United States Patent Application Publication US 2011/0183924 A1 - sequence listing, part 64

SEQ ID NO: 220151 - DNA, 4454 bp, Homo sapiens
gggctcaaggcatggatggatggcgaccacttcagtccataccccagcttaagtggtgtctcttagccagtggacaggctgtcctgaatgaaactgaccttgctacccttatattgaacatgttgatcacaatgtgtggatattttccaagcagggatcaagacaatgccatcattcggcctctacccaaagtgaaaagactgctgtcagatagcacttgccttccccatattattcagctactgctgacctttgaccctatccttgttgagaaggttgctattttgttataccatatcatgcaagataacccacagttaccccgcctttatctgagtggagtatttttctttatcatgatgtacacaggttccaatgtgcttcctgttgctcgatttttgaaatacacacataccaaacaggctttcaagtcagaagagacaaaaggacaagatatttttcagagaagtatacttgggcacattctacctgaagcaatggtttgttacttagaaaattatgaacctgaaaagttttctgagatttttctaggagaatttgatactccagaagcaatctggagcagtgaaatgaggcgcctgatgatagagaagattgctgcccatctcgcggatttcacacctcgtcttcagagtaacacaagagcactttatcagtattgccccattcctataatcaactatccacaactcgaaaatgaactattttgtaatatttattacctcaaacaactgtgtgatacactccggtttccagattggccaattaaagacccggttaagcttctaaaagatacccttgatgcctggaagaaagaagtagaaaagaagccacctatgatgtcaatagatgatgcttatgaagtgcttaatctgcctcaaggacagggaccgcatgatgagagcaagattaggaaagcttacttcagacttgcacaaaagtaccaccctgataagaatccagaagggagggacatgtttgaaaaagtaaataaagcatatgaatttttatgtaccaaatcagcaaaaatagtggatgggccagatccagagaatataattttaattctaaaaacacagagcatcctcttcaaccgtcataaagaagatttacagccttataaatatgcaggataccccatgcttattcggactataacaatggaaacttcagatgacctccttttctcaaaagaatcaccattgttgcctgcggctacagagctagctttccatactgtcaactgttcagccctcaatgctgaagagctcagaagagagaatggactagaggtgttacaagaggcatttagtcgctgtgtggctgtcttgactcgttctagtaaaccaagtgacatgtcagtacaggtgtgtggatacataagtaaatgctacagtgtggctgctcagtttgaggaatgccgagagaagatcacggaaatgcctagcatcatcaaggatctctgtcgggtactatattttggcaagagtattccccgcgtagctgctcttggggtagaatgtgtcagttcttttgctgtggatttctggctacagacacacctatttcaggctggaattttgtggtatctccttggttttctgtttaattatgactacacactagaagagagtggcattcagaaaagtgaagaaacaaaccagcaggaggtagcaaacagccttgccaaactgagtgtccatgctctgagtcgccttggagggtatttggctgaagaacaagcaactccagaaaatccaaccataaggaaaagcttagctggcatgctgacaccctatgttgctagaaaacttgctgtggctagtgtgactgagattttgaagatgcttaacagcaacacagaaagtccatatttgatatggaacaattctacaagagcagaattacttgaatttcttgaatcccaacaagaaaacatgattaaaaaaggtgattgtgacaaaacttatggatcagaatttgtctacagtgatcatgccaaagaacttattgtaggggagatttttgttagggtgtataatgaagttcctactttccaactggaggttccaaaagcatttgctgcaagtctcttggattatataggctcgcaggcccaatacttgcacacattcatggccatcacacacgcggcaaaagtggagtcagagcaacatggagatcgcttaccgagagtagaaatggctttggaggctctgagaaatgtcataaaatacaatccaggttctgagagtgaatgcattgggcactttaagttgatattttctcttctccgagttcatggagctggtcaagtgcagcagttggctttagaggttgtgaatatagtgacatctaaccaagactgtgtcaacaatattgctgaatcaatggttttgtccagtttattggctcttctacattcattgccatcaagtcgtcagcttgttctggaaactctttatgctttgacatcgagtacaaaaataatcaaagaagcaatggcaaagggtgctttgatctatttactggatatgttctgcaattcaacacatccacaggttcgagcccaaacagcagaactttttgccaaaatgacagcagataaactgataggtccaaaggttcgaattacgttaatgaaatttctaccaagcgttttcatggatgctatgagagacaatcctgaagctgctgtacatatttttgaaggaactcatgaaaatcctgagttaatttggaatgataattccagagataaagtgtccacaacagttagggaaatgatgctagagcactttaaaaatcagcaggacaaccctgaggcaaactggaagttgcctgaagattttgctgtggtgtttggagaagcagagggtgaacttgctgttggaggagtcttcttgaggatctttattgcacaaccagcctgggttctaagaaagcctagagaatttcttattgccctgttagaaaaattaactgagctcctagagaagaacaatcctcatggagaaactctggaaaccttgacaatggcaacagtgtgtctcttcagcgcacaacctcagctggcagatcaggtcccgccattgggccatcttcccaaagttatccaggcaatgaatcataggaacaatgccattcctaagagtgccattcgggttatccatgccttgtctgaaaatgagctgtgtgttcgagccatggcatctttagagaccattggcccactgatgaatggaatgaaaaagcgagcagatactgttggtctagcctgtgaagcaattaatcgaatgtttcagaaggagcagagtgaattagtagcacaagccctgaaagcagatttggttccatacctcttaaaattactcgaaggcattggccttgaaaacctggacagcccagcagccactaaggctcagattgttaaagctctcaaggcaatgactcgaagtttgcagtatggagaacaggtgaatgaaatcctgtgccgttcttcagtctggagtgccttcaaagatcagaaacatgatttgttcatttctgagtcacaaacagcaggatacctcacaggacctggagttgctggctaccttaccgcaggtacatctacatcagtcatgtctaacctgccacctcctgtagaccatgaggcaggcgaccttggctatcagacttgaaatattcacgagagacaataaacgctgaaaggccagtgccaagtccacattcctccagctgatacgttgaagcaaactcttactgcctttctcctggtttcatgacagtgttattcctttttctataaatatatttttaggaaaaaaagtcagtgatcctaattgtatcacattataagaaagcactctgtggatcaacataagtgggtacacaagaattttttttttcttggtgtatgtaagcacatttgttcctttatatctgtttacaaaactgtgaatcaaaaagacaaaactttcttcctagtttttgtaattttttttttgaactagcatgactgtagggttgagctacagtcaacaaaaattgggctaagtcacttttccccaggaaagaatatttccctctcctgcatcaagtctgcgtggccatcctccccccaccatccaagactattaggttttgtccctgcacccttcactggcatcctcaatcattaaccttctgaaagctcacagtacacattagtatgtataactggctttaccaaattgaatgaaaaggagcttgtgcaaaaaaatttaaaaatggatgtcaagatgttatgtaaaagatgagtgtaattgtgaaatgttctatacactatcaaatatataaagctttctatattgaatgtacattatacagatcattcatatgtgtacataaaattttaaaaataaagggaattgactgctttgttaatgaga

SEQ ID NO: 220152 - DNA, 2073 bp, Homo sapiens
ggggaccagcgctggtccgctcgcccagcgagggccgagagcacatggcgcaccggcagtagttccgtaagtggaagtcgtcagcttgttctggaaactctttatgctttgacatcgagtacaaaaataatcaaagaagcaatggcaaagggtgctttgatctatttactggatatgttctgcaattcaacacatccacaggttcgagcccaaacagcagaactttttgccaaaatgacagcagataaactgataggtccaaaggttcgaattacgttaatgaaatttctaccaagcgttttcatggatgctatgagagacaatcctgaagctgctgtacatatttttgaaggaactcatgaaaatcctgagttaatttggaatgataattccagagataaagtgtccacaacagttagggaaatgatgctagagcactttaaaaatcagcaggacaaccctgaggcaaactggaagttgcctgaagattttgctgtggtgtttggagaagcagagggtgaacttgctgttggaggagtcttcttgaggatctttattgcacaaccagcctgggttctaagaaagcctagagaatttcttattgccctgttagaaaaattaactgagctcctagagaagaacaatcctcatggagaaactctggaaaccttgacaatggcaacagtgtgtctcttcagcgcacaacctcagctggcagatcaggtcccgccattgggccatcttcccaaagttatccaggcaatgaatcataggaacaatgccattcctaagagtgccattcgggttatccatgccttgtctgaaaatgagctgtgtgttcgagccatggcatctttagagaccattggcccactgatgaatggaatgaaaaagcgagcagatactgttggtctagcctgtgaagcaattaatcgaatgtttcagaaggagcagagtgaattagtagcacaagccctgaaagcagatttggttccatacctcttaaaattactcgaaggcattggccttgaaaacctggacagcccagcagccactaaggctcagattgttaaagctctcaaggcaatgactcgaagtttgcagtatggagaacaggtgaatgaaatcctgtgccgttcttcagtctggagtgccttcaaagatcagaaacatgatttgttcatttctgagtcacaaacagcaggatacctcacaggacctggagttgctggctaccttaccgcaggtacatctacatcagtcatgtctaacctgccacctcctgtagaccatgaggcaggcgaccttggctatcagacttgaaatattcacgagagacaataaacgctgaaaggccagtgccaagtccacattcctccagctgatacgttgaagcaaactcttactgcctttctcctggtttcatgacagtgttattcctttttctataaatatatttttaggaaaaaaagtcagtgatcctaattgtatcacattataagaaagcactctgtggatcaacataagtgggtacacaagaattttttttttcttggtgtatgtaagcacatttgttcctttatatctgtttacaaaactgtgaatcaaaaagacaaaactttcttcctagtttttgtaattttttttttgaactagcatgactgtagggttgagctacagtcaacaaaaattgggctaagtcacttttccccaggaaagaatatttccctctcctgcatcaagtctgcgtggccatcctccccccaccatccaagactattaggttttgtccctgcacccttcactggcatcctcaatcattaaccttctgaaagctcacagtacacattagtatgtataactggctttaccaaattgaatgaaaaggagcttgtgcaaaaaaatttaaaaatggatgtcaagatgttatgtaaaagatgagtgtaattgtgaaatgttctatacactatcaaatatataaagctttctatattgaatgtacattatacagatcattcatatgtgtacataaaattttaaaaataaagggaattgactgctttgttaatgaga

SEQ ID NO: 220153 - DNA, 1627 bp, Homo sapiens
gcatattcttaaagtcctttagattcatgccttttatgaaagaaaatgggaagttcgttgttctcttaggattagtgaatctgttttcaagtatcagcacttagaacttttgaatccctagttttgaacaccaaatacattaccttggatatttaggactgtatgagtattttatagttgatttatttttgttttacacctgcagggagaaactctggaaaccttgacaatggcaacagtgtgtctcttcagcgcacaacctcagctggcagatcaggtcccgccattgggccatcttcccaaagttatccaggcaatgaatcataggaacaatgccattcctaagagtgccattcgggttatccatgccttgtctgaaaatgagctgtgtgttcgagccatggcatctttagagaccattggcccactgatgaatggaatgaaaaagcgagcagatactgttggtctagcctgtgaagcaattaatcgaatgtttcagaaggagcagagtgaattagtagcacaagccctgaaagcagatttggttccatacctcttaaaattactcgaaggcattggccttgaaaacctggacagcccagcagccactaaggctcagattgttaaagctctcaaggcaatgactcgaagtttgcagtatggagaacaggtgaatgaaatcctgtgccgttcttcagtctggagtgccttcaaagatcagaaacatgatttgttcatttctgagtcacaaacagcaggatacctcacaggacctggagttgctggctaccttaccgcaggtacatctacatcagtcatgtctaacctgccacctcctgtagaccatgaggcaggcgaccttggctatcagacttgaaatattcacgagagacaataaacgctgaaaggccagtgccaagtccacattcctccagctgatacgttgaagcaaactcttactgcctttctcctggtttcatgacagtgttattcctttttctataaatatatttttaggaaaaaaagtcagtgatcctaattgtatcacattataagaaagcactctgtggatcaacataagtgggtacacaagaattttttttttcttggtgtatgtaagcacatttgttcctttatatctgtttacaaaactgtgaatcaaaaagacaaaactttcttcctagtttttgtaattttttttttgaactagcatgactgtagggttgagctacagtcaacaaaaattgggctaagtcacttttccccaggaaagaatatttccctctcctgcatcaagtctgcgtggccatcctccccccaccatccaagactattaggttttgtccctgcacccttcactggcatcctcaatcattaaccttctgaaagctcacagtacacattagtatgtataactggctttaccaaattgaatgaaaaggagcttgtgcaaaaaaatttaaaaatggatgtcaagatgttatgtaaaagatgagtgtaattgtgaaatgttctatacactatcaaatatataaagctttctatattgaatgtacattatacagatcattcatatgtgtacataaaattttaaaaataaagggaattgactgctttgttaatgaga

SEQ ID NO: 220154 - DNA, 2304 bp, Homo sapiens
gggctcaaggcatggatggatggcgaccacttcagtccataccccagcttaagtggtgtctcttagccagtggacaggctgtcctgaatgaaactgaccttgctacccttatattgaacatgttgatcacaatgtgtggatattttccaagcagggatcaagacaatgccatcattcggcctctacccaaagtgaaaagactgctgtcagatagcacttgccttccccatattattcagctactgctgacctttgaccctatccttgttgagaaggttgctattttgttataccatatcatgcaagataacccacagttaccccgcctttatctgagtggagtatttttctttatcatgatgtacacaggttccaatgtgcttcctgttgctcgatttttgaaatacacacataccaaacaggctttcaagtcagaagagacaaaaggacaagatatttttcagagaagtatacttgggcacattctacctgaagcaatggtttgttacttagaaaattatgaacctgaaaagttttctgagatttttctaggagaatttgatactccagaagcaatctggagcagtgaaatgaggcgcctgatgatagagaagattgctgcccatctcgcggatttcacacctcgtcttcagagtaacacaagagcactttatcagtattgccccattcctataatcaactatccacaactcgaaaatgaactattttgtaatatttattacctcaaacaactgtgtgatacactccggtttccagattggccaattaaagacccggttaagcttctaaaagatacccttgatgcctggaagaaagaagtagaaaagaagccacctatgatgtcaatagatgatgcttatgaagtgcttaatctgcctcaaggacagggaccgcatgatgagagcaagattaggaaagcttacttcagacttgcacaaaagtaccaccctgataagaatccagaagggagggacatgtttgaaaaagtaaataaagcatatgaatttttatgtaccaaatcagcaaaaatagtggatgggccagatccagagaatataattttaattctaaaaacacagagcatcctcttcaaccgtcataaagaagatttacagccttataaatatgcaggataccccatgcttattcggactataacaatggaaacttcagatgacctccttttctcaaaagaatcaccattgttgcctgcggctacagagctagctttccatactgtcaactgttcagccctcaatgctgaagagctcagaagagagaatggactagaggtgttacaagaggcatttagtcgctgtgtggctgtcttgactcgttctagtaaaccaagtgacatgtcagtacaggtgtgtggatacataagtaaatgctacagtgtggctgctcagtttgaggaatgccgagagaagatcacggaaatgcctagcatcatcaaggatctctgtcgggtactatattttggcaagagtattccccgcgtagctgctcttggggtagaatgtgtcagttcttttgctgtggatttctggctacagacacacctatttcaggctggaattttgtggtatctccttggttttctgtttaattatgactacacactagaagagagtggcattcagaaaagtgaagaaacaaaccagcaggaggtagcaaacagccttgccaaactgagtgtccatgctctgagtcgccttggagggtatttggctgaagaacaagcaactccagaaaatccaaccataaggaaaagcttagctggcatgctgacaccctatgttgctagaaaacttgctgtggctagtgtgactgagattttgaagatgcttaacagcaacacagaaagtccatatttgatatggaacaattctacaagagcagaattacttgaatttcttgaatcccaacaagaaaacatgattaaaaaagtatgttattgttttataaatttcttgggtaatttattctgatggaatctctggaagtacagcagtattgattagaacagaaatccactacttctcactttagtgtcagtcagtatggctttctgccacctaatatttggcccatttaagaagagcattgtgttgtatgtagtaatacattaggaatttttattgttgttaccacttatatacagctgtcttctattttaaccagtttttgaacccagaaaccttattttagttgttcacttcagcctcttttcgctagtaagtgaaaggtgctttccagtatcaagactgaacattttttcta

SEQ ID NO: 220155 - DNA, 357 bp, Homo sapiens
gaggtagcaaacagccttgccaaactgagtgtccatgctctgagtcgccttggagggtatttggctgaagaacaagcaactccagaaaatccaaccataaggaaaagcttagctggcatgctgacaccctatgttgctagaaaacttgctgtggctagtgtgactgaggtatgtgcttcacaggtagcctgggttttaatcaatagtgcaagatcctttaagcagtaaagtagtacaataatattgatctagggaacctaaaaattaagaacgttcacatgtttgttctctcaagcaagaaattcactttataatggattgatgctaatgatgtcagttctacaagtccagtttttg

SEQ ID NO: 220156 - DNA, 526 bp, Homo sapiens
tgatttccaagaaaaggaaagagaccacggatgaatgatagcaagactattaaacaggaatacaaagaagagctcacatttattgagcacctactatatgtgctggaccctcttgtaagagcttcatacaaattaggcagacaggcaatattattatccccatttgatctacaaggaaactgagtacaaagtgatagcttttctgcagagcttgtgcacaggggccaaagtttgggaacaatgcctttctttaatttgaaagtatctgttgttggtgtcacttgttggaattcctagaatcccagaaaagtaagtttaagttttcttctgccagcatcggtcagcctacctttgacccaaggtcacgactccctccctcctcccttcccttccctgctctgacattcttaccttgtttttgagttccttattccctagcttcctccaagcagcaggctctgggaacagtcccgttcatttatataacaaatatttattgaaatgcagacttgttgttttcataata

SEQ ID NO: 220157 - DNA, 718 bp, Homo sapiens
ggatctaaatgcactgtggagtcaaagattaaggtgtttctttgggttggaatcccagaaagttagcattcaaaacggcggtgaggtggcgcttattagcgttccacgtgatgacacccaatggttactgatccccaaacttgagcagcagcatgctgtgctgtttgacagccctagcgatctttagcgagagactttgttgactcacttaacttttaatttctaaaaattggtcatttttgttacttatgggacgctttcctggctagtcaatattttgcagaattatgcgaaagaaagaggattattgaaaaattaactgtaaacggactggtgttctgatgatccacccttcccctaagttacttggcttgccaagagaaaaaaaaatctcaaaactagatactagaaaagatttgatcaaattacatagttaaattttgagtgtggatatttcagtaattttgtttccaaaaaaaacagaaaaaaaaggtatttgattttaaagtatcagtggatgaatgtatctgtctcctacaatttataatcattttagtcttaaaaataaattcacctccaaaaccagaacaagaaatactcctcatatgggttgatgatgtcagcatttattcagctaaggcagatggagagtattagaggcgtactgtctgaatgggtgtcaattctaaagttatatttgccaatataatttgagttc

SEQ ID NO: 220158 - DNA, 674 bp, Homo sapiens
tgccttgatgtccctgttgtacctggcaaccaccattctgctttctgttgccattgaatttgactaccctaaatgcttcattaaagtgaccaaatcatatttatcttgggggtgattgggtttatttttcctaatacaaagccctcaagattcatccatgtggtagcgtgtgtcagaatttcccttcctttaaaggctaaataatattccatcgtatgtctatcattttctttatccattcattcattgatgccacttgggttgcttccacttcttgactatattgtgaatactgctgctatgaacatgggtttacaagtgtctcgggaccctgctttcaattcttttggatatatatacacaagtggaattgctagatcatatggcaattatatttctaattttttgaggaagcccatcccattttccatggtcaatacatgatttcacattcccactaacaacgtacaagagttcaatttctccacacccttgccaatagtaattttttgttttgttttaatactagccatcctaataggtatgaggagctgtgggtctttaaaaataccaatgctcaggtcccaatctctggagagagcgcctgggaatcagttttgttggttttttaaaagttccctgttacttctgaatgcgtccgaagattgagtact

SEQ ID NO: 220159 - DNA, 627 bp, Homo sapiens
cttttaccctcacaaactcttaaacatctgtatgcaaacagctaaacgtctattttagactgagaaataaagcacagaaatgcaagcaggatattatcgcaaaggcaaagtagaaaaggaagagtgggcaccagtgtcctggatgtgtcactgggtgatggttgtgcaaggccagctgggggttcagggccgggtcacagggtcagaatagaaagaagcccaaggagttctgcaggttccctgaggagtgaaccagggatcaatgtaaggctttaaggaaaagaaaaatgctaccgggagggaagggagatcgtggaaacacagcatggaaatagagcctgctctatgggataggatggatctagaataagagctaaagaaataatagaaaagagatacaatatcactaaaaaagaaaaaagacatagaaacaggaggcaggagaggccagttggagagaagatcagacaatccaagcgctgctcagctaggagggaactatgtggaggcagaacggtgaggaggacactgagaattagagagaaggagaaagaggagatgtaacaagatggagaaaaggcggaacaagacaggggtggctcttagcattttcccatcttggatggc

SEQ ID NO: 220160 - DNA, 292 bp, Homo sapiens
actcagacttagacagctggcataagcaaggacttccctattctgagtgccaaatgtcaatttgaaatacttgaacttttattctctgggacatgtactggcattagtaagaatttctatttattgagcatttatttggggcaggcagatgataagttatacacattaattatcttatttgattttcacaatgacctatcagttacataattgattgtctgcattttatggataaataacctgaggctcagttatttgacttgctcaaggtgatgtaacaagtaaatggcag

SEQ ID NO: 220161 - DNA, 546 bp, Homo sapiens
catggcaaaatcagttttatcctgttcatttctaatatttcatttttgcctccatgattagtctccttagaatatgtaaacagttcctttcttctgttttttgtccatttttaccatatggttttcatgcagcctgttttacagaatttcgtattttatatttcatcctgtcttattgtcagtctctttattttcttaactcctcttgtggtcttcagagccctttttgactcttctctatttcattaccaggtgacaggtttgaaggcaatgttacaatctcatgtaagctgtttagagaaatagttggttaacatcttcccaggctttgggcttataattatactttcttttctcctgttccctatgtcatattacacagacaacagcctttcttttgtaaaataccaagccccaaaagaaatcactgactcaatgagcagtttttaaaaatgtgcatactttagacttttggtactgcctgccctttggtatatataacatcatcggaacattaataaaataaatagattggtgatagtttta

SEQ ID NO: 220162 - DNA, 143 bp, Homo sapiens
aagtaactattcccacagttctagttttgacatcatctactttctcagggtatatgttttaagaatgcaggcacacctgttaattttactcctttggtaatgttgaaatccagggttgggagctttgccataagcaaatcact

SEQ ID NO: 220163 - DNA, 796 bp, Homo sapiens
agatagtgaacatattcattaccccaaaaagtttcctcatgcttctttgtaatccctctctcccttgttttcctctactcattcccctcttcccaaccagatctgctttttatcactggagattattttacattttctagaagtctatataaatggaatcaaacaacatgcactttttttggtatggcttttttcagtaagtatatttattttaagattcatccaaattgtttcatatataaatcttttttaaaaattatattgctaagtaactttccatttatggccacaccacaatatatttattcattcatctgttgatgtttatgttcttttcagtttctgactattacaaataaaatggctatgagcatacatgaataagtctttgtgtaaacataagcttttgcccccttaggtaaattcataggagtagaatgactggattatatggtaggtgtggtgacctttttaagaaattgctaaactgttttccaaactccataccgttttaaatttccacacacaaaaaagtatgaatgttcccatttcttcacatcctcaccaactcttagtatagtcattccttaattttagacattctactagggctatagtggtatcacattgtggttttgatttgcatttccctataactaatgatattgtatgtcatatcatatgcttctttgccatccatgtatctttggtggaaggtctgtgcaaatattgtaaacacgttttaattgtgttgattgatttcttatggttgagtaaaagtgcacttcttgcaagc

SEQ ID NO: 220164 - DNA, 501 bp, Homo sapiens
ttccggttgtagccatttcactttgatcactcagaacattcaaatgaatgttgcatggtactttaagccattcagacatctataggaaaaacataccagacagaggggatgagggacagctagtgtagaagtcctgaagtaggagtgcctagcattgtttgaagtcattaaggaagcctttgaggctgcagaggaatgagtgaaggagagtgtcttaggagattggaggagcagggagcaatgatatcctggaagccaaatgcagaagtgtgtcatatcattgataggacagatatgtgaggactgagaatttaattgacccctggatttgacactgtggaagtctttggtgacttccagaacggttgtggtagagtgccaggagtaaaatgcttacagatttcagtgtatggaagggaatgaaaagagaggatttataggtggccattacaggcttgctttttttttttttttccttttttttatttaaagaattttgct

SEQ ID NO: 220165 - DNA, 308 bp, Homo sapiens
tccatgggtcttaaacccctcaaagtcatccataaggattggaatcaactcataaaccctgggatttttttgtttttttcactctatttttatcttttctgttttacacgcgatgtttattttaaacaacgagaggctagacttgaaggtgaaagtagaaaggattgtaagccaaactcctgttaatgttgatattttggccgggcatggtggctcacatctgtaatcccaaagtggtgggattacaggcgtgaaccaccgcgcctggcttaaagtcttttaaaggctcagctgcgtttcacttccga

SEQ ID NO: 220166 - DNA, 479 bp, Homo sapiens
aggtaggcatggcaacaaaataaagacaggaagtcttcggaataagtgatcccatcacaatgaatcaatttgccattggaacatatttttacaaagtcactcttgtgaaaatatttggctatgaattgaaacagagtctgtaaggttaatatttttcctggtctaaggtgaacagcattttagagaatgaacccaggacacaaccacagcacaagaaaaaaatatgagaattaagtttacacatgtgtgttactacagtaacagaaaacatgtaaagaacatttgttttgatttatatgtcagtctgcactgtttaattttttgtgtcataaatgctcttatttaaaaaaataggactagttaacagtgtcaattactagtaattcatggtataaataattaaacaaggaagtgttcaaaaaacagtgttttaaataaagttttattttacatctttttacttacacagaaattgtcaa

SEQ ID NO: 220167 - DNA, 342 bp, Homo sapiens
agggcccatgccaccccagcctgccaaatggggcatctggtgctgcaggagctgatgaggagtctaacacaccgcttaattcctgtgtgccccatctagcacagcagctggccctcctcccgcctaaaggccccctgtcttccaggacggtgccaccttaccccccttttaccaacggactccactacacctttgtctaacaccttccaagtaagagcccctgtctggtgtgcttctgcctgcttcctgcacctccctagcgctgagcccctcacctccctgctgtgctgaggtgattgcagtgccacctgctgatgcctccttccactggcaaagcggccg

SEQ ID NO: 220168 - DNA, 473 bp, Homo sapiens
agtgtcaacctgaaacgtcatttcctgtttttcattgtaactttattatgtttgcccgttctcttaaatctttggatttttaagtgtttgaacagaaaattgtttaaacccagttttcacagttactcaaattggtctttttctccttgaagtatattgtgtgtcctagtaactcaagatggagacagcgtaagtgtccctgtcctcacgctgtcagccacagccaaaggaccgctggccaaggagctgcaacaactgggccggataattggcctgtcatggcgagggggggtggcgcaaaggacctggggctgtgcctctgccatcatcaccatccttgttcacaagcgctacttacatcctcttacaaataggtgtggatttctaactttttcacagcaccatgctgggcctgcagtgaagggtcaggaacgaaaacactaggttatgacacccaaattggggagtggggt

SEQ ID NO: 220169 - DNA, 716 bp, Homo sapiens
cgtccttagcatttagagacgtcatttactcttcacctggggcctcttgcgtctctgtgcagggtggtttggttgtctctaggtgaggttgtgtccagaattggtgggttcttggtctcactgacttcaagaatgaagcctcgcagtgagtgttacagtttttaaaggcagcgtgtctggagtttgttccttctgatgtttggatgtgttcagagtttcttccttctggtgggttcacggtctttgctggcttcaggagtgaagctgcagaccttagcagagagtgttgcagctcacaaaggcagggtggactcaaagaatgagcagcagcaagatttattgcaaagaacaaaccttccacaacgcggggcgattcgcgagcgccgcccctcgcgcctcactccgctcgcttctatctcccatctccccaccaccacctttgatctccgccccatctcaccgccccctccttcccaccgcccgcccgcaccacgccttccccctcccctccccgctctcaccctccccctctcacccccccattcctctcccctcccctccccctctcccgccccctccctcctcccccctccccctcgccccaccctctcctctccctcccctctctccctctctccccccgccctctcccctctccctccgccctcccctccctctcctcctctctcgccccctccctctctctcctccttccc

SEQ ID NO: 220170 - DNA, 569 bp, Homo sapiens
tatttgtgaggtggctggtagagaagtgggagcaaggaggttgaggtagaagtgtaactttttaaaaaatatatatatttttaaagatgggcgtctcattatattgcctaggctggcctcgaactcctggggtcaagtgagcctctgctttagccttccaaggagctgggactataggtgtgcaccaatgcacctagcttgaagtgtaatttttaaacaaccacaacattccaagacaaatctttctgatttctgttcttttagtaattccctaaagcacagcttgtctatttcaagagttaaatgttcgtactgtgccactagtgactgaaacacagaagccaaataataatactgatattttgaaaatgatgtatgtaatggagctattttattttttaagagttaagaatcataaactgtggaatgaaatatataaagcatttcagatgtacaaatatataaaacatctagtaaaacaatgcatttacaaacattaaacattaagataaattgctatattaaatacaattagttttcaaaaataaaactaagctacgaaaaacaaa

SEQ ID NO: 220171 - DNA, 701 bp, Homo sapiens
aaaaaaaaaaaatcctatgatgatcaaactggaaatacacagcatagttagcacacgaatgcaagcccacctagtgccaatgcttgttattattttccactctaacacagcacctaaagccttaactgaggagggggaaaaaaaaatcacaaaaatcttccttcttgacatttaaatctattcaatcttccttatatgaggccaaatagtttgaaggctttagccatattagtttcaaaataatatgtgattttgatcaagtgcgggtggtgatagtttacatggtagctatcatcgttactttacatatgtaacactttcataggtgtaatagacttcaggcaatgttgtaagtattcgaaacatattaacttatttaatattcaaaaccaacctatgaattaggtaccatgacagaaaaaaaaatggttaaataaagtgcatgaggccaccaattcaaattcaggtcatctggctccagccttcatgctcttaatacaccacttgtaaacacagacattgagacttgaaatgttaagaaagcataaaaacaacactgtttcaataaacaagagcatacagtcacgtatctgccaccacagtcaatcagccttcattttttcattctaaaattggtatgtttaatgtacttaaaatgaaggaggcagcagatttacaattgctccttagtgtgaggttgt

SEQ ID NO: 220172 - DNA, 584 bp, Homo sapiens
agactccgtctcaaaaaaaaaaaaaaaaagaaagaaagaaagaaagaaatactgggtttgagccttatttagcacttagcatcaaacagacattttcttttccaggggctcatcctacttgtttaattccagccagataacttataatttgtcaatatgtcatattgaacattactcagctgtggtaagaactttctgtcatgcttgctttggaaagcccagatcatgtttattgttttaacaatattacgtggttaatttgggaagcaagaatagcagcatgattttgagtgctgataaaccagtatttgaattcctggtctctcccttctttgctgtgtgaccctggaaaacttagtaacttctttaagtctgtttccttgtatgtaaagtggaaacaattatagtaaccagttagggctgtgaggagtaatgagctaatatagacactccacacacatgaagctgctattgttatgatcaggattgttatttggaggtagtgagaaaagaatgatagaaggctggccaagttggattgtgcattgaaatgagaacattgaaagcaaggtggtgaaaggaaa

SEQ ID NO: 220173 - DNA, 646 bp, Homo sapiens
tatcgagttgtcttcttgcactcagtgagttcctggctgggggccacaagatcagatgagccagttcattgatctgtgtggggccgccggatccatcaagtgcagggtctgcaaaataccataagcaaacttcctcccaaagtgctgggattacaggtgtgagccaccgtgcgcggccctccctgttctttttgggacatcaactttgatgtcttctccagcaagtaacaaacttagcaataaccttggcatctgacctagctagggagaaactgagccaagagaggcgttacggaccagtgccccaggagtctcagagctccagcgggtgggtcatcctcagggcaagagaaggccttaatgccagcccgtgcattcggaacgctgtttgtccccactgatacgggttggatgctgcctgggaggaggacttgtggggatggttaatagatgagcgagctttctggagagagaagggtgagttatggggttggcagggaggagagccatcttggaagtgagtaagaggaagtgaggaaagagaaggagtggggcatttggcatcttactaagtcattggttgagttgttactggctgagtggaattaacatagcagaaggtaagattctttaggaaattaaaagt

SEQ ID NO: 220174 - DNA, 889 bp, Homo sapiens
cagtagcatagatattaccgtttttgtttttttgtcattttaaaataccacattactctgtgtgtttttatttatttagtctgacagtcttttaagagtttggtttgtttgtattcattatgataggggtttgttactaccatttacttaacgactactttctgtttttctctttctgcgcccctcctccttgccttgcctttttgattgattgaggactgtttgcttattagttttggtgttttgttttgttttgctcataattccattccttctttacacccatttttggaggctatacactatttctgtatccttagtggttctgaaactttactgtgcttacttaaaaagaagtcgtaagttaataatcttaactcattctagtataagacaatgattgtgaaacagtttaattttaatcagctcctttcctgattaaatgtttccagactagtgacttttaaaatgccagttgcttctgtttaactcaaaagtttgtccggctcacaaatgccattttggaaatgccatgtagcctgttcttacaatctaagagtattctgcaatggaaaaccagcttcagggaggtgctccattaggaaaatctagaaaccaaaaactgtggataatcactttgctgaggttttcattccctgaagaagcaaaagttgctagtctccctttgaacaaattttatgcctagcttttcttgggtttagagggcaaaattaactttttttgttgaagtagtgtgttatgaaggctaaagcgaacatcattatttcaaaggaaaagtaaaatagaatatggtcttactcacctggtagcaattgcataaaataacgtgtatccaacattaatttttaatcggtaatatttttttcct

SEQ ID NO: 220175 - DNA, 484 bp, Homo sapiens
cagtagcatagatattaccgtttttgtttttttgtcattttaaaataccacattactctgtgtgtttttatttatttagtctgacagtcttttaagagtttggtttgtttgtattcattatgataggggtttgttactaccatttacttaacgactactttctgtttttctctttctgcgcccctcctccttgccttgcctttttgattgattgaggactgtttgcttattagttttggtgtgttttgttttgagacgatggggttttctagatatataatcatgtcatctgcaaacagggacaatttgacttcctcttttcctaattgaataccctttatttccttcccctgcctgattgccctggccagaacttccaacactatgttgaataggaatggtgacagagggcatccctgtcttgtgccagttttcaaagggaatgcttccagtttttgcccattcggtaatatctatgctgctg

SEQ ID NO: 220176 - DNA, 485 bp, Homo sapiens
cgagctgaaatcgtagttcacgcattgtcagtgttgcttttgctgtgagaatagtccggtttcctgaacctccttgtgccagtgtattttagattctgtaaatgtgtgcagtccagcctgcactagaggaataagataatatcctacaaggtacaagctacaaggctccctagcattgcattgtggtccgggaggtaagccgtgtactgggatgcctgtgctgcagtcactcagctaaagaaaatattgctgagcatagacatagatctttgcccagccattgttacctatgttaaaaaggaattcttgttcatgttgagagcaaatcagcatctagaggctgatgtcagattttcaaacatagtagtattctgttgtttaacaatgtaaataattaaatctactttttccacaaatagaagtggacccaaattgacaaacttaatacgttctttgagctaaaatgaagttttgaaaaagtaccc

SEQ ID NO: 220177 - DNA, 441 bp, Homo sapiens
aataatttaaatatgcaaatagaaagtccatgccagttcttgtagaacatactcccatttcagttccatcagcaatagaaaagaaaaaaatgccctcagttgtgcacacaagagaaagattcatgcagttttttctccagatacaccaagaggtttgattcttccatgccttttgtgtttgcttgttggtccaactcaaatttcctccccttcttctccctgccaacatgtaatatacactttaatgctagagtgatcatatattttattggccaaagaaaacctttgagagtaaaagggcagtattaaactatacacctggctgggaactgcagctcacgtctgtaatcccaacagtttgggaggccaaggtaggaggattgcttgaggccaggagttcaataccagactgagcaacatagcaagacccatctctaccaa

SEQ ID NO: 220178 - DNA, 564 bp, Homo sapiens
acactgaacatttgttcaatctgttcacattctgggctcacttaagtatttgtgaatccctaagcactgtatttaaaaattcagcatgaagttctgttcatgtagtggcttcacagccaaggaagccagcaactatcagaacctgaggatgcatcaaataatttctatgatgatggaaggtaactttaaaactcaactaagacaagtggaaatgaattatcaggttggcttgctcttgtatgggagacagtcctgtgtacaaatctgcactctacttggaattaatgagaatttcttcagcaccaactgtgtgtatatcactatacttggtacatataaacaaacagtagataatgtcctcacccttttggggcttatgatccatagaagactaaaagacaaagcaaaagcagttcaacatgataaatgtttgataaatgttgtgggtttagcacagggattcttaaccaggaaaccagttctgggaaggaataccagattcacctatagaccattttcacagtttactattctgcttttctttccacccttcttcgtcgacgc

SEQ ID NO: 220179 - DNA, 435 bp, Homo sapiens
cctcccttcacccttcctcatactggctctccgaggaagtgaaattagagctgagatccaaaggcagaaatgtgaccgaaacaggagatgagtggaggaaacaggatcccagccagagcataacacgcacagagatctgaggtagaaaacagttgtgtgtaggctgggcacagtggctcatgcctgtaatcccagcactttgggaggctaaggagtgtggatcacttgaggtcagaagttcaagaccagcctggccaaattggtgaaactccgtttctactaaaaatacaaaaattagctgggcatggtggctcatgcctgtaatcccagctacttgggaggctgaggcaggagaatcgcttgatcctgggaggcggaggttgcagtaagccgagatggcgccattgcactgcagcctgggcaatagaatgagac

SEQ ID NO: 220180 - DNA, 555 bp, Homo sapiens
caggagcaggagtggcagctgcagcagggtggctgaaggtgtcatgtgcatcatttttcatattatttagcaacagtgatgagatcactccccatgggcaaacggaggtgggtggcttatatttgctgaaggaaggacagtcttcaggggatggctgctgggctgggactccagattgctgactgccaaagctgctcctgcattttcctgccaggagagccctctctgccctcctccctccaatcacctctcaccatcttttgggttattgggaagattagaaaaagtgagacccagccaggcccagtggctcacctgtaaatccccggctactcaggaggcggaggtgggaggatcacttgagcccaggagtttgagaccagcctgggcaacatagtatgagacttatcactacaaaaaaaacagccaggtgtggtcgtgtttgcctgtggtcccagctacttgggaggtttgagccagggaggctgaggctgtagtgaactgtgattgtgcctctgcactccggcctgggcgacagagtgagaacttgtctca

SEQ ID NO: 220181 - DNA, 342 bp, Homo sapiens
gccaaagaccgaacctaaatgaccatgacagaggactggtttctttcttttctctttctttctctttcttctttctttctttctttctttctttctttctttctttctttctttctttctttctttctttctttcctttctctctctctctctcttccttccttccttcctctctttctctctttctatctgtctgtctatctgtctttccttccttccttccttcttttctctctttctttcttttttttttttttctggatggaatttcactctgtcacccacgctggagtgcagcagcacgatctgggctcattgcaaccaggggctctcaggttcaat

SEQ ID NO: 220182 - DNA, 311 bp, Homo sapiens
  misc_feature (32)..(32): n is a, c, g, or t
  misc_feature (58)..(58): n is a, c, g, or t
ggggagtggtctggggagaattctgagggcgnagctggaaggttgggataggggtcantggggcaaccaggactctgcccaacatcaggaccatcagcaacagcagagcacacctggaacagaataaagagtccaaacataaaggatagtctcttcaataaatggtgctgggaaaattggatatctacttgctaaagaataaaatggatacttatttcacaccctatacaaaaatcaaatcaagacagattaaagacaaaaattgtaaaacctgaaattataaaaactagaaaaggctgggcgcaatggct

SEQ ID NO: 220183 - DNA, 607 bp, Homo sapiens
gtgagtgccagagactctagagcacagtgcttgtctgtcctgggtaggcaggtgccagtcagcagatgactgccatcatagttccagctatgctattagcaagttttctgattttttaaagaaaaattctaagtgtggatattttcaaaaggagttatctctcgatttttaagtgttggcaactaatcaaatctgtgcacaaaaaaccacaaaggcttgggtcctttggtttacgatgtgacctcttctgaggaggtattaacattttataagagatctgcttccttagagaaatttggagacctagggtggtctaagaaaaatcacttctccttctagccaagactggcagtcccaactctgctctggtgaaaggtttggccaagccaccatctccccaccacagttgctagttccttcaaggaggaactgaaggaacactgactctcaacagctgttgcccgttcccaatatcatggctacatcacaatactagagggaaataattactgtcatggtgataagaattttaagtgtacatttctaagatgtttttagttagctagtgaaaatacaattcaaaaatataagccatttatatgggaaa

SEQ ID NO: 220184 - DNA, 390 bp, Homo sapiens
taattttagtcagtataatcaagatgtggtgttatttcattgtgtgtgtgtgttttaaacagctttattgagatacaattaacataccctatgattcagtcatgtaaagtgtacaattcattgttttttaatatagtcacagttaatgtgcaaccatcagaacagccagttgcagaatattttcaatacctcagaaagaaactttttacctttagctaccaccaccctgcttcctaaccccatccttaccctccagcctaagcaaccattaatctattttctgtctctgtaagattttgctgttctagacattttatatgaatggaatcctaaaatatatggcctttgtgactggcttctttcacttagcataaatgttttcagggttca

SEQ ID NO: 220185 - DNA, 469 bp, Homo sapiens
tggtcaaatcctgccatttctatatgacaatgcaatttgctgggaagacggggatgtgtgtgcaggggtagatgtaccctggctatacctggagcacagggacttattggctacacctggccatcaacaagatcatccacctggaagtccattagaatgacctggggctccaaacacaccctgcccaggccctacccgtacattctctgtttggcctggtggggcttgggcatgttacgtttaaaaaatcttgagtgattctgaggtggagtcatggctgtggcttcgctgtggcattctggtctgcgtggagccctgaatggcagggttttacggcaaatgcaatgactgcccaggggcttctaagtgaccctgacctttttcccaagtgtcccacctctgaacaagcctctggctatttttgcttcctcctttgccactaagggagctactgtgaaaaaaaaaaaca

SEQ ID NO: 220186 - DNA, 453 bp, Homo sapiens
agaaaaacaaacagcattatgttatcacttatttgtgagatctaaaaatcaaaacaattgaactgaagaagatagagagtagaagcatggctaccagaggttggaaagtgtagttggggggggggaaatagggatgtttaataggtacaataaaaagtagaaataatgaatttactatttgatagcacaaaagggtgactatattcactaataatttaattgtatatttcaaagtaaagaatataattggattattgtttgtaacagaaaggttaaatgattaagtatatggatgctcaattttctatgatgtagttattatgcattgcatgactgtatcaaaatatctcatgtacctcataaatatatatgtatctgctatgtccccacaaaaaatacaaaatttttttataaaggaaactctaagaaaaaccttggactcaaagctcattc

SEQ ID NO: 220187 - DNA, 354 bp, Homo sapiens
ttttttttttgatggattgctgcggaagacatcacatcctttgatttcaatgtaagactagatgcagctatcaataacacaacaaataactatgtactcaacacccagttgaagaaataaaatcatgacaacagagctggcactttctctttcaagttatgtctttgtgtccatcctgcttccaaattacattgaaggggcaaccagttctcctcagcactgccagcttatactcctctggagtgtatcctgaaccactgggacttctttgacactcagaatctggaagaaaagtgcttcatatcccactgcaccaagaaggcgtcgaactccacatgaatcaggcaaccagac

SEQ ID NO: 220188 - DNA, 546 bp, Homo sapiens
ggtcacccaatcaaccaaacaaaaatcatatacttgaatcaaagctgaaacttttcagtggtgatctacaaggaaacaagtaacaaaatgtgaaaaatatgagcatttatttaactttggaaacaagaaaatgccatcagagttagaaccagaatcatagcatatcagagcccaaagggccttccaaggtcttagttctatccattcattgcctaggtgtggacatatattcattaaggataaatggcatgtcagagtcacctgcctaatgtgtgaaagggtcatcatgttctgattcttggcttagcatgctttctattaatacaactttgataaatggacaaagggccaacagaatgagaagtataaagtgacagatgtcttctgaaaagtaatggtagccagttgaataatgaaaacagtaaattttaagaagactagggagtacaatgtaataattttaaaaagaaggcgaatttaaattcacttccaagtgacactctccaagatgaattatctgtcctacgttaaatgttccagaagacc

SEQ ID NO: 220189 - DNA, 272 bp, Homo sapiens
tccctgattcctgtgagagattagttggctctgcacgtagagcctactacaaggtgtttgccacgccttcttggaatttcatgtttacacgtctgtctttgactctaagttcagtgaagtcaggaactttcttttcgttgtcataaccgtggttctaggacatattcgatatgcaataaatacttaaaaacagcattgaaagatgttaccctagtctggattttgaataaaaatgtaatgttatttcatttgagtccttgtaacaacctttt

SEQ ID NO: 220190 - DNA, 461 bp, Homo sapiens
cacggtgtctcatgcctgttatcccagcactttgggagaccgcgaggtgggaggatcacttgaggtcaggagttcaagaccagcctggccaatatggtgaaatcccatctctaccaaaaatattaaaaattagccggtcgtagtgatgcgcaactgtaatccctgctactcgggaggttgaggcacgagaatcacttgaacctgggaggcggaggttgcagtgagccaagaaaaaaaaaattagctgttatcacacaattaagtactaacatggaaattaaaaatcatgagtagctgtctttccttatgaaatttcctagactacactccataagcagcaaatagaagtgttactgtgactatagaacaagttggcaattttttaatttgactgtcatttttctaaagtatctgtaaagaaaatccatttctgactggactgataatttataaaatatcct

SEQ ID NO: 220191 - DNA, 425 bp, Homo sapiens
agaaattaaaaaacaaaaaacatagctgggcatggtggtgtgtgcctgtagtcctaactactagggtggctgaggtggaaagatcacttgaacccaggagttcaaggctgcagtgagctacatgattgtgccactgcactccagccttagcaacagagagaaaacctgtcccctataaaagcaaacaagatcttatctgcctttttcactgtgctgacatttgctctaatggtacaaaagcaaaagcaatggtgggtgaaactgttggggccttagtacacctcaaagcaggaacactaaactgtactggcaaaatattttacaagcctttgtaaattattttacaaattttgtaaattactctacaaaaataccagttgtacttaagaatgtctctgatgaagcagtaaaaatatgtcaatttt

SEQ ID NO: 220192 - DNA, 887 bp, Homo sapiens
tgagaagttggtgatgggggaagagtggacttttttttcaaagaatgctgtggtgactcgagtacaacacatgaagaattccagaaaagagccatttttgaagtcagcggtgaatcagaggttttctgaccctctcgagtgccttctatgaagaagagttcaactctggctccagtttgtcccctactcttttcccgaatccctcgacattccttgctcttttccccaggcaccgcatggcctgtgacatttgctgggactcacacacggcgtccaacctcctttctccgagcgatgactcctaggaacttcccaaggaccagagcgatgcaggctccgacacgcgagggcggggggcgggggtgaggggtgcgatggacgggggagcggaagggaaagagagagagaggggacctgggtgtagagagggcccagggccgcatgagccaagccagggaggagcagggggttcatctcagcaacctgatcggtgtcggcctttccctcccttcaaccctccattggtgttgctggaactgggaagactgctagacagacatcctctagggcactctccctgactcactttgctgtgcttttaagcgctcttttctggatcaacaagagtttgctagtaaaaatctgagcccgccatctcgatgcttctcctgtctctaaaactggtgcccgggctgaggccccaggtgacagacgttttccagtctacgctgcgcggggctaagcctctgcgaggcagagcgcactaaagcgtgcgccgcctccgggagagctgagctcaggacagcatcgtctccgtgcggtcgccgctgggcacccagcagcgcggtctggctccgcttcttgtgtcgctggccttaagagtggga

SEQ ID NO: 220193 - DNA, 306 bp, Homo sapiens
gaaaaagactgtttagttgacatctgagaaaataagaaggcaggaaagaagacagcatttggggaacagtctggtttggtaggagaatgataaaaataaggctggaaagagcttggggccagattttggaatatgaagtattaatggtagtttaagtttagattttattcgagtgcaaattcagaaagagcattgactccctgtcacttttcccccatagcagtgaccataataatggcagaaatatgaaacggtttttatttcatgttaactctgatataccagaacattcaggaaaaaatactt

SEQ ID NO: 220194 - DNA, 436 bp, Homo sapiens
gtcaaacattatttcttagtgtgtctgtgagggtgtttctgaaagagatttgcatttgaatcaatagactgaataaagaagattgccctcagtgatgtggacagacatcatcaaagtcattgagggtatgggtagaacagaaagaaaaaggaagagtaaattctctctctcttcttgactcacaacatctatcttctcctgtcggcaggcatcacagctcctctggccttcagactgcaagatttacaccagtacctcttgccccccgctcccccattttgcagatctttggcctctgatggttagttacattattggctccccaggttctcaatccttcagacttggagtaaatttctcatttggctttcctggttttccaacttacagataacatattacagcacttctcatcctccgtaattgccgtcgacgc

SEQ ID NO: 220195 - DNA, 501 bp, Homo sapiens
agccaggttcttctctgtgtatggttatgcatgtcctagatggccttgaaattgatctgttctccattagcaatctgtgaattgtactcctgtctgaaattgagtagaggtcagagctatgaaggttgaattcaacaagaatttttatgaagtataactagagttagtgctctgctctaactgcttttggagacagactttccccagtgtatcccatcaaatcacagactaaaaacagtctatttccccttattcttggccagataggacctaggcacctgaatttttttttaaactagatttccaggaaattttattgaaggctaacagcatagcatttcatgttggataaagaagatgcacaagacgggacatggtaagacacacctgtaatcctaccactttggaaggatgaggcaggtggatcacttgagctcaggagttcaagaccagcctgggcaacatggtaagaccctgtctctccaaaacaaacaaacaaac

SEQ ID NO: 220196 - DNA, 727 bp, Homo sapiens
ctctagcggatccccctgatattctggaggagagagtgggcttagaaaaagtttatttttataagccctggagatcttgattgacttatttaggccaacagtaagtttgcagttaagaaatctagtgcctggttaaggtattatgtcaagaaatattgtgtcctttttaagaggttattgtcagtgtagtctgcacggattggaacacacctggaaaagttgttcattttggctcctttctttaaatggaacaaactaagtggagcggctaaagggagccagcatggtcacaggctatatagtgcgaagatgaccagcccgaggagaaggaacttgtggaaatgtgacagccagctgtcaatatgggaaaggatattgtcgggagtagtggtcaaagagcagaatttattagaaagcacacttcacttaggtcaacagaggggagaactttctctttgcattttccctcagtgaatgggcctctttacagagtggcagagactggggaacagtgtttctttgttgggagaaaaattagatggcaggagctctaaggtctttctgcctgtgagactgaattgacccaaagaaaaatagatcttggatgggcacagtggctcacgcctgtaatctcagcactttgggaggctgaggtgggaggatcacttgagcccaggaattcaagacaagcctgcctgggcaacatagtgagacccccgtctctaca

SEQ ID NO: 220197 - DNA, 356 bp, Homo sapiens
tgaacctgtgaagagtttccatgcagggaaggggggatgagtagagctagggacctaaaatttgagaggggaagatattccccagtggaagacagtaaatcaaagactagagaccaagcatcagtctactgggtgtttgctacacctctgaagagctaaggttttccctcctgttacagtaatggacactcaacaacacatacccttcccagcaacctgtcctgctggaaaactactcgataaggtaacttctgcctgaaggggaccagggtcatcatacccgcaagtgcagcatcttcctgcagctctcatactaccaagctggggtttttccaacataaacattacaggtgcta

SEQ ID NO: 220198 - DNA, 202 bp, Homo sapiens
cgagatttgaacctgagtatgcagattcgatgtgatacctgttttggaggccgttttgcataaagggtaaggattttgcgatcttgtgtcctttcccactggggcaagtgtcctcatgcctcactctttcccagagtgggtctggactgtgatcttgagtctgaagaaatacctctggtgcttggagacatagatttgggga

SEQ ID NO: 220199 - DNA, 516 bp, Homo sapiens
aggctgttagagcttgaacaaactgacttttaaccatagcactcaaatccttttaaatatcttattacctgactttagccatgccaaacagccgatattttttgctcagagaaaggaaagttcaagatggtttgtggagaggaagagaattaaccagtggtaaaggttatacagattttaaaccagaaaggattcattccctaagccaggattgaaccctgggccaccattgtaaaatggtgaagccttagctattgagctacagcattggctggtttccgttgttcttcccagaaggattttagagcagccaattctgagcttgcaaagtcttttaactgttcaagataatttttagggataagtatgacatgaacccccaaattcctatctgttggatggtggaaaccaagagaaagaactgccatgtggttacaagttcaagctcccaaggacatttttcaacatgtggtctctgggcacaatgaaagagcagacagttaccctgagtaacag

SEQ ID NO: 220200 - DNA, 1110 bp, Homo sapiens
gaggggttatgttgaggtgaggacacgaggacacgtttttgcgcgcatggcgtggggcggattttaacccccgccttccccttttcacccccccatttttcccttctcccccccttttccccaaaaaatccccccccacaaaaaaaaaaaaaaaaaaaaaaaaaaaaaaaaaaataggatcatggcccttttaaagatctgaatcttctctgttattttcctgatgaatcaccatcccatatcttcttagtcctggccagtatgtagttgcgctcacatacgtctattctagctctgtagctccacaaaacaagtcttaagtccaaatctttgcctcttcatgtctgatatcaccaactcattcagcttttcttcacttattgacatagtgtcatgtcctatcactctctgctgcttctttaaacagtggacacaaacatattttctaattttcagtgtactcagtgaaacttggcagttcaccatgagtcaggctaggttgaaaggctttctttagggttgaaagtaaacgaaattggaatcacccaaagagaatttccccaaaaaacctcagacccagaagtgtaaaagctacaaaaggatagaactcccatgtctacagacagttctgttactttttgttctgtactattttggatgttgccaaaatcaaattcatcctgaaaacaggaagcaagctaatgcatatgccatccatgagattcccacttctgggtcagttcatattccattcaaccttttccttttatccttgtcttcttcagaataagacatttttcctccatattttcatattaaatattaacactttataggttctactttaatatatggacactttacaggttatacataaatatttgctggttgattgatttcgagattcattcattctgtgctcaaatatttgtacctagagacgttacatgttagaaaaagtgagcagcttctttctctaatcatttaggagtccatatttttcttttctttttgttctcccaacatccttatctcttactcagctcttcaatttataattaccaaataatcactgttagagaatcagcccctaagtaactttgattctgg

SEQ ID NO: 220201 - DNA, 583 bp, Homo sapiens
aaatgctgatgccatgctcttagatagctcagccttgagaacaatgagccaaataaatttctttttcttttcttttttttgaggcggagtttcactctgtcacccaggctagagtgcagtggcatgatctcgactcactgcaacctccacatcccaggttcaagcaattctcctgtctcagcctcccgagtagctgggattacaggcgtccaccaccatgtctggctaatttttgtatttttagtagaggcagggtttcaccacagtggccaggctggtcttgaactcctgacctcaaatgatctgcccaccttgacctcccaaagtgctggaattaccacccggccataaatttctgttcattataaattacctgttctgtggtattctgttatagcaacataaaatggactatgatagaaaattggtcctgagaagtgaagctgttgctattaaaaatatctgaaaatgtggaaatggctttgaaactgggtaatgagtagagcagaagaatttaaagaagcaggctaggaaaatcttagattgccgtaaacataatattaagggcagttctgatgagggc

SEQ ID NO: 220202 - DNA, 397 bp, Homo sapiens
ctctcattcttctgaattgggttgaggatcattccatgtgaagcagtgggataggcttagaatacatagatggacctttgaaaagacccatctcagcccccgggaaaactcaggaatgatttctggattcttaatatactgcatcttcatgtatagacggccacgtattggggaagcaaaaaataaacatttagaaacaggcaggtttgggtttaaattccccatctctactaaaaatacaaaaaattagctgggcatggtggcgggcgcctgtgctcccagctacttgggaggctgaggcagaagaatggcgtgaatccaggaggcggaggctgcagtgagccgagatcgcgccactgcagtccagccagggtgacagaacgagactccatctaaa

SEQ ID NO: 220203 - DNA, 317 bp, Homo sapiens
cagttgatgccacttgctattggagttgtgggtaagtggttttacattgcattacacgactaaaaggtaatcagattttgctactgttttggtgtacagatgctctttgatttacagtggggttaccttttataaccccatcataagttgaaaatattgttagtaaaaaaatgcatttaatatacctcacctaccgaacatcatagcttagcctagcctaccttaaacatgccaagaacctgcatgtttggcatgtttggcaaatgcatctaatgagcctattttataataaaatattgaatatctcatgtaattta

SEQ ID NO: 220204 - DNA, 471 bp, Homo sapiens
ggtgggggtggggaccctgcagttgcgtgtgctttgaattcagccgacggttgtacattccagtagccggcatctggcggtgaattcatcagccagtgtatcacccttgatctcaaacccagatgttgtgttcacagcagaagggaaagaaggaaaaacgaaatctgagacgcccagggagaggccgtggtttctgggctcagggcagttagaacgagagtctttataaagactccccctctcgcagctgcctctggctccttggggaaggggcagaggagcagagcagcccctctcgggggcatggacaggagatgggctgacacccaccccagtgcctaacaccaggcccagcacccagtaggtgttcagtaaacgtgtctgtgccacaattttcatttcttcccagattccttatgtctcttcgctttccccagccctgttcttcacatggcctgggactcggagagg

SEQ ID NO: 220205 - DNA, 447 bp, Homo sapiens
ttgctgcttgctgtatctgagccaatcagctgctaaggcctcctgccctgctgaactattgaaagaaagagctaaggcaagaatttttacttcatgagccaaggaagaggcagggaccagttaggggaggtccaaggtgaggccccagtgcatgtgttagattctgagaaaagcctggcctgaggggtatatgagctaaacctgcctgtgagaatggtccttgccaggtgaacacgtcttctcaggctttgagtagcttccaggtaaaggaaaaattttttaatgaaaaaacaaaaataaaataagcaataaaagaaatgattgtcaaagataactccaagaggattaaaagaaacaaacagacacaaatgaaaaaaaaggtaaaaaacatgaaagaacaagtcaagactaagaaaatatatttaaaaaacaaataaataatccaga

SEQ ID NO: 220206 - DNA, 364 bp, Homo sapiens
gtttctaaggggaagccggcatctgctgccatggccctgagccgccggcatgacgacgctggtgacctcaagggctgcgaagctcaggactgtgtgcggctgcaaagctgagctgtcgtcttgcctgtggcttccgaaatgcagccctgggccctgtgatcgctgcattttctctgcgcagctttgagggacggagtgtgctgaccaacagaagaaaggcaaacagcagaaactgacactgtggtggccactggacgtggcctcggtcggctgcggagagagaatttatttccacagcgaccctcaggaggcgcaggtcttggccagacccattcttagaaaggaacatgagatcagaaaggct

SEQ ID NO: 220207 - DNA, 505 bp, Homo sapiens
tccgcgccgcctgagaagggggcggaaggaaggacggagaagggtgaggggcggattaacccctccctggcgactcctttgtctggcccggacattgctgagccgagtggggcgcccaggagccagcgaggggctcccgaggcggccccggctcggcccaggtgtgcgggccgcggtggggcgcaggttcgcagcggagccacgagatccccgcgcctccggctgacgtccgggcgcccagggtctgcggccccacgtgcgatccatccgggagctgcgcctcagacgcctcgtggagcgggggagaacctgaaggaagtcgtggcgcgtttagatattttaaaaactcgaattaattgggaaaataggaagggcgcttccaaacgcggagaagacatcccggggtggggaaggatgtcttttaaaaattatatccccttgttgtggcggttgtttttgacctttcctactattaaaagaaatgttgccacgtttaatttttgtt

SEQ ID NO: 220208 - DNA, 747 bp, Homo sapiens
tgcggtagcaggtgcctgtaatcccagctactcgggaggctgaggctgaagaatcacttgaacccaggaggcggaggttgcagtgaaccgagatcgtgccactgcactctagcctgggcaacaagagtgaaactccatctcaaaaaaacaaaacaaaacaaaaaaaatgacagaaacatatttgaaatgtattaaattcatttaatgttcccttcttatgaactctgattaaattaagtaagaattccgcgtacacttcaacttgtgtgagagaaggagatcctgaagggcaactgaagagcaattatcacatttaaaatacgcaaaatctgaattaatttagtacctaaaacagaaggctgaagagcacatgaacagtttccacgaactgaaatctgaaggtccacagttaacatatctgctttctcttccctactacagaaaagagttgataggctggcctaagagttcctgttaagttactcaagagagagtgttctctcattttctggagaattattctgcaaaaatgcagttctctgagacggtttgcacacaggagaaggctggcaatctagaatggagtggcaaccatgagtttcctccctcctgaaaatatctggtctgccaagcccttcatatgtgacccttatggtttcttcaagggcttctaggcatacagctgatcccttagggaaatgggagaaaccaggaagttagccatagcccactccttactccctagtt

SEQ ID NO: 220209 - DNA, 243 bp, Homo sapiens
cccattgaaaatgttttaccttttacgtgaaacgtaactgtaaaagtgtgtaggtaaaatgtatatatattttaaggaatagtaatcaaatgagcactcatgtaacattgatacagcatgagaaatagaacattaccaacaatttagaaactgtgtactactccccaatcacatatcctttcctctgccagagaggtaagcacgttcttaaaattcatgttaatctttttttttgtaaacttc

SEQ ID NO: 220210 - DNA, 492 bp, Homo sapiens
atctagttgtcccaacaccacttattcagtagttcccgtctctactggtatgatacacctcttttatcatttactaaattcccatatatacttgaacatatatctggattttctatcccattccattgttttgactacttatgtgtcagtattttcttttcttttcttttctttttcttttgagatggagtctcactctctcactcaggctggagtgcagtgatgcaatctcgactcactgcaacctctgcctcccaggttcaaatgattctcctgcctcaacctcccaagtagttgggattacaggcatgtaccaccacgccctgttaattgttgtatttttagtagagacgggatttcaccttgttggccaggctggtctggaactcctgacctcaggtgatccacctgcctttgcctcccaaagtgctgggaatacaggcgtgagccaccgcgcccagccgtcagtattttattttcgtatgtaggtgt

SEQ ID NO: 220211 - DNA, 582 bp, Homo sapiens
tcatgttcaaaaattaactcaaaatggaccaaagacctaaaatggtaaaactcttggagagaacacaggggaaaagcttcatgacattggatttgcagtgctttcctggacgtgacaccaaaaacacagattacaaaagataaaataattaaattggaccatatcaaaaatataaatttctgtgcctaaagggatataacagtaaaaaggcaaccgaaaggatggaagaagatactgcaagtcatgtatctatttctttttttcagctttctcaggttgaacaagtcatatatctaataaatgttaatatccagaatatattaagaattacaagtcaacaacaaaacaacccaattttaaaaaggggcaaagcgctgaatagacatttttccagaggtgatacacaaatagccaataagcatatgaaaagatgctcaacattactaatcatgagggaattgcaaatctaaaccacagtgagataccactttacattatttaggatggctactattaagcagccaaaaagtgaaagtaatccaagtccatcagcaaattaatggataaacagtatgcaggatg

SEQ ID NO: 220212 - DNA, 295 bp, Homo sapiens
atattggaaatgatgtgttatgttatgattttatgagtggttgtttttatttgagatggagtcttgctctgtatcccaggaacataccccacgcacatgcacaccacacacacacaccccacatcactcacacacccagcacacccagggcatagagtgtggctctgatagaagtaacatgggcctctaaacaagtgtggcttcttttcatttccaagctataggcagaaagcctggactacagctctagaaaccagatctcgcctcctcttcagcctcatagcatgtgtctcat

SEQ ID NO: 220213 - DNA, 409 bp, Homo sapiens
ccacatctagaacgaacagccagacggcctcaaaacctctgtttcaacagccacatggcctcgaaacctctgtgtttcaacagccagagggcctcgaaacctctgtgtttcaagagtccttgtacctgctgtgaagtttgtcagagtaaacttcagtgtgtgcaaatctcagaggagggccaggctctggtgggttctagggccccccaacctgtgcccagattggcacagacttcctaagcatgaacatcgtgatgcatggagaataaactgacatgatggacttcataaaaattaagtttttgctcttctaaacatagtactaatcaagtaaaaaggcagacaagagtaaaatactttcagtacatatcttcaactcaacgatcagacagacaactcagttttgttt

SEQ ID NO: 220214 - DNA, 652 bp, Homo sapiens
caaacagagatttacagacacatagtagggtgtgtatatatatagatgagcatcaggtataacacataaatgcttatatatctaattggtgttgaggtctgaattaatgtatttttgaaagcatcggttcttgtgacagtagaatcaaatacttgcataatgttttatagactagttataatccttacaaaaatcctattgacaaaatagcattagcttaatattccagatgagaaaatgggctccaagtaattagatgctttgttcctgatcaaacactaagtggaaaaaaacccacctcattacaaaattttcttgttgaaagacttcagactgcctctaaaatagaggagagaagaaatagtctgacactctaaattggatataaacgtcagaattgggactataagtctagaaaaagtaagtatgtttaatggcacatatagaacttacagtcttaacaaatgaagctttttggtcaattttggagtatgatcttctataacacggaaaatcattttggggttttttttcctgaataattcataaatggagatggactaaagaaaatataaaggaaatagcataggaaaattttgtaaaaacttatttggatattttatgatttttctacatctgttttctaaatttt

SEQ ID NO: 220215 - DNA, 428 bp, Homo sapiens
ggctttaatgtttcttaaaatggatttcactatagtttgttgcttactccgttgcatcatatttgaataaaaactctttattgtatttccagatcttaaaacatcactggcattagtttcatggtagctctcttcatatagtgccttggaagctaaattttgcaattacctagtaattatttaagcattggagcattggagccaaagaacagttcaaaggaattcactgaacaagtgccaaatctttggattgatttgttatttcagcttccttaaacttccaaaagagtctcacatgcaaatgtcttaagaattattaatacaagaacaaaagtataagagccaattgataaaatgtttgggaaatgattgtatctaaaatttagactaaggatgatgttaaaattgattgcaaaatggctagccaa

SEQ ID NO: 220216 - DNA, 404 bp, Homo sapiens
gatgggtgcagcacaccaacatggcacatctatgcctatgtaacaaacctgcacgttgtgcacatataccctagaacttaaaatataataataataataaagagtaccgctttatttttaaatgttatcattcactagttatgccatctgagtttgcaggctatttttgtagaaaagtttatggctaaactgaatttcttcaatacatgtagggtttactcagatttctatttgaggtactatattttggtaatgagcatttcccaggaattttctatttcatatggacattaaaatgcattgataatatagttttattgcctgtttaataactgtaaagaccataatggtattgccatgtttaaactgggaataaaatatctgtgccttttcaaaatcttccc

SEQ ID NO: 220217 - DNA, 477 bp, Homo sapiens
ccacattcaagagaagaaagcaatacaaatccttaaacactggtattagcaaacaagaatgataaagcccctattataattattctgaatgacataaaggaaaatgctattaatggatgagcagatgggaatttcagcaaatgagtaaatcagtttgaaaatgggaattctaaaactaagaaatacaatgtttgaaagtaaaaatccactggataggtttaacaggaaatttgaggtggcagaatagttaatgaagttgaatatagatagaaattatttaatctgaaacaaaaaggattgaaagaaattaaaaggactgaatagtgctggtgataatgtcaaaaggtgacttgtgataatgctttgtgttctctgatcttcctagatctgtggtttggtgtttgttttcttgcttttagagacaaggtcttgctttgttgcccaggagggagtgcagtggcaggataatggcttgct

SEQ ID NO: 220218 - DNA, 180 bp, Homo sapiens
gctgggaatgtgggctgggtttcatcctccagctctcccctccttttattcctgctgggttcctagatatgaggagctctaagtcaagggtctgccttgtgttgatagagaacaggttcttggagccagtactcatgcaaagggatgaagtgcaggcttgacagcttcaacattaaatca

SEQ ID NO: 220219 - DNA, 895 bp, Homo sapiens
ggaagaatgccccttgcatcctcttccaatgtggtgggaaggaagacaggaaaaggcaactttggagggcagaatgagcaggaggacacactcaaccagctgctggtggagatggatggttttaatacaacaacaaatgtcgtcattttggccagcaccaatcaaccggatatcctggaccctgcgctgcttaggccggggcgtttcgacaggcaaatctttattggactaccagacataaaaggaaggggttctattttcaaagttcacctccgaccgctaaaactggacagtaccctggagaaggataaattggcaagaaaactggcatctttaactccagggttttcaggtgctgatgttgctaatgtctgtaatgaagctgcgttgattgctgcaaggcatctgtcagattccataaatcagaaacactttgaacaggcaattgagcgagtgattggtggcttagagaagaaaacgcaggttctgcagcctgaggagaagaccgtggcataccatgaagcaggccatgcggttgccagctggtatctggagcccacagacctgctcttaaaggtatccatcatcccacgtggcaaaggactaggttatgctcagtatttaccaaaagaacaatacctctataccaaagagcagctcttggataggatgtgtatgactttaggtggtcgagtctctgaagaaatcttctttggaagaattacaactggtgctcaagatgacttgagaaacagtaactcagagtgcatatgcccaaatcgtacagttaggcatgaatgacaaggttgggcaaatctcctttgacctcccaagtcagggggacatggatataggagaaaccttacagtgaagccactgcagattgatagatgaa

SEQ ID NO: 220220 - DNA, 740 bp, Homo sapiens
tagtccagagtaataggcaattagaaacatggtgagtcaaataattctgttcttttgttttttccctcttgctcattcattaatttggtctgtatttattgagtactaactacatagatattgcactaagtattaggatacagtagtaagcaaaaatctgattgcttttcttatggagcttaaagtctaatgggggagatggacattagtcaagtaatcgcacacataacattttaactgtaaggaagtcctatgattagaaggtacatagttctgaaagagtttatttaaataggtggatttgacctaattatggatagatatcagaagagaccactgagctgagatccaaagtgctgggattaacaggtgtgagccacctcacccagcctatgaggttttaatagcataagttgtagcatccttaatgtgttgaataaggcaaatttgaaaagactgatgctatggaaaatataactttaagcatgagtacaatacaaagctcattactaaattttcataccaatttttatatttatcactggccccaggcttcccaagtatttagggtcaacatctttacctttggtacccaaagtgtaggtcttaaaatggcagcatttgcctggcacagtggctcacgcctgtaatcccagcactttgggaggctgagacaggtggataacttgaggtcaggagttctagactaccctggccaacatggtgaaaccccatctcta

SEQ ID NO: 220221 - DNA, 481 bp, Homo sapiens
tagtccagagtaataggcaattagaaacatggtgagtcaaataattctgttcttttgttttttccctcttgctcattcattaatttggtctgtatttattgagtactaactacatagatattgcactaagtattaggatacagtagtaagcaaaaatctgattgcttttcttatggagcttaaagtctaatgggggagatggacattagtcaagtaatcgcacacataacattttaactgtaaggaagtcctatgattagaaggtacatagttctgaaagagtttatttaaataggtggatttgacctaattatggatagatatcagaagagaccactgagctgagatctaaaggaagactaggaggccaggcgtggtggctcacgcctgtgatcccagcactttgggaggccgaggtgggtagatcatttgagcccaggagttcgagaccagcctggcaacacaggagaccctgtctatg

SEQ ID NO: 220222 - DNA, 540 bp, Homo sapiens
cagtggaaactctgtgatggtgacaaacatgggaatcactctgatgtgacgcagttaaatttacaccttaaaaaatggatgccaagacaacataaacaagacccagggacaccaacagggtatggtgctgtgccccagagtcagggtcctgggttcttacccagggaagtgagaaataaagataacttttccctgctccctctctcctcccctgacactgatcttcccaccctgtacctccctcttctgctcccaaacccccacccagtgctcagtcgcagacatcactgcctgcagggcatgcacagtgcagcccattgcacacaaactacaaactcacagaaggtgatgacaatttgtgtttgggacgtctgattgtgaaagagggaggacagcgtacttgcagccacagagactgaaactggaacgtgatggaacggggctggaacgtgatggagctctgacataacagacgtgtgactttgtgtgaaatgtgcagatccatgtggaataaaacacagcctagcctgtgaaaaaaaa

SEQ ID NO: 220223 - DNA, 521 bp, Homo sapiens
atgtatgcaagtgtactttagccataggttttgatgggaaagtagagagaggaaggaagggattgggagcgtgatgcatgtctcgggagggtggagttgtgaggacaccatgctagagggtatgagaagggaggaccagtttgttcagttgtgtgggctgtgcgctgcacaactcggggataccattcaaaaccatatgtattagacatctgaggcttggagaagcttgggaaatagtagttgagtggccacttgctacatatttttaaattccgctggcctacccagctcctagcctatggtttttaaaacccctctgctagctggaggctggatgagtcaatggagcgtgtatcggtgataccgtatagaagcactactgtcttgatcaagaatttgcattttcttcctgaaattatgcagcatcttaaacatgaatattcaataatatttaatattcaataataataattataaaataaatattgggaatttaatccatagagtattatttaaacact

SEQ ID NO: 220224 - DNA, 451 bp, Homo sapiens
gcggccgcgcggagcggggagccgccagcctgcgccccgtccgcgggtctatgggaagttcggggacttgacagccgctgccgccgcagggcatttttggtcgaagagagctgaagtaatgagaagacatcatggaggcccagtcccacagctccacgaccactgaaaagaaaaaagttgagaattccatagtgaagtgctccactcgaacagatgtgagcgagaaagccgttgcctccagcaccacttctaatggcaaccatttggaggcccaggccagaggctggaccaggaggattggatgcatccgcgctgtccatccctgctgctgcacaaacgactcagccacagatcctcttggatgggctaccttgaaagggggaagctccaaagaatgcgtacaaacccatacatttacctaggtgcgggatgattgcaagaccactttatt

SEQ ID NO: 220225 - DNA, 301 bp, Homo sapiens
  misc_feature (47)..(47): n is a, c, g, or t
  misc_feature (87)..(87): n is a, c, g, or t
tttttgggggggccccccaaaaaaaaaaaccccccccccaaaaaaancccggggggggtaaaaaaaaaattccccacattaaggagnttgaagagattaaactgactttgttttggctgtttttttagttctgtatgtattttagcaatctcatctcacctaactgagatgtgtttcaattatattccttttatggaaaaggactctgaaaaaccctaaagtattctagggagaaactgtcttccatttcagttttgaatcagtattgttacactcaaaccaccctctttttaaaaaaaaa

SEQ ID NO: 220226 - DNA, 4967 bp, Homo sapiens
cgagaatgttcctagagggtctgcgcagctagagagagctcaccaagagaagttggcgcaaagtagctagccagagcctggggactgtgttaggatgaaagtcctggacagacttatcacagagagagaagaaacgcaatcactatgcagccacagaatgtccaggggctcagcaaagtcagtgaggaaccttcaacatcgagtgacgagagggcctcattgatcaagaaagagatccatgggtccctgccacacgtggcggagccctctgtgccgtaccgcgggacggtgtttgccatggaccccaggaatggttacatggagccccactaccaccctcctcatcttttccctgccttccatcctcctgtaccaattgatgccagacatcatgagggccgttaccattacgatccatctccgattcctccattgcatatgacttccgccttatctagtagccctacgtatccggacctgcccttcattaggatctccccacaccggaaccccgctgctgcttccgagtctcccttcagccctccacatccctacattaatccctacatggactatatccgctccttgcacagcagcccatcgctctccatgatctcagcaacccgtgggctgagccctacagatgcgccccatgcaggagtcagcccagcagaatactatcatcagatggccctgctaactggccagcgcagcccctatgcagacattattccctcagctgccaccgccggcacgggggccatccacatggaatatcttcatgctatggatagcaccagattctccagccccaggctgtcagccaggccgagccgaaaacgtacactgtccatatcaccactctccgatcatagctttgaccttcagaccatgataaggacgtctcccaactccttggtcacgattctcaataattcccgtagcagctcttcagcaagtggctcctatggtcacttatctgcaagtgcaatcagccctgccttgagcttcacctactcttccgcgcccgtctctctccacatgcatcagcagatcctaagccgacaacagagcttaggttcagcctttggacacagccctccactcatccaccctgccccaacttttccaacacagaggcctattccagggatccctacggttctgaaccccgtccaggtcagctccggcccttctgagtcctcacagaacaagcccacgagtgagtctgcagtgagcagcactggtgacccgatgcacaacaagaggtccaagatcaaacccgatgaagacctccccagcccaggggctcgggggcagcaggaacagcccgaaggaacaacccttgtcaaggaggaaggggacaaagatgaaagcaaacaggagcctgaagtcatctatgagacaaactgccactgggaaggctgcgcgagggagttcgacacccaagagcagcttgtgcaccatataaataacgaccatattcatggagagaagaaggagttcgtgtgcaggtggctggactgctcaagagagcagaaacccttcaaagcccagtatatgttggtagtgcatatgagaagacacacgggcgagaagcctcacaaatgcacttttgaaggttgcacaaaggcctactcgagactagaaaacttgaaaacacacttgagatctcacactggagagaaaccatacgtctgtgagcacgaaggttgcaacaaggctttctcaaatgcctctgatcgcgccaaacaccaaaacagaacgcattccaatgagaaaccatatgtgtgcaaaatcccaggctgcactaagcgttacacagacccaagctccctccggaaacatgtgaagacagtgcatggcccagaggctcatgtcaccaagaagcagcgaggggacatccatcctcggccgccacccccgagagattccggcagccattcacagtccaggtcgcctggccgaccgactcagggagcccttggtgagcagcaggacctcagcaacactacctcaaagcgggaagaatgcctccaggtgaaaaccgtcaaggcagagaagccaatgacatctcagccaagccctggtggtcagtcttcatgcagcagccaacagtcccccatcagcaactattccaacagtgggctcgagcttcctctgaccgatggaggtagtataggagacctcagtgccatcgatgaaaccccaatcatggactcaaccatttccactgcaaccacagcccttgctttgcaagccaggagaaacccggcagggaccaaatggatggagcacgtaaaactagaaaggctaaaacaagtgaatggaatgtttccgcgactgaaccccattctaccccctaaagcccctgcggtctctcctctcataggaaatggcacacagtccaacaacacctgcagcttgggtgggcccatgacgcttctcccgggcagaagcgacctctctggggtggacgtcactatgctgaacatgctcaacagaagggacagcagcgccagcaccatcagctcggcctacctgagcagccgccgctcctcagggatctcgccctgcttctccagccgccgctccagcgaggcgtcacaggccgagggccggccgcagaacgtgagcgtggccgactcctacgaccccatctccaccgacgcctcgcgccgctccagcgaagccagccagagcgacggcctgcccagcctgctcagcctcacgcccgcccagcagtaccgcctcaaggccaagtacgcggctgccacaggagggccgccgccgacgcccctgcccaacatggagaggatgagcctgaagacgcgcctggcgctgctcggggatgccctcgagcctggcgtggccctgcctccagttcatgccccgaggaggtgcagcgacgggggagcccacggctacgggcggcgccacctgcagccgcacgatgcgctgggccacggcgtgaggagggccagcgacccggtgcggacaggctccgagggcctggccctgcctcgtgtgccgcgcttcagcagcctcagcagctgcaaccccccggcgatggccacgtccgcggagaagcgcagtctcgtgcttcagaattacacgcggcccgagggcggccagtcccgaaacttccactcgtccccctgtcctcccagcatcaccgagaacgtcaccctggagtccctgaccatggacgctgatgccaacctgaacgatgaggatttcctgccggacgacgtggtgcagtatttaaattcccagaaccaagcagggtacgagcagcacttccccagcgccctcccggacgacagcaaagtgccccacgggcccggtgactttgacgcgcccgggctgccagacagccacgctggccagcagttccatgccctcgagcagccctgccccgagggcagcaaaaccgacctgcccattcagtggaacgaagtcagctccggaagcgccgacctgtcctcctccaagctcaagtgtgggccgcggcccgctgtgccgcagactcgcgcctttgggttctgcaacggcatggtcgtccacccgcagaaccccttgaggagcgggcctgctgggggctatcagaccctcggggagaacagcaacccctacggtggcccagagcacttgatgctccacaacagccccggaagtggcaccagtggaaacgccttccatgaacagccctgtaaggccccgcagtatgggaactgtctcaacaggcagccagtggcccctggtgcactcgacggtgcctgtggtgccgggattcaagcctcaaagctgaagagcacccccatgcaagggagcgggggccagctgaatttcggcctgccggtagcgccaaatgagtcagctggcagcatggtgaatggcatgcagaaccaggacccagtgggacaggggtacctggctcaccagctcctcggcgacagcatgcagcacccgggggcaggccgccccggtcagcagatgcttgggcagattagtgctacctcacacatcaacatctaccaagggccagagagctgcctgccaggggctcacggcatgggcagccagccgtcaagcttggcagttgtcaggggctaccagccatgtgccagctttgggggcagcaggcgccaggctatgccgagggacagccttgctctgcagtcaggacagctcagtgacacaagtcagacctgcagggtgaatggtatcaagatggagatgaaagggcagccccatccgctgtgctctaatctgcagaattactctggtcagttctatgaccaaaccgtgggcttcagtcagcaagacacgaaagctggttcattctctatttcagacgccagctgcctgctacaggggaccagcgccaaaaactctgagttactttccccaggtgctaatcaggtgacaagcacagtggacagcctcgacagccatgacctggaaggggtacagattgacttcgatgccatcatagacgatggggaccactccagcctgatgtcgggggccctgagcccaagtatcattcagaacctttcccatagctcctcccgcctcaccacgcctcgggcgtccctcccattcccagcgctgtccatgagcaccaccaacatggctatcggggacatgagttctttgctgacctccctagcggaagaaagcaaattccttgcagttatgcaataggctttaggaaaaaaagactgcaaccaacggaaatcaataggagttgaagagattaaactgactttgttttggctgtttttttagttctgtatgtattttagcaatctcatctcacctaactgagatgtgtttcaattatattccttttatggaaaaggactctgaaaaaccctaaagtattctagggagaaactgtcttccatttcagttttgaatcagtattgttacactcaaaccaccctctttttaaaaaaaaa

SEQ ID NO: 220227 - DNA, 4704 bp, Homo sapiens
cattatatcatgctgattttaaaataatagtactaatatgtatttgcctgcagtttggtccacaaggctcctttgaattcacttaaaatcttacttattttctttcagagacagcctctgcctgtggagatatttgtctcatgcataccccttgtatctggttttctttgtacccaggacttccgccttatctagtagccctacgtatccggacctgcccttcattaggatctccccacaccggaaccccgctgctgcttccgagtctcccttcagccctccacatccctacattaatccctacatggactatatccgctccttgcacagcagcccatcgctctccatgatctcagcaacccgtgggctgagccctacagatgcgccccatgcaggagtcagcccagcagaatactatcatcagatggccctgctaactggccagcgcagcccctatgcagacattattccctcagctgccaccgccggcacgggggccatccacatggaatatcttcatgctatggatagcaccagattctccagccccaggctgtcagccaggccgagccgaaaacgtacactgtccatatcaccactctccgatcatagctttgaccttcagaccatgataaggacgtctcccaactccttggtcacgattctcaataattcccgtagcagctcttcagcaagtggctcctatggtcacttatctgcaagtgcaatcagccctgccttgagcttcacctactcttccgcgcccgtctctctccacatgcatcagcagatcctaagccgacaacagagcttaggttcagcctttggacacagccctccactcatccaccctgccccaacttttccaacacagaggcctattccagggatccctacggttctgaaccccgtccaggtcagctccggcccttctgagtcctcacagaacaagcccacgagtgagtctgcagtgagcagcactggtgacccgatgcacaacaagaggtccaagatcaaacccgatgaagacctccccagcccaggggctcgggggcagcaggaacagcccgaaggaacaacccttgtcaaggaggaaggggacaaagatgaaagcaaacaggagcctgaagtcatctatgagacaaactgccactgggaaggctgcgcgagggagttcgacacccaagagcagcttgtgcaccatataaataacgaccatattcatggagagaagaaggagttcgtgtgcaggtggctggactgctcaagagagcagaaacccttcaaagcccagtatatgttggtagtgcatatgagaagacacacgggcgagaagcctcacaaatgcacttttgaaggttgcacaaaggcctactcgagactagaaaacttgaaaacacacttgagatctcacactggagagaaaccatacgtctgtgagcacgaaggttgcaacaaggctttctcaaatgcctctgatcgcgccaaacaccaaaacagaacgcattccaatgagaaaccatatgtgtgcaaaatcccaggctgcactaagcgttacacagacccaagctccctccggaaacatgtgaagacagtgcatggcccagaggctcatgtcaccaagaagcagcgaggggacatccatcctcggccgccacccccgagagattccggcagccattcacagtccaggtcgcctggccgaccgactcagggagcccttggtgagcagcaggacctcagcaacactacctcaaagcgggaagaatgcctccaggtgaaaaccgtcaaggcagagaagccaatgacatctcagccaagccctggtggtcagtcttcatgcagcagccaacagtcccccatcagcaactattccaacagtgggctcgagcttcctctgaccgatggaggtagtataggagacctcagtgccatcgatgaaaccccaatcatggactcaaccatttccactgcaaccacagcccttgctttgcaagccaggagaaacccggcagggaccaaatggatggagcacgtaaaactagaaaggctaaaacaagtgaatggaatgtttccgcgactgaaccccattctaccccctaaagcccctgcggtctctcctctcataggaaatggcacacagtccaacaacacctgcagcttgggtgggcccatgacgcttctcccgggcagaagcgacctctctggggtggacgtcactatgctgaacatgctcaacagaagggacagcagcgccagcaccatcagctcggcctacctgagcagccgccgctcctcagggatctcgccctgcttctccagccgccgctccagcgaggcgtcacaggccgagggccggccgcagaacgtgagcgtggccgactcctacgaccccatctccaccgacgcctcgcgccgctccagcgaagccagccagagcgacggcctgcccagcctgctcagcctcacgcccgcccagcagtaccgcctcaaggccaagtacgcggctgccacaggagggccgccgccgacgcccctgcccaacatggagaggatgagcctgaagacgcgcctggcgctgctcggggatgccctcgagcctggcgtggccctgcctccagttcatgccccgaggaggtgcagcgacgggggagcccacggctacgggcggcgccacctgcagccgcacgatgcgctgggccacggcgtgaggagggccagcgacccggtgcggacaggctccgagggcctggccctgcctcgtgtgccgcgcttcagcagcctcagcagctgcaaccccccggcgatggccacgtccgcggagaagcgcagtctcgtgcttcagaattacacgcggcccgagggcggccagtcccgaaacttccactcgtccccctgtcctcccagcatcaccgagaacgtcaccctggagtccctgaccatggacgctgatgccaacctgaacgatgaggatttcctgccggacgacgtggtgcagtatttaaattcccagaaccaagcagggtacgagcagcacttccccagcgccctcccggacgacagcaaagtgccccacgggcccggtgactttgacgcgcccgggctgccagacagccacgctggccagcagttccatgccctcgagcagccctgccccgagggcagcaaaaccgacctgcccattcagtggaacgaagtcagctccggaagcgccgacctgtcctcctccaagctcaagtgtgggccgcggcccgctgtgccgcagactcgcgcctttgggttctgcaacggcatggtcgtccacccgcagaaccccttgaggagcgggcctgctgggggctatcagaccctcggggagaacagcaacccctacggtggcccagagcacttgatgctccacaacagccccggaagtggcaccagtggaaacgccttccatgaacagccctgtaaggccccgcagtatgggaactgtctcaacaggcagccagtggcccctggtgcactcgacggtgcctgtggtgccgggattcaagcctcaaagctgaagagcacccccatgcaagggagcgggggccagctgaatttcggcctgccggtagcgccaaatgagtcagctggcagcatggtgaatggcatgcagaaccaggacccagtgggacaggggtacctggctcaccagctcctcggcgacagcatgcagcacccgggggcaggccgccccggtcagcagatgcttgggcagattagtgctacctcacacatcaacatctaccaagggccagagagctgcctgccaggggctcacggcatgggcagccagccgtcaagcttggcagttgtcaggggctaccagccatgtgccagctttgggggcagcaggcgccaggctatgccgagggacagccttgctctgcagtcaggacagctcagtgacacaagtcagacctgcagggtgaatggtatcaagatggagatgaaagggcagccccatccgctgtgctctaatctgcagaattactctggtcagttctatgaccaaaccgtgggcttcagtcagcaagacacgaaagctggttcattctctatttcagacgccagctgcctgctacaggggaccagcgccaaaaactctgagttactttccccaggtgctaatcaggtgacaagcacagtggacagcctcgacagccatgacctggaaggggtacagattgacttcgatgccatcatagacgatggggaccactccagcctgatgtcgggggccctgagcccaagtatcattcagaacctttcccatagctcctcccgcctcaccacgcctcgggcgtccctcccattcccagcgctgtccatgagcaccaccaacatggctatcggggacatgagttctttgctgacctccctagcggaagaaagcaaattccttgcagttatgcaataggctttaggaaaaaaagactgcaaccaacggaaatcaataggagttgaagagattaaactgactttgttttggctgtttttttagttctgtatgtattttagcaatctcatctcacctaactgagatgtgtttcaattatattccttttatggaaaaggactctgaaaaaccctaaagtattctagggagaaactgtcttccatttcagttttgaatcagtattgttacactcaaaccaccctctttttaaaaaaaaa

SEQ ID NO: 220228 - DNA, 3990 bp, Homo sapiens
  misc_feature (3952)..(3952): n is a, c, g, or t
  misc_feature (3978)..(3978): n is a, c, g, or t
  misc_feature (3983)..(3983): n is a, c, g, or t
cgagaatgttcctagagggtctgcgcagctagagagagctcaccaagagaagttggcgcaaagtagctagccagagcctggggactgtgttaggatgaaagtcctggacagacttatcacagagagagaagaaacgcaatcactatgcagccacagaatgtccaggggctcagcaaagtcagtgaggaaccttcaacatcgagtgacgagagggcctcattgatcaagaaagagatccatgggtccctgccacacgtggcggagccctctgtgccgtaccgcgggacggtgtttgccatggaccccaggaatggttacatggagccccactaccaccctcctcatcttttccctgccttccatcctcctgtaccaattgatgccagacatcatgagggccgttaccattacgatccatctccgattcctccattgcatatgacttccgccttatctagtagccctacgtatccggacctgcccttcattaggatctccccacaccggaaccccgctgctgcttccgagtctcccttcagccctccacatccctacattaatccctacatggactatatccgctccttgcacagcagcccatcgctctccatgatctcagcaacccgtgggctgagccctacagatgcgccccatgcaggagtcagcccagcagaatactatcatcagatggccctgctaactggccagcgcagcccctatgcagacattattccctcagctgccaccgccggcacgggggccatccacatggaatatcttcatgctatggatagcaccagattctccagccccaggctgtcagccaggccgagccgaaaacgtacactgtccatatcaccactctccgatcatagctttgaccttcagaccatgataaggacgtctcccaactccttggtcacgattctcaataattcccgtagcagctcttcagcaagtggctcctatggtcacttatctgcaagtgcaatcagccctgccttgagcttcacctactcttccgcgcccgtctctctccacatgcatcagcagatcctaagccgacaacagagcttaggttcagcctttggacacagccctccactcatccaccctgccccaacttttccaacacagaggcctattccagggatccctacggttctgaaccccgtccaggtcagctccggcccttctgagtcctcacagaacaagcccacgagtgagtctgcagtgagcagcactggtgacccgatgcacaacaagaggtccaagatcaaacccgatgaagacctccccagcccaggggctcgggggcagcaggaacagcccgaaggaacaacccttgtcaaggaggaaggggacaaagatgaaagcaaacaggagcctgaagtcatctatgagacaaactgccactgggaaggctgcgcgagggagttcgacacccaagagcagcttgtgcaccatataaataacgaccatattcatggagagaagaaggagttcgtgtgcaggtggctggactgctcaagagagcagaaacccttcaaagcccagtatatgttggtagtgcatatgagaagacacacgggcgagaagcctcacaaatgcacttttgaaggttgcacaaaggcctactcgagactagaaaacttgaaaacacacttgagatctcacactggagagaaaccatacgtctgtgagcacgaaggttgcaacaaggctttctcaaatgcctctgatcgcgccaaacaccaaaacagaacgcattccaatgagaaaccatatgtgtgcaaaatcccaggctgcactaagcgttacacagacccaagctccctccggaaacatgtgaagacagtgcatggcccagaggctcatgtcaccaagaagcagcgaggggacatccatcctcggccgccacccccgagagattccggcagccattcacagtccaggtcgcctggccgaccgactcagggagcccttggtgagcagcaggacctcagcaacactacctcaaagcgggaagaatgcctccaggtgaaaaccgtcaaggcagagaagccaatgacatctcagccaagccctggtggtcagtcttcatgcagcagccaacagtcccccatcagcaactattccaacagtgggctcgagcttcctctgaccgatggaggtagtataggagacctcagtgccatcgatgaaaccccaatcatggactcaaccatttccactgcaaccacagcccttgctttgcaagccaggagaaacccggcagggaccaaatggatggagcacgtaaaactagaaaggctaaaacaagtgaatggaatgtttccgcgactgaaccccattctaccccctaaagcccctgcggtctctcctctcataggaaatggcacacagtccaacaacacctgcagcttgggtgggcccatgacgcttctcccgggcagaagcgacctctctggggtggacgtcactatgctgaacatgctcaacagaagggacagcagcgccagcaccatcagctcggcctacctgagcagccgccgctcctcagggatctcgccctgcttctccagccgccgctccagcgaggcgtcacaggccgagggccggccgcagaacgtgagcgtggccgactcctacgaccccatctccaccgacgcctcgcgccgctccagcgaagccagccagagcgacggcctgcccagcctgctcagcctcacgcccgcccagcagtaccgcctcaaggccaagtacgcggctgccacaggagggccgccgccgacgcccctgcccaacatggagaggatgagcctgaagacgcgcctggcgctgctcggggatgccctcgagcctggcgtggccctgcctccagttcatgccccgaggaggtgcagcgacgggggagcccacggctacgggcggcgccacctgcagccgcacgatgcgctgggccacggcgtgaggagggccagcgacccggtgcggacaggctccgagggcctggccctgcctcgtgtgccgcgcttcagcagcctcagcagctgcaaccccccggcgatggccacgtccgcggagaagcgcagtctcgtgcttcagaattacacgcggcccgagggcggccagtcccgaaacttccactcgtccccctgtcctcccagcatcaccgagaacgtcaccctggagtccctgaccatggacgctgatgccaacctgaacgatgaggatttcctgccggacgacgtggtgcagtatttaaattcccagaaccaagcagggtacgagcagcacttccccagcgccctcccggacgacagcaaagtgccccacgggcccggtgactttgacgcgcccgggctgccagacagccacgctggccagcagttccatgccctcgagcagccctgccccgagggcagcaaaaccgacctgcccattcagtggaacgaagtcagctccggaagcgccgacctgtcctcctccaagctcaagtgtgggccgcggcccgctgtgccgcagactcgcgcctttgggttctgcaacggcatggtcgtccacccgcagaaccccttgaggagcgggcctgctgggggctatcagaccctcggggagaacagcaacccctacggtggcccagagcacttgatgctccacaacagccccggaagtggcaccagtggaaacgccttccatgaacagccctgtaaggccccgcagtatgggaactgtctcaacaggcagccagtggcccctggtgcactcgacggtgcctgtggtgccgggattcaagcctcaaagctgaagagcacccccatgcaagggagcgggggccagctgaatttcggcctgccggtagcgccaaatgagtcagctggcagcatggtgaatggcatgcagaaccaggacccagtggggaacccaaaggggggggggggggtttttnaaaccccccccctttttggggggggnccccnttttttt

SEQ ID NO: 220229 - DNA, 561 bp, Homo sapiens
gcggccgcgcggagcggggagccgccagcctgcgccccgtccgcgggtctatgggaagttcggggacttgacagccgctgccgccgcagggcatttttggtcgaagagagctgaagtaatgagaagacatcatggaggcccagtcccacagctccacgaccactgaaaagaaaaaagttgagaattccatagtgaagtgctccactcgaacagatgtgagcgagaaagccgttgcctccagcaccacttctaatgaggatgaaagtcctggacagacttatcacagagagagaagaaacgcaatcactatgcagccacagaatgtccaggggctcagcaaagtcagtgaggaaccttcaacatcgagtgacgagagggcctcattgatcaagaaagagatccatgggtccctgccacacgtggcggagccctctgtgccgtaccgcgggacggtgtttgccatggaccccaggaatggttacatggagccccactaccgctgtgctcgaccgaggcacctccaccaccaccgtgttcaacctccccggctccccgataaca

SEQ ID NO: 220230 - DNA, 5131 bp, Homo sapiens
gcggccgcgcggagcggggagccgccagcctgcgccccgtccgcgggtctatgggaagttcggggacttgacagccgctgccgccgcagggcatttttggtcgaagagagctgaagtaatgagaagacatcatggaggcccagtcccacagctccacgaccactgaaaagaaaaaagttgagaattccatagtgaagtgctccactcgaacagatgtgagcgagaaagccgttgcctccagcaccacttctaatgaggatgaaagtcctggacagacttatcacagagagagaagaaacgcaatcactatgcagccacagaatgtccaggggctcagcaaagtcagtgaggaaccttcaacatcgagtgacgagagggcctcattgatcaagaaagagatccatgggtccctgccacacgtggcggagccctctgtgccgtaccgcgggacggtgtttgccatggaccccaggaatggttacatggagccccactaccaccctcctcatcttttccctgccttccatcctcctgtaccaattgatgccagacatcatgagggccgttaccattacgatccatctccgattcctccattgcatatgacttccgccttatctagtagccctacgtatccggacctgcccttcattaggatctccccacaccggaaccccgctgctgcttccgagtctcccttcagccctccacatccctacattaatccctacatggactatatccgctccttgcacagcagcccatcgctctccatgatctcagcaacccgtgggctgagccctacagatgcgccccatgcaggagtcagcccagcagaatactatcatcagatggccctgctaactggccagcgcagcccctatgcagacattattccctcagctgccaccgccggcacgggggccatccacatggaatatcttcatgctatggatagcaccagattctccagccccaggctgtcagccaggccgagccgaaaacgtacactgtccatatcaccactctccgatcatagctttgaccttcagaccatgataaggacgtctcccaactccttggtcacgattctcaataattcccgtagcagctcttcagcaagtggctcctatggtcacttatctgcaagtgcaatcagccctgccttgagcttcacctactcttccgcgcccgtctctctccacatgcatcagcagatcctaagccgacaacagagcttaggttcagcctttggacacagccctccactcatccaccctgccccaacttttccaacacagaggcctattccagggatccctacggttctgaaccccgtccaggtcagctccggcccttctgagtcctcacagaacaagcccacgagtgagtctgcagtgagcagcactggtgacccgatgcacaacaagaggtccaagatcaaacccgatgaagacctccccagcccaggggctcgggggcagcaggaacagcccgaaggaacaacccttgtcaaggaggaaggggacaaagatgaaagcaaacaggagcctgaagtcatctatgagacaaactgccactgggaaggctgcgcgagggagttcgacacccaagagcagcttgtgcaccatataaataacgaccatattcatggagagaagaaggagttcgtgtgcaggtggctggactgctcaagagagcagaaacccttcaaagcccagtatatgttggtagtgcatatgagaagacacacgggcgagaagcctcacaaatgcacttttgaaggttgcacaaaggcctactcgagactagaaaacttgaaaacacacttgagatctcacactggagagaaaccatacgtctgtgagcacgaaggttgcaacaaggctttctcaaatgcctctgatcgcgccaaacaccaaaacagaacgcattccaatgagaaaccatatgtgtgcaaaatcccaggctgcactaagcgttacacagacccaagctccctccggaaacatgtgaagacagtgcatggcccagaggctcatgtcaccaagaagcagcgaggggacatccatcctcggccgccacccccgagagattccggcagccattcacagtccaggtcgcctggccgaccgactcagggagcccttggtgagcagcaggacctcagcaacactacctcaaagcgggaagaatgcctccaggtgaaaaccgtcaaggcagagaagccaatgacatctcagccaagccctggtggtcagtcttcatgcagcagccaacagtcccccatcagcaactattccaacagtgggctcgagcttcctctgaccgatggaggtagtataggagacctcagtgccatcgatgaaaccccaatcatggactcaaccatttccactgcaaccacagcccttgctttgcaagccaggagaaacccggcagggaccaaatggatggagcacgtaaaactagaaaggctaaaacaagtgaatggaatgtttccgcgactgaaccccattctaccccctaaagcccctgcggtctctcctctcataggaaatggcacacagtccaacaacacctgcagcttgggtgggcccatgacgcttctcccgggcagaagcgacctctctggggtggacgtcactatgctgaacatgctcaacagaagggacagcagcgccagcaccatcagctcggcctacctgagcagccgccgctcctcagggatctcgccctgcttctccagccgccgctccagcgaggcgtcacaggccgagggccggccgcagaacgtgagcgtggccgactcctacgaccccatctccaccgacgcctcgcgccgctccagcgaagccagccagagcgacggcctgcccagcctgctcagcctcacgcccgcccagcagtaccgcctcaaggccaagtacgcggctgccacaggagggccgccgccgacgcccctgcccaacatggagaggatgagcctgaagacgcgcctggcgctgctcggggatgccctcgagcctggcgtggccctgcctccagttcatgccccgaggaggtgcagcgacgggggagcccacggctacgggcggcgccacctgcagccgcacgatgcgctgggccacggcgtgaggagggccagcgacccggtgcggacaggctccgagggcctggccctgcctcgtgtgccgcgcttcagcagcctcagcagctgcaaccccccggcgatggccacgtccgcggagaagcgcagtctcgtgcttcagaattacacgcggcccgagggcggccagtcccgaaacttccactcgtccccctgtcctcccagcatcaccgagaacgtcaccctggagtccctgaccatggacgctgatgccaacctgaacgatgaggatttcctgccggacgacgtggtgcagtatttaaattcccagaaccaagcagggtacgagcagcacttccccagcgccctcccggacgacagcaaagtgccccacgggcccggtgactttgacgcgcccgggctgccagacagccacgctggccagcagttccatgccctcgagcagccctgccccgagggcagcaaaaccgacctgcccattcagtggaacgaagtcagctccggaagcgccgacctgtcctcctccaagctcaagtgtgggccgcggcccgctgtgccgcagactcgcgcctttgggttctgcaacggcatggtcgtccacccgcagaaccccttgaggagcgggcctgctgggggctatcagaccctcggggagaacagcaacccctacggtggcccagagcacttgatgctccacaacagccccggaagtggcaccagtggaaacgccttccatgaacagccctgtaaggccccgcagtatgggaactgtctcaacaggcagccagtggcccctggtgcactcgacggtgcctgtggtgccgggattcaagcctcaaagctgaagagcacccccatgcaagggagcgggggccagctgaatttcggcctgccggtagcgccaaatgagtcagctggcagcatggtgaatggcatgcagaaccaggacccagtgggacaggggtacctggctcaccagctcctcggcgacagcatgcagcacccgggggcaggccgccccggtcagcagatgcttgggcagattagtgctacctcacacatcaacatctaccaagggccagagagctgcctgccaggggctcacggcatgggcagccagccgtcaagcttggcagttgtcaggggctaccagccatgtgccagctttgggggcagcaggcgccaggctatgccgagggacagccttgctctgcagtcaggacagctcagtgacacaagtcagacctgcagggtgaatggtatcaagatggagatgaaagggcagccccatccgctgtgctctaatctgcagaattactctggtcagttctatgaccaaaccgtgggcttcagtcagcaagacacgaaagctggttcattctctatttcagacgccagctgcctgctacaggggaccagcgccaaaaactctgagttactttccccaggtgctaatcaggtgacaagcacagtggacagcctcgacagccatgacctggaaggggtacagattgacttcgatgccatcatagacgatggggaccactccagcctgatgtcgggggccctgagcccaagtatcattcagaacctttcccatagctcctcccgcctcaccacgcctcgggcgtccctcccattcccagcgctgtccatgagcaccaccaacatggctatcggggacatgagttctttgctgacctccctagcggaagaaagcaaattccttgcagttatgcaataggctttaggaaaaaaagactgcaaccaacggaaatcaataggagttgaagagattaaactgactttgttttggctgtttttttagttctgtatgtattttagcaatctcatctcacctaactgagatgtgtttcaattatattccttttatggaaaaggactctgaaaaaccctaaagtattctagggagaaactgtcttccatttcagttttgaatcagtattgttacactcaaaccaccctctttttaaaaaaaaa

SEQ ID NO: 220231 - DNA, 4730 bp, Homo sapiens
acaagaggtccaagatcaaacccgatgaagacctccccagcccaggggctcgggggcagcaggaacagcccgaaggaacaacccttgtcaaggaggaaggggacaaagatgaaagcaaacaggagcctgaagccatctatgagacaaactgccactgggaaggctgcgcgagggagttcggcacccaagagcagcttgtgcacgacttccgccttatctagtagccctacgtatccggacctgcccttcattaggatctccccacaccggaaccccgctgctgcttccgagtctcccttcagccctccacatccctacattaatccctacatggactatatccgctccttgcacagcagcccatcgctctccatgatctcagcaacccgtgggctgagccctacagatgcgccccatgcaggagtcagcccagcagaatactatcatcagatggccctgctaactggccagcgcagcccctatgcagacattattccctcagctgccaccgccggcacgggggccatccacatggaatatcttcatgctatggatagcaccagattctccagccccaggctgtcagccaggccgagccgaaaacgtacactgtccatatcaccactctccgatcatagctttgaccttcagaccatgataaggacgtctcccaactccttggtcacgattctcaataattcccgtagcagctcttcagcaagtggctcctatggtcacttatctgcaagtgcaatcagccctgccttgagcttcacctactcttccgcgcccgtctctctccacatgcatcagcagatcctaagccgacaacagagcttaggttcagcctttggacacagccctccactcatccaccctgccccaacttttccaacacagaggcctattccagggatccctacggttctgaaccccgtccaggtcagctccggcccttctgagtcctcacagaacaagcccacgagtgagtctgcagtgagcagcactggtgacccgatgcacaacaagaggtccaagatcaaacccgatgaagacctccccagcccaggggctcgggggcagcaggaacagcccgaaggaacaacccttgtcaaggaggaaggggacaaagatgaaagcaaacaggagcctgaagtcatctatgagacaaactgccactgggaaggctgcgcgagggagttcgacacccaagagcagcttgtgcaccatataaataacgaccatattcatggagagaagaaggagttcgtgtgcaggtggctggactgctcaagagagcagaaacccttcaaagcccagtatatgttggtagtgcatatgagaagacacacgggcgagaagcctcacaaatgcacttttgaaggttgcacaaaggcctactcgagactagaaaacttgaaaacacacttgagatctcacactggagagaaaccatacgtctgtgagcacgaaggttgcaacaaggctttctcaaatgcctctgatcgcgccaaacaccaaaacagaacgcattccaatgagaaaccatatgtgtgcaaaatcccaggctgcactaagcgttacacagacccaagctccctccggaaacatgtgaagacagtgcatggcccagaggctcatgtcaccaagaagcagcgaggggacatccatcctcggccgccacccccgagagattccggcagccattcacagtccaggtcgcctggccgaccgactcagggagcccttggtgagcagcaggacctcagcaacactacctcaaagcgggaagaatgcctccaggtgaaaaccgtcaaggcagagaagccaatgacatctcagccaagccctggtggtcagtcttcatgcagcagccaacagtcccccatcagcaactattccaacagtgggctcgagcttcctctgaccgatggaggtagtataggagacctcagtgccatcgatgaaaccccaatcatggactcaaccatttccactgcaaccacagcccttgctttgcaagccaggagaaacccggcagggaccaaatggatggagcacgtaaaactagaaaggctaaaacaagtgaatggaatgtttccgcgactgaaccccattctaccccctaaagcccctgcggtctctcctctcataggaaatggcacacagtccaacaacacctgcagcttgggtgggcccatgacgcttctcccgggcagaagcgacctctctggggtggacgtcactatgctgaacatgctcaacagaagggacagcagcgccagcaccatcagctcggcctacctgagcagccgccgctcctcagggatctcgccctgcttctccagccgccgctccagcgaggcgtcacaggccgagggccggccgcagaacgtgagcgtggccgactcctacgaccccatctccaccgacgcctcgcgccgctccagcgaagccagccagagcgacggcctgcccagcctgctcagcctcacgcccgcccagcagtaccgcctcaaggccaagtacgcggctgccacaggagggccgccgccgacgcccctgcccaacatggagaggatgagcctgaagacgcgcctggcgctgctcggggatgccctcgagcctggcgtggccctgcctccagttcatgccccgaggaggtgcagcgacgggggagcccacggctacgggcggcgccacctgcagccgcacgatgcgctgggccacggcgtgaggagggccagcgacccggtgcggacaggctccgagggcctggccctgcctcgtgtgccgcgcttcagcagcctcagcagctgcaaccccccggcgatggccacgtccgcggagaagcgcagtctcgtgcttcagaattacacgcggcccgagggcggccagtcccgaaacttccactcgtccccctgtcctcccagcatcaccgagaacgtcaccctggagtccctgaccatggacgctgatgccaacctgaacgatgaggatttcctgccggacgacgtggtgcagtatttaaattcccagaaccaagcagggtacgagcagcacttccccagcgccctcccggacgacagcaaagtgccccacgggcccggtgactttgacgcgcccgggctgccagacagccacgctggccagcagttccatgccctcgagcagccctgccccgagggcagcaaaaccgacctgcccattcagtggaacgaagtcagctccggaagcgccgacctgtcctcctccaagctcaagtgtgggccgcggcccgctgtgccgcagactcgcgcctttgggttctgcaacggcatggtcgtccacccgcagaaccccttgaggagcgggcctgctgggggctatcagaccctcggggagaacagcaacccctacggtggcccagagcacttgatgctccacaacagccccggaagtggcaccagtggaaacgccttccatgaacagccctgtaaggccccgcagtatgggaactgtctcaacaggcagccagtggcccctggtgcactcgacggtgcctgtggtgccgggattcaagcctcaaagctgaagagcacccccatgcaagggagcgggggccagctgaatttcggcctgccggtagcgccaaatgagtcagctggcagcatggtgaatggcatgcagaaccaggacccagtgggacaggggtacctggctcaccagctcctcggcgacagcatgcagcacccgggggcaggccgccccggtcagcagatgcttgggcagattagtgctacctcacacatcaacatctaccaagggccagagagctgcctgccaggggctcacggcatgggcagccagccgtcaagcttggcagttgtcaggggctaccagccatgtgccagctttgggggcagcaggcgccaggctatgccgagggacagccttgctctgcagtcaggacagctcagtgacacaagtcagacctgcagggtgaatggtatcaagatggagatgaaagggcagccccatccgctgtgctctaatctgcagaattactctggtcagttctatgaccaaaccgtgggcttcagtcagcaagacacgaaagctggttcattctctatttcagacgccagctgcctgctacaggggaccagcgccaaaaactctgagttactttccccaggtgctaatcaggtgacaagcacagtggacagcctcgacagccatgacctggaaggggtacagattgacttcgatgccatcatagacgatggggaccactccagcctgatgtcgggggccctgagcccaagtatcattcagaacctttcccatagctcctcccgcctcaccacgcctcgggcgtccctcccattcccagcgctgtccatgagcaccaccaacatggctatcggggacatgagttctttgctgacctccctagcggaagaaagcaaattccttgcagttatgcaataggctttaggaaaaaaagactgcaaccaacggaaatcaataggagttgaagagattaaactgactttgttttggctgtttttttagttctgtatgtattttagcaatctcatctcacctaactgagatgtgtttcaattatattccttttatggaaaaggactctgaaaaaccctaaagtattctagggagaaactgtcttccatttcagttttgaatcagtattgttacactcaaaccaccctctttttaaaaaaaaa

SEQ ID NO: 220232 - DNA, 2470 bp, Homo sapiens
  misc_feature (2408)..(2409): n is a, c, g, or t
  misc_feature (2438)..(2438): n is a, c, g, or t
  misc_feature (2469)..(2469): n is a, c, g, or t
cgagaatgttcctagagggtctgcgcagctagagagagctcaccaagagaagttggcgcaaagtagctagccagagcctggggactgtgttaggatgaaagtcctggacagacttatcacagagagagaagaaacgcaatcactatgcagccacagaatgtccaggggctcagcaaagtcagtgaggaaccttcaacatcgagtgacgagagggcctcattgatcaagaaagagatccatgggtccctgccacacgtggcggagccctctgtgccgtaccgcgggacggtgtttgccatggaccccaggaatggttacatggagccccactaccaccctcctcatcttttccctgccttccatcctcctgtaccaattgatgccagacatcatgagggccgttaccattacgatccatctccgattcctccattgcatatgacttccgccttatctagtagccctacgtatccggacctgcccttcattaggatctccccacaccggaaccccgctgctgcttccgagtctcccttcagccctccacatccctacattaatccctacatggactatatccgctccttgcacagcagcccatcgctctccatgatctcagcaacccgtgggctgagccctacagatgcgccccatgcaggagtcagcccagcagaatactatcatcagatggccctgctaactggccagcgcagcccctatgcagacattattccctcagctgccaccgccggcacgggggccatccacatggaatatcttcatgctatggatagcaccagattctccagccccaggctgtcagccaggccgagccgaaaacgtacactgtccatatcaccactctccgatcatagctttgaccttcagaccatgataaggacgtctcccaactccttggtcacgattctcaataattcccgtagcagctcttcagcaagtggctcctatggtcacttatctgcaagtgcaatcagccctgccttgagcttcacctactcttccgcgcccgtctctctccacatgcatcagcagatcctaagccgacaacagagcttaggttcagcctttggacacagccctccactcatccaccctgccccaacttttccaacacagaggcctattccagggatccctacggttctgaaccccgtccaggtcagctccggcccttctgagtcctcacagaacaagcccacgagtgagtctgcagtgagcagcactggtgacccgatgcacaacaagaggtccaagatcaaacccgatgaagacctccccagcccaggggctcgggggcagcaggaacagcccgaaggaacaacccttgtcaaggaggaaggggacaaagatgaaagcaaacaggagcctgaagtcatctatgagacaaactgccactgggaaggctgcgcgagggagttcgacacccaagagcagcttgtgcaccatataaataacgaccatattcatggagagaagaaggagttcgtgtgcaggtggctggactgctcaagagagcagaaacccttcaaagcccagtatatgttggtagtgcatatgagaagacacacgggcgagaagcctcacaaatgcacttttgaaggttgcacaaaggcctactcgagactagaaaacttgaaaacacacttgagatctcacactggagagaaaccatacgtctgtgagcacgaaggttgcaacaaggctttctcaaatgcctctgatcgcgccaaacaccaaaacagaacgcattccaatgagaaaccatatgtgtgcaaaatcccaggctgcactaagcgttacacagacccaagctccctccggaaacatgtgaagacagtgcatggcccagaggctcatgtcaccaagaagcagcgaggggacatccatcctcggccgccacccccgagagattccggcagccattcacagtccaggtcgcctggccgaccgactcagggagcccttggtgagcagcaggacctcagcaacactacctcaaagcgggaagaatgcctccaggtgaaaaccgtcaaggcagagaagccaatgacatctcagccaagccctggtggtcagtcttcatgcagcagccaacagtcccccatcagcaactattccaacagtgggctcgagcttcctctgaccgatggaggtagtataggagacctcagtgccatcgatgaaaccccaatcatggactcaaccatttccactgcaaccacagcccttgctttgcaagccaggagaaacccggcagggaccaaatggatggagcacgtaaaactagaaaggctaaaacaagtgaatggaatgtttccgcgactgaaccccattctaccccctaaagcccctgcggtctctcctctcataggaaatgggcaccacanntccaacaaacaccttgcaacttgggggtnggggcccattgaacccttctcccccggggcna

SEQ ID NO: 220233 - DNA, 499 bp, Homo sapiens
agacagtgggaatgccacatcttactttatagtgataagaccctgtttacatagtgagatgctgcacaaacatgcattccaaagtaatcctccatttttgaaacttgggaaatctgaaaaggggacaggtcatgtggcacctgcaggtcccacagtccccgtctttaacctatgatatctgaggacctattaaaagctttaaggtcgtctgggcatggtggctcatgcctgtaatcccagcacttttgggaggccgaggcaggtggatcacctgaggttgggagttcgagacccgcctgaccaatgtggagaaaccctgtctctactaaaaacacaaaattagccaggcgtggtggcacatgcctgtaatcctagctactcaggaggctgaggcaggagaatcgcttgaaccctggaggcggaggttgcagtgaaccaagatcatgccattgcactccagcctgggtaacaagagtgaaactccatctcaaaaaaaaaa

SEQ ID NO: 220234 - DNA, 196 bp, Homo sapiens
ttccaggtaataggtagataaggacaaaaggttgcattcttttgagtttctgataagcctttccaaaggaggagatatgcatttatctcagtgagcagaaggatgactttgagttctgtctgtcctttgtccacaaggaaattccttgtgagggaggtatgtaacatttttatctttacagctatcatttctagga

SEQ ID NO: 220235 - DNA, 428 bp, Homo sapiens
aagggatacttggaaatgttgtcatgtgcgagttgtaaattttcttttttaatctggtggaaaattggaatggcatttctctgttttgcccagctatgccaaaaatcttcttggtcccacataggcctaggaaggatgtagatggcaatcacaaaacaaacaaaaaatgagcaaacaaatagaagacctcaagcaacattttctcttgttaataggttagcaacctcatatttgtatattaaagagatctgcattatgttaggttgatttcatataatttcagctaagtagatctagtttaaggtcagtgttttattgaatcttgtattttagcttcagtatattaatttccttagctgagggactcctactgaaggagaaaagtgttcctgttaaaattttgaaataaaagtttctgttttactgta

SEQ ID NO: 220236 - DNA, 533 bp, Homo sapiens
agctatcttacaattgaggaaactgacagagcttagggtacacagctggtaactgctagggcctcagtttaaatttgtgtccagattccatgttctttccactgaactgtactccctctattactgaaaatacgtcttgtttgggatattagttcccaaacaccaatttgagaaacctctccctggtccacaggaaaatgagagaaattagagcaatgtgattgttttttcataaatctaactgtactcattttaaaggatcatggagattattgctgttttagatgtttaaaatactgtctttccacacttgtaaaaaatgtagagtcagtttttttaaaatgacttttaaaagcctaatcaggcaaaacaggttgagaacttgttattgagctgtcttaattgatttaaacgttttatatggaaataatttcaaatttacagaaaatttgcaagcataagaatagtgcaaagaacatctgtatgtcctttaaaattcaactattattcagattttaccctcttaacatttt

SEQ ID NO: 220237 - DNA, 681 bp, Homo sapiens
gggtcaaggaaatcacctcatcactcttctttgatgggcagattcctatctcttagtttaccattttccttactaattccctcagctccatccaatgtgcattcttgtgtcaaattgcatgttcatgagtatattacatgttcctgttgtgagtatgcaggggttaccatgggatgacccctgtgctatgaacttggaacctcaagaaattagattgccttttaagaatgaatcagagaagaaatacaggaaaccactttaaataacaaatgtgttcctaggatagcaagatttgactggaccctgactgacgagattactatacctaaagaaagaacgcattcgtgagaaggagagttctgctcagttatgaacaaagcaactgcattcaataaatatttgttgagtacctactgtgttccagcagagagctcacattctagctggggagacagaaaacaaataagtgcatttataattggatgtctgcttgtgatatgtgtgtatcccaggcagagggtccacagaacaaacaacagcatctagtgtggctcggagatgtgctcactcaagttctatgccagatttgagaagcctgcttgactctaacatcccaaatctgcatttccagcacttgggtgacattttgacctacctaatttctctcggaccaatttctcc

SEQ ID NO: 220238 - DNA, 470 bp, Homo sapiens
tgagatgaggtctcattatgttgcccaggctggtctcgaactcctgggctcaagggatctgcccaccttggcctcccaaactgttagggtcataagcatgaggcaccatgcccagcacttaacacgatttgaaataagaatcactcaaagcatttgctgcctactgtggactccccagcctgggctgtaagctctggaggcagggatgatacctgtcttgctcaccacgacacccctacacctaacacaatgcctggactatagcttcaagtgagtagaaacttacccagcaaataaatgaaattaagacaaccctagctttctctactttgcgtgtattcccctcaattcatcacttccttatttttccttaagaggaaggcaggaagtctgagccccaacaatgtctctcaaacccacaccaccctggggggccaccccaacaggacgaggtggacgtgtcaacagtg

SEQ ID NO: 220239 - DNA, 445 bp, Homo sapiens
atcaattgtcaattagaatgtgctaatcatcggcattggaacaacagggaaactaaacgtgggggcagggtataagggctcttaaataaatgcatatctaagcaccaataaataatttttacagataccttgcataaaatcagcatttcagtttttttaaatttactattaaaaatgcctgtatagaaaatcagattattttgtgatctcttaaatggcagcaagttaattaaaagttcagtgtattcaattgtcatctttttggaagagattggatttttaattaataaattaacacattaaatataacttttcttaatataaattgttaaaataaattaaaatttaaaatatggtattgtttctcctatgctgatgtaaattttcttaatataaattgttaaaataaattaataaaaatttaaagtatggtattgtttctcct

SEQ ID NO: 220240 - DNA, 406 bp, Homo sapiens
tttcagaaagtaaaggttgatagaatccactggtcttgaggagcagactttgcagaagagagtcttatgaatgagggagaaggggatactgaactttacaggatttctaggctcacagggacactcccctagagatgaacaaggctgactggaggtgatgttaaaacccagctaagaaggcagccacagacctctggcctctcacctgtggctggcccagaagttctcagcccgtgttccacaagagccttgaagacctgaatgaaggacatgaagtcagggccccactatattctcctttctgcagggccctcaacatagctgtgactttatcctcttctctcaccaccaagaaggcccattaagatgtgaatgagtggaagttttattaaaggatgagctttga

SEQ ID NO: 220241 - DNA, 388 bp, Homo sapiens
aaatacgtgctagtttcacttgagaatgtccttcatgaagcagtatagaatattaattttattaacctcacactttgggtaccaatctttttaatattctgtgtgacaaagcaggaagtacgtgtaaagcactttgactgcataccgaaatacagcaattgcctcaaggaaaagcactcgtgcagtgctttgagtaggagttgaaactagctgctttttttaagggattccatttttacctgaaagaatgacatattgacaaactacgtgttcagacttgagtgtttggctgatgtcttctcaaaaataaaccaagcgagagtctatcacttcacagaaaacaacagacagtatttgttgccaatggtaaaatttgagctttcaagca

SEQ ID NO: 220242 - DNA, 446 bp, Homo sapiens
ttttgatattatgatacatttattgggatgtaaccccatcctatgttgtggagtacatatatgtatatattggttctatttctctggaggaccctaacaagtacagactgagagagcggctttgtcaaggtccagaagccaagaaaagcaaattgatggagtgagtatagaaattgaaagcataggtgttgcatgcagctcggcctgtgttagaacccggctctgtcatttaatctctctgagtcttaatttactcctttgtaaaatggaaaaaataatagtgcctgaaccaaagggtaatgttaggatagtgcctgactcttggcaagtgcttgatgaatgatcaatattattattactattgttgttattattactaagtcttcctaagaagagtcatgggctctcagagaacctttgctttcttctcctacttacttgaaatt

SEQ ID NO: 220243 - DNA, 449 bp, Homo sapiens
tgaattggaaccatgaaaccagcagcacagagaacctgggaatcagagctgtcagggcctggtgttgatccgagagccctggtcctgtgccagcggagccattgggcgatactgggagagctgtcatgagcagcatggcatcagcagggacacctgggcttgttctcggcttccttaccctgtgatgacgtcccaggcaaagttgcacagccgaaggttccccatgaactgacttctgcctgtcagatgctatgtggggacaggtctgatttaggagcaaaggtggaggtcagacagagctgggtcctggccctgcccctgacaggggcaaagtctcctcactctgggtctaggacttagggtaagggctgttccaagggcagaagtcaggcttaaagtgcacagccagcgttgtggtacttaggtttgttgctggtgttaggattgct

SEQ ID NO: 220244 - DNA, 309 bp, Homo sapiens
tggatagaggctgctttacacctctgaggcctcaagcaggattcaccatgatgtcatctgcatccctccaaagtcacctgcttttgtcttattgcataacttgtttcaaatgttctgccacaacctcccccagcccagacatattcatgatgttcttttatgattagtcagtcaccacgggtagaatgtgtgttccagtgccacatcagggatgacttatgcaaacccaagatggccctttggcttagtccttcttcgcccagtgtaagagtctgtcttgtgcctggacactgaagactgggggagggc

SEQ ID NO: 220245 - DNA, 489 bp, Homo sapiens
ggcgctcgcctccgctccaggccagaagccgcagcccgcgcgccaggcacagctcccccgaccggtctcaggagttcggccacctccccggggaagagtgggactcagccaggcgccgggccggcctctaggagcctgcgccagagcaaagggcatccggcacccgacccgggccaggcccttggactagggcggcacggaacctagcgcctgggcaggtccaaccctgcgcactgcccctcagcctcgtgaacccttcgcctccacgacccccggaacccatcccagcaagtgcggcagtgacctcgggtctcaccgcccgggggccaaacacctcggccaccccggggccccagaagggccgagggtcagccgagcggacgaaccacattcccaaggacaagcagcgggtggcagcaccgcccccgcccgagcgccctcgggtccctttctgccggggctccagtggcttgagtgtcccgacccctc

SEQ ID NO: 220246 - DNA, 528 bp, Homo sapiens
actgctatcaggttaaaattattggatcccagttgtgcatgttcattaatgacttctcttatttatgtctcactgtaattttgtccttttttattcaacttttgatatacttcttagagttaattcttattcctagaataaccccttcttgttgtgttgatatctgtcactgaatttccccatattatttaataataatctgttttatcttattctgcaactagacagttaatttccttagtgtgcctctcgtcttctttatcaatgtatgcccagtgcctgtagtgtagataatttgtgttgagctttaaagttcataaaattattttcttttcttcatttgttccctaccaaaattcttttagagtaaatataattcctattttatagatggagaaatgagttttaagtggcttgcccatggcagttagtaactaagagataagttctgttttgttttgtttttttcctttaaggtttattgagttataatctacaaagaataaaattaaccttttttagcagaca

SEQ ID NO: 220247 - DNA, 490 bp, Homo sapiens
tcgtcactcgctgactcacccagagcaacatatcctgcaagctccattcatcacaactgccttatacagttgtaccattttttatttttgataccatattttttactgtactttttctatgtttcaatacgtttagataaaaatacctacctttatgttacaattacctacagtattcatcatagtaattggccacaccatatagcctagatgtgtagtaggctataccatctaggtttgtctatgtatactctgatgttcacacaaccatgattatctcctaatgacgcatttctgaatgtatccccatcataaaatgacacgtgactttattctgaagggagaacagacaattttttgcagagagaattcagatacgtggtatgagagaaagatgagtcaagaactgcaagcttttaagctaggtaactggaaagacagaattgcatttcggaaaagactaagatgcagctttgaggtaatctgaggg

SEQ ID NO: 220248 - DNA, 583 bp, Homo sapiens
accaatttgatttcattcttcccccttttcttggacggaatgaggtattagtatgtttcatacaacacattaaagacaatagtgtcaccaaggttggtgacaggttgaaaaatcatgacttatacacagataaaaagtaaatgtttaaaattaaacttcagtaacagaaactacggataatgttgcactgcattcatttccttcacttcttgtcatacaagaggttatacaaacttatttgtttaggataaaattcagtgagataatataaatcatcacaggaaatgaaacatgttataaatacgtggtctctggttctctgttctatctctagcacctggaaccatgtctagcataattggcactccataaatatttattaaatgaatgagataaatgaatgaatgagtgaaatcaacatttcttaaatttcagaaaaaatttcacctaccttggagactacatcaaaatatttcttttcacccataccaaacatcacaatcatttcactgaataactatctctgaaacaagttcacagagacattgtgtgaaatcaagtgtaattttttaggccatgaatc

SEQ ID NO: 220249 - DNA, 682 bp, Homo sapiens
gatgctgggtttgagtttggtagtcatagttttaagggcgaaggaacctaaggtagctggggcaatttccaggaaagaaaacttggacccaacctctggagactaaggggttcagggggaactttgatggggagtgcacatctgacttggaggtattgaggatgtcgattttctcccagttttgctacttcctcccagccagacgctgacaaaaaaatccccagacgtttcagttaggagggcctcccagatgtgaggttttgggggtggagtatttgagtttggtagactacctctttgccttcagagtttcttcttttctttcttccccatcacacagctagcctattacctcatattttgggggtgcagggagcaggtagacaaacttgctaaggattgggttgttaccagggcctaagaatggctggatggggccgggcgtggtggctcatgcctgtaatcccagcactttgggaggccgaggtgggtgtatcacctgaggtcaggaattcaagaccagcctggccaacatggtgaaaccccgtctctactaaaaatacaaaaattagccgggcgtcgtggcacatgcctgtaatcccagctgcttgggcggctgaggcaggagaatcgcttgaacccagaaggcggaggttgcagtgagccaagattgcgccattgc

SEQ ID NO: 220250 - DNA, 405 bp, Homo sapiens
tctgcattttgaacacactttaagtaattattatgcagattgaagtgtgagagctgctgatttagaaactgcagttatcaagtaggattatttttttcttttaacaggtagttcatattgcatttttacagttaatatttctgtatattttaggaaaacgtgctctttgtatttaagcagggatgattcagacacatgtagattgctattttgtctcaaaatggtgtatgtacagtgtataaaaatatgatatttattacgttgggctagtcattttatttgtgtgtcaaattttatgatccttgtgactactttttagccagaacagattatcaccaaaataaatttctccaattagttaccttggatttatagaaatataaataaatgttggaatattcttct

SEQ ID NO: 220251 - DNA, 597 bp, Homo sapiens
  misc_feature (589)..(589): n is a, c, g, or t
tccactgctgagtgaatttcttcatatttgatgtggtaccaatggttccatgcgttcactgttaactcaataaatcttcacaatgcactttcagaaagtgaggaccaaagaagagaaagaagacaacttacccaaggcttcgcagtgccagaaacagtctaactccaaagactatgctctttcattacaccatgctgttttgtacttacaggacactttttttttgagacaggttctcacttggtcgtccaggctggagagcagtggtacaatcacaactcactgcggcctcgaactcctgggctcaggtgattctcccaccttagcctcccaggtagctgggaccacaggcatgtgtcactacacccagctatattttgtattttttgtcgagacggattttcatcatgtggcccaggctggtctcgaactcctggactcaagcaatcctcctgcctcggcctctcaaagtgcttggaattacaggcatgagacactgctcctggccgataactattcttattgctataaatctggtaaagaatatgactaatttgtcatctaaaaagccaaaaaaatattagacagnctttaatt

SEQ ID NO: 220252 - DNA, 217 bp, Homo sapiens
tccagggaggttttctttatagaatttacaaggtctgtgttactatattttcctggttttcttcctaccattcttggcctctcttaattttcttctgggccactttcacattttgttctccagcctttcttattttccacactgtttcttgggtggtctccactttcatggctgaacttaccaggtatgtgctaatgatgctcatacctacttctaa

SEQ ID NO: 220253 - DNA, 504 bp, Homo sapiens
actatggaattggacacagcaagtctaaaagatcttactaggctgggcacggtggctcacgcctataatcccagcactttgggaagctgaggcgggtggatcacctgaggtcatgagtttgagaccagcctggccaatatggtgaaaccccatctctacctaaaatacaaaaattacctgcgcatggtgacacacgcctgtaattccagctattgaggaagctaaggcaggagaataggttgaacctgggaggcggaggttgcagtgagctgagattgcgccactgcactccagcctgggccacagagtgagactccaactccataaacaaaacaataaaataaaataaaataaaataaaataaaagattgtattaaaccatgttctagccaatacctggccatgggagaaagacaactggaagttattggaaactttgcttcctaatacaaaaatgtattcaaattctcttgctttagttttctctttaatttacataatagg

SEQ ID NO: 220254 - DNA, 277 bp, Homo sapiens
gaaagatggctgcaccattttccatgaactattaggataggctggtgagaaacagggaaatacttccaatgactacggattagcagatttccttcctgctgagctgccagatctgtaagttgcaatgtaagaccagcctaaccaaaaacaaaataaaataaccctacaaattattttggagtggcaacattatattagggatttctttctttttttttttttttttttctgagatggagttttgctcttgttccccatggagttttgctcttgttcc

SEQ ID NO: 220255 - DNA, 415 bp, Homo sapiens
cggtgggatattgatgcagtgatgctgatgatggtggtgatggtgatgatggtggtgatggatgcaacaactgcattcagcagtttacttcctgtggccaaatggctgagctttgcggaacacctgccttgttccagcaggtgttgtgcttatcttatctcctcctcagcccaagcccacaatgcaggcacaatcatccacattttacaaatgaggacactgaggtgtagagtcgtgagtgaccctttctgaggaccctccttgggaagaggcagaggcgggactcggacccaggctgggggctctggtgccctcagtagatgtctaggccaatcctttgcctctcaagctttcctggagtcatgatgtgcctgtgcagggtggacagcggccactaaggagactatctctggtc

SEQ ID NO: 220256 - DNA, 457 bp, Homo sapiens
atgatgctgatgatggtggtgatgttgatgaaggcagtgatgctgttgatggcggtgatactgatgatggcggtgatgctgatgatggcggtgggatattgataacagcagtgatgctgatgatggcagtgatactgatgatagcagtgatgctgatgatggcggtgatgctgatgatggtgatgatggcagtgatattgatgatggtggtgatgctgctgatggctgtgatgctgctgatggctgtgatgctgttgatggtggtgatgttgatggcggtgatgctgtttatggcagtgatgctgttgatggtggtgggatattgataacagcagtgatgctgatgatggtggtgatgctgttgatggcagtgatgctgttgatggcaatgatactgatgatggtggtgatgctgatgatggtgatgatgctgatgatggtggtgatgttgatgaag

SEQ ID NO: 220257 - DNA, 278 bp, Homo sapiens
aaatttaattgattcaaaagaaatacagtaagtgagcgatagccataaaaatacattaggataaaattacataagtaaaataatatacatatgtgttcatgaataaaaagaggaataatacaaaaatgtttaaatggataatggtggatatcaaaccaacatggcatttagatcccgttacacacttttaaaagcataatgtaatcattttattttaaatgtcagtgtttagaattcaatggaaatgatgtctttcagaacaaattaaacttatgatg

SEQ ID NO: 220258 - DNA, 455 bp, Homo sapiens
acgaggggagctcagaaccctacttcctgagtgtgggatgtgcgcagctatgtggttccgaagagttcaagacgaaaagagggagaaagagtaacttcccagcagaggacctgacgacctgagccaggcaatcgaggtcagcaccgatggcgaccaggcgtgtagactcgtgccctgggtaaggcgtgaccgggatggcactttacctctgtagtcctcctccccaagcacatcctccccactccaatcatgagaaggacgtcagagttccaacagaggcttccagtatacctgaccagtagccctcaaaactgtcaaagtcatcaaaaataagggagctctgagaagctgtcacagccaagaggagctgaaggagacaggatgactgaatcctagaacagaagaatatattaggcaaaaactgtggaaacctgaataaactgtgcatagttaat

SEQ ID NO: 220259 - DNA, 250 bp, Homo sapiens
atgagcctccatgcccagcaaaaaaaaatgcattttttttttccatagagatagggtcttgctaccttgcccaagacagacctcaaactcctggccccaagggatcctgccaccccaagtgatcctgctgccttggtctctcaaagcactactgtgcctggcctattttctttataataatgctaggaataaggaactaaaaaataaaagacatagaaaatgttctagtagattctggcctccctggaaa

SEQ ID NO: 220260 - DNA, 451 bp, Homo sapiens
cccactattacttcaaaattaatcaggtttaaattttagatcagaatcattgcccactgttttcatttagaaattgtccaaaagaccatagatacattctggtgattccttacattttacagttcctacgttagcctctcaaggccacaagttgccgccacgtcttcactgaatggctttctcagtgctgaataccaacagccgtattacagtatcaaggattctgtcaggtagggtttacagaccagactgttcatgcagcaaggtgctaactcaggcgtcaacgttctacttgtattttctgaccaacttgcagaagtgagcaatcttcttaaaatgccatttctgttggcagggaagaatgaaacggcacacatcctagcattctaagaacacctggtttaaataaaatccagtgatgatgggctctttcacattgtttaaggggaaa

SEQ ID NO: 220261 - DNA, 738 bp, Homo sapiens
aactcctgaccacttattcactggtcaactcaagcaaataatatttgtgtttgtccaattaacaaagagcaaaaaggggtggtaaaatacatcctgagccttaggcatcaggagaagtttgcacgtggaactgctgttctcaacgttgcttgctacggtagattgcagaaatggtggctgttttcctcgctgctgctaggcttgacatttttcagctcttaccatcaaaaggtagagtcttatttttctacctcttgcatgcagcaggccttctgattgtgttggccagtaggatgagttagaagtggcattgtggaagtcatttctgagctcagacctcaggaggtttctgcacacttctgtctttctcttggaaccttccacgttaccatgtgaacaagcatgggtgaaagtatgaaatatgagaaattaccagggaggtcttcccagtgaaggccattcttgaccaacgagacccaactaacctggtagttgggacagatgtgtgatcccagcagaacccagaattatgagctaaatcgatggctattgttttaacccaaccaagtttggggatgatttgttacgtaacagctgactgatacccttcatgttacacaagttcgtgagtaacaaaaaagtagattgtcactaagtatttttgaagagataaacacatccttttaatttatcttttattgagacatcttatttttttctttacctgagaatcgagct

SEQ ID NO: 220262 - DNA, 816 bp, Homo sapiens
cgtccggggcaagtccgagagcggggagggcgtttcctggggtaactccacctggggtcttgtcgaagttgccgcatctccgccggaccgcacgggaacgacgtgcccacactcggaggaaggggttggcgctgagcgagtttaaagggttccttttgaaagcaggaagtttgaagtgacgttgcatcagcaacagagcatgcagtttcaggtgctctcgggacagctttcagtttctcagaacaagtctaagcctcaccgcagtaataacttttattagaggacaaaaaatccgccaaagtaaaccctttctgtccaacccctaaaaacctttggataaacgtttacaagaaacggatcacagccttatttgtttttctaaactgagcataaactcttttgaagactcagcgttactgtcaaaatgaatgagtgcctgcctagttatgattcaattatcgaggtgtttgggtctctgcagtacactcagtgactcccaggcttttcttttttctctttgaaattgcttattagaaggctttatctaatttctcacagttgtgtgtctttttgaggtagttctaataaactttaaaggcttctggtttgctgcaggcctgccgtcgctgtggaaagcaagtattctttcaaagaagaatagaagtgcattggtttctaaataatcccaggacgctaggatcagcatcacttgggaacttcttggaaatgcacattttggggtcttatcccaaacttactgaatcagaaatatattttaacaagccttccagttgataccaatgcacctggacgcta

SEQ ID NO: 220263 - DNA, 449 bp, Homo sapiens
agagaaccaagtaattatttatgacagtggaaatataaatagaaccacagttcatgacttaggtaataacccatccccagctatggacataagtctagataacatttctatttaggagactggtatcattgtggcacataccagagtcaccctgccagtctcaggagcagatcagtggaacagatgatggttatttttaggcataggtttatactgataaaccactaaatggcacacccttaaaagctatttcagtttagtaaccagggccagaaaataatgttcctatagcaacaaaaatagttgtagaattcatccaccagaaatatggcccagcttcactgataagtgactggatgttgctatatcctcagaaattgctgcacgtaagttaaagagtaggaagttggaggatatgacagaatacagcttgggcttggactttgtcc

SEQ ID NO: 220264 - DNA, 1087 bp, Homo sapiens
  misc_feature (1049)..(1049): n is a, c, g, or t
agcaagcacggaaatttcaggtgtaaaagggctctggcccagaacctaagagatctggctccagatcttggatctgcctctgacttacttgatcaatttggcagtgtcatcaggccaggcaccgtggctcacgcctgtaatcccagcattttgggaggctgaggtggatggatcacctgaggtcaggagttcgagaccagccttgccaacatggtgaaaccccgactctactaaaaatacaaaaattagctggacgtggtggcacgcgcctgtaatcccagctactcgggaggctgaggcaggagaatcgcttgaacccagaaggcagaggttgcagtgagctgagatcgtgccactgcactccagcctaagcgacagagtgagactttctgtcaaaaaagaaaaaaaaatggcagtgttgcttaactgtagtttcagttacctcacatttttaaaaaagggggtggggtgaagaagagctatgagacaatctccacaattcccagatcccaaggatcatgaggaggtgcatggactgactccttcaagtcatcaaagttccacgaagccgtggtagctgctcagagtgtcagccaaggaagtcaccttcttgtgaggagcaattacagcagagtacagaatctggaaaagggtttggatatcaataccaatccaatgcccctagtttatagatcaggccactgaagcccagaggggtgaaatgatttgcttttgccactaagtagccactaactttggccaggcaggaaaccagatctcctaactcccctccagtgctcttgctgttagctcactgcctctcattgaagtcagtacacacaaacatacaaatcacacacatatacattccaagaacctcgcaatggaaaatcattttagagcaggggaagtttgggtttctctaatgtgccctcgtgccgaattcggcacgaggggctgcttcccaactccacctccagaatcaaggatattcctccaagcccagctcgaatgcttgatctgcctggagccttcctggtcatccttgngtgacctggagctggtgctgttagagcacttctgctct

SEQ ID NO: 220265 - DNA, 409 bp, Homo sapiens
tcacattgcagctactccctcccacaccattggcagacagttctaaccaatcaagcatccttcccttctgaacccagatataagccttttcaatagcagtctacactgggctaccaatgactggagtattcatatggcacaaaaccagtagaactttgatctattagtagagaatcactacacattttcgtatttcaaatactgtatgcttctcatagttaatgtgtacattcattgttattttatttttatttttactctccttccgcaaaagccgctattacaatcaatggcctattggagtcgatattcatccaccttgtttactcaggactcctgccatcaccagctcaccccacacgcatgcctattgcttgccttggctcactcatgcttgcttcccagatcc

SEQ ID NO: 220266 - DNA, 485 bp, Homo sapiens
gccaggcgtggtggcaggcacctgtaatcccagctactcgggagtctgaggcggggaattgcctgaacccaggaggcagaggttgcagtgaactgagatcgtgccactgcactccagcctgcatgagagagtaagtctctgtctcaaaaaaaaaaaaaaaaaaaaaaactaccaatatgaaattatcatggtcacactatcacacgtaactttgaaggtttgatgacccataacttcatagatctgtgtggatcccaggtgatttttgaggaatatcattggccttctttcaggactgtggccttctacgtgggaatcttccctgattgggcctgtaattttcataggaaaatgtctatttctattctcagcacagctaacttagtaaagcctatgagtttccccccactcaaccaagcaataacaccttcgcataccctcttacctcactgccacttaaaactcaaaggagaaacttgttattg

SEQ ID NO: 220267 - DNA, 471 bp, Homo sapiens
tcagttgctattaattttcattttatcaaacacagactgctataagattaaggtggattatctcagagtgtttcaaactctaataaatctgggtgagtattttggcctcattggacaaaaagtttcttcatttgtatttcaagtaaaatggagggttttgtattctgtctaccagaagaaaagctctagcctgggaacaattcctcacatgctcaaccaaatttctcatctcaaatctgttcctactcaattcttacatttccaggcagtgaatccaacttatagatcaccccaagtctgtttttgcactttcttaaaaagggtggaaggggtagatggaagagataaaatgcgaggctttgctgttagaccttccatttattcaacacattttagccaagtctcacttggatctgggcacagaactagatgttgggaagggggcagcaatggagaaggcctcagaaatca

SEQ ID NO: 220268 - DNA, 640 bp, Homo sapiens
tagggagtactcagtggcaagtccggtattgaagttgggcctgtctaactacaaagcttgtactgtgtgactcaatcaagctggcctctggtgagcacatgtgggaggccggctccttgcaaactgccctgtccatgtgttactgaggacaactgtaaacccaagtacatgtctcctaagccatctcctgactttacagagaaatgactgcagcccagagaggggaggtgacttggtataggccacatagccagggaacccccagggaatcaaacagaaatgagacctggaattactttgtactgggggctgcagctcaggaccactgaagtgacagtgcattttctaccactgttgtcaatcactctgttgagcgttctttgcagcccacagatgtccaagggttgccaggggcatagagccctgccttgggtgggaccaggcccacgcggggtgtcggcctaatccaaggagggagttccctgccttggtaagttggtgcaagacccggagctcttatgcatacacccaacaggtggtgatcccccgagtccagcccacccgcccagcagtgcgcaggcagccaggggttcaaggacccacccacatccgtgcctgacaagtctcccctccacccgac

SEQ ID NO: 220269 - DNA, 714 bp, Homo sapiens
gactacaggtgcccgccaccacgcccagctaattttttgtatttttagtagagatggggtttcaccatgtagccaggatggtctcgatctcctgaccttgtgatccgcccacctcggcctccccaagtgctgggattacaggcgtgagccacggcgcccagccttcacatttcatttcttgtacatcgttttgttttcccaggtgttaatgattatccctttttttcacttaattattaatgttatgagttagtaaacacctgcctgtactctgccactttttttgtaaataaagttttgttgtaacacagccatgctcattcattgatagattgttttatgcctgctttcacactagagcagagttaaatagttatgatagagacagatggcttgcaaagctgaaaatacttagcctgaaatattttctagctgactttttgtagtttgctgactcctgatctgtgtacctgttggtagttcatcagtagactatctattagaagtataaatcacttctccctaccttcaaggactttgtataatcttatgagtttccctttttttctcctcttgttaattaatatccctgttgttacccttcattcttcttttccgatttggattagtagttctgtagtcctgtttcacagtagtcatcttggggattctctttgcttttcccttcttgttggatccctcatttctcatttc

SEQ ID NO: 220270 - DNA, 752 bp, Homo sapiens
cttaaaaaacagcaatgaccctcccaatccctccgctataaaaggtgttttgaacttctataagttttgccatcaggtgtgtatttcatattgttttctggtatccatacctaaattccttctgaaggactatcttcctttacgtgctaagtctatgagcttctcagtggaactgacacttccagtatgtaaatctctagcctaactcatcagagtatagcatcccactcaccaaaataattgattcaggtgactctatgagagtcaatgaaactttgctgggacatctatagaagagaatctccttcttttctgttggacttaagcctgtgaacctccaccagccacattaccaccacagagcataataccatgcaagaatagacccatgcacagatgaagcagagagacaaagagagaaaatgggtcttggagtcatcatttgaaccccaatctagacatatctatagccagctgttcccttggacttttcaattatggaaactgttaaatgctgtttttacttaagccctttgattatttgatcacttggaaaagatgttatcctacctaatactcataaaagcatcgtttagcatggtgcattgagcccttgaggatgtagcttctgcaaacttttacagtcacatcttcaaaagtcacccacgtgtaactattatccaagaatatgcagataactgcaattctagggtactttgccctagggtgcctcaccttttcaggttcagctc

SEQ ID NO: 220271 - DNA, 596 bp, Homo sapiens
aggcggaagcacagtcgctctgaggtcgcccgtggccgcaggtgcctcagcccagccgcgcgccttggcccttggccgcctactcctaccgccccggccttgggcggccctgggcctgctgcgggcgcggcgctgcccgaccagagcttcctgtggaacgtcttccagagctgccacctggcaccgccccggacgatcctcctcgtcctcgactcgcaggtcgctcctgacggttcttttgactgaaggatgcgaaggaagatgactgtggaccaggatccgtatatcagggaattaggatcgatatggacttgaagccactttgatccctgatttatcgatttgagtgtgtatgtctcttcccagctatctctgagtaagctttctcatcctgaagattacgggggactcaatatgtaccagccccgagagcaagtggaagcatgcatgagttatgtatggaggcaaatacaataacaactgcaagtctgggaaaaggtctctagacactaaaacatggcaatgccaagtcagtgatatgtaggtcaggaaatgctcactgctacctctagtgcagtaagactgacctggataca

SEQ ID NO: 220272 - DNA, 397 bp, Homo sapiens
aggcggaagcacagtcgctctgaggtcgcccgtggccgcaggtgcctcagcccagccgcgcgccttggcccttggccgcctactcctaccgccccggccttgggcggccctgggcctgctgcgggcgcggcgctgcccgaccagagcttcctgtggaacgtcttccagagctgccacctggcaccgccccggcacctcccgcctcccccgcagctgccccggacccgtgtcccgacccccgcggccaaccccgttccctgccggttgccccgcggcctcccccgtcacctgccgggtccccagcggcctcccccgtcccctgccccgacctccgccgtctcccccgcccctgcccggacccccgcgggcgcccccgaaccctaccccgaccgacgcg

SEQ ID NO: 220273 - DNA, 344 bp, Homo sapiens
taaaagaagttctgagctccttggagaatgtttataaaataagacctgtgctcaatgatcaagtaaaatggaaatttgacattttttaaagtgttaaacacctttaatgtaatttgacttactgcagaaacccataacagggaatttttaattcaaaatatatgctaattataattttgttaaactttcatttatgcatattagagctacattatttataaatatatattaaatttatattatattagatgcttattcttcttgtttgaataaatatatcactttaaatcatgccatccagtttttattcagcagtatatttgaggaatataagtttttagctg

SEQ ID NO: 220274 - DNA, 380 bp, Homo sapiens
tggggaaagaggaagtggggagggagtgctcccacacaccactggtgagcatggagactggcacggctccagaagcaacttgcccacgtgtaggaaaaccagacactcctcagaacccaaactaactacaaccctttttaaggcactgattcttttttaggacaatatctttacttaaagaatagtacagaacataggccaggattaatgtagaaaatatcttaatacttatcacagtgaaacacaaggaaaaattaaatgtccaacagcaggggaggttttgctcatctcttgaactgaatattatatagccattcaaatgatgttctcaagaaatctatttcaaaaaattaataaaattggaaaagatgtatatagaa

SEQ ID NO: 220275 - DNA, 233 bp, Homo sapiens
aagcttggaggtgggaatgatcagggcaatttgggggctagcccagcttagttggagaattcatactgaaatagtggagtgtaaacctggaaaggtattaggagccatttcattcagtacttcaacaaccagactatctggttagcctttataaccaaccaggaaactttataatgagtaaaggattaggttaagcagtttgttttgttttgttttgttttgagacagtcttg

SEQ ID NO: 220276 - DNA, 406 bp, Homo sapiens
gaaatgaagtttggggacgtaaaaagcaatataccttctgaactaaaagcaaaatagaaaatggaagagatttcttgtttatgcacataaccataaataattctgaggctgtgcatacatgaagtaacctagtccccgtatttactttcaccattcttagctacatgtctgggggtggggggcggaaagtcaaggacattacaaactagtttacactatgtaaattacctaagatagtatcaatcaggatttgcccaataaagtttagctgcattcacatcaaggaaatattttttaaacaatgatatactttagtttgttaaacgtgtactttgcagtgtttagaacaatatcatgtattaaatagacagtaaataaatgtttatggaattgaattacaggacaa

SEQ ID NO: 220277 - DNA, 391 bp, Homo sapiens
tcctcactgacgtgtagcaaaaggaccactctgccaatcaccaacaggccttcatcttggtagaagtctggagatttattctctggagatgataaaagcaaggtgtttccaccaaaacgagaagtaagctaagacaagatccacgaagtaagagttgcaacaaaaaaagcaaggcaagaaccatcccaaagcctcagctgcgcggtcatcatcagagggggatctgttcagactggagcagagctgaaggcttcagggacacttcaagaggattaagtaattgcaaacctaataacaaccattgcctcttctatttattgagtgttcattgtgtgtcagacacagttctaagcatgtgtgtattaacgattaaatcctgatagtagcccta

SEQ ID NO: 220278 - DNA, 519 bp, Homo sapiens
ttatacataccgacatagttacacttctacaaaggcctttggtaaactgacagtaaatatgacttttagcttatgggattggcttacagcactatccgtcatttgtatgtctctttaccttggccactaagttctattttgcctactaactcttcccaaagcagtatagattcagataatataatgggcactcacacaacttttaactactattacttctagattccttaaattaggcctcggttttttggagagaagaaacctggagagcagggtacgtgatgtgattatttctctggtagattagtcctgagaccacagtgttctgacagtcactgggctcctcagtggaccgctggctataaggacttgggagctggagtaggagcagatggcagcaggtgattctccgttggaaacagggagtataaacattttctgcaagtctgctcaagagccctgcctcatttatcttgaatgcagtgtgtcttctaaggaaataaaataaatacagcctgg

SEQ ID NO: 220279 - DNA, 346 bp, Homo sapiens
atatccagcatggattatttgtaatggcaaagatgatactaagcctgttcacttgcacaataatacagtagggctgacctagtaatgcaccctctcccctaattttccttttatctggaagcagataaaaatgacactactgaaccagaggtgagcacaattgtcatcaattttctaaaaaacagaccttaatggtataggatggaatgaatggaagaatatctagctatagagaacaatatagggagatatctttattgttttgtactgatttttttgtttccctttaacatttttgttatataggtaatatatcttcagtgtagaaacaatgaaaatactgaga

SEQ ID NO: 220280 - DNA, 935 bp, Homo sapiens
ggcacgagggcggagtctgcggccgttcccgcggcctcctcctcctccccgttcccttcacccccaccccgcacccctttccccatcccggctccgtcaccctcccgtcccccacactcaggacaagaatgccctgcccggaacaacccagcagcgcctagatggctttggtcacggtccagcggtcacctacccccagcaccacctccagcccctgcgcctcggaggcagacagtggggaggaagaatgccggtcacagcccaggagcatcagcgagagctttctaactgtcaaaggtgctgccctttttctaccacggggaaatggctcatccacaccaagaatcagccacagacggaacaagcatgcaggcgatctccaacagcatctccaagcaatgttcattttactccgcccagaagacaacatcaggctggctgtaagactggaaagtacttaccagaatcgaacacgctatatggtagtggtttcaactaatggtagacaagacactgaagaaagcatcgtcctaggaatggatttctcctctaatgacagtagcacttgtaccatgggcttagttttgcctctctggagcgacacgctaattcatttggatggtgatggtgggttcagtgtatcgacggataacagagttcacatattcaaacctgtatctgtgcaggcaatgtgggttgacagggattcaaggaacaaacactgtgatgtactattggtggaagaatgaactggagcagcctttctggagagtgatttgccaatatgccttatcattttgcatgatctttgtcctagtaactctatttctatggatttactctaagtttgtaaacatggatgtgtgcaaagattttagctctaagaatgtttgtcagtgttctaataatagcaaaaaataaaaaacaaatgattg

SEQ ID NO: 220281 - DNA, 917 bp, Homo sapiens
  misc_feature (4)..(7): n is a, c, g, or t
ggcnnnnggctccgcgcgacccggcgggcccgcctccgccgccgggtgcacgcgcagcctgcgcctcgtgccggagcagagcagaggccaggatgcggagttgtgcactttgagccggccccatgaccctgagcacgttggcccgcaagaggaaggcgcccctcgcttgcacctgcagcctcggtggccccgacatgattccttacttctccgccaacgcggtcatctcgcagaacgccatcaaccagctcatcagcgagagctttctaactgtcaaaggtgctgccctttttctaccacggggaaatggctcatccacaccaagaatcagccacagacggaacaagcatgcaggcgatctccaacagcatctccaagcaatgttcattttactccgcccagaagacaacatcaggctggctgtaagactggaaagtacttaccagaatcgaacacgctatatggtagtggtttcaactaatggtagacaagacactgaagaaagcatcgtcctaggaatggatttctcctctaatgacagtagcacttgtaccatgggcttagttttgcctctctggagcgacacgctaattcatttggatggtgatggtgggttcagtgtatcgacggataacagagttcacatattcaaacctgtatctgtgcaggcaatgtgggttgacagggattcaaggaacaaacactgtgatgtactattggtggaagaatgaactggagcagcctttctggagagtgatttgccaatatgccttatcattttgcatgatctttgtcctagtaactctatttctatggatttactctaagtttgtaaacatggatgtgtgcaaagattttagctctaagaatgtttgtcagtgttctaataatagcaaaaaataaaaaacaaatgattg

SEQ ID NO: 220282 - DNA, 336 bp, Homo sapiens
aagaaaaagaaaggaaacttgtctagagtagacaggagcgtatgagtgagtaaccacagcctctcttgattatgtttttacttcgttccatgaagttgggactttggaatagagaagagagaatccaaaagtggttatccatcctactctttgatttcctttcctaagtaatttattttcttttgactttttccttgtagcatcagcgagagctttctaactgtcaaaggtgctgccctttttctaccacggggaaatggctcatccacaccaagaatcagccacagacggaacaagcatgcaggtaatgcttgcatatacaccatttctttcttg

SEQ ID NO: 220283 - DNA, 465 bp, Homo sapiens
ggcagtaaacaaaacaagtaagtaaaatatgtgctgtttgacaatagcaaggacaaggtctttgtggtcaagaatatgcccaggaaagtccctacagtgtacatgaaggggcagctggcccctgatggtgacaaagtggattgctcagtggcaaagctggatttaagcccaaggctgcaatgtatccacattcatccttcttgataaaagaaaactgcaactgaaagatccctccctgtcatgtcttctaagaaagtggcacttgattgagaccaaagtagtcagtggtctgaagatattcattaactgtcatggaggtatggaccaacccttcaaggcttctgtcttctgcacccagtgctgcatagggaatacactgttgagacaagtcttgtgttcactccatgttagacaccattataagcagttgacagatgtcaataaactttctatttccaacagtca

SEQ ID NO: 220284 - DNA, 471 bp, Homo sapiens
tgttgcccaggttggagtgcaatagcaccatctcagctcactgcaacctccgcctcccaggctcaagcaattctcctgcctcagcctcccgagtagctggaattacaggcatgcgccaccacgcccagctaattttttgtatttttagtagagacagggtttcactatgttggccaggctggtttcgaactccggacctcgggcaatccacctgcctcgacctcccaaagtgctgggattacaggagtgagccaccgtgcccagccacatatatttacaaaaagaatctaaaatcaataacctaataatgatcaacgtaacaataaaaaagtcttaaatccgtaacctaaactttaagaaactagaaataagagcaaactaaacccaaggcaagcataaggaaggcaataataaagaagagagtagaaatatatgaaataaagaatagaaaaacaatagagaaaatcaatg

SEQ ID NO: 220285 - DNA, 510 bp, Homo sapiens
ggaaggagacaaattgagatggctagtatggatgactcttctgagggtttttgccagaaatgggataaaaacatagggcagtagctggtggggggtggagaagtatcttgaaggtagaaaggccaagtatgtggatgcaggtcctgtggaaacttatttctgatgtattcatttttctcattaaaatacaaaataaatatcagttgcaggtatggacagggaaaaaggggttgcaggttttagtggggaggagcgatcacctaggagggggacatgagagaagggactggggggtgggttgtgactgccggggacatcacaggtccacttgaggttctcagtcatgaaagtaaaatgtgatcaggcagcatggttgtgttgaaatccaagttttaaaaaactctacagagaatcactgctcccagtcacagaactgatttacttggctgtgatctcccttcatttttaaatatcctttcattgatatataacatatagagaaaaatatgc

SEQ ID NO: 220286 - DNA, 252 bp, Homo sapiens
cactgtaagaatttgcaacagggcaaataattcacgcctcataggatgatgaaaagagctagcaagggtctgaattgagtgggctagaaagttggtaaacaggagccagaagttcagccagctagcgtctgtatctcagccttgtaataaagatcttgtaataataatgataattgggctgggcatgtggctcatgcctataatctcaacactttgagaggccgaggtgggaggattgcttgagcccaggag

SEQ ID NO: 220287 - DNA, 402 bp, Homo sapiens
tgtcatgagtaaaaagagccgttgtcttttctgatgggtatcatatcagggataataatttaaaccaggagagtcaagctgatgccataattaatctgaaaataagtcaatataataggtatgaaatataatttttagaagaaaaaccagattctgatggcaagattttagtttaaagatgtagctatgagtaaaattatacttgaccccttgaatttgttttttaaaaatttaaaccagttttagttggttttgtcagatattacaacaacaaaaaagctaatacaggcagtgaaactatttctgagggtgtgaagtcaactggaggtcaagtcttttttggtataaagggggtcagatcagaagcgggagatcaaatatattggtacatacttgttcaaa

SEQ ID NO: 220288 - DNA, 463 bp, Homo sapiens
gcccgaaaattcccgaggcataagggtgggggaggagagttgtgagtatagagttttgggtgaggtgaggagtctgtgggtaaggtgtttataacgtgtgtagtgtatttggagtgagggtgcatgctcccttttcccaccgttctgaagtcacagcttggcgtacctgggaatgcccttggcgtagtaatccctggcccttattttggatctgtcctttattcctttgttactttagaactggcttcgccggcgattgtcctgggtttcctctagtgtctgaggcttggaggagaagtcatgcacggcttctggggtccagtcctttggcctttgctggagattatttataccaacccagcccttttagctcccacttcagtatttttggatttatttattttcatcaaagagaaagttcctttgtctcggctgagttgatgaacgtctctatagcagcaaa

SEQ ID NO: 220289 - DNA, 282 bp, Homo sapiens
tgaagcgtctcagcacatctgaattcacaagctgggcgctggtggccctggggcctgctgacatctcaggaagggaggaagagccacactgcccgggagctggtctgcccctattctaacagggatctcattcgacttccagatccaaccactgatttgcaggaacggaaaggacagaggacgatgtttggctgtgcttcaggcacctggccatcaaaagccaaaccatgggaaatgctgtgtgaccaacgactcttcagttaataacttgggaggcaaaaa

SEQ ID NO: 220290 - DNA, 427 bp, Homo sapiens
tttgctatagcgttctcatttcttttttcctgtggtaaataaattaccagaaagttgcctaaattttcttcattatcatccatctgacacaatgtgtgaaatttttattggtatgaagttacaacatcatctgtaatattagtataaaaattatctcaggtgttccatatgtgtctcattataaattattttatcaagcataaagttttgcagcagagggaacctgtcatacacagtgagaaactccactgggaagctcctatcacagtgtttgccaaaccaacacaatgttttccctcagcacctgggttttgccattgtatagtcatgcataaaaataccaggacagttgtatctggactgattcattaataaaaaatgttttaatgtagatatgactccattaaagtaatatacatgtctttta

SEQ ID NO: 220291 - DNA, 375 bp, Homo sapiens
tgccattaacttagggaatatgcaagaaggagcagatctgagaggcatgatattccaccctgtgacatgtgcttgtaggatatctaagttaacgtgtccagtagacatttgtatgttatgtctgggaggtaaggagtagaatctagtcttgagaaataaaactacttgaagtcatagtggcttcaatgagcatggagtgagaagacctccaaaagctaaggaagctgggcatggtggtgggtgcctgtagtcccagctactgggagactggaggcaggaggattgcttgagcccaggaatttgaggttgcattgtgcacagttgcgcctatgaatagccattgcattccagcctgggcaacatagacagtctcta

SEQ ID NO: 220292 - DNA, 396 bp, Homo sapiens
attactttgcttttgtcagcactttgcaaaaaggaaattaactttttgcaattaattagtgcaagttgcccacagtgatatagcttggtatgtttttctttagtctcagctctgcagcccacaatctaggagctgaactttaaggtgcttcatacctgtccctataggatctaactctggcagctttgggttgcctctgcttagaggcttggtgccagggatgagtggagagacctcttggcttgatgcctatcttggctaggcctagggcagactcatggtttagccttagcccttcctttcaaggtccttggctggggacttggccttgtgctcggtacaaaggtgcactgcaatgtgttttactagatgagtaagaagatactcctcccaccc

SEQ ID NO: 220293 - DNA, 451 bp, Homo sapiens
ctagtctttgaaattggaaggagtgtcaaatacacagaagccagagtcatcttggccagatggtgtttgatacagatggatggttagttgtcatgcagatctcctagttggtaacttgttgctgccatctgactcaaagaatcattcacacacactggctgtcaaaagcatcttcttttctgtctgttttagctgtcatgtctgtgctctgtacagaagtgttgacaagacattgctgttgtacattttcaatgtggttgttagtgagttttctgtttcgtggggtctttgatagtgctagaatgtacttgctttgtaattgtattttaaaaaaatactatgactgtgcaacaataatctgaccttgtaaaaggacttttctggttttaagtttaggcagatatgttctgtgaacaaaagcatttaatcaaatgaaaaaaaaaagactagt

SEQ ID NO: 220294 - DNA, 438 bp, Homo sapiens
agatgaggaaattaagccacagagagttaagtgacttgcccagggtcacccagttagtagagagtggaactgggattccatctcaggcagtcaggttccagagcccatggtttttaaccagtaagctctcatacataactgtttgtaatggttaacttttgaactgaagcttatatttgaattttccaaatgttaatgtgtgagtgagtaatttatttttccttgtgatttcattgtttagggggtctttactttctgaaaataattggcgtaagaacaagatcttgtaggatgaattgacctagaacatttcagagataatagtacatagttggggtggggagaaaaggctttatttgggtttaatcttgaaaaatgaaacaaaactatgaaaacattcatgttatggttgcaactatgtgttaaattattagaatg

SEQ ID NO: 220295 - DNA, 411 bp, Homo sapiens
agggagctttgacagcattccaaagcccaggccccagcccacagagacttggatttaactgctctggggtagggtctagacattagaatttttttaaagcttcctcggggattctaacacccagcctgggttaggaatcacagtgcagtgctcagcttcagtctccatgagaaccacctggagaccttcccaggcaccaccccagaggttctgattcagtagggaccgggactctgcaactgacaagctcccaggtgattccaatacagaaactgagttctggactgggcgcagtggctcatgcctataatcccagcactttgggaggccgaggcgggcagatcacctgaggtcaggagttcgagaccagcctagccaacatggcaaaaccctgtctctactaaaaataca

SEQ ID NO: 220296 - DNA, 623 bp, Homo sapiens
ttagtggtccaggctccttccatgttgtggcttgttcatctgtgagagcctctgagttctctgcttctacttggtgaaaggggaataagagagtagaaaaactcttcccactgcttaagatccctgactgtgaatcattctgtaccacttctgctcatgttcgattagtgagaactaatcacatggccccaccctgatgaaagaggtgctgggaaatgtagtcccatctgggcagctaccttctgctgacaactctacactgtggaagaggaagtaggaatatttgggggcaggtagccatctctgccatagtaccagcttgagtcgttgttccctttgcaggtgcccttggtacctgagcctccttttctgctggcttctgcttcttcagctggccatgtccagctccatgttccagaagattctgcctcttttactgtgcggagtgatgttcccctggggatctactagtgctctgctgagagactcacacccaggttctgatcagatacccacactgtgtacatttctcatattgcagtgtctgtcagtcagcttctgagaaatctgtgagagcagcattccatctcctatgattctgcaggtgatcaggaggccttctg

SEQ ID NO: 220297 - DNA, 403 bp, Homo sapiens
tgtcctaataaatggacttttcctacaactataatcatttttttgaagaaattgtgtgctaaagcagaatcacctgaaagtgtgattagttcaaaatccttatgcaggttctccttagcattgaaaatttgaactgtattaaagtgtcaattctaattgtaatgaaataccattctttgaccttctggatgtggatgtagctgtggagcacatggaatacacacagggaattgtattctgccctctcggtcacagatggatacattaagaagactcaaaagtgttctcttgggaaacctggtttcttgaccacaaagattctttctactgagcaacattccttttcagatctctatcctaggagatagagatcagtccaagcagggtcccctcatcatccatc

SEQ ID NO: 220298 - DNA, 340 bp, Homo sapiens
ttcatcatgtttcattttattctttttaatgtagctaatagaaaattgaaaattatatatgctttcattctctttctattggatggcactggactagaacaagcactgtgctcctggcttgaccccacgccagaaggagctagaaggatgagtggctggtgagacatgagtggtgtgtgccgtagatgcagcactctctgcagcctctgtctgcctctggtttgaatggcctcttccaatctgctgtgttgtgttttgctcagctgattctgagtggtgggaagattttattgcactctgacttagaattgcgccaatttagaatttgattctcatctga

SEQ ID NO: 220299 - DNA, 203 bp, Homo sapiens
accaccaatgagtcttgagctgttattttacttccatcagctgatgctgaaataacttcaggttgaagaatgtatacaccatttaaattgtcagctaccattttgagtaaataaaaacaagctaaaagtttctctgagaataactgacccttttgttgctgagtcagcaaaagttttacagtatttgaggtcagctttatcaa

SEQ ID NO: 220300 - DNA, 391 bp, Homo sapiens
caagagcgaaactgcatctcaacaacaacaacaacaacaaaaaagccagatgtggtggtttgcgcctgtaatcccaggtactcagaggctgagatgaaaggatcgcttgaggccaggagttcaaggttggaatgagctgttccagcctgggcgacagaatgagaccatgtcttaaaaaaaaaaaaaaaaaaaaagtgagttttggggaagaataatcaacagatgattgttgtgtgctctgctaaggggcttttgaccgcctggcattgggaagccactgaaagctgttcaatagttgaatgaggcattaaagatatttgagaagcccaggagttcgaggctgcagggagctatgattgtaccgctatactccagcctgggtgacagatta

SEQ ID NO: 220301 - DNA, 546 bp, Homo sapiens
tccaagcctattggcatgtttttccagccttgttttctccttatatgagtattgttcttgatatttaaatattgacataaaattcttccataactttgattgagttgtaaatcacaccctctccttggcttcctacatccactttttctttccttttcttgcttaacagcaaagctataaacctcttcctggactgataaggaattttatcatcatgccccagagccacagaagaagctgttggtttagaattcttttcaaagactcatttaagtaatcccccagccctttctccgctcactactttcagggctgccttctcacgtccagaagcaatacagtttccaaactgctagaacagaaaaacaaatttgcatttttctggaaggactgtctgtgctcatttcaagctggttccgccttctccgccagaaacacagtaagtgctcagaatgcgaaaccaaaatgagataagaggccccgtgaaattctttttcaggacattcagctgtctttattctagcccaaagcatagggtagaggcac

SEQ ID NO: 220302 - DNA, 753 bp, Homo sapiens
caaaaaagagtaggtacttaatctcccctgaaagtgaacatgtgaacaggactttgtttagttatcctgtactctagggcacactgtattacagggaaataagaacactgatcatggccgggcgtggtggctcctgtaatcccagctactcggaaggctgaggcaggagaatcacttgaacccgggaggtggaggttgctgtgagtggagaccatgccactgcactccagcctgggcaacagactgactccatttcaaaaaaaaagaatactgatcatgacatttagtttcatgcattagtttttgaaatgtatatcacgtatataattctatactttcatgaagtttttatatagtgtatcacaaaaaacaatcacgaaatccaaataaaaaaagaaataaacttacataactatttgatgcttactattaacttccgtggacaaaaatacctttccagtgaaatggtttttttcacaaaaacacttttgtttttcttttgctatataataaagcccccacaatcatgtgaaatcagatacagcaagttttccattctttagagaaggttggctagaatgcttatcttgtgtaaaagaaggaaattagaaagtgacttcctacttatcatttaggactttctcagctcaaaatctatcttttcctatatatctaaataaatgaaataaatagatgataatttttttcatccattccctctccatgaaggaactaaaattctaatattgcttt

SEQ ID NO: 220303 - DNA, 582 bp, Homo sapiens
tttttttttttgagatgaagttctgctcttgttgcccaggctggagtgcaatggtgtgatcttggctcaccacaacctccatttcaaaaaaaaagaatactgatcatgacatttagtttcatgcattagtttttgaaatgtatatcacgtatataattctatactttcatgaagtttttatatagtgtatcacaaaaaacaatcacgaaatccaaataaaaaaagaaataaacttacataactatttgatgcttactattaacttccgtggacaaaaatacctttccagtgaaatggtttttttcacaaaaacacttttgtttttcttttgctatataataaagcccccacaatcatgtgaaatcagatacagcaagttttccattctttagagaaggttggctagaatgcttatcttgtgtaaaagaaggaaattagaaagtgacttcctacttatcatttaggactttctcagctcaaaatctatcttttcctatatatctaaataaatgaaataaatagatgataatttttttcatccattccctctccatgaaggaactaaaattctaatattgcttt

SEQ ID NO: 220304 - DNA, 544 bp, Homo sapiens
ttacaaagtttgaaaaaagaaaatacgagtttcctttctgactgagaacagattcagccactgtggaaatgagccaaagaaatgtcaaaattgatattccatgaagaatttaagaagccagatcattgatctcactcaaatatgtatgaatattatttattataattttgaatctttttttcctaaaagtttacaggggctggtgataaagttgcttttaggacctaaaaggtcacttgccttacttacattgtcttttctactctagattggatggcgcgattaatggtccaggctctgttgttccatcgtttttgttggttttactgcattccattctactagttagtagtttaaaaggccacccaagagctccaacatgtaaagagctaggaagtcatgcttacaagaaaaagccaaagaaactaaaaatcattgacttttcttggatccatcagaaaattgaggtcacaaagcaaacttccacactgaaatgcagagatacaggcaaatacagagtcaaagcagcaattagtttccctcg

SEQ ID NO: 220305 - DNA, 604 bp, Homo sapiens
ctgttgtcctgtttggaggggtgacagcagaaatcaaagaattccactcctccatggaaagacaaaagacaggtgctcaccctgggatggagggggcagtgggagcctgttagtacatctgtgatcccaggggtcagggcctacagaaggaccctgcaggctaatgggggcaaggataccagagagtaggggcctgtttgctcttctgaccctgcagcactaaccatggggggatagggagtttctagtgcactgattccaggcagagagatggagcctgtgagatgtccacagggaatctgacatccctggaaccccgtcatgtcttggggaatatggggtccaaggacagatgggaagacaggagagacattatagaagctaaagggtatgggatggcctgaatttgggctacaacctctgaagaagtcacttcctcatttatagccaaagtaaatgggcacccagatagtctcagtgtggaccaggagccagcctcacacatccctccaagccctccctatccatcatactcccaccctccaatttcactccccacttacagggcaagccgattggttcattaatcactgcctcctcatca

SEQ ID NO: 220306 - DNA, 440 bp, Homo sapiens
taagggtgctaagaattaaacacaatatgcacgttaagggctcaggatagcacacggctagtgctgatgagttgtggttgctactatcgtgataactgtgataaaaggtggggaagggctaacaccatctaggaccctttcctaacagtggcactcgaaaatcttggatgccattggccaaaaagcccagttagggcagaatgagaaggagaccagggccatgacaatagtggtaaattctatccatacctattaaattaatgcatgtagccattcagtaagtactgagtgttccaactctacatggaacttgttccaggtatctaaggcagtgaaaatttttaccacttattgagtgtgtactttgtgccagccacattctaagcgttttcatctattaaatcataaccctaccaggaaggcgctattactaccaccac

SEQ ID NO: 220307 - DNA, 545 bp, Homo sapiens
cacggattactcaacatttatcaaccaccaccatgatcagtcagcagccatccacacccaggcaagaccctttaccagcaaagaaattatgattttctgaaggctcaaatgattgtgagcattttttgagctataaagtatttttaattaaggtatgcccattgattttttaagacataatgctattgaatacttaatagactacagtatagtataaacataattttcatatgcactgggaaaccaaaaaaattgtgtcttgctttattgcaatattcacttcattgcagtgttctgaaaccaaacgtgcaatatttctaagatatacctatatgttttatcccaaagatgtttgaaatttttatctgatcaaatctgtcagtcttttcatttatggtttccaggttttgtgtacaatttacaaatatattatcctcctcataatttgaaaacatttttacttgcttgtagaatatttgaaatactttttaatgtttaaatctataacacacatagaattcatttattgaggtaatccgtgaggg

SEQ ID NO: 220308 - DNA, 599 bp, Homo sapiens
gaagagtcacatcttaacaatgttgatttagcaggttaaattatatccattaattttcatcatagataggtctccttaattgactctttgggactaaaatatttatatcctctgcatcattgttctagttttaagtacaggtaatgttgaccaataacctgttttaataggtaaaaaactgtacataatctttttgaggtgttttttaggattatttcttgctacctgggatacttacagaaatgtagaactgagccaccacgcccggtccaggtcctttttaatgtctgacagtaaagtgtttttttgttttttgtttttttttttcatataatttacataggataaaactttactcttaaaatgattaagtatttaatattttcactaaaaactactgaataacaatattcagcaaccatcactgctagaacatttctatcactccaaaatgaaaaccccatacccattagcaatcactgcaccatttcctcctgcctctatcccctggaaacccatagtctacttttcgtctctatggatttgcctattctggacatttcatataaatggaatcgtacagatttttttttaatgta

SEQ ID NO: 220309 - DNA, 478 bp, Homo sapiens
cgaaagtctcaggccatccccatgcagatacaaaaagatgctttttctttaaccctcttttatttactcctttattttataaatgcctggtgaaggaggttagcctgtttattagagtgaatcaaaatggttaaacctagttatcttgggatactgtgagacaaagtttgattatgttgtatttttgtatttgtatactgatatataaatacctatgtggtaagatgtaaagcagcttcagaagccttgggtaataaattgtttcttgttcatgaactaagccacaatccacagccatgtactttttgtcccatacttgcttgattgtagtacttataatcttgtgatagacacacttgtttaattaacagttttccatagaagtttgtgagctctgtgaggaaggaactgtgtctatttaattcactgtttctttgccagcatttaggaaagtacctggtccttggccacataaaga

SEQ ID NO: 220310 - DNA, 300 bp, Homo sapiens
cagtatttgtcatttgcatttacagctctttggattctacatttttttaacctagtaaaagaaatttagcatacaagaacgctaaaatttttgttttatgtcaaactgatggcaggctgtgtatattcccgccttagagaagtgagttgaaatataccttttaaaaacagcaacttggcctggcccggtggctcacgcctgtaatcccagcactttgggaggctgaggcaggcggatcacgaggtcaggagattgagaccatcttggccagcatagtgaaacccatctctactaaaatac

SEQ ID NO: 220311 - DNA, 410 bp, Homo sapiens
tatctttccctttactggtttatgattcagatttcacatttttgttactattatctcctccctgttcgctgtgttcttctgtgtttccatctcttaaaaaaccttttgctgtggagagagtgtctcagagttgaggacactgctgtggtttgaaagtgttgcctccaaaattcaggtgttgccaatgtgataggattaagaggtggggcccttaagaggtgattgggccatgggggctcctccctagtgaatggaattaaggcccttataaaagagccttcagggccgggcgcggtggctcacgcctgtaatcccagcactttgggaggccgaggcgggcggatcacgaggtcaggagatcgagaccatcccggctaaaaacggtgaaaccccgtctctactaaaaatac

SEQ ID NO: 220312 - DNA, 445 bp, Homo sapiens
gcactcagctttcactagttttacgtgtgtgtgtatttagttctgtgcagtttcatcacatgtatagattcgtgtgactaccaacataatcaagatatagaccaattccatcacaagaatcccttgtattttaccattttacagccacagctacctcctgccttcccctcactaacctatgacatcagctaatttgctcattatttctctaattttgtcatttcaagaatgttatataaatggaatcacacagtatctaaccttttgacattagcagattttgcttatacattcactcaaatggttgcatatatcaatagttcctttctccctgagtattccatggtatggatgtactatggagtattatggtacatctgttgaaggacatttggtttgtttccagttttgggctcttgactaataaaactgctatgaccactta

SEQ ID NO: 220313 - DNA, 699 bp, Homo sapiens
cgtcgagttaaacgtctggggctgcttctgaggaatcagcttgactgggtaagtttgattggagaaaacacctatatctcaattgagcttcctgcagacttttgtattctggcccggtttggggcctcggcgtctctcagtcataggaattgcacattaatcttcgtcctttacgtttcctattcagacacctgtagccacccgctcccttgaccctcccacggtcgcctcgcacttttaacggccagtgcccctggaatccccactgagctcccgtcccaggacccagcccccgcagccccaccttggaccccacagccctaccctgattcctcggccctaccttcaccctgcagcctcacatccctgaaccccgggcttctttatgctcctccaccctttgtgtactttactcttactctcagttttctgtttttcatggcggtggaagaagggtccccattccttctttccgatccgcgattaccctggactcgaagtcagcagacccggttctaggccagctctgcctctcaccctctgtgaccttgggcaaatcatacaactctgggactcagtttcttcctctctaaaacggagatgactgttgctccatcagtctcaggtgaggagtgttgaggagccaacaagctagtatgtgtgaagatgccttgtaaactgtaagaccttcacaagaga

SEQ ID NO: 220314 - DNA, 484 bp, Homo sapiens
tatatcacacttcaggtcctacaaaatgttcggcattttcccaactacatccacctccttggcacattaaaatgagtgttgtaccaaatgcccatcaatgatagactggataaagaaaatgtggcacatatacaccatggaatattatgcagccataagaaagaatgagttcatgtcctttgcagggacatggatgaagctggaagccatcattctcagcaaactaacacaggaatagaaaaccaaacaccgcatgttctcactcaaaagtgggtgttgaacaatgagaacacagggagcggaacatcacacaccagggcctgtagggggtggggggcaaggaaagggagagcattaggacaaacacctaatgcatgcggggcttaagacctagatgatgggttgatggatgcagcaaaccaccatggcacatgtatacctaagtaacaaacctgcacattctgcccatgtatcccagaactta

SEQ ID NO: 220315 - DNA, 171 bp, Homo sapiens
tctcaaactcctgatctcaagtgatccacccgcctcggcctcccaaagtgctggaattacaggtgtgagccactgtacccagccaagtctgggaagtttgttaaccaatcagtcccccacagataccaagggacaactgtgtattatacctaaaacaaatcagatatttat

SEQ ID NO: 220316 - DNA, 429 bp, Homo sapiens
acataaaatggacgttctgtgaaaatcaattgactgtcccggctggaccagacagctctgacaccacagtaggtggcaggtggtgaacataaggtacccagaaaccttggccgcagtgacacagtgaatgcagccgctggcctccttccttgcaacactatttgtagtttcttctctctgtgcgtccatggcatttccagaaaatgcatcttgagttgacttcccttcgttatgacacagcactgcaagcagggtcgagctgcagttgggaagtttcagggcacatttcggccacatctgctggtaccagtaggaccgtgattgttttggtggttgtatgagtgcagattaattaaacaacagtaacaaaacagaacaaaacaaaaaaacagcaattcgcagcagatctgaaatatcagtgacaaagac

SEQ ID NO: 220317 - DNA, 488 bp, Homo sapiens
atggttatccccaaactcatcgagctacataattaaatatgcacagctttttacatgtcagttgtacctcaacaaaatggttaaaatgaaagaagaagaagaagtaatgtggctgcaagcaaaagctccagccctgttgtgcacacagagaacaagtgtatgcagagggtaaatgaattgactcaactggacagtgggcagcacctgaaataaagccccactgtgctggctccttgtgctccaagtgccgtaccacgtcttctcccctgtattgcctcattattattcacttaagtgggtgtgatctgaaagggagcattgtttcagaatcaataaggggctgaattcgtgtagtacagtgaatgtctgcgcttcaagcacctccttatcaccagcacacagtagaggacaggtccaaataaaacacattatcaggctttgttgactttccaggcccagcagctgtattaatggagctctttatatcc

SEQ ID NO: 220318 - DNA, 914 bp, Homo sapiens
cattatacatttatactacccctatgggccagacactatgccaatgttttacatggatgatctcatttaatcttcaagcaacctcataaagcagaacctattttctactagattggaacagagaaaatggaggcttagagaggctgggtaacttttctgaggtcataaagcaacttttgggagaaaaagaccagatgtaggtttgtgtgactctgaagcacaggttcttaaaaactccagtacacttgtgggtatttttttgtactcaggctctcattagcggtacaattttatagtgacaaggtatgttaatttcttccatagataactgatgcataaaagcttagaagctgtaataatttaatagttcacatgaacaaccctaactgacagtattcaccaaagttgaagaaggcaaatcagtcagttgtattaaagaaagaatcagatttccttacaatttccctcttactctcaaatgagactcatataccaagtatcttctgaggggaaacaacaacaacaacaaaaaaaaacaactcagtagctagaagattacttgacgtgataacaattttgtgaactcgctgtggtcaaagttaagtatttgacacaccggcaattttgcaatctgaaaggactctggtgtcattcttctgccgatttgggatccgaaccctaactgagaataccataaagatgtagatgtagatttttatgatgccttaagagagatgctttaagagataacttggaatcaaggttaacatcaaaggtgttaaagatgatgtatttgacataaacgtccttacctgactacaggttgaaacctgaatctctttaggtagatgtaaatggacaggcatgaagttaatgaatgaactgaaagtaagttaattaaattatcctatcat

SEQ ID NO: 220319 - DNA, 188 bp, Homo sapiens
ggccccggcgggatgaggagaccatgccgggcgcgcacacacggcagcttctgtttgaaaacggcgaccttcgggcccttttctccagcaactgcagaggcatttcaggagttggagaagagacgtgtttcacctccccgacgtctggaccagtctggaagggatggaggcgctgtggccaagtgcag

SEQ ID NO: 220320 - DNA, 1030 bp, Homo sapiens
cttcctagttgcaggacaagaactcaagacccatcaagtggcagggccaaaaaagctgtaacaccaacagggctgaaacatgccccctgcttgccacgttgaaggtgaagagaaggaggtaaactactgtcaaatcactgtaacttgaggagttttggtgtttcaccttgctgaacaggtgtatggaaagcccaagtcgtttggtaaacctctcaacttttgacaggccacaaactccaaactggatctcctgtggtaggcagtagaatatctatgagtcatcagtgtcctgagaagctaaacgtcctactaaggatcctgcaaagggaaaacagaagaggaacttgcactttttgagaacttgctgtgtgccataagcctaagtccctatgtgggaaggattctacccacacatgacagaggaggagactgaagcatgaaaaagaaatggcgttttgctggagaaagcagcatagcggaatgtaaagcggtaaagcgtgtatgctctggagccacagacctagatggtgaagtctagctctggtacttgacagatcccattctccatcatctccaccctgctctgtgacccagtcggctgctctgcttgaacgacatcaacaagcttcctgcatcctcatgtctagctgaactcaaccagtgggaagtaccagcaggagatcaaaagaaaggagcaaagtccactgtgggatggctgcttctcttgacccatggtttcagctcctgacagcattttggcatgctttggttgacttacaactgctgcacctgcatcctgtgcctgcaaacattttctggaaccttggaagtctcctttgcccacaactctaggaggccagctgtgctgggaaactaacatcctccacccatgagcagatctccaacaatggctctcaggagttggtgaatgaatacccagctccctcatccttgggtggtatcatgctaaggcatgtgttttcaacaactatgcacagagttttcctaggtaataaactctagtcaacca

SEQ ID NO: 220321 - DNA, 929 bp, Homo sapiens
cttcctagttgcaggacaagaactcaagacccatcaagtggcagggccaaaaaagctgtaacaccaacagggctgaaacatgccccctgcttgccacgttgaaggtgaagagaaggaggtaaactactgtcaaatcactgtaacttgaggagttttggtgtttcaccttgctgaacaggtgtatggaaagcccaagtcgtttggtaaacctctcaacttttgacaggccacaaactccaaactggatctcctgtggtaggcagtagaatatctatgagtcatcagtgtcctgagaagctaaacgtcctactaaggatcctgcaaagggaaaacagaagaggaacttgcactttttgagaacttgctgtgtgccataagcctaagtccctatgtgggaaggattctacccacacatgacagaggaggagactgaagcatgaaaaagaaatggcgttttgctggagaaagcagcatagcggaatgtaaagcggtaaagcgtgtatgctctggagccacagacctagatggtgaagtctagctctggtacttgacaggctgtacaagaatcatggtgccagcatctgcttctgacaaggacctcaggctgcttgcacttatggcaaaaggtgaaggagagccaacttgtcacatgacaagaaagagagaggccagagacaagagagggaagatgccaggctgtgttaaacaagctcttgcatgaaatgatagagcaagaactcactcattaggaggagagggcaccaagccattcatgagggatctggccccataaccctaacacctcccagtcagccctacctgtcacactggagattaaatttcaatgtaagatttggaggggacagatagccaaactgtgttagaagtcccaaataaagaaaacagtcttcgtatatttggaactttaa

SEQ ID NO: 220322 - DNA, 335 bp, Homo sapiens
gcaaagttgaatataagtactggcagcctggctggaaaactacaacccttctgtgtttcagtcaacaaactcttttaggttcatttgaggaaggaacattcgtatcggttatagaaacctttttttgtgcccttctggtaagatcaagaaagtgccgtcctaagaacttgcagaatgagagtcagtggctgtggtggagccttcttttcaaaaaatgctatgtcccaagaggacattactaattgaaaacacatggacaccaacaagtctgagttgaagtaatttggaagattcaaattctatgtgcgaagaagttttagggatatcttaagcag

SEQ ID NO: 220323 - DNA, 305 bp, Homo sapiens
atgcaatatatacgcattactgttatccctttttcacgtctgagaaaaatgaggtgcagagagattgaattagttgctctactgacatgggaaagagaggcaggatttgaaaccagtgctttcaactattcttttctctcaagagacagagcctgtgtaagtttaaattaaaataaaaccaggtccctacttctgtgttcttgtttttccttgtgatcctgaagtaactctatgctatgaatgtttttcaatcctgatagtcttctttgttttgaagccttaaataaattctttattatattcta

SEQ ID NO: 220324 - DNA, 135 bp, Homo sapiens
caggggccggatcacagaggcctttgtgagtcatacttaggagattggatataaaattgcatagctcaaaattatagagttagttatatttcatttggattatagtggctaataggtttaagctgctagcatgac

SEQ ID NO: 220325 - DNA, 1260 bp, Homo sapiens
tggtcaggagatcgagcccatcctgaccaacatggtgaaaccccgtctctactaaaaatacaaaaattagctgggggtggtggcacatgcctgtaatcccagccactcgggaggctgaggcacaagaagcacttgaacccaggaggcggaggttgcagtgagctgagattgccgcactgcactccagcctggagacagagggagaactccatctcaaaaacaaaacaaaacaaaacaaaaaaacaggcattaccagcctgccacagaatatgcctagagaaatctacaggtgaccctgatggggcatgcagaacccagagccgtggaaatcacctaaaaggaggggaccacctaaaaggaggggacaggagagcatctgagcagactgtctgttgcctggagcaacaggaggactctctggggtcagctgaaagggaagcagtcaggggacttgcaaggggggagtaccactcgggcaagggcaggagaataacaggcggtgccctggaggaacactgcatgctgctgaggaaggagggcggccttggcgatgatgtcaccatgaagcacttggaattgagacagaacattctcacttggggtcagtttgtaccctcgtactgaaagttactccctggtgctatctgtactcatcatattttgacacactttagagtaacccttccatctctccctgcttctttttgaatttaaacatcaagcatttgaacacaagtcttcatgtccatttatctcagtgtaaagaggaacaactgggctgggcgtggtggctcatgccctctcttggtacttgatatagtcagttgcctgactgcaaacccaggcctaccctgggtagaaagaaaagggagttgtgacagttgccaggaagatttctctgtggaagcagctggtgtttttctgagtggaaactttgtggagggaactagcatttaattaaaaaacaggctgggcgcagtgccttacacctgtaatcccagcactttgggaggccgaggcgggtggatcacttgaggtcaggaattcgagaccagcctggccagtatggcgaaaccccatctccaataaaaatacaaaaaattagccaggtttagtggccggcacctgtaatcccagctacttaggaggctgaggcaggagaattgcttgaacctgggaggcggaggttgcagtgagccaagatcgggccactgcactatagcctgggcaacagagtgagactccatctcaaaaaaaaaa

SEQ ID NO: 220326 - DNA, 586 bp, Homo sapiens
ctgatctagaggatcccagtcaggctgcaacaatctatgctgggagtgcagtggcgtgaacatagctcatggcagcctagtactcctgggctcaagtgatcctctcacatcagcttcccaagtagctggactacaggcgcataccaccacatctggctaatttctttatttttttagagatgggggggtctcactacgttgcccaggctagtctcaaacccctggcctcaaacaatcctcccgcatcagcttcccaagagtcattagggttacaggcctgagcccctatgccaggcttatgtatataaatttgaactttaagaagtgttaacaagtatcaaactccagctaattatatgtatgtcaaaatgtttaggggtaaactgtaaggatgtctgcagcttattttgaaatgaagcaaaaagtaagatgtaatgaaggttaaatagtggagtgaatagatgcatagatgtaagatacagttaatgaaagataatgttaattgcagaatataggctgcactaattgcagaatatatggaggttcactatacaactcttccaactttttgcatgtttaagctttt

SEQ ID NO: 220327 - DNA, 705 bp, Homo sapiens
aggataagaacataaatcagactctaccttttcacccggaagacggtctatgtgcctggggtctagagcttgtacttctttttgtccacgacaaagacttcctagtcactaagtacttgttagtctcttgaattagtctcctctccagctcacaagcaaagcccagtttaatcattccctgttctggaggtacagactctagggccatgctaactctgatttctctagattattaaagttttaccatcacatgatttcaaatcattggaaatatgcttgcttctaaaagccttctccgaacaacagggttctgaggggttttgttttcaattaatagttagtataaagaaacaaacgttagaacatctctaattttctttgagaaattttttgttaaatttttatgtcctacctcccccaccccgcttttttaacgtgacagagttccctcatagctcaaggacagaaaaaatgtctgtcctgaaagatggttgagtgcttttgttattcaataggatatatttaacccatttgtttccctttttgccttggttaccagggagttcagaactgcacattaggctcaattgtattcacttccctcagcccagatttcttgtataggaccttctcttcctcatttgcctttgttatatgggtcttttttttcttattttaatggattcatagttacatatctgtacg

SEQ ID NO: 220328 - DNA, 543 bp, Homo sapiens
aactgccagttattaaaaacaaacaaagactacttagtggattcctgaggctatgctcccttgtaggtcagcttctaatgcaacctcggatggatgctgtaatatcttaagcgcataatgccatgtagtatatagcagagtccaggtattgctagagatctagtccatgccccttcagaaagcattccaaaaagtgtgggaaataattcatttactcctatgaggaatgttaccctccagatttgctgagaaagcctttacatttgaaggctgactcactgcttcttaggttagccaggtaccttgagtaatatgctatattaggctagcttcctaatagtccaaaaatggtagcaatttgatattcccttttccctagtgaacctgtaaggggttggatagttgctatatctttctaagactggatcttgtgaatatgaacatactattctacttttttcccttctcttacttttcatgacttttatattctttgttattatttgaaatcacaatggggaaagaagtcaataggttgaagtg

SEQ ID NO: 220329 - DNA, 391 bp, Homo sapiens
agaattagatgtcctttgagaaaaaccaaactctaatgatagaagttaggaaactaaagatgtgacaataattacttccaagttattagagaagcaagctgaactgttattctccatttccacataggaaaggtttttccaactttaaatgggtcagatgttggaattatatttccaagggagtccagggcctggatatctttaaaacagatatgaacagctgctcaaaatgacttaggctaagattgatgatatttcccaggcagcaccctaacttgccattcattccttcactaccaaacagtaagaagaagtgagggggcccaagtcaggagtcgggcaattaggcacgtgctcacacacacacagaggactctgttctctacacccc

SEQ ID NO: 220330 - DNA, 191 bp, Homo sapiens
tgacaggcaaggaaaagccagtagagcatcatcgccactggcctggcaggaggaggtggccctcgggctgcagttcactgtgctgtttgcactctgattcttggaagaatctttcctgaagtcacggagcctccagctcctccggaacagaactagttgtgtaggagtgtgtccttcatgcccctcaggtc

SEQ ID NO: 220331 - DNA, 396 bp, Homo sapiens
tagggtttttaatgtttattgccaatctgcctccctgaaagtttgtacaaatgttcacatccaccatcattgtgtgagaatgccagtttaaccatatttttggtatcatcaagtgtttttacctacagtgttgatagggaaactctggttttttacttggcgtatctttaattacattagaaaagttacagaattttttttcatgttagttaactactttgcattctttgtgaattatctcttcatatttgtccatttttaatgaggtgtaatgttttttgacagtttgcgtaaacattttaaacattaagtacattaatcatttcatagttgtggtagatattttccatgctcattgacttttaattatatttatgttgtttttggtgaatagaa

SEQ ID NO: 220332 - DNA, 364 bp, Homo sapiens
ttttttttgtatttttagaagaggcggggttttgtcatgttggccaggctagtctcaaactcctgagctcaggcaatccgcctgcctcagcctcccaaagtgctaggattacagacgtaagccaccatctctggcccattaaccatatgttctaacctaagagtactaatggatggcaaactagataaattgtgctatgttcactaaatccagggatgattagggcccaaatggctattgcatggaaacagagagaaaggggtagtcaggtacactctcaaggaagcagcagcaagatttagaaaatgaaaggatacaaaatgcctaagaaagcagatgtttgatccttttagctgataaaaag

SEQ ID NO: 220333 - DNA, 417 bp, Homo sapiens
tacctgtagatgccaggatctatattggacacttgggaaacagcagtgaataaaacaaagatctctgacttgtatatggacaagcaataaacacaataaatgagtagtaaactacaaggtaaaccatgtagtaggttagggagaaatagtatggatgaaatagtagagcaggtaaaagagactgggagtgccagggaatggtccaggtaggcctcactgagaagacgataactgagcaaaaatttgatggaggtgagggagttggccatctgggggaggggcattctgggcaaaggtctaaaagtgagagcatgctggggtgctcagggagtggtaagagggcacgtgaggctgggaaggagtgatgatggagaagatgaggatgacagacaatgaggggccacatcatatggggtg

SEQ ID NO: 220334 - DNA, 475 bp, Homo sapiens
ctggcagggcttaaagaaccaggatccactcttaccagctgaggtattcccctagagtggcatatctgcctgctgccccggaagtggcacccttcaagctctgcttgaggttggaaatggaggtcagcgtgtcgtattcgctaataatgatcattcacacccaagctaagttcaaactttacaagttgcttctgctgttgccttggagcagtccttgatgggaaactgggaggtagttattgggctgttcccattttacagatgaagatactgaggctcgggaggggaagcccttgcccacggtctgtaggcaagaatctcgctagaagtcactgtcatgtgtgagtctgtgagggctgacattcttacccacggctggaggcccttctgtctcctggcttgctttcacagctccttaccaccttccctgccctggggagtgggtgcctttgtagggggctggccacagagcaga

SEQ ID NO: 220335 - DNA, 457 bp, Homo sapiens
aataagagtttattaatgaggtcaatgttaggcttaaacactagattactaaggtcacgtaatttcctggtgactggcagtttaaagatgagatataccacatgtgaattggtataataaaccatttaatggtgtatagacaacatttatgtgtactatacaacagtatacttccaattcctttctcccatcctctgtgctattgttacgtgttttacttttacatattctataaagacactttacatttcttctcttactgatgtagactgctagttaatctttcacagtgattaaaaataagaaaaatgcttttatatttaccttcatttatgccatttccagtattcttatttctttatggaggtacatgtatctctaatggcataatatttcctccagcctgaggtactttcttgtacccctttttgctggtaatgacttctctgtttttgtt

SEQ ID NO: 220336 - DNA, 488 bp, Homo sapiens
aggcacagtggttcacgcctggagtccctggccgacacaggaggatccctggagcccaggaggtagaagcttcagtgagctgtgatggagccactgactgcactccagcctgggcgacagagcaagaccctgtctcaaaaaaaattaataataaataaattaatttaatttaaaaaaaaagaaagtctcatgggtctcagtatagaatagatgtagaataggtgtcgttattaggtagaattaccattataaacagagcccactgaaatcacagtaggctgccagtctattgatttctggtgtcaatttatgaattttgagagtataaaatccaacataaaaatctgaagtaagaaatggtatacaaatttcactgctagaatttctgaatgaaaacaaggggcaaataaacatttttaaaattattagctaccaaaaaatcctaggggcatatttatttgcacaattgctaatcctgaacacccagg

SEQ ID NO: 220337 - DNA, 439 bp, Homo sapiens
taggagtcactaggtttagcctaccttcaaggggaggggattacaaaatagtttgagtaagaggaggtggggaactttgagagacatcgtaatggctgtccaccacagtcttcctccgtccccacctcccagtgattcatttcccttccagatgcagaatacactcactccttccaaggcccctctcagagtctcacctcattacaggatcacctcaaagtcaataatcttgtcatctaacataggtacaggtgctaatgaagcccataagatatactttcttaagtatgggtattgatctgcagacctttagacttaaagaaaataaagaacaagttatctgtctcccctcctccaccacccctaaccgatacagtggaatcactgctccatagcaattctgaaatctaaccagacaaatgtttggaaattcctttat

SEQ ID NO: 220338 - DNA, 433 bp, Homo sapiens
cacagaagtttttttttttttaaaaaaaacaacccccaccacccccccaaaaaaacagtgttactgtgttgcccaggctagatgtaaactcctgggttcaagcaatcttcctgcttcttgggtagctgggattataggtgtgtatgtaccatgcacctggcttgtttttgtttcacgttttgtataaggttgtagtttttgcagagtcttttgtgatagtttttatcatgcatacccgcatgacagcccttccttcatagccttccctggctgtttgtcagggtgttttttttttgttttgttttgtttaaaaaaaaacagaacaaacactactactactccagtttgattctgataactttcatataagtctgttcatcaaggtgttgttatccatccaaactctttgttgccttaatagattttgtttttg

SEQ ID NO: 220339 - DNA, 428 bp, Homo sapiens
ctatgtgaagtaactcattaaccaattccaagtcctaaatttcccatacccattatgaatgcgctataagttataaacattctccaggttaccagttttaaatagcaattgtgaaagactaatgcaagtataaaaacactttgtgaggctgggtgtggtggctcatgcctgtaatcccagcactttgggagaccaaggcaggcagatcacgaagtcaagagatcgagaccatcctggccaacacggtgaaaccccgtctctactaaaaaaatacaaaaattagctaggcatggtggtgcgcgcctgtagtcccagctactcgggaggctgaggcaggagaatcgcttgaacccaggaggtggaggttgcagtgagccgagattgtgccactggactctagcctggtgacagagcgagattccatctca

SEQ ID NO: 220340 - DNA, 472 bp, Homo sapiens
ccgccaccgcttgtgtgttgcagctgtaagcttccctttacatgggtttgagatctttcttctttttaatttaaggatctgcagctgtaagcttccctttaacatgggtttgagatctttcttctttttaatttaaggatctgcagctgtaagctttcctttagcatgggtttgagatctttcttctttttattgtgtgtttgcagctgtaagcttccctttaacatgggtttgagatctttcttctttttaatttaagcacctgcagctataagcttccctttagcatgggtttgagatctttgttctttttaatttaaggatttgcagctgtaagcttccctttaacatgggtttgagatctttcttctttttaatttaaggatctgcagctgtaagctttcctttagcatgggtttgagatctttcttctttttaatttaagcatctgcagctgtaagcttccctttag

SEQ ID NO: 220341 - DNA, 403 bp, Homo sapiens
taaaacccctggtctgagtcttgatgctgtactctggctggctgtgcttccctgcagcctctgtttccctatgtgtaggaagtggggtaaggcaattaacatgtgcctcctcttcctgcctcaaggcaggagtccatgctgatggtcatgtttgggccagactgactccctcccagacggcggcccactgagtggttttcccgccactccagggagctgctcttttcccctcccacctgctgggatgaagccgggcattactgctttagatgagtgaggagcctggccaggtgccaggatgttaaaagcactggggtgggagtcaggcactttcttgtcacaggactgccactgctttgctttgtgaccttagacaagtcacatctgagtgtgctcatctgta

SEQ ID NO: 220342 - DNA, 512 bp, Homo sapiens
ttgccctgttgccatggtcaagttaattatgtgcctctgtttcgtttccttccctccctcccttccctcctttccttccttccttccttccttccttccttccttccttccttccttccttccttccttccttccttcctccctcccttccttcccttccttcccttcctttcttttcttttctttctttcttttgtctcactctgtcacccaggctggagtgcagtggtgcgatctcactgcaacctctgcctcccaggttcaagtgattcttgtgcctcagccttctgagtagctgggattacaagtgtgtgccaccactcctggctaatttttgtgttgttagtagagaccaggtttcaccatgttggccagcctggctgatcttgaactcctgacctcaagtgatctgcctgccttggcctcccaaagtgctgggaggcatgagccaccatgcccggccttgtgcctccattttcttgtcattaaaacacggtaatagcagctaccta

SEQ ID NO: 220343 - DNA, 569 bp, Homo sapiens
agctttcataaggcataatcccgagagtaggttatgattagtgatggaggaaagaaaaatctccatgaagcccgcatctccagtatggtgactgggtctgataagcgcgccatgcatgtcttgtagaggcagcttccagaacttcctggtcaggtttagaggtggtgatctgattggaaaagctggagaggggcaggcggggaagtgtctggaagctactcattgcttttacttagatgtttgttatttggaggcttggaaagaggtcgatggggtaccccttggccactgagtcccctatcaacgggcatcagcatctcactgggtggggatgctctgcttccatggttggctctgtagtcataggaacttgccgtggtggttgttgtttagaatataatatacaagcctttattaatatattaaataccaagagctagtagtagctctataattttaaagtagtgatgaatgtaatgatattttaaaatatctataacaactgtaaaatgatatgaaaataactgtggatttcattggtgataaagtcatagatattgctaacacta

SEQ ID NO: 220344 - DNA, 367 bp, Homo sapiens
acactccagcctgtgtgacagagcaagactccttctcaaaaaaaataaataaataaataaaaataaaaaagaatttaagtgtcaaccagtaggatctttggaggtctcaacacctccctacccatccttaaattttattgcggagcaatgtctttgctcctgtacctttctctccataatggtgctatttattgcgtggtcataaatacagttcattattattcctgttagacttcctatgtttatcacagcattccaggttgaattggattctggtaacacttatgttcaacctacctcccagcttcaaaactgaatcctataatatttaccaaatacctactacattctcagcactggggtatga

SEQ ID NO: 220345 - DNA, 545 bp, Homo sapiens
gtatatcaattttctaatctttaaaatgatatatgacatcatgatgatgatagctaataggtaatgagtgccaggcactgtgctaagtgctttgcatggcttatctaattgaatcctcataactaccttgggggcagatactattagtatccctgtgttacagatggtaaaccaaagctcaacagtttggttacttgtccagggtcatctcaccagtaaaagtaaagctagtctcatttggtagtctgtgattctctgtgtgtcagatgttagtagttgcatacattagctgccttcttttgcatttgatttttctgatcataattacattttggctgatgcttcatgggttgtcttaaggaaaacatttgggagtaagtttgggatttgaggctaaattgtagttaataagcatttaaaggccaggtgtggtgggtggctcacacccataatcccagcactttgcggggctgaggcgggaggattgcatgaactcaggagttcaaggccagcctgggcaacatagtgagaccatcatctctaca

SEQ ID NO: 220346 - DNA, 485 bp, Homo sapiens
taaataactttacagaagtataatttacaaaattcaaccatgttaagtgtataattaaatggtttttagtaaatgtaccaagctgtgcaaccatcaccataatctaactttagaacatttccatcacccaaatatgatccctcatgcccttttttaaatttttttttattttttaaaatttttgtgggtacatagtaggtatctgtatttatggggtgcatgagatgttttgatacagggatgcaatgtgaaataagcacatcatggagaccttatgcccttttataattagttcccactcccagcccctggcaaccactattctactttctgtctctagatttgtcttttctggatatttcatataaatggaatcatataatgtatgatgatttgcttttggcttctttcattcaacatgatgttttggaggcttgtctgtgttgtagcatgtgtcaatatttcttacctttatgttgctgaat

SEQ ID NO: 220347 - DNA, 876 bp, Homo sapiens
gcacgagtagtgttagagttctgttgccaggcataaacatatgctcagatgatcagaacattgctgacttaaagttttatgaatttatttgctggttaatatttcttatattttacatggtacaaaatgacttttcttctttctgaataatatctgacaatgtagttcaacagattttgcaggtgaaatactccttgaaatagtgaagtctattgtgtgcctaccttataacgttttctggcactgtacttgtgtgaacaacatgaggataaattcagatgcaaaaagtcaagcgttctgtattctcaggttaggaagggtgcgggggtggagatattcacttgttcagcattaaggctgaagaagaccttggcatctgtagatcctagggagctgctaagttcaacttaaagaatatttcctttaacaaaggcaaatcattaaaggcatagagacgaacaacaagacagctttgtcagctttgctacaggccttaatgtcgtttgaacagaaaggcctgtgaggttttatcttgactccatgacaggttatgtggataaatcactgtgaattaaaccttaatcaagtgtttagtcaagttcaatccaactatagctctataaagccagtcttgcttttactccaatttttcaatatggtaagcaatttattgaactctggaaaattctagatgagtttcctaatttctcatatgctataacaagaagaacaataattaaatgctgcctaattttacataaaattttaattatttaacaatttgcattttgaggtatttatacttaaaagcctttgaaaaaagtgactgaataactattttcttcttagatgaaaaaacaaattttccttttacta

SEQ ID NO: 220348 - DNA, 916 bp, Homo sapiens
caagaagcgggaagcttgatggaacatggcaaactccctgagctgaacacacagagctgagaatcttggggggccaaacagctagggtttacagggcagggtaatggaaagctgcacagagggaaaattccagaggtctacggaagtgtccccgccagaatactcagcagagtgctgatcagtgtgtgcatgtgaagacactaccgaggctgaacaatcaatcaaagggctttgaggggatagtcccctaaagctcactgggcctgggatactgcctgtttcaccagccagactggaaaacctcataactcttggggtatcagtagagttctctaaagggtcttgctattagtgggacataattagttctaaactaaatactgctctggtcctgcctaacaaatcacaaaagcaagatccaaaagaatcaaactgtttccaagtcacttaactatagtccagaaaaaaagctcaagaatattcataggaatacaaaaatatccaatacccaaaaaggtaaaattcacaaagtctgccacaaagtctggcatccagttgagaactaccagacatacaaaaaagcagcagaaaaatataatctataataaagagaaaaatcaatcataaccacccagaactaacacagatattagaattagcagataaaatggaaagttattatagctatattctatatagttaaaaaactagaggaaagctcaaagatagtaagaagagacatgaaagataataaaaacccaaatcaaacttctagaaatgaaaattatctgaggttaaaaaaatacactggatagaattaatggcaagttagacattgaagaaaaatggtgaatatgaaaagagatagcaatagtaactatccaggatgaaacccagagaaagactcaaaaaagaa

SEQ ID NO: 220349 - DNA, 440 bp, Homo sapiens
gagctttgacagaggacagggagggtgaagaggagtaagacctgagagtgagaactgaggttccaaggctctggggccagaccagggagaccgaggtgtcgactccccacctcagcaggtggggttggggctttctgcctgcacctgcttccctgggattccccaggttggctctgcccttccgaaagcgggggtgggagcggccgtatctcctacctcatgggcaccagagtcacttctcaggaggcgggcttgccactgctgccaaggagccagctaacctcttgttatattagaactaggatttcagctgggcgcggtggctcacgcctgtaatcccagcactttgggaggcaggggtgggcagatgacctgaggcccggagtttgagaccagcctggccaacatgcaaaaccccatctctactaaaaatacaaaaa

SEQ ID NO: 220350 - DNA, 410 bp, Homo sapiens
tttccattgttctgggaatatgctattaaagaatgaatggttactatcaaatccagtctggtcatcagccatagttaaatagctcataatgggggctataaaattaccattcatgtcacagacatttgttgttagcgttactacctttcaggcactgctctaagtgccttacaactgtaaactcatccaatcctcataacaattctgtgagatagaaattattattatcctcgctcacagatgaggaaactgaaaaacaggggagctcaataattcacccctggacacagagcacacactcattcattagagccagtgttcaaatccaagccatctggagccaagtctacactattcattgtgactgtttaattcttgcatcactttcttacgaggaagatgttttttgt

SEQ ID NO: 220351 - DNA, 592 bp, Homo sapiens
ttatttgataatttaggagtgctcattttggtgggacacatatattcttcaataacagtaatggagtgagttactgcaggctttttttttggataaaagtttctagaagttatatcaatagcaattcactttcatgacaggttattgcctctttttaagtatattttctttctgaataagtagagagaaatcagtccttcattttaaagaggcttgttgtatcttcattactcctgtaactgtttatttaacagcagccttatgttctgtaaattgccatggtattaaaagagagctggaaaaatcagaggcaaaggctgtcttcaaggaagtttcagttagagagaccactttaaaatccatgagttgacaagagaagagcaaagttattgaggtgctgttatagcaaggcaatattctgggttcttcattcactttttcatttaatcctcatcatggttttcaatgtagaactgagaatccagtgataaaattgtgagataaagaaaaactattagatgtttagagaactagatatcgttatgagctgcatttgcagaaaaacttgtagatgatcatcaagacttggaaa

SEQ ID NO: 220352 - DNA, 500 bp, Homo sapiens
acttgataaagctgtacaatttgtgatataaatgttaagtaaggattcttgacatagaaaagaattcttgacatagaaaagacacactgcaagggcaattctataactatattaaaagtgtaagtgacttcagaaaaatccaggagttgaacaaaaggggaaatgaaggatgtaaaagtgttaaaaattcctcaggcacagatggggtaagaggttcagagatggagagaatgtaggtattctaaaagtctcatcttaaagtggtaggttaagctgagaaatctagagcttcttagtagaggacatggccagtgtcctgttttcagagaacagttaacaacaacaaaaaaaggtatatggtgcatggagcaaggtaagaaaccataaataagatgtaacactatgctagaattacaacctgacagagaaaaaagctggagtgaatagttccttgaatgaataacaccctgatcaaacaaaaagcaaaaacgaagaacaaa

SEQ ID NO: 220353 - DNA, 510 bp, Homo sapiens
atgggtctcgtggggcctggtatcagttcccagctggcggtcgagttctctaggggaacagggcctgcatgtagcagtatttttattattttcaaccgcagtcgcttcttcctgttgccttctgggtactgggaggcacccgggaagagctgggattctggggtcccccagtatggtttacctgctctggggcaacagggacaatttgggtttctaagcaacattctggctgggtgccgtggctcatgcctgtaatcccagcactttgggaggccgaggtgggcagatcacctgaggtcaggagttcgagaccagcctggccaacatgatgaaaccccatctctactaaaaatacaaaaattaggtgggtgcggtggtggaccctggtcatcccagctacttgggaggctgaggcaggagaattgcttgaacctgggaggtggaggttgcagtgagccgagatcgcgccattgcactccagcctgggcgacagagtaagactccatctca

SEQ ID NO: 220354 - DNA, 401 bp, Homo sapiens
agtggccctgctgtgctgcagttggaatgctggcattctctgttttgagtctgggccttgaaattcacagaccatgctctcctctggcacagtggagaggctagcatggccagggcagtgtctctgggcctggaacatgactcgatttcccagtatgtgcaagcctcagcttccccacctcacagacaacagtcatggggatgcttcccttgtcagaaggatgtggggcccttaggatgataacatggacagctgtgttgaaaggaggatgcttcaggagtggatggcagggacctggcttcctgccttggcctgtccccaattttatgtctggcctgagcaagtcacagctctgctttagtccttagtgtccccctcatgagggacgttgagtgacccac

SEQ ID NO: 220355 - DNA, 291 bp, Homo sapiens
agattggggtgaactggtgtcaaggcacgatgccactctttgagcttctctcatctgattccctgatggaagtgcccctctcatggcatgggtgcttcttgcaaatcttccacccatgagaaagtcactgatcagaccccagcatccgctcccctcagagccctaaaaacccctcagagccatcagaacagatgagaatttatgtgggtacaggggcctaactttgggaggggggagctttggttagtggcccgaggaggggagagacaggagagagtaaaatatcatttt

SEQ ID NO: 220356 - DNA, 610 bp, Homo sapiens
ctgtatctagctaatctggtggggacttggagaatctttatgtctagccaaggtattgtaaatataccagtcagcactctgtgtctagctcaaggtttgtaaatgcaccaatcagtgctctgtgtctggctaatctagtggggacttggagaacttttgtgtctatctcagggattgtaaatgcaccaatcagcaccctgtcaaaacggaccaatcagttctctgtaaaacagactaatcagctctctgtaaaatggaccaatcagcaggatgtgggtggtgccagataagggaataaaagcaggctcagccaacattggcaacacggtggggtggcttccacaccgtggaagcttagttcttttgccctttgcaataaatcttgctgctgctcactgggtccacactgtctttatgagctgtaacactcactgcgaaggtctgcagcttcactcctgaagccagggagaccaccaacccaccagaaggaacgaacaactccagacgcgcagcattaaaagctgtaacactcaccgggaaagtctgcagcttcattcctgaagccagcgagaccacgaacccaccagaaggaagaaactccgaacacatc

SEQ ID NO: 220357 - DNA, 221 bp, Homo sapiens
aatgtagtaagtgttatgaatgaagaatgcacagaatgctagaggagcacagaaaaagttcataaagcaaggactacaagtaccaagtaaggtttcccaaagtaggaagtaccagaggcagattattaaagaaatcaatgaggtcataaagtataaggtattgtaggcatatataaagcacagaccacgctgtaagtcactcactacagctaggctaggga

SEQ ID NO: 220358 - DNA, 370 bp, Homo sapiens
gggaactctcccatttaaccagcccacagacatgaagacaccatggggagtgtggggagagccacgagatgtgtaccatgactgcctcatctttccaccctctgatctcctgttgagggttcccactgatcaaatccaagaagccagaggggaagagagttcctcaatgtagtcagcgtcctggagcaaagagaggagaggagatgatccaggagcaaataggagacaaccagcacagttcccaaatgtgagaaactgactacagcagaatcgacttgaggcacattttaaatatacacatgaattcctcagactcccccactcccaatttcagagtatgtcaggggtgggacctaaataatttacgtta

SEQ ID NO: 220359 - DNA, 295 bp, Homo sapiens
ggctgttgtggaaatgtgggttttctttgctgtgagaatttatgcgtacaaagagacctgcttttcagaaagaacattgagaacccagagcccaagaggaagggttattaaagttaatgaaccagggtaaccttatccagagggtgcccagaaacactataaaacaaaaggtcaattgctattgctattttagttatataccccctctccaggcttcagaatttaacagggttaatttcctttatagtgaggacttggcaaataatttttaagccagatgaaaattctttaattt

SEQ ID NO: 220360 - DNA, 430 bp, Homo sapiens
cgctgattagcgcggctggttagagccaggactaatgaggctgaggtcacggactcggccccgtagcccaggtagcccggccaccctccaaacggccgctccgcctggtcagctgcctcacagatgctcgctgctgtctggaaaggggccagggaggctcgagccagcagccagcacgggctctttgtgtttaaaaccaaacaaaataaaaacaggttctctaatgtaccaccccctgtgatcctctctaggaatatcagacttaatgatttaaatttaatttgttagccatttggtggttaattttttttattaaaaaaactaatgatttattagcattcttataataagcaacatttaatatctattcatgagagttcaaatggatcaactatttaattttgtaataaaatgaatcagaaaagtatta

SEQ ID NO: 220361 - DNA, 691 bp, Homo sapiens
agcatcctcaggccaggtgctgtctattctcattttacagatggggacactgaggcccagggtggcttggtggcttgtcctcactgctactgagccacagagctatgtctgcccgctccccactaccaactgcaccttcctgcactcagcccaccacctgcctccctcaacactttaatctcacccatgccctcaacagacatttactgaaggcctgcttctaggagggcacagcgtgatccctccaccctccaggcattaagaatgtagtgagaggggccggtcattacagcagcttttccatcaaatcaacttcaggaagtgtcccttgtcaaagtttggggctatgggagtgtggaggcaggagggacttatttcatttgggggaacctagggtcatcttagagcagggcgttggcctgcagcaggcagcggccccaagcatagggaatgcagtcacgcaccgcataaccatgatggactgcatatgtgacagtgctcccgtaagattatactgctgtatttttcctgtgcctttgctatgtttagatatgtttagatacgcagctacttagcattgtgttacagttgcctgcagttttctgtaccgggccacgctgcccaggtttgtagcctgggagtaataggctagaccacagcccaggcgtggagcaggcgctgccttctaggt

SEQ ID NO: 220362 - DNA, 603 bp, Homo sapiens
tgttcctgctatgtccccagcatcgagaatggtgcccagcccgtagcaggtgcccaacaagtctttgctgaacgaatgcataagcgaatgaataaatgatgcaatggatggatgggtttaattacatcccgccctcgctgagaggagctttggtttggggtgaggaagagaaaaagaggaaaaagaatgaagaggcaaagtgggaccatctgggtctgactcatgctctcccgggctctgtctcttccgcctcggccctcctcctcccgctccatttttattatggttgctgacagatccctctctggactagactagaagcgatctgccaccaatttggaaagctcctgtatactgagcatggtttcatcttccctcgatcagtctctgtagaaacccaagccacctccaggctattattatgaacataaattaccatcccattgcagatgagctgcggagtcattaataatgacttctgattgatagaatgacaaataaacccagtttgactgcaggaaaccctcaggatctctcatacaaaaaagacaagtgggttaaaaaaaataatacaatgaactggagaaccaagggaccctgctg

SEQ ID NO: 220363 - DNA, 500 bp, Homo sapiens
atgagcatccattttgaccatggaaaaacctacattatgctactggtacaataaattgtacaccagatcaaaagttctttgagggcaggggccttaccaaagtcatatttggaacccagaaagtgccctggcacattaataatcacgtataatgtggcagaatatattaattctgtgagtgctcagtaaatgtcattgaatgatataagaaaggaaggacagcctttatattatattcatcataaacactggactgaatataagaccttcaacatccacttgtactacaaatgatcagcacctcttccatgtttactcagaacctctctttcatagcgcaaagcaggtaagttattttctttggtctggtttgttttttcaggaaagtcccctcttggcattttgttctgcgcctcaattttctgtgctcctactatcacctgacctcctggaggccattaaccatcctgatcttgtgtcaatggaatattttcctccag

SEQ ID NO: 220364 - DNA, 459 bp, Homo sapiens
gtcttcaatgaattattttgcccattactcttcttatacagaggtgaattccagattggcttgggacaatgactgtttatgctttaaccatctccaaacgcaaataactagcaaaactctttatctcattctagtattaggcactccaagttctgcagcaaatattcactctgatgaccatatggaaaataacacataatttctgctttcttgtatcttaaaatcagaagatgaagccaaaacacaagataaataggaaatccaaacagtgaccccaaaattgtgttttgtgaaagaagaatagaaacacaaaagtggagagagagacctcattaggatgtgagtagcaaagggggttcagtgaagcagcagagcttccgttatgtttataagagggataacatttagagataaatcttaagatagagaaaaaagaagctgatgcaccaagaaagagaa

SEQ ID NO: 220365 - DNA, 325 bp, Homo sapiens
cctcttgttctcatgatccctctgttaatagtgagtcacccaggtcacacagagagtaaatgtgctgagctaggactcaagcccgggttatttagataatgaaatgaaaggatcaggctgagcatggcagcctgtaatcctagcctttgggaggccaaggtgggaggactgcttgagtccaagagttcaaggccagcctaggcaatagaacgagacccccatctctataaaaacaaaaacattagctggtcatggtggcacacacctgtagtcccagctactcaggaggccgaggtgagaggatcgcttgagccctggaggtcga

SEQ ID NO: 220366 - DNA, 345 bp, Homo sapiens
acagaaggttcccttctaagatagggacgccaaggtgggttgatcatccggggtcaggagttcgagtccagcctgggcaagaagagtgaaactctatctcaaaacaacaacaacaaaaagctaaaaaaactatcagtgtaaatttgtgaagttaataatggtactgtgattgattatgtaagagaatatccctaatcttataaaataagcactgaagtatttaggggtaaagtgccgtgttgtatataatctgcttcttaatggttcagggaaaaaaaatcaaatgtataacatacatatataatgtttagagagagagaaacacaagtgcaaattataaaacaa

SEQ ID NO: 220367 - DNA, 282 bp, Homo sapiens
aatgaaaaactgagacttctaattcccaagatagtgtttatgaaattgtgttgcatcttttttcttttctttcttttttaaaagagatagggtctcactctgtacatagtggtacaattgtaactcactgcaaccttgaactcctgggctcaagcaatcctcccaccttggtctcctgagtagctgggactacaggcgtgtgctaccatgcccatttaatttttttatttttggtagagacgcagtctcactatgtgcccaggctggtctcaaactcctggc

SEQ ID NO: 220368 - DNA, 803 bp, Homo sapiens
aaaacctttttatcttaaaattccttgccactgttttggaaaaagaaaaggagagtcgttgttgcaggagatagtatttaaaattatgtgtgcatctatatatgatatggtaatttcctcctcataaaataagcaagtattatctcaaaccttgaaacctagacgcattttgttccagatcaggtagaggaatatggattgggagaaatatttagaattaaaagaaaattttttttcctcagctcgactatgtctgaaagttttaatgattctcaattctggcccagtgtagggctagtcatagagttcatttctggggattcacaaacatagtagactcaaggttattccaaagccttcacacaatgtgaaaatatcagtacactgtctctgggaaagacactgaaatttgtcaaatatttgagcaataagttgttattcacccagcttcttttcagagtgtcacagacacaccgatttagagacatgactctttggcttgaaatgtatgccataaccattaacctgccaaatgtacaaaatatttgagttttctgattttagcaatcatactctgagttttagaaactgggatatgaattttatgtgatcaccttcattgtgtgatggtatggataatgggaaaccactcagtgccaaatatctccttcttattcttgaaattgtacccaaaatgagattatattgttaaaattcatgcaagtaatttcttggttcagacatagtaaattacagatagactagagactataacagcactggatcctaagggacagaaaaga

SEQ ID NO: 220369 - DNA, 542 bp, Homo sapiens
ttgtgcgtaacacggtccctctcgctcaaccccaccccctcaatattgagagctactctaacttacaagaaagcccgacatatgacactgcagaaatgaactagcaccagttaagccaggatagagtagtaacaaagaaattacaagataccaagtcagctgagacactgacacttttaaatgctgaataagagccctctgatttaaaaaataaaaaaataaaaaataaagcttttcccaaacaaaatgtaaaagctacgaaaaatttagagcccagtttataattaagagtgccaatttctgggagtgttcattatttttgacaattcttaaatatgtttacagaaaaaattgtccccattacattttgaggcatgaatttttaggcaacatgcatggacatgagactgccttttatgaagacatttttgaaagtcaatggaaaatgtattttctcatggcctagaaccaagatttctgagacatctatattttgcataatgtgacacatccatttatttattttgagacggagtctcact

SEQ ID NO: 220370 - DNA, 545 bp, Homo sapiens
cactaggttccttaataactcaaatattctaggtgtgctcccatcccagggccctgccatgtgttttctctgcctggagtgttctacccccggaatgtcacatgagtctgttcctttactttgttcaacttcctgcttcaatgtcacaagatcacactatctaaaatagtgtaccctcttactacatcactctatttgttaccctcctttattattattttttttcataatagacatgcttacatgacactatactgtattagtggattgtcctttaggatttttttttttaaccgctgaatcttatacctgaatcagtgcttggcatgtctctgatgctcaataagtgttttgaatgaatgagtatgtattaaatatacgtgtatgcttaaacattgtgatacattagaaacttaacagcaggttgcctgggaagtgagactgagtctagcagtcagatttcttatatccatggtgagtgagagaaggggacattttaactttcatttcataccctaataaagtgtttgaatttaaaaattttt

SEQ ID NO: 220371 - DNA, 322 bp, Homo sapiens
tctgagatgggctttttcttggaggagtcatgattttggagaaaggcatgtagatggctactgtagggtaggaggctgtctagttaagggtggatcattgagggtataagagacagaaatccaacaggaaatgcattggtttctggaactgagaaggccagacatgtagctggatcccgtaggcagggtctgatctcccgccatcgttctctctctctctctgccttcctccatattggctccattctcaagcaggctctcccctcacgggggcaagatggctgccacagctccagactgcctctcagtaatcctggtaaaa

SEQ ID NO: 220372 - DNA, 218 bp, Homo sapiens
ggggcctagttccctgctcagtaagttactagcaatgagacttttcacctctctttcctgctgagtgaggtagcaacttccagcctcctttctttctcctttatccccagaagtaacttaattaactttctgggttagtagactaaatctcaaattgtttttaaaacccaaaaagcagttataaacttaaacattagcttgttggaagcctgatagtc

SEQ ID NO: 220373 - DNA, 408 bp, Homo sapiens
atcccctctcctctcccaaacataaagccctacaaagttcttatttccaaccttagccaaagcttcttagctctcatttctacagcttctttcctcaaaaaatctgctcccagccctcaaaccaaacccatcaaccaacgaacatgttactgtttggtcagctgctcatgtgatcagagcaaggcagtcttaccaagttaagacagtgcccaaagtggctttgtaaaattagccacaacaagtgtaaaatgagccatgaaacagtttttaaagatgcctggacacacctccctcacaaaaaataaacatcaaataatatacacaactaaaagtaaccctcaatccacaaaacaaaatcttccacttgatcactgacaactacagactgttaggagagtgtcaaaatta

SEQ ID NO: 220374 - DNA, 363 bp, Homo sapiens
ttaagtccacacaaaaatctgcacacaagtgtttatagcagctgtattcacaattgcccaaacttggaagcaactgagatgtccttcagtagagtagatacataagctgtggtacatccagacaatggaattctattagcaataaaaagaaatgaggtaccagccatgaaaagaagtggaggagtcttaaatgcatatcgctacatgaaagaagccagactgagaatgctgcacactttaagatcccagataacgatatgacattttgaaaaaggcagccactatggcgcactatggaaatacgatggtcgcgatgggtatgcaagtacaatggttgtgatgggttgaggagagggagggatg

SEQ ID NO: 220375 - DNA, 495 bp, Homo sapiens
ggagaaagttcactttatttacataacttatacgtaaaaatttaataaatctccctgcttcttttcttttgcatcataacaaccactgaaaataatatttctatggcagttgggggtaaatggacaatagcttttgtgaccagaggtgaatggcccagggtctccagcactccaggtcccactgagcctgccccacagctgagggcatcggtatttccacacacctataatgtacagtgccccagaacagagatcggatgctctgctttattcagatggggtgttgagagtattgtcattgtaattgaattagtaagtaagtatttatacactgttaaaatctggttggatttgtgtcccttcacaaaacaaattgcttaaatgaaaccacagagttaacataattgactacatctgcttctatgagctgctgttctaacatttaactagaatctaatttgaaattagtcaataaaaagtttattcaactgaaaa

SEQ ID NO: 220376 - DNA, 471 bp, Homo sapiens
cttttttttttttcctcccttcccttcctccctgcctctttccttccctccttctcttccttccaaccgtctgtccttgttttcctccctgcctctttccttccctccttctcttccttccttccttccgtctgtccttgttttcctcccttcccttcctccctgcctccttccttgttttaagaatttgaaaataaagtttcccaggagttttgaattggagtcgagatttaagtggctgaagttttgcatttcactaggaaaccaacagctttaatcatgaaatgaaagcacagctgggcattgggccagtcacagagtgtcttttgctctgagcacttcacaaacccattgtggaggggaggaaagagttaacataattgactacatctgcttctatgagctgctgttctaacatttaactagaatctaatttgaaattagtcaataaaaagtttattcaactgaaaa

SEQ ID NO: 220377 - DNA, 1038 bp, Homo sapiens
taagatagcatgtggcctattccccgcgcttttccagtggagaaagtagccccagaaatcagaagggtttgtccacaagcatatggctgtctgatgtcatccaaaccagaactaaagcctattgccctagtcgtttcccttctataacctaggcgtatttacagagtcttccttcctgtggtgttgtgtggattagaaaagtagctaagaaaagcacataccttattaaaattcactgcaatagatgataagtctgtagaattatagtgcagtagaagtttacctgtgagatcatctattagaatcccatctttttaaaactgaggaaacgatgcactaccccaagccactaagttaattcaaagccaggaatagatgctatgttccttgacttcttatccaacgttccttccttgtatgtagcccatctctgaatcatgagaggggagaggagagaaaggaaaggagggatattctcactctcttacatatatatgaaaaaatatatatgcctctgtgtgtgtgtgtgtgtgtgtgtgtgtgtacacacacccataataatgtttcagtgaacaacagaccacatatattactgtgatcccatataatataatactgtatttttgctgtacattttctgtgtttagatacacaaatacttaccattgtgttacatttgcccacagtatttagtacagtaatattctgtacaggtttgcagcctagaagcaataggctaccccatatagcctgagtgtgcagtagcctatatcatctagatttgtgtaagtgcactccatgatgtttgcacaaagtcgcctactgatgtatttctcagaacacctccccataagctaattgacgcatgattggagatatatatatatatatatatatatacacacacacatataaatatatatacatatgtaaaatagatacaataaatattttatacacattaatatttttggtatataataatatattacaaatataaaaattttaatatatgataataaaggatttctaaaaact

SEQ ID NO: 220378 - DNA, 330 bp, Homo sapiens
catcctaaactcaaagcaaagtccaactcgtcatcacctgtgacagtgcataagaaagaacatcttccaccaagttgttaaagtggtgtgtgtgtgtgtgtgtgtgtgtgtgtgtgtgtgtgtgtgtgtgtgtgtgtgtgtgtgtgtgcgtgcagatatatctccgggagcactctgtagagaggattacatatcagcacagcatgtgctgtgcactgtctgagagaaacagggttccctagccctaaaataactcgtggaacaaaactccacgagggcgctgacatatacagtggtgccaaagatctatagtggagagaggttcccagg

SEQ ID NO: 220379 - DNA, 416 bp, Homo sapiens
actgttttgttaaccttgttagcttgagtttttgtcactggtgacacaaaagtcctaacgtatcattcaagaatccaaaactagctgaacaggtagataattgggctcaaaactcaacaagataaatgcagcgcttgacctcaatgttaaaaatcaaccgtgtgtccaggaagacttttggggtgctggtaatgttctgtttcatgatctgagtgctgattagttacatgggtatgctcagcacatgaaaatacaactagttttacccttttctgtctgatgattatgcttcaacaaacagttttttgttttttttttgttgttgttgttgttgttgtttttaaatcaggatggggaaaatgtagcttcattaatgggaagctgacttgggggttttgttttcttataaattcaat

SEQ ID NO: 220380 - DNA, 553 bp, Homo sapiens
gccagatcaccttcaagccttctgttcaattctgggtgccacattttgataaaaacgtgataaaattagggcccgtcaagaagtagctagaaatgaaatatgtgaccatgtttaggaaaagatgtttgaaggagtcttggatgattgacttggagaaaagaaaaagcagggaagcctctgtcatgtgagtggaattagacttgctcagtgacagataagaggagaaccaaaggagagaaattagaggaagacaaattgcaactcgaggtgaggaatctctggctagcactttgggactgggtgattttctcctcatcaaaaatattaaagcacagactgaacaacaacccatggggatgcatagaggggactgaagcacatggcagggaaccaggcaatagttggatgtccctgagagtcctacgaccccatgggaggaggcagattggaacaacagttataagattaggagccacctacagggagcaggcagctaaagctacaaataggtaaaatgcccaagataccaactgcagcaagagaaagtaagtaa

SEQ ID NO: 220381 - DNA, 425 bp, Homo sapiens
cactctgtcacccaggctggagtgcagtggtgcgatcctagctcactgcagcctcaagctcctgagctcaagtgatcctcctgcctcagtctctcgagtaactgggactacaggtgtgcaccaccacacctggctacacacacttttacataactgagatggtatgagacacactgggtttatgcagcagtgcttttcttttggtttgcttccaccagatcagcccccctccctgtgtccagcctccagaaacttcacatatacctttctgtaggatactttacattcacataactatataaaaaattacatatacattgtgagcatatgtgtacatagagatacacacacaaggggtaagttttctggttgttgatttataaaactagtgttatataaacttatctgcatcttacaattctcac

SEQ ID NO: 220382 - DNA, 447 bp, Homo sapiens
tttgacttaactttgatctcaacgtctctaggaatcgaagtcaactatgaaaatgatttttattgtgggtaatggtaaaaaagagagagaggcgtgagccaccacacccggccaaaaaaattatttaagtatgcagtaaactcaaagtctgtgtggactctatttgcagggtatgctttttccaagccagatttgatcacatggatggaacaagggagaatgctattaatcagcgaacagggatgcttagataaaacaagaaggacaactagccctcctactgatgaacagttgaacatgaagaatactggaaagttgctatgttttggtgagtaagatggatttaagatcatgaattattttattttcctagccttgtttcctgaatctttctttttggatatctgactagatctagtcaataaaaaaagttgttttgatggagaa

SEQ ID NO: 220383 - DNA, 384 bp, Homo sapiens
  misc_feature (368)..(368): n is a, c, g, or t
ggaggccgtgccaggcagggccggttcgtgcggaaccgccatggccgagccggcttcggtaactgtgacatttgatgatgtggccttatatttttcggaacaagagtgggagatcctggagaagtggcagaagcaaatgtataagcaagagatgaagaccaattacgagacccttgattccctggggtatgctttttccaagccagatttgatcacatggatggaacaagggagaatgctattaatcagcgaacagggatgcttagataaaacaagaaggacaactagccctcctactgatgaacagttgaacatgaagaatactggaaagttgctatgttttggtgacgaaggaactcccaggacanaagaagaggattgccg

SEQ ID NO: 220384 - DNA, 1147 bp, Homo sapiens
gcaattcactttggattttctaatatcccatttctaagaagaatggcagactattgaacaggtgtattttaggtcacgtggggactgcatccacctgaaaatccaccgttgacttatcaggaaactcagagatcaggatctttcacagagtagtcttttaagaagattcagttgtcaacagctagcagtctctttgccaaataattatatctgtgacttctgaaactatttggctgcctaaagttaaaggacttggggaaagtccttccactgctcttctgcagtagtgtcacaccactcagtgcagggcccaccaagaagaaagcagtgtcaggatccacatggcactatggtaactttgtgaaaggggacattttctccctctgaacttctcttcataaagtcattgtgcttcctcttggggatcacctgttcagtctcaatgggctttgatgtgctcctggatcaagtgggtggcatggggagattccagatttgtctgatagctttcttttgcatcaccaacatcctactgttccctaatattgtgttggagaacttcactgcattcacccctagtcatcgctgctgggtccccctcctggacaatgacactgtgtctgacaatgataccgggaccctcagcaaggatgacctcctgagaatctccatcccactggactcaaacctgaggccacagaagtgtcagcgctttatccatccccagtggcagctccttcacctgaacggggaccttccccaacacaaatgagccagacacgggagccctgtgtggatggctgggtgtacgacagaaagctctttcctctccaccatcgtgactgagtgggacctggtatgtgaatctcagtcactaaaatcaatggttcaatccctatttatggctgggtcacttctgggaggtctaatatatggccatctttcagacagctcctgctctcagtctcttgcgtcggtgcctgggtggcttgccgcccacactaattaaactaaagagcttctgcacagcaaaagtaactatcatcagagtgaacaggcaacctacagaatgggagaaaatttttgtagtctatccatctgacaaacagctaatatccagaatctaaaaagaacttaaacaaattta

SEQ ID NO: 220385 - DNA, 517 bp, Homo sapiens
tttcaacacacgtatgagtaattgtcaagagtcagtgagtgctcgagtgtgatgtggtctgtggcgtttgcctcgcagtgttgctttggcttgggataactgggcgacagctcccttccttctgcagctgcctgggagtcccaggagaaccccactgataccatttataaatgctggacatgtgacattctgcttggtgccagcacatctggaatccgacagcgtagttagattcttggtcagcaaacccgtacaggagcgtgtgaactctgcatttgcttctcccggacaaaggtgagttcctggtcactgtgctggatggcaacaggtgtggcctcaggagcaggacagagactggcacccacgtgcaggagtagcatctgcaaggaggtgggggatgtgacagacacaaaaccactgaaatcctgaaagtgcgagctcagctgttaccatggaggagaggcgcaggtaagaccagattgtttctcattgttgcacgtttctgaaaatgacccta

SEQ ID NO: 220386 - DNA, 446 bp, Homo sapiens
gctgaaaagtattgtgtaaagcataaaattcaggtgtaagtactaagaaattttgaagacttacaaacaggcaaggatcaaatacttcttgttacgtaaatcatgttttatttgtagaacattgtgaagcattcataacaaaatctgagattcacctggtttcagtttcaagtaaatgtgaaactcagactggttcagcaaaagttttgccaaggttcataaactttcatcaatgtgggctgatttttttggaagggggtgggaagtaggactatccaataatttttaccatgtttggactagatttctttgcaaatgaaaacatgcagatgaaagccaaaggaggtaaaatgcagacaatcttatgcttactttttataaatacgatctggtgcaaattttctttacacttttaagaaaagttttatgtcctttttggcaggcca

SEQ ID NO: 220387 - DNA, 471 bp, Homo sapiens
cccaccacctgggccgctctggcagcccaccttcttcccatctgctctaaggctctttggagtcagccagcctccttggaaaacgctggagctgagggccgacccgccgccccttcaaggcaaatccctcgagagcacaggttctagacgcccagggcggctggacttagaggcagagcagggaggttccgaaggtcgcctgggtgaggggtgcacagcagaagggccacccaccccaaagcccaagagccgctcagcccagctccctgctggccgagccgcccccggctctgcgcttcctcccagggcaccaaggccttcaacgccaacacgtggggctgtcaccaggggaaaccggaggcctgagctcagcacctctggacccgcacccggctagcctccagcctcccttcaaacttcggtcccttcccggctgtagaggaggtgactgaggcggaagccggcggccgc

SEQ ID NO: 220388 - DNA, 165 bp, Homo sapiens
tcatccagcaaaagctggtagaggaactttggtgtttttccatttccctagtattgtagtgagataattttacacatttgcaaaccttaaataatcctacacaactcctttgtgtttaaattgccctagaccttataggtgaggtttattctccctttacatatt

SEQ ID NO: 220389 - DNA, 414 bp, Homo sapiens
ctgcctcagcctcccaagtatctgggattaaaggtgcccgccaccatgcctagctaatttttgtatttttagtaaagacaggatttcagcatgttggccagcctggtctcaaactcctgacctcaagtgatccatccaccaatctcccaaagtgctgagattacaggcgtgaaccatggcgccaggccagtctttccaatttttgattgttggctgttctctgggtctagaatgtcttccacttatctgaaaatacctctaattgcctttctcaacattttcctgctgtaggaaaagatacaaataaatagcatctactgaacccaggtttcagtatgtgaaagacaagcattctcaatagacaaatatgccgttatacctaataaattccagaaagagagtctaattgtgttg

SEQ ID NO: 220390 - DNA, 643 bp, Homo sapiens
gcactgtactcattgtgaaataacttgatgagaactgacactggctgtcatctagttcaaataatctgtgttacacatttcagatgaagaaccccagttaagaaactgtgttgtgttgtccagactaggaacttctttcatggttcatcagaaaataggattatatttaaagcataaaataattatacttttaattagtccacttcttcacatcatcatatgtggtaactcacatgaatgtaagattaatctcccttttatctactaccctgaaaacattaaaaaaaaaaaaaaccccacactcttctgatttactcagaaaactttagaggaaagtatccatttttgagttgattaacataaaccacaacaaacacagacttggtttactatagctgtttcaaatctcactgcacatgagaatcactggagtaccttgttgaaaatagagacctctaattttcatgttacacccactgaatcaggatctcagtagtggttccaggaatttcctacttttagtagttttcaatgtgatttttatgtactcagcctgaaactaaccagtgggcctacaatttgggaaccatcacttttaatggtttacctgtagttttcatgttttatatgtttggctttggta

SEQ ID NO: 220391 - DNA, 573 bp, Homo sapiens
aatgccaggaacatcggggctttaaaccacacaaacttatcacctgacaggtcaggaggccccaagtgtgaaataagtctcccaggaatgaaatcaaggtgtcagcagggctgcctgccttttgggggcctctagaggagactcccttgcttagcttcttccagctagtagaagctgcccgcagtccttggctgggctgcgtcccccatggtggaagccagcaggcagcatcttccaagctctctgactgcatcttgcctcccttcctaacctgaagacccttgcaatggtgttgggcacacccagaaatccagggtcatcccctatctccagatcctcaatggcatctgcaaagtccctgtgttagtctgttctgaaagtccctgtattagtctgttctgaaagtccctgtattagtctgttctcaaagtccctgtattagtctgttctcaaagtccctgtattagtctgttctgaaagtccctgtattagtctgttctcaaagtccccatgttagcctattctcacactgctaataaagacatacccaaggctgggtaattcataaaggaa

SEQ ID NO: 220392 - DNA, 311 bp, Homo sapiens
gggtagagctgagtgcggtggctcatgcctgtggtcccagctactcaggaagctgaggcaggaggattccttgagccttatagctggaggtttcagtaagctatgatcatgccactgcacgctagcctgggtgacaaagtgagactacctcaaaaaaaaaaaaaaaaaaaaaacatgcagggcaaacaaggtagagaggatgaatgggagtacagcgtagacgagtggccaagagttaattgctaatgaaattttatacacagagattcattgtactgctcactctgcttctgtgtatgcttgaaactttt

SEQ ID NO: 220393 - DNA, 268 bp, Homo sapiens
agaaaacaactttatttgccagtatttttgaaacactgctgagcagtatcttgttcttgtaataccggctgtcaaaatagcatgccgactgcttccttcatcaatagaaaacaaatgcaagattccagagagtcatttttctatttttgtggtctctagccttcttgtaattatttattctcatcattgtatgtgaatagaaacatttctcaattgaaattaatgactgaaggtggaacagaaatacagttttcagtgatgtgctatt

SEQ ID NO: 220394 - DNA, 521 bp, Homo sapiens
agagaccatgtgacaaagtttacttctgatcagcgccacaagtccaagaagtcttctcctggaactcaagacttgctggggattcaaacaggaaccaggaaaaggacatacagatgagtcagcaaatactcactgtacaggaggaccagggttctgcgtatgtggactactccatgacctcatgcaatcacaatgctttaaataacatttgctactaccgcaggggctttgtaaaaaggaaattaagccccaatgaaaaagaggagaaacacagagcacagcatctgacacataataaatttttgttaaatggatgtttgataaagaatgaccatgtgaaagatttagagtttcaaaatataacctgaccttttgtccacattaccatctttatttgtattgggctttatttacaaacttgaaagttattctctttaagtttaacatcttttgccgctgctaccacctgctgtctccaccctgctcaacctcaggcaaattcagggaagattcggagaatc

SEQ ID NO: 220395 - DNA, 539 bp, Homo sapiens
tggcatccccagactccatcctttgacaccttaagccaataaaattgcagccttctgcttgggttctggctagcctgcacatgcaggaaggcaagttctctcagctgaagggccactcagtgcagagctcttctttgaagggtttaatctcttccagtctctgcctgcttttggttgcttctccaatcctatcaaatagatgtcttttatattttgtccagagtttatcattgtgaccaatgtgagggttaaccaattgccaggataagaaccctcagtatagtgtcattttaaaaatgcatttgttgtgaaatatggttagcttttccattaataaaataatgcatttttaaacaaaaataataataaaatgaatgtttatgtgtcagaaaaaaatctgaaaagatatgttccaagttgttatttctgaacagtaggattattggtgatttcaatgttttttaacttatatattttctacttttttctgtaacaaacataggtagaacagtaaagtcctttctttgttctcctgggta

SEQ ID NO: 220396 - DNA, 460 bp, Homo sapiens
gctagtccattctggctttcaggctcagtcacttggtcaccagtccccagtcctggacctactgctactgtccttttatccggtcctccctcgctgtcctcttcagttgcctttgctagggaccggcctgtccctttactacctaagtcatcgtcagttcgcccaacttccctccaaatctgcccctcacggtacgcagggatcgcccttccttcctgcctttggactggtccaggtcctcctccgccctccttcacgcaaaggcctcctccagggggactacctgtccctcagcccagaggtccccctgtccaagcggggtattccaccaggccatatgacctacccacccgacaactgaagggggcgtggatgagctctgtgactctgaatgctactttataaatcgactgtcagcgttttctaattaaaggagctctggggtaaagatcttaaaaac

SEQ ID NO: 220397 - DNA, 472 bp, Homo sapiens
taaatatgcatctgctagtgttttggcaactctaagttacctaaattagttttgatcaacactgtcggatttttaaacccaccaacgtaataaaagcaagtttaaaaaaacacaaacaaaccctacagtacattgtgtgctctgctgttccaagcctcagcttcaagacaaaaggagagcgagactttgtcattcgctagctgttaataatcaagagaagatctgccagacaagctcttcgagggctctgtctgtctggaccaggtatatactgcaatacacaaagggctttgcagggggagaaaaatgagtgttcatggacaatgatgcagctttcttaattaagattttcattactgatacatacattaagttctgcaactgcaagagccaaagcactgtcatgtgcaggtagatgtccctgattccatcttcaggcagtaaagctaaaacatattaaatgtgcacccag

SEQ ID NO: 220398 - DNA, 428 bp, Homo sapiens
tttaaaggttagcagccatttgaggctaagatccggcacagcgaattccttttcccaggcctaggctggtgaaaggctatctaatggctttctaagcagagtgtggaaacatagctgctttggtaaggaaggggcagttcacgaccccatccacaccagtggcctggccaggactactttgcgattctattcctgttcttttaaaaaaagggttccagcttcttggcactgtgtgtgtctggtaccccaggccctctgttcaccctactgaggagatgggcctacagccttcagcaaggagcctcccagctgggaccagcagccctgtctcttccattagctttctaaagtggaaggccagccgcaaacacaggtgcattgagcaacactttgcccacctggcagcatattccaggtcctatgccaag

SEQ ID NO: 220399 - DNA, 390 bp, Homo sapiens
tggattattagtttgaaaaacagtaagaatgccaactgccaaaaccaaacttgtcctggaggtttccacatctgaatttggaagctaacctcctttaggtttaagctactttgttaaaaaaaaaaaaaaaaaagaaaagaaaaataaaacaatggaataaacagccttttttcccctagattctgcaattctgtccatttcatagagccataatgaacttaaaagttaggttttatataaaagagattaaatagacaccatggaatcaaatcttacctgaaggataaattctatttaaacattccagcagagctgtttttctactaaagaaaaatagtcattcccttaaaagcaattctagcacaatgggtatatttggtaattaggcaa

SEQ ID NO: 220400 - DNA, 482 bp, Homo sapiens
tgtcttgccagggggatcatatctgagtctggtcaagattcacattctagctgccaatttgcaggaaacccagaggacaaaggagcgttcagcaaaagctagatggcaggtcaaatgcaaggttcatcaacagataagttgcaagaaaaagagcaagacagaaagaaacttcagatcaaagagaatgtaaaagacaaatcatgcttttaaaaatgtgcaagattaaactacaacatataggaatgcacacttgggtgataaagctataaacacaagggctagagtgagaaatggtgctgtgactgcaatgaggtgtgtggagggggcccctcaggtggctgccaaggctctctttcttgatctggatggatttaggagtgtttcctttatgataattcactaagctacacatttgtcttgtactgttctgtttctctgctttattttacaataaaatgcatatataggtaggtgtatatata

SEQ ID NO: 220401 - DNA, 406 bp, Homo sapiens
ctattcttggaataaggatcaataaatgagtaaagtgccactggctctggtagaaatgaaaatggtatggccactgtggaagacagtttggcagattctaacaaaactacacactgtctcaccatgcactccagctatccagctccttggtatttacctaactgagttgaaaacgtacatgcacacaaccaatgtttgtaatagctttatttgtaattgcccaaacttggaagcaaccaagaggtccttcagtagatgaatggatacgtaagcgttggtacatctagacaatggaataatattcagcactaaaaggaaatcagctatcgagccatgagaatataagtgaaaaccttaaatacatatactaaatgaaacaaaccaactggaataggccatatactgt

SEQ ID NO: 220402 - DNA, 344 bp, Homo sapiens
tgcatattagttctctcaccaattatgttaggcaggtccaagcatcaagtgtcaagatgataaataaaaaataacaccacgtctggagaattgcagagatcagcacctccatcaaagactaaagatgcagggaggatggttcctatcatatcgccatttggctcatatgtataaaaaaccatatggattgtggtggatgactgtgggcttccatcaacttaaccaagtgatagccgaaattgtagctgctaggctggatgtttacctgaacagatcgatacagcctgtggcacttggcatgcagctattgatctgataaatgcattcttttcaatcctcatgag

SEQ ID NO: 220403 - DNA, 520 bp, Homo sapiens
aatgatgcagaccactaaggaagccataaagtaaactatcagaagaaagtgactgaggagatttgcccagcttttcatcactcaacatatcagtccaagtgggacaacagaagtcagttctcctgaataaaaaaggcagcaacattgcaactgtgcctttgacagttcccatataaagcttagcttagaatttatagacaaaccagaatgtactctgggaatagtactcattcttaattcatttttctagaagaatttgtgttgactagaattttaaatgaaacagaaaggggcatgttcctatttaactaaaatcacggtgtgtgtgttattacaagggctagactgtagatggaactaagtggcataacactaacaagagcaattcagtgttatgttcaggttttttacattcctgctagtattttatttcttttaagttcattatatgccactgtgtacttattttaagttcagatatattatatgacaaagttaaccaagaatattttctttcacc

SEQ ID NO: 220404 - DNA, 423 bp, Homo sapiens
tcttaatctttaaagttgtacttgatactgaaggcatttgatgacaagtgatactgtaaaaccagctgcactctggcagggatctagaatcaggaggatgggtgggccaacccattaatcactgtctttagaccacagatagtcttcaagtaagccactgtggagatctaagtcattacacatacatagtcacacattgtagaggatatgaagcatataatgcaaattttgactatatttattttaaagtctttcccaatgattaaatggtataatcctatgtccttcacaaccaaatttgatcttcttgaccttggatgtgccatttgcacacagcatgtggatcatgctgaaaaaggagttactaaatcagaatgaacttagccaatggaatgagctcaaccaaccatttactgtaatggc

SEQ ID NO: 220405 - DNA, 566 bp, Homo sapiens
ctaggagtagcttggaactgggtaagatcttagaatttagagaagccatagcctgaacaccacacacttctcactgaggaagataggggtgataagatcatggaggaactggagaggaatatgaagacagtgcctacaaccaccacatacacagtaaacattctctcttctcagtggttgaagttgttcctgattacagctctcttatctgttctccctttgatttgctgactgatggatgcagtccatttaagaaatgagcatagcatattggaaagagcactagacttagattctagtcccagttctgtcacttaacagctatgtgttgaggtgaggtgagggaagagtacttggatctctggatctcttttaactttaatattctcctctataagggtagaagatgaactagaggatcacaacagtaccatttagttttccgttcagtggcaattttgacatacttttttgagcatacataatctcagaatcctatgcctcaaaactttgattcattggacagatttcaagaaaaatataatttaacaaatgtaataaagaaa

SEQ ID NO: 220406 - DNA, 440 bp, Homo sapiens
tttctataaaagtatgaatttctccgctaagtagtctgagaaattatctctatacaaagagctccgtgggggatttgcagggtttggaagtgaagaagagaatgaaaggagcccctgaacagtttcagtgactctcaggaatttcaattctccattgctacatggcttattattattattattatttttaccaaaacatatgatacccctttctaggccactactgttgctccattttagcgttttcagagaatgttttttcttccttctgattagcctgtttttctgctcctgctgccgctgctgctgctatcctgatgtaagtgcctgtgagtaagcagtgagctccagtgtacagggtttattttttttctccatgattctcaacagcttttctattagaatgattttatgcctggatggtttgactatctttttct

SEQ ID NO: 220407 - DNA, 467 bp, Homo sapiens
ggagatggttgaataggaggaagactggtgagttttatatagtgatgaaactcttctgtgcgatattgtaatcttggatacatgactctgcatttgccaaaacccatagcactttacagaatgaagagttatccttaaagcatgcaaattatcaaaaaatccacttaggtggttgggggatcccaggatagaatgaagaatgtgacaaaaacaatctaactgtatcaaaaatgtataaaacaacttaagagcgtggaaaaaaaagatgctgagctaagtagctctggaaatgattggagtttataaaatgaaagacaaaataaaacacacaaaaacattctgctctaacagaaaaacttaacagaaaaacttgctttccacatgaatacaattaataactctgacagtgctacatatgtatactgcaattgaagagttaataaattcttatggctgataatgggagt

SEQ ID NO: 220408 - DNA, 1176 bp, Homo sapiens
tttttttgagacagtctcgctctgtcacccaggctggagtgcagtggtgcaatcttggctctctgtagcctccacctcccgggttcaagtgattctcctgtctcagcctcccgagtagctgggagtacagtcacatgccaccatgcctggctttgtatttttagtatttagtatttgtatttttagtagaaacaggatttcaccatgttggccaggctggtctcgaactcctgacctcaagtgatcagtccggctcggcctcccaaagtgctgggattacaggcataagccaccgcgcctggctgtgacattcacattctaaacaaagccagctgagggtgtatggaatcaactagtgtgcccctcactgggtaggccccaaactgggagcatgaagaggtgacatgccatctgtagtttcacagttgagggctggtgacaagggaagaagaggggagggctctggtcatgtccagaatggctggcctggctggtgagggtcacagaccagtcatccatggaggtttgcccatggactacacgcaaagatcctaacaaagaggaatcactgttggcaaggccccactgtgtccccagcaatatggaaggaagtgtgggtccatgaagacagtgcctggcagtgtgcagcaggagagccttgggtagggcaggggtttgcacctcatctttcagagctgaggggacagatggcagtttggactctgggctgctcagaggctgccttgtggattttttagttttgacaaaatcagattccccagcacctctgcaagccttctgcaatcctggcccctctcccagaggcctctgtgtactaagtgctgctccatcctcccccatgccacccctccccatacggatccaagctgtttccttatgaggtcaaggaattctagatttgccttctccctaaggagcaccccccacccgttctgtacctgcctcgacactctgccttttatgtcccacccctttgccccacaatcaggtcccaccacagatggcaccaggaagctgaactgtgatggtccccctgcacccaccctgtgggtacctggagcctaagtccagccccattgcagtgcagctccactccagaccactggaagccaggcaggctcctgagcagcagagcctccatcttatacagggaga

SEQ ID NO: 220409 - DNA, 479 bp, Homo sapiens
ccccaggttagagctcatgggggtcaactaagcgagggagggaaggcgaaggcaaagctggccttgcacctggacagcggcctggctcctccccacacctgccttcatttatgactctgaaacatcccccacctgaccaagggagccactctccagttctctcactccaccagggccctccgtgagccaggaccgggtcacatctctcagccaagtctagaagctctggctagaggagaggaagcgtgcagagggtcctctgccaaagctccctgcctggcccgagcccgggcatgctgggattagtgcaacaccgccccagtgtgcctcctctgccttctaccatgccagtttaaaagcaagaagactcccccttcacatcctgaggaaatccccttcctggtgaccaactgatgcaatgaaagtttgaaaagttcttcattttctagaagttcttgaataaacatggacttactaaa

SEQ ID NO: 220410 - DNA, 1630 bp, Homo sapiens
ccaagcccggagctccaacatggatacagaggtgctctggggccaccgattcacaccagtcctcaccttggaaaagggcttctatgaggtggactacaacaccttccatgatacctatgagaccaacacacccagctgctgtgccaaggagctggcagaaatgaagagggaaggccggctcctccagtacctccccagccccccactgctggggggctgtgctgaggcagggctggatgcagaggttttttagtgctttttggcccaagaatctcagagtgcttctaatcatcacagtagttagtgtgatatgtattgttttgttttgttttgttttgtttttttcacaatctcagccagacctgtggggggacctggggagaaagttgagtgtcaggggacatgatgagccagttggccctgaaacaggaatggggcaaagagaaaggagagccaggagcatttaaaaatcagcatctgggccaggcaagatggctcacacctgtgatcccagcattttgggaggccgaggcgggtggatcatgaggtcaggagatcgagaccatcctggctaacacggtgaaaccccgtctctactgaaaatagaaaaaattagccaggcatggtggcaggtgcctgtagtcccagctactcgggaagctgaggcagaagaatggcatgaacctgggaggtggaggttgcagtgagccaagatcatgccactgcactccagcctgggcgacagagcgagactccatctcaaaaaaaaaaaaaaatcagcatctgccccagttgtggccaagacactctgacctcagggctcagcaccttcaccatcaagttcagcctgagccaagctcccagcccactgctgaaaagcccctgggcctccctccgcaggcagagttacaaccgggagggctgggcagggagggcaggaattgcctgcggaaggcaaagggaatggctgcccctcccaggctggaaacaagagggcaagcggggtcagcaggagaattcgggggcagggtgagtgttaagagaaaaagagtagagaagagcctgaaaatcagcaacttccagggcttttctgatctggaggcccaagagcaagggtggaggggcgcagattgtcaggtcccgaaatgtgtgttgacacacatgggcttcgggttagctggcctgacatggagatagagtgccaatgttcccaggccacagaattatggaggcctcacccacagtattcacagctctcaactggcctttgagaatggaagccttttcctgccctggatatggcgcttcttcctgggagaggagcagagccacagagaggtaggaagttgaggcagagcaaagggaaggcttcagagcttaggcccggttcatctcagatgtgttttctaggcctggggctgaaaggaagaggagtggggcatgcatgctgggattagtgcaacaccgccccagtgtgcctcctctgccttctaccatgccagtttaaaagcaagaagactcccccttcacatcctgaggaaatccccttcctggtgaccaactgatgcaatgaaagtttgaaaagttcttcattttctagaagttcttgaataaacatggacttactaaa

SEQ ID NO: 220411 - DNA, 1355 bp, Homo sapiens
ccaagcccggagctccaacatggatacagaggtgctctggggccaccgattcacaccagtcctcaccttggaaaagggcttctatgaggtggactacaacaccttccatgatacctatgagaccaacacacccagctgctgtgccaaggagctggcagaaatgaagagggaaggccggctcctccagtacctccccagccccccactgctggggggctgtgctgaggcagggctggatgcagaggttttttagtgctttttggcccaagaatctcagagtgcttctaatcatcacagtagttagtgtgatatgtattgttttgttttgttttgttttgtttttttcacaatctcagccagacctgtggggggacctggggagaaagttgagtgtcaggggacatgatgagccagttggccctgaaacaggaatggggcaaagagaaaggagagccaggagcatttaaaaatcagcatctgggccaggcaagatggctcacacctgtgatcccagcattttgggaggccgaggcgggtggatcatgaggtcaggagatcgagaccatcctggctaacacggtgaaaccccgtctctactgaaaatagaaaaaattagccaggcatggtggcaggtgcctgtagtcccagctactcgggaagctgaggcagaagaatggcatgaacctgggaggtggaggttgcagtgagccaagatcatgccactgcactccagcctgggcgacagagcgagactccatctcaaaaaaaaaaaaaaatcagcatctgccccagttgtggccaagacactctgacctcagggctcagcaccttcaccatcaagttcagcctgagccaagctcccagcccactgctgaaaagcccctgggcctccctccgcaggcagagttacaaccgggagggctgggcagggagggcaggaattgcctgcggaaggcaaagggaatggctgcccctcccaggctggaaacaagagggcaagcggggtcagcaggagaattcgggggcagggtgagtgttaagagaaaaagagtagagaagagcctgaaaatcagcaacttccagggcttttctgatctggaggcccaagagcaagggtggaggggcgcagattgtcaggtcccgaaatgtgtgttgacacacatgggcttcgggttagctggcctgacatggagatagatgtgcctcctctgccttctaccatgccagtttaaaagcaagaagactcccccttcacatcctgaggaaatccccttcctggtgaccaactgatgcaatgaaagtttgaaaagttcttcattttctagaagttcttgaataaacatggacttactaaa

SEQ ID NO: 220412 - DNA, 1618 bp, Homo sapiens
ccaagcccggagctccaacatggatacagaggtgctctggggccaccgattcacaccagtcctcaccttggaaaagggcttctatgaggtggactacaacaccttccatgatacctatgagaccaacacacccagctgctgtgccaaggagctggcagaaatgaagagggaaggccggctcctccagtacctccccagccccccactgctggggggctgtgctgaggcagggctggatgcagaggttttttagtgctttttggcccaagaatctcagagtgcttctaatcatcacagtagttagtgtgatatgtattgttttgttttgttttgttttgtttttttcacaatctcagccagacctgtggggggacctggggagaaagttgagtgtcaggggacatgatgagccagttggccctgaaacaggaatggggcaaagagaaaggagagccaggagcatttaaaaatcagcatctgggccaggcaagatggctcacacctgtgatcccagcattttgggaggccgaggcgggtggatcatgaggtcaggagatcgagaccatcctggctaacacggtgaaaccccgtctctactgaaaatagaaaaaattagccaggcatggtggcaggtgcctgtagtcccagctactcgggaagctgaggcagaagaatggcatgaacctgggaggtggaggttgcagtgagccaagatcatgccactgcactccagcctgggcgacagagcgagactccatctcaaaaaaaaaaaaaaatcagcatctgccccagttgtggccaagacactctgacctcagggctcagcaccttcaccatcaagttcagcctgagccaagctcccagcccactgctgaaaagcccctgggcctccctccgcaggcagagttacaaccgggagggctgggcagggagggcaggaattgcctgcggaaggcaaagggaatggctgcccctcccaggctggaaacaagagggcaagcggggtcagcaggagaattcgggggcagggtgagtgttaagagaaaaagagtagagaagagcctgaaaatcagcaacttccagggcttttctgatctggaggcccaagagcaagggtggaggggcgcagattgtcaggtcccgaaatgtgtgttgacacacatgggcttcgggttagctggcctgacatggagatagagtgccaatgttcccaggccacagaattatggaggcctcacccacagtattcacagctctcaactggcctttgagaatggaagccttttcctgccctggatatggcgcttcttcctgggagaggagcagagccacagagaggtaggaagttgaggcagagcaaagggaaggcttcagagcttaggcccggttcatctcagatgtgttttctaggcctggggctgaaaggaagaggagtggggcatgcctgggacgggaactgcctctgtgggctccccactcccagggaaggggctccataagctttgctcctgggctggatcttgagaggtgggcagggtcttcccaccagtggcagggtgtgcagttgtggtcccaagccttggagggaatggggaatgggctggcacccggctcaggg

SEQ ID NO: 220413 - DNA, 1309 bp, Homo sapiens
ccaagcccggagctccaacatggatacagaggtgctctggggccaccgattcacaccagtcctcaccttggaaaagggcttctatgaggtggactacaacaccttccatgatacctatgagaccaacacacccagctgctgtgccaaggagctggcagaaatgaagagggaaggccggctcctccagtacctccccagccccccactgctggggggctgtgctgaggcagggctggatgcagaggttttttagtgctttttggcccaagaatctcagagtgcttctaatcatcacagtagttagtgtgatatgtattgttttgttttgttttgttttgtttttttcacaatctcagccagacctgtggggggacctggggagaaagttgagtgtcaggggacatgatgagccagttggccctgaaacaggaatggggcaaagagaaaggagagccaggagcatttaaaaatcagcatctgggccaggcaagatggctcacacctgtgatcccagcattttgggaggccgaggcgggtggatcatgaggtcaggagatcgagaccatcctggctaacacggtgaaaccccgtctctactgaaaatagaaaaaattagccaggcatggtggcaggtgcctgtagtcccagctactcgggaagctgaggcagaagaatggcatgaacctgggaggtggaggttgcagtgagccaagatcatgccactgcactccagcctgggcgacagagcgagactccatctcaaaaaaaaaaaaaaatcagcatctgccccagttgtggccaagacactctgacctcagggctcagcaccttcaccatcaagttcagcctgagccaagctcccagcccactgctgaaaagcccctgggcctccctccgcaggcagagttacaaccgggagggctgggcagggagggcaggaattgcctgcggaaggcaaagggaatggctgcccctcccaggctggaaacaagagggcaagcggggtcagcaggagaattcgggggcagggtgagtgttaagagaaaaagagtagagaagagcctgaaaatcagcaacttccagggcttttctgatctggaggcccaagagcaagggtggagggatgctgggattagtgcaacaccgccccagtgtgcctcctctgccttctaccatgccagtttaaaagcaagaagactcccccttcacatcctgaggaaatccccttcctggtgaccaactgatgcaatgaaagtttgaaaagttcttcattttctagaagttcttgaataaacatggacttactaaa

SEQ ID NO: 220414 - DNA, 364 bp, Homo sapiens
acacttaggattctgcctggaacagctcaataatgagctcaataacattttattttattttaaattttattttaagagatagagtcttgctgtcacccaggctggagtgcagtggtgagtcatggctcactgcagctttgaacttctgggctcaagagatcctcttaccctggcctcctaaagtgctgggattacagctgtgagccaccacaactggccttcaaaattaataaaggcttaagaattgctttgttgtgctgtgcttgcttcagcatcacatataaataaaaattggaatgagacagagaaaattagcacggcctctgtgcaaagatgacacataaattcataaagtgttcatatt

SEQ ID NO: 220415 - DNA, 244 bp, Homo sapiens
ttcttttctttctgttccttagactataatctcaaccgatctatcttcaaatcctctgattatttcatctgcattctagaatctgctgttgagcctctctttaaaactttcatttaaaaagtgcttattgattagttcagtgattttcatcctttctggatgtttctgactgatttttatcctgtttattgctcatattttattgtactttacatgtgtaatacccttttattgagtcttgaac

SEQ ID NO: 220416 - DNA, 387 bp, Homo sapiens
aactattactatattggggcctatctttctctagctctaatatttgctttatatatctgggtgctccagtgttgggtgtgtatatatttaaaattactatatcctcttgttgaattgacccctctatcattatacagtgaccttctttgtctgttcttgtagttttagtccttgtcaggaaaaaaaacaaaacaaaactcgctctgttgcccaggctggagtgcagtggcatgatctcggctcactgcaagctccacctcccgagttcacgccattctcctgcctcagcctcccgagtggctgggactacaggcgcccgccactgtgcccggctagttttttgtatttttagtagagatgggcttttactgtgttagccaggatggt

SEQ ID NO: 220417 - DNA, 365 bp, Homo sapiens
agagagagagagaaagaaagaacagtcaaaaacaaacaaaaaaaaaaaaaagaaggaatggacttctagcaagtttctttgcctcctgcatgcaagacccatgcagctgcttcttgaggcttgctttgcgtagggccaactttgtccacataaactcaccaagagattttttccattatgatcccattgatggcaccaatcaatttagtttaaactcattcttagttagtgatgaaagatgaaaatcttaatttctgtgcaagctgttttgcatactgctgattagaatgcatgcattgaaaacgaacaaaagaaatctacaaaaacaaatataccttttcattttgctgtacattttaccacag

SEQ ID NO: 220418 - DNA, 665 bp, Homo sapiens
gagccagggtctccctctgtcatctaggctagaggctggactgcagcgacatgatcataactcactgtaacctctaactcccgggctcaagcaactctcctgccttagcctcccaagtagttaggaccataggtgtgcaccaccatgcccagctaaaaatcattttgggtccaggcacacagtggctcacgcctgtaatcgcagcactttgggaggccaaggagggcagatcacctgaggtgaggagtttgagatcgtcctggccaacatagtgaaaccccgtctctatgaaaaatataaaaattagctgggtatggtgacacacacttgtaattgcagctactccggaggctgagacaggagaattgcttgaacccaggaggcggaggttgcagtgagccaaggtcacgtcactgcactccagcctgggcaatagagcgagactctgtttcaatcagtcaatcaatcagtcaatcaatttggtagagatggggtcttgctatattgcccaggctaatctcaaactcctggcctcaagtgatcctcctccctcagcctcccaaagcactgggattacaggagtgagtcaccgcacctggcccagtttcacaagttcacacagctatatattagccacataatcatgagatagaaaaacatttctg

SEQ ID NO: 220419 - DNA, 507 bp, Homo sapiens
ctatttatacgtttataattcctctaggttcaaactcctgctttcccaaagctcattctctaacacctaatctatcacaatagtctaactggttttcctattttcagaaccctcagatctctctcctttacaggagatgtcggtaaactttttctgtaaaggggcagataacaaatattttagactttgcagacagtacagtctctgctacaagtaccaactctggtcatagcacaaaagcaatcatagacaaaatgaaaatggacatagctatgttccaataatactttattttaaaaaatatttggcctgtgtgccatattttgccaactcctgctctaaattgatgtcaacataatatttttaactggcaaatcaaactgtctcactcccctacccaatctgtgagatctaattctctatttctattacctacagaataaagtcaaggcttcctaatagagtaatataaagtccttcaagatctggcacttgatactctctggc

SEQ ID NO: 220420 - DNA, 432 bp, Homo sapiens
gcagattatatcaaaagtctggacttaagaggacctcgacagagaatcacccaaaatgcagggaatcacaaacataagtgattaacttattgatctggaggactagctccttttccgctcttgctggtttttcttatggttaggtatcttcctatcccgccccctttcaggactctactaaacgtccaattatcttttgtacttttatgtctctactggtacccactgcaagacctagcacagggcacactgcacaaacagcgcgatgctggccaggcgcggtggctcactcctgaaatcccagcactttgggaggcggaggctgggagaggcgggggaaggagggaggattcgaggccaggagttgaagaccccaaaaacaacaaaaaaaggtgcaatgcttgctgaataaatatgctaacctgctggact

SEQ ID NO: 220421 - DNA, 407 bp, Homo sapiens
cgtgatctgcccgcctcagcctcccaaagtgctgggattacaggcatgagccaccgtgcctggctgggaacgacatctttatagaggacctactgcaaagaatccctccagacagggtcagaacctggacagtggatagcttgggtctcctaataagggtgtttctttttcttttttctgagatagggtcttgctctatcacccaggctggagtgcagtggtgccatcacagctcactacagcctcgacctgctgggctcaagtgatcctcctacctcagcctcttgagtagttgggagtagctgggagtagctgggaccacaggtgtgcaccaacacatctggctaattttttaaaaatttttttctagagatggtgttttgccatgtttcccaggctggtcttga

SEQ ID NO: 220422 - DNA, 531 bp, Homo sapiens
agctcctcaaggagcttgccacagggtggaggtgacaggtgacatgaatggaagtaactagtagttaccaaatacttggtgtgagccaggcactttgcatttcttcctctattatttctgtgagttaacagtaattgtactaatcttaatcccattgtttgaaagattatatggcttacccggggccacttagctaataaaggaacagagaagaggggctgggcctggggccgctgtttgatccacagccttgttcctaaccactatgccctgtggcctctcacaccaaaaggaagtaccaaactgcttccttactcaaataaatgtgctgaaatgcagttgcagttttctcccagtcccttaggagctggttagagagtcccttaggaacttgagagggtagtgtagtctaggtggtaggcacagatgtctgagagctttaacctcagtctggaagacaatgtggtgacttaatttgttgagaactatgttacaaataatgtgttactaataaaacattgaggcttcgca

SEQ ID NO: 220423 - DNA, 413 bp, Homo sapiens
tccttggagcagtcgggccatcatgcactggcttcagccaccctgcggagaataggaattcctccgagcatgctcgtgccagcctcttgccataacctaccagaatatccgtgattgtcaccactaattgacttcttgtaaagctagaattaaacttttaaattcactcccttcttttgaaacatgaggagcatgctcctgaaatttaacacaggaggcagccttgctctcctctgtagaggatttgctgcagggagcagggcagggattgcatttgtgcatgtaaattgcatttgtgtcaaaggaattttgtaaaatgttaaaattttggtcaaaataattcaagaaaatgatattaaaaaacagaatagaatgatgaaaaactgctatttcatgtcctgcttcttttcagc

SEQ ID NO: 220424 - DNA, 972 bp, Homo sapiens
aaagggagcttcaccttgtttcaaatgttgagtgtgagtgctcatgctgtgcctccagtgaatcacctactgcctttggaagagtgtcctaatgactgggggaggtgaaactgacaggctaaggattcatgtggggttacaaggcttgctcagaaggactcttatcagaaggttggaaactgatgaagtccagcatggatgttgcatttcttggctagtctgtctgaggttggctggagtcctgctcatatagctgagtttgttggtgaattttgtctcctccaacagtgaaagtctttgacttaacagggcagcctgttgcattctatagaagtcccagatgttggctccagagtcttacatgctttggtattttttcttaaaagcataatagggaagaaaccacaagtaaaggaagtagtttgattttaggatcatacatctgaaaaattaagttaaataactgatatatctttaggggctgataatctattaataaaagccttgaggtttccaagagttgcatttagtgagagcataataagggcaatgtatttgtaatgagataatcaaacaaggcacggactgtgtcactccaggagataatataaggtacaaattgtgcaggtggtgggatactggagggtggccttttccacctaattggaactccttaggaagagctgacaattattgagaggctggtagcttgtaaagaattcatttactagaagtgaaggcagaaggattttatgatcttgactccacattttaggtggcactggataaaggaggaatttatttatttttatttttatttttggagacagagtctcgctctgttgcccaggctggagtgcagtggcgtgatcttggctcactgcaacctccacctcctgggttcaagcgattcttctgcctcagcctcctgagtagctgggactacaggcacgcaccaccacacccggctaa

SEQ ID NO: 220425 - DNA, 517 bp, Homo sapiens
aggtttttccagcatcatttgttagactattcttacctccatggtgattcttggcgccattgtcaaaggccagctgactgtatatgttaaccctgggacttctgtaatattggatcatactgataaacctaatttctgacaaattcttcctcatccaattcatgctccccattctgaacaccagcatcatgcatcctttgctctgttctaggcacaacaatcaaaagtgcttattcccaaactggacctgacttcagccagagcattgctgggacatatataaatctacgtttaatatttgaagacttgccagactgtttcctaaaacacctgcagcattttacattcccaccagcaaagtacgaaaagcttccaatttctctacatcctcaccgacaatcagttttttattttaaatgctatagttacaaagaaaagttttagaatgaattaatgctgtgattttaatcacaaagattaattttgcaataaaaatccctgataattatgattatat

SEQ ID NO: 220426 - DNA, 542 bp, Homo sapiens
ataattttaataacactggatccttatattaaaccatttttggtatcttttagggatagtacttggttttctttccattcatcatttccccaaaacctaaagcatgatttcccatggttacaagctactacattgtatgaatatataattattgggagtctctgtgagcctactctgactcagaaagccgctcctaaagaagaaaaaagaacaaacaaacaaataaaaaacccgaattatttttaaaactctttattttggatttttcagtttctacattttgttactgtagattttactagattgaacagccttatccataaatatttgcatcaatctctaaatttttttcttcaacactaacttttatagttggaattttgggggcaaataatacaacattttaaaggcacttgccatgtgtacatggccaaatgcttccagaaacatttccacttccattagcaaagtatataactacagagtatttaaggttttattcctttatatttttttctttggcaaaattgtctatagtagaa

SEQ ID NO: 220427 - DNA, 405 bp, Homo sapiens
catatatctatatacatgtagaggtaataatggtagctattttatggagctgatctgaggataaaatgaaataatgcattttaaagtgcttagcacaatgtctggcaaatagaaagcactctataggccaggcatggtggctcacgcctgtaatcccagcactttgggaggcctaggcaggtggatcacttgaggtcaggtatttgagaccagcctggccaacatggtgagaccccgtctctactaaaaatataaaaattagccgggtgtggtggtgggctcctgtaatcccagctacttgaagtgaggcaggcgagtggcttgaacctgggaggtggaggttgcagggagccaagattgcaccactgcactccagcctggtcgacagagcaagactccagctca

SEQ ID NO: 220428 - DNA, 267 bp, Homo sapiens
ccaataactgcttccccttcagaagttctacattccacgagctcccagcactgctaccagctcccccagacagcaggcatctggccacatggggtgtctgctaaaaaagccactcttggctggggtgtggtggtgcacacctgtagtcccagctactcaggaggttgaggcaggagaatcgctcaaacccaggaggcagaggtttcagtgagctgagatcacaccatcattgtacttcagcctgggtgacacagcaagtctcaaaaa

SEQ ID NO: 220429 - DNA, 107 bp, Homo sapiens
catacaagccaccttcccaccacccaatttctccaccctttaaccccgcaccccaaagcccgcccctgactccgcacccagagcggcagtctcaccactgcggccgc

SEQ ID NO: 220430 - DNA, 541 bp, Homo sapiens
ttagtaaaaacctgtgggagtatgccacaagatgatcttcgccgcctcggccttccaaagtgttacaattacaggcgtgagccaccacacccagcctggatttttaaatttgagatttcttctggtgctgtgatgtttagaaggccttcaccatccagagattggttaaatactcactttcatttccttctgatttttaccgttttacactttatatttaattctttaatttgtattgaacttactttgaagtaccaaaccaatatgtttaatgcctttgtatatctgagttccagatctgtatttccagctacctgttaggctatgtggatagtccctgtacgccatgcatctgcgtacacccagattcactaaggagaaagcttgaggttgtacttaccactttaatacttttctccacccacatttgatcaatccccaagtttggctgattctgccccaggggtgataagagttctttaatcagtcttctaattcagattccccttttagttttttgccagagtccttgagtccttga

SEQ ID NO: 220431 - DNA, 409 bp, Homo sapiens
tctactaaaaatacaaaaattagccaggtgtagtggcagacacctgtaatcccagctatttgggaggctgaggcaggagaatcgcttgaacctgggaggcagaggttgcagtgagccgagattgtgccattgcaccctagcttgggcaacaagagcaaaactccagctcaaaaaaatatatatatatatataactgactcacgtactcccatttcacaaatgagagacatgaagatgaaataggtgaaatgggagaatcactgctgacttttaaaggtggtgggatacatagggcacattacttgattttagcagtcatgtttttaaggccagcaggagaacacctaagaggtggaagaggatcacaaaagtaggtctggcaatcctggtagtaacttctatggttaga

SEQ ID NO: 220432 - DNA, 309 bp, Homo sapiens
tgtgggcatctaacccagactagagagaggcttcctgaaggaagtggtaacagaaatgagccctaaagaacaggcaagaattgggggaagagaggcatgtggagtgtgttgcatgcacacgcatttgcaagtgctttattctagaaggtgacagagaagggagtgaattcagagaactgaaatgaatctgactgagaactgcaggtcaatgtcacacatgaggctggagaagcaaaataggcctagagggctgcactttgttctgggagcaggagattttatgaaattgagcagtatgttcagacttac

SEQ ID NO: 220433 - DNA, 411 bp, Homo sapiens
attatttgaatactagtttctgtgatcatgttataaattgttatggcaaaggactgcttcttggatcaatcaaaacctacctcttttctattctaataggattgtagacttagttttccaaggtagtaattattttgataatcaagagaccagatcaagtgaccagatctctccaataggagagatttctattttagttttttttttttttggtcttcccaagaaacatgcatatttcatgccatcatcaaaatgattccctagcataactacaaaagcagtaaatctgatggctggaatttcaagcgggataggaggagaggaccttgccttagcaggctggtgaaagagatattttgggagaggtggggcttcgggatgcttctcaaattgcaatgtgttggcagccga

SEQ ID NO: 220434 - DNA, 317 bp, Homo sapiens
agccttcagtcccgcagctccattccatctgtaaaggcatcggattcctctgctcagactccttcaagggcacccccatccactaccaactgcagccaaactcctcagcttcacgatctggcccctgtgctcttgccaatttgaaactggaaagtggcctggctgtttcacttgcatgtccttgattgagaagatcgtctatctcagtttttatatgtgtggatgagtttctttctgtttttttttttttttttttttttttttttaagggaaaaaaaaaaaggaagagttttcgggggggaaaacttattcccttt

SEQ ID NO: 220435 - DNA, 364 bp, Homo sapiens
ctgttatccatgctagagtgcagtggtgtaaacacagctcactgcagccttgacctcctggactcaagcgagtctcctgcctcaacttcccaagtggtgtggaccacaggcatgcaccattatgcccagctaatttttattttttatagagacagggtcttgccatgttgcccaggcttgtctcaaactcctaggctcaagcaatcctcctacctcagcgtcccaaagtgctgagattacaggtgtgagccatgtgcccagcccagtactaggatcctattaccgatagatattaggcaagaaccttgagcgaaaaaaaagccaaaatgtcgtcgacgcggccgcgaatttagtggtagtaggc

SEQ ID NO: 220436 - DNA, 277 bp, Homo sapiens
taaatgtacagaaaaaacttcaaaaaggacacaaagtaaatcatttgcagtggtttcccagaaagtagtaggtggggagaggcagatggtaaagagatagggaggtattaaaaataagtatttaagactttttgtgattttaatgccaaatataacatttgaatagaaataatgctccttgacagaagtaggcaagctatcatgatatatattctctggtgggtttttctgtttggttgggttttttttttttttgagacagagtttccctgtgtca

SEQ ID NO: 220437 - DNA, 658 bp, Homo sapiens
tcttaacaactaatacatgattggttgagctggaatttaaacaagtgtagtttgagctcctgctctgtgccaggctctgtgctgagcattgacaagcctaagatggtcccctaacctcatggaaatagagctgagggagtctgacttcacatctgatgctccttcacagtcaggagaagtaatatgagtgaggacttggcaggctactagttatctgcttttgttcttaccacttgacagctctggtttcatctggattatgggctttaggaatgttaccccacctgtcataatttatacctcattttgattcatgactctgggttagcattccagagtagagtaaacataaatgcagaaagtggagatagcatgcatatggcctgttttcaagttatacaactacagcaggggtatccaatcttgtggtttccctgggccacattagaagaagaatagtctggggccacacgtaaaatacacttaacactagagatagctgatgagctaaaaaaaaaaaaaaaaaaaattgcaaaacaatctcacagtgttttaagaaagtttacaaattcgcattgggccccattcaaagccgtcctgggctgcatgcagctcatgggccacgggtttgatcgagctaacggtagcgagctcgatt

SEQ ID NO: 220438 - DNA, 420 bp, Homo sapiens
cctgcggtgaaagcagaaaatcaagttgtcacccagggtgcagtgataaagccacagcctcatttctctgttggtgccctataatagcaaatgccagacagctggatggatgggaggctttggattaaggccttgatgcactctggccagagaattagtagttgctgtttccgtgtgcatatcctgttcaaaacaaacatctggagagaggcaagtttcctgggacagaaatgtcctttgcttcttctagaatcaaagaaaacagccaaaggagagtggtatttcctttctcataagattccaactctaaatttgctatgaactttatcaaggacctagagctatgtgaagtttaagaagttggcaaaaagtccaggaccaagacaaatcttggggaaaaaaaagaaaaaaagaagaaaa

SEQ ID NO: 220439 - DNA, 468 bp, Homo sapiens
atggcctgagctttgggggtcagacccagctggattcaaatcccaactctacaaccttggggaaatcactttgcctctctgagcctaacttcctcatctgtcaaattgggattaaaaataaccccatttaagagtcacagagaatacatgtgcagggcttagtccacagcgggtatttcacacatcatagctggtttttgtggttcaaggctccccagcacacccagtgcggtgtcttcagtccattcccaagctgggttactcagtccatttttttgctcttccctgcctcttccatagcccttgccctggctccggcccaggcctctggcttctgagggtcttagggcctgagtgtccctggagacttggaatagatccatggacttctcaggattccagccaccattcaagtcaggggctctcattcctggctgtacattagaatcgttgtttttttcaccaaaa

SEQ ID NO: 220440 - DNA, 801 bp, Homo sapiens
caattgacccagacccttcaggaatgaaggttcaccccaccagacgcatgtaacatttggtgctgaaacccaagacaggggactccttcagaagaccagccccctgtcctcaccctcagtccgggaggagatccacctacgacctcgggtcctcagaccagcccaaggaacatctcaccaatttcaaattgggaccccactggaagtcggaccatccaacttggattacagctgctcctagacctactggagcaaaaagctaaggctcctggctgattccttcccagatctcctcggcttagtggctaaagactgacgctgccaaatcatctcggaagccccctggaccatcacggatgccgagcttcggataactcctacagtggaggacaggaatgtcaggcctgtgagcccaaagtaagccatcataacccctgtgacctgcatgtatacgtccagatggcctggagcaactgaagaaccacaaaagaagtgaaacagccagttcctgccttaactgatgacattccaccattgtgatttgttcctgccccaccctaactaatcaatcgaccttgtgacattcctcccctggacaatgagtctcatgatctccccaccctgcaccttgtgtcccccatccctgcctgtaagagataaccacctttaactgtaattttccactacctacccaaatcctataaaactgccccacccctatttccctttgctgactcctttttcggactcagcccacctgcacccaagtgaataaacagcctcattgctcacacagagcct

SEQ ID NO: 220441 - DNA, 484 bp, Homo sapiens
tctccgtcagcatgccacatgtcagggctacacagcctagtccagcaccctctgccatgtcttaaagatgttttactgatgtccaacctgcaactgtgccttcagcacccaacacctctggttaagtctgttgatcctggcagtggccagctcttatcagggttcttaatggggaggggaagactctgccccaccaggagatatttggcaatgtccaagacatttttgattgtgacagtaggggaggggatgctactggcatctggtgggtagaggtcagagatgccactaaacatcccacaaggcatagggaacccttacaacaaagaattgcccagacccagacatcaacagtggcgaggcagagaaattccggcttttggggttatctataatgcagagttcccaaccgactgaatgggactctggcactgtttacatttgcagtccttcccaagagaagttcaccatgatgccaaaggca

SEQ ID NO: 220442 - DNA, 477 bp, Homo sapiens
cttattaacattctttgatgattcttatggtgttgttacagtaaaacatttctaacaattattctaacaattattcttgatggtgtatatgaagaatttattgtcgtgtatttgtaagctgctatgtgcagaagaatttcagtcaaataaagttggtaagataggtatgtaagtaatatgaaaaaagatagaaggtgatgagtgacttaggtataaattaagtacaatagaaatgttgaggaaagaaaaatttcttgtaatagaaatcggaagtacaaactgggcatggtggtgtgcatctctaatcccagctccttgagaggctggtatgggaggatcactttagcccaggagcttgaggctgcagtgaggtgtgatcatgtcaccgcactccatcctgggtgacagcaagaccgtctctctttttttttttttttgagacggagtctcgcctatgctggagtgcaatggcgcgat

SEQ ID NO: 220443 - DNA, 422 bp, Homo sapiens
aatccacattcttctgtcatgacttcagccggtccctccgtttggggtccctgacttcccgcaacaaggggggccttcctgggcccccaagagtgcaaggatgcctgggtctgcagccacggtttgggcagctggagctgtgcctgggagggtggagctcccacctgcccctctgggccctgagagcacagggatgcctgggtctgcagccacggcttgggcggctgcagcagcatccaggaagctctcaccccaacttggaaggggcgggtctcgcgcttgtccctggcttttgccttctccatggagcatgcagccctggccatgcctagttgctgcagccagcgtgatggcagcagctgctccagatggcctgctgctgccatcattaatatgtagctattaaacacagttggtgaatc

SEQ ID NO: 220444 - DNA, 487 bp, Homo sapiens
cagcaccccctctccaaaaggtggcactccgccccctcttcagagaactcctctccccacgtctgtctccagcctaggcctcccctctgagccccagactcaacgaagcaacagccccgtcctggacataccccaggcacctcacaccaccacgtcaaaaccaacctcagcatcacccgaaatcccactcctccacatccccatctcaggggaaggccagctgtccaccctctcacccgctcatgccccaagacccacctgatgtgcctcctgaacacgcctcccactcagcccctcctctccaaccccgaagcccccagctgggtccaggcccctcctcacctgcctcggcccagcaccagggcacccagactccctccctctaatctgcactccgaagcccaaacctgagcctgccctacccttcaaatgaccctcacctaccagcccccagccccggaaaccctttaggaccagagtctggtgg

SEQ ID NO: 220445 - DNA, 496 bp, Homo sapiens
tgctgggattacaggggtgagccaacacgcttggcccactagcccttttaaaaggtgctaatctcatccatgagggcagagccatcatggtctaatcacctctcaaaagccctacctctaaatactgttgcattggaaattaagtttcaaaatgacttttggagaggccacaaacattcaaaccacagcatctacggaacaggttttcatggagaacagtattcttttgctgaattaaagaaaatagaacaaaaggtagaaagtactgtcccccactccacccctattccaggaaaaactgaaaagagctgggcagcaaaagcatccacatgttcaaatagtggattctagctaatgggagagtatgtggcttccagagggcttgggaaggtggggtgggggtcagacacctactgtagagatgctcacatttatttctttcaaatattagtctctactcaagagggttttttggaagaaagggttccacagctga

SEQ ID NO: 220446 - DNA, 651 bp, Homo sapiens
actttcttaataaacttgctttcgctttacaaaaaaaaaaacaaaactttttttatatagtgaaaactgaaatgtaccaagtgtgcatcatgtggagaacacctaaatacagttgacctttgaacaacatggggtctaggggtgccaacccccatgtggtctaaaatccgaggataacttttgagtctcccaaaacttaactactaatagcctaccactgactataagccttactaataaaaagagctgattaacatattttgtatatgtattaacactgtctatttacaagaagaatcatctatctgaaatggcaggtaattgcagttgcagacctcaatttacaatatgtatcaaggaattctcgggagcacttccaggatcactagtggcacttcttatgggtttccatattgcattaaagatgatgaaaaaatatggaggcacctcaagcaataactttttactgagaaaagcaatttacttactggagagacaaactgctcacgtggggatggttagtatcacatggccttgcaacacttttcacagtaacagcaacaggaagtggctatgaaattattgtatactgaatatatagaaaataatggcaaaaactgcaattactttggcacaacctaatagtactac

SEQ ID NO: 220447 - DNA, 506 bp, Homo sapiens
tagtcaatgaaatctctttaggctaagcttgggctgcattctgggtctcccaaggctaagactgttaaaagcatgtgcattctgttccctcctgccttccggtccattccagttcacagtcttggccaaggacacttagctgctaagtggaagcagtcaggatttgggctcagtggaccaagcaggccttctagggttctccagcttagaaacagggtggagagggcccggcgcggtggctcatgcctgtaatcccagcactttggaaggccgaggcgggcagatcacgaggtcaggagattgagacaatcctggctaacacggtgaaaccccgtctctactaaaaatacaaaaaattagccgggtgcggtggcgggcgcctgtaatcccagttactcaggaggctgaggcagggaaatggcgtgaacctgggaggtggagcttgcagtgagcccagatcgcgctactgcactccagcctgggcgacagagcaagactccgtctca

SEQ ID NO: 220448 - DNA, 350 bp, Homo sapiens
acactttctggagattaacccattgctcctggcaccacagatgaggaggcagcataaaatatggaaagagccctagccttggaatcaaaagctgtgggttcaagacctggcacatccatcctgtaccatctccaagccttgttttcttcattttaaaatggagatgataatacatgttctattgacctcacaagtttgtcatgagcttcaaatgagataatgcctgtagtcccagctatttggaaggctgaggcaggagaatcgcttgagcccgggaggcagaggttgcagtgagccaagatcgtgccattgtactccagcctgggcaacaagcgtgaagctccatctca

SEQ ID NO: 220449 - DNA, 383 bp, Homo sapiens
ctttatagacattatgagttgtgaaatcaccagcaaagagttgcgcttccctcctaattatagcttgtatgaaaacagtggaagtaaaatattttaatgataaaataatttcagtactggttaagcaatatatattagtcatcagattatggaattttgaaatattttaatcttattaacaagccataggatacttgaagatatcatatttgaacatattctagaactacatttctcttgggctttaattacagcatttagaaatgaaatctgggagactcttctgtgttgtagtagatgatttgtaaccctctttccataatatccaatttaatactaaaaaaacttctagtgtacaatgataatgtaatgaatatatcata

SEQ ID NO: 220450 - DNA, 397 bp, Homo sapiens
ataattgttataaaggattggattaaaatctgatcaatatgagaatggttgatattttttttttcttaaatttgaaccatgacagttaagagattaactcaataaagcattccatgtccgtttccctaaaactcatgaatttagaagtaaattaaaggtcaagtgtagaaagtttttaataccacgtctactgatcatctatacacagtataattttgggcttttttttaatctataaaaaatcatagtaataccctctttgcacaattcatttcattagtgtattaggatgcctatcaaatatacatgggatttaggtttatttttatttatttctctgtctagccatcccctttccccctccttcccgtctctctcttctctcctttcctcctcc

SEQ ID NO: 220451 - DNA, 422 bp, Homo sapiens
aaggtgaggctaagcaggctcttgaggtgcgcccatggccaggccagaatgcaggcctggcactcttcgcccaggcgccttctgggcagcagcagttttgagtaagtaaggagcctaatgtttaatggcctttgtgtaagaacatgatgatgacagcgagagcagggaggctgggagggagtgtgtggatggacatccgagtaagagttccccagtgtctccaggaaccacttgctttgtaaaatgacccaaatccaccatccctggacctggcgcagattctgagttgggccaaggcctgggaaacctgagttggaaagtcttttctcagcccgtatcatggacttgcttttggtgctctgggctggggtcagatttgtaagtgtgttcctgttgtaagaagttgccttgccaaaagatca

SEQ ID NO: 220452 - DNA, 222 bp, Homo sapiens
ccgaaaatgtgtcactatctggaaaaccattaactccactgattgttccagccttacacgttgagatgtcagagccaaatacatttattcgctccaagcatcagtaatgtgacagacatgtggataccctaccaggacacaatgctgattccacttgcagtgaacacagacactgtgcccaagagaaataaagcagagggaggcaagaggacccaaagctag

SEQ ID NO: 220453 - DNA, 398 bp, Homo sapiens
gcaggcttccaaactgaggaaagctggagcctgacgtcagagcttttaactcggacatcaccctcctgaggccctcagctcatacgggcagactgctcaggcgtgaggctggatcgtagggttcgaggctgcttgcttttgttgttgttttgtaaactcagacccttgtaagccccttccttcctcccttgcccaaagatcctttgctgagtgttctgtttttgcagaataaaagcaaaggatgcagacttaccccaccctccacccctagctcagccagatccttacacgtggagcccccagcatgggaatgaggggctctgcaactgagcgaagctgcgggctaggaggctggaaagccatttatcctaggacataaactcagattttgggggtca

SEQ ID NO: 220454 - DNA, 334 bp, Homo sapiens
ctaattaataattaaagatgacacttagggtctctctgtatttgttcactcagaaagtcattcactagaagctataaacgcacttcctaaatccggccatctagcaatcatatacaaatgctagagggcaaactatttaaccagagacaaatcagcagcggtgagaacaaagcctttcccttcggcaacttaagttggcacagcgatatatggcataatattgacagcaaacgcgtttccagcagagaaaaggaacaaaataataaaaagtggtaaagttcccacaagtaagacactcatatctagagcaaacaccttgatatttttatcatta

SEQ ID NO: 220455 - DNA, 463 bp, Homo sapiens
agtgggagggaaatgcaaggacttgagccggggagtgcatgtgagtgggagacaggtggggaaggggtgtccgcatacactataggagtgggagagagcagaagaaacagggctcagggaagggtccctgtcctccttgtttgttggtgaagaggaagaatatggaccatccacttagcgattgtagcaaagaccaagcttgctctcaaaacttcttaaaattcattatgagagtgtgttacttaagccagtttaaatactattagcttttgttaataaaaactctataatttactcttgtacttttttgatttttgtgttatctgaagtagaaggaaataaatttaaaatttttcagaaaatctgtcacttgacccctccctgatttgtatttttatttgcaatatcacatgtattttagtttgcaaaattaaactagctaaataaaatcattcacaagatt

SEQ ID NO: 220456 - DNA, 746 bp, Homo sapiens
actacttcataactgtttgtgccctgtggcattccaacaggataacgggcaggttctacatagcactggtatatctaagtttatctaacttttaaatttaccttgtctctcttcaaaataacgtatgtgccacaaggctatgcatttgaaatataaactgatcaagttacccgaacaattaacgataaggaaggaagccgagtaaacacagaaagcttcacagaaccaccaattttagacaggacaatttctgttttaggaaaatttgacatgtgaaattccttcatataaaatacccctatgccgtcacaaattctgtttcttcttcctgggatgtcatcccttctctctcaactctacactctcaaattcttcctcactaacctttcaagccctgagcaatgaaacttccccctaagtgttggtgctgttttggaagcaccttctcagagctcccatcacaccatctggttaccactgacaagtctctaacaataccacagtaaaatttttcgttgtgttttcttattctttcaccacgtcatcatgtcctctgaggctaggaagttaagacaggtttgtctttgtacatccaaagcttagaagcatgcttagcagctaaaaaagtaaacacatgttaagtaaatggtgtacaactaaccaaataggtacatccttaagttaaaatatatatatatacacaaaaagtaaaagaaatctcaataaactacttactttgttggggt

SEQ ID NO: 220457 - DNA, 367 bp, Homo sapiens
atcagtgctgatatcagtcatatgttagaaaaagtaataactgtagacaccacaatgttgatgagagcagataaaacgaagccccggggcccacaccccagcagctaatatccggcgcctgccggatccggtctggacccacgtggcttatcctccacacaaagctgctgagacactccagaaatgaaagtcctttctctatcaactgcttcatcttgcctccatctctggctggtggtgggcttcacacgtgggccaatacaaacagctcctgcctgggagctcagcacctgcaatcttatgtgtgatttcatccgacagaagtaagacgcagtcattgaaagaattagggaaccgtgagataaac

SEQ ID NO: 220458 - DNA, 552 bp, Homo sapiens
ctcagacggtacaactgcacccctgccccccaccccccgcctcagaatttaaaattagtccaaaacaggaaacagctggaaacagagttcagagaaaagagaggaagaaatacactggtatttattttttcatctgtctttcaatcagagctagttttgtcacggttaatattgaaagtgtcttttcctcctagacatttcctgatgaaggcccaggataagtaagtcctgtgtgtgctctcgtgtttaagaaataaacaaattgaggctgggcatagtggctcacagctgtaatcccagcattttgggaggctgaggcaggcagatcacttgaggtcaggagtttaagaccagcctggccaaccatagcaaaaccctgtgtctactaaaaatacagaaattagccaggcgtggtgctgcatgtctgaatcccagctacttgggaggctaaggcaggagaatcgcttgaacccaggaggtggagattgcagtgaactgagatcccatcactgcactgcagcctgggtgacagagctagactctgtcaaaaaa

SEQ ID NO: 220459 - DNA, 407 bp, Homo sapiens
ttcacctctcagtgccacagttcctagactgtaaagtggagctaataccaagatttcgttcctagagtcattgctaaggatgaaaggaattagtatgttagaacactgccgggcacataggaggctctgtttaagtgtttcttaagtaaattaaggaaatgaattctgaggcgattgaatcatgcagttttacactttcttaccgtggagaagggcaaaagctcagacagtgtctggtggccctgatgggacagacacatgaggaggaggcgcccctgggtgccaaagaagctctaacagtgtgtcattattaacaatggtcgtggtgaccatgtcttgagagcagttccaggccaggcgctgtgctgagtactttccatgtgttcgttgattaaaatctgcatgac

SEQ ID NO: 220460 - DNA, 466 bp, Homo sapiens
aatcaggaatgtgatgtgctagaggtcaagaaagaaacagaactcaacagtgtcagatgttgcaaaggaggcagtaaagtaaggattcaaatggacatttagtaaccagaaggtgattgataattttgtagagaatgactgaaagtcatttcaaggaggaggtgagacagatagcagtgggttttttaatgtggacgtgaacacaagaacattaaataatctttcatttggcttggctgcaaatggacagatgataaggactggagaccaaggcacacaatcctaacgagttttttgttttcttttgcttttatagtgggagaaacttgagcatgcttatcagtttgagtgtctgaagttagcagagggaggtgagattcctgacaaggcaggtggaaataatcatcctagaaattttgcaaagtcctgctttctaccgaggagggagggaggaagggatatttcc

SEQ ID NO: 220461 - DNA, 527 bp, Homo sapiens
  misc_feature (518)..(518): n is a, c, g, or t
gcaattacaagcatgagccaccgtgccaggccttatgtgcattcctaagtaacataataataaaaataacttcagctagggtaccaagaccattcacagttgagaaaggatagtcttttcaacaaatagtgatgggaaaactggatatccacaggcaaaagactcaagtttgacttttaccccccaccccgcacgatggagtctcgctctgtcgcccaggctggagtgcagtggcacaatctcggctcactgcaacctccgcctcctgtgttcaagcaattctcctgcctcagcctcccaagtagctgggaccacaggtatgcatcaccatgcctggctaatttttgtatttttagtagagacagggtttcggcatgttggccaggctggtctcaaactcctgacctcaggtgatccatccgcctcggcctccccaagtagtgggattacaggcgtgagccactgcacctggcctaggtaaatacttcagagttggagcacatttcatggaaggggantttttgttt

SEQ ID NO: 220462 - DNA, 539 bp, Homo sapiens
gaaattttgaaatatctctccagtaggaaatgggtttgcagagctcttctctcttccctgggaattaagtacagctagccatgggaaataccacttgggtttagagtggatgaaaccatcagatgtggaaataccagatggaggaatgggagggaggctgtggacagcaaatgtgtttctccagtgtgcaagatttcttggcactttgatgaggatgttgtgtgtcacaactgtaatgatgcaagaatattgtcctttgtcttaaaattgtgttgctctttggccatgtcagccggaccctgtgtgaaggggctggaggcaggcagagaaaagagatgctcttgtaatcatcagggacacacctcagacctctagttccacaggacccgagtggtcgtgctaccatctctgcacaatggcaaccctcagggacagactgtcacaatgtatggcagcaccaagaaattgggggctcgtctcctccagctcagcgcctactcaaacctggaggagttctggtcacaatgagcacttgagcc

SEQ ID NO: 220463 - DNA, 560 bp, Homo sapiens
tgtccctataatatcataattatttaatatcataatttctctttatagttatgaacaccatatagtcatttatcatttcatgagtccatgcatcaatgacccctgtaagaaaaatgccctcattgtataatgctaagttgtccaaaacgatgtctgatgctttggcaatttcacaggctgtatttatgtgtgtttagtaactgcctataacattaaggcaccttttctgtccgctcctattgtttatattcacacatgccaaactgtgagttgtttttttttttctgctctgctatcattttgatttctaacaatattggtgttggttattggaccttccttccatgaagcccagtgagctgcttctgacagaggtaccaagagactacaggggaactaatgggattgtcctcagtgacatcagttttaccagctggggactttgtttgaatgccctggatttactcactgaccactctggaaatgcaatctattgattgataaccctccttgaacttatctgtaaaaccattcatgaaatattttatgtttccataggc

SEQ ID NO: 220464 - DNA, 463 bp, Homo sapiens
caataaacaactttcctctacagtatcttccagggtctaaactattagacaggttcctaagtttatccagatctctcctatgtctgaattcttggtcatcttccttgcctctggctccacaggtaaagaagaaataataataaaggaacaaaaattatatgtttcaggccgggcgcggtggctcacgcctgtaatcccagcactttgggaggccgaggcgggtggatcatgaggtcaggagatcgagaccatcctggctaacaaggtgaaaccccgtctctactaaaaatacaaaaaattagccgggcgcggtggcgggcgcctgtagtcccagctactcgggaggctgaggcaggagaatggcgtgaacccgggaagcggagcttgcagtgagccgagattgcgccactgcagtccgcagtccggcctgggcgacagagcgagactccgtctcaaaaaaaaa

SEQ ID NO: 220465 - DNA, 797 bp, Homo sapiens
cttccgggataaagcaacctcttaaggattttttatagtttatgatacttttgtaaatggactttttttttcccaacttttggggatcattgctcatgtagagaaaaactaccgttcattttatatctagccactttaacaaattatcttataattcaaaagtttttaagatttttttgggttttctagatagtcacgcttatcaccaaaagctggtctgctctctgcttccctggtgtgcacatcagtcacgtcaccgtcacgtcaccgtgggcctgatgggggaggaggatgtgggcatcttgctgtgctccacagaaatcgctgttttgccttctcagaacatttgttgttgggctgtttttaggagggtggctgactttttagaggtttctttgttagcatctactatgatgattctgtcctttttctggtcctcccgggatttgtggatgtggccactacaaggccagagtggatgggtgtctccgtggcattctggggtgaaccctggcctgtcgtggcttcgccgtggccttctgccagctcactgtcacacgtggtctcggttgtgtggactggctccagcaggttttgctgtgacaggtgtggcccctgcatgttacgagcagggctggctgtggctttgtggcctggaatggttaaaatcacagggatggccaggcgtggtggctcacacctgtaatcccagcactttgggaggctgaggtaggtggattgcctgagcccaggaattcgagagcagcctgggcaacatggcaaaacccgatctctac

SEQ ID NO: 220466 - DNA, 480 bp, Homo sapiens
aaaaattggctatctcttgccccaaattcaccaactactccctccagtctccttatccaggacagtctgtatcttttgtgggctctttcttctgtgtcaagctccccctcccccacaccacaaaataaccagccgcacatactactggcacatctaccctgtggtcccactcactatctactgaatggatgagtgtttggggctaaatgttcctcagtgtggtggaaagaaagcagcagcctggaccttccagaaagtccttggcagtgcagggatggggggatctgggctgccacccctgccacctgatcctgaatgacttcccctcatctggagttccttccactgctacttctcaaaggtgctgcgcatgctaagagggaatttgaaagttcgggagtgcgggtaggggaggatgagaaggggagtggctttactcttttttttttgagacggagtttctctcttgttgcccaggct

SEQ ID NO: 220467 - DNA, 438 bp, Homo sapiens
taagatgagtgcatgtgtgcttaatagtcacatacatatgcacacaaacatatgtaccctattacactcatagtctcctttgcacagtagtgactgctgattgtctaccacaactgtatttccaaataggggcatggaaattgtctcttagcctaagcttacagagctttgttatcctactaaagaaaatcatagacatgggttctatttttgaaggacttcaatactaggcagactgaatcctcaaagtggtctcaccaggagacatatctgtatatactgatgtgttaagtgagaaaacagcaaggtatagacaagtgctatcatttgtgttaaaaggagaaaaagaagagggctgaggtgggaggatcacttgagcccaggaggtggagtccagcctgggcaacatggtgagacaacatctctacaaaaaggaaa

SEQ ID NO: 220468 - DNA, 430 bp, Homo sapiens
atgtgacactggaatagagtattcttgagtattacctaagagctagctaatcagaacaggtgatatcacacgtagatccaggttctggagctctaccagggcagttccattttctatttagaatcagcttgagtctttcctgcctggatcaacatagggtcatcagtccatggtcactaggaatcctctcacagtcacccgggaatctttaagacatttcaggatgtcctgtgcagacttgggtcaggctggcaggagtgtctaattctgcttccatgttagaggaagggaaatgagtcattcagtgtctgttccttcttttgtagaaagattctccgtggttggtacccagatgagagtttctccagtttccttggcaaaaaattcaggagttctggagactcagactgataaacaaattggtcgacgc

SEQ ID NO: 220469 - DNA, 540 bp, Homo sapiens
caaggtggtgtagcttttaaattaagcctttgtgatatttgattatacgccaatctttgatgacagaaacgatgtcatttatcttaatattcccagcgcaagagaaaaccgataatcaaaatatttgttcaattaagtagagtaaaaatcagcgggaataagataggaaaaatgagaccgaaataacagaacatctattattggatgctaaaacttttacaggatttactgcaggaggactgcaaagggaaagaaacttcaacggagcagtttttcagatgggctgtcaacaaaccacaatttggaagcagcagcagaaagctgcggcgttgtcttagaaaggtgatcggcgttccttagaaatgaaaactggtcaggtaacaggtttgagcccctcgagtcaaaagagaaaggcaagagcgacagcgacccgcagattggcagaatggaggagcgtctagggtgagagaaactccgaacacgaagccgaagcgagagcacgcagggcagctggcgggagaaccccggtcccgcggccgc

SEQ ID NO: 220470 - DNA, 433 bp, Homo sapiens
aagtgatcagagttaattaagagaagggtttgccatcacccggatctggccaactctttcgtttggaaaatgcctacaagctcagttcgtggcaccttcccaccctcactccctatccctctgcaaagaaaccagggaacttttctttggcattgtgggtactaagatgcgccaggagtcccgggtggtgcgcgagcggcggaattcgtgacatcgccaagttgcgagaggcaaactccccgattccatccaaagcctctcgcggagcctttaagagacgttgtgtgtgcgcgctgcgctagtctccccgccggggcggaaacctcgggtgcgggatgtggggagagcagaggcagcgctcgcagggccagcacgggcccatccccctctcggcgacgccgctcgcgctaggaccgggctgcgcccgcggccg

SEQ ID NO: 220471 - DNA, 486 bp, Homo sapiens
aaatgaaaagacattccatgctcatgtattggaagacttaatattgttaagatggcaatcttccctaaattgatcaacagagtcaatccaatccatatgaaaatcccagtaacttttttgaagacattgacaagttgaacattctattgacaagttgaaaattctattggaaatgcaaggtagccaaaacaaacttgacaaaggacaaagttggagggctcaaacttacttgatatcattttattacatgcctccacctaaatcttgtgtcgaaatgagatctgttcgtttaaaagtgtgtggtacctaccccgcaaccttgttcttgctttcaccatgtaacgtgcctgctccccctttgctttctgccataactggaagcttcccaaagcctccccagaagcttagcagacattggcaccgtgcctcctttacagcctgaagaaccatgagcgaattaaacctcttttctttataaattaccca

SEQ ID NO: 220472 - DNA, 677 bp, Homo sapiens
cgtgactgtggtccagaagcattacctcctaaggcaatttaacaaagaaaaagagtctaattcctttgaatggggaactctgcttaagcccgagctgggactcgcaggtctggctaacaccgagacttaaccagccatgactatatgaattccgccagagagaagcagctggatccagtaatgaagccttggtcactgggggaggaggctgatcctgggggaggaggatgacctgccatgtctgatgctcagatttgtcccttggttcagctcttcctgagtgccatgtgcgtggcgatcaatgattcaaactctcaaacagctctttcactaaaaatcctggaaggccctggggtacacataaaaagtggggcgagatcttgacttcacaatgcatcaacaagaaggtcccaccgctctgggtatggacaagaaacagccaggtctggtagacccaatgggtggttggcaggaccagctttgctcatgaggaaccaagagacatccttggcactcccagaaatagacatggagcccttgctaaggcctgaagttcatcacgagcagccagggcatggagtggaatgcaggttattcctaatgtaacctcatcggtctgtccaagctggagaggcccggggtatctcaggttacactaaacatatttaacttacatc

SEQ ID NO: 220473 - DNA, 462 bp, Homo sapiens
tcagttgatggtctttttcttaatgacttgtaggaactctttagatattaaggaaatggaaatgagctccatgatatatgttgcaaaaatgctttcccaattttgagaactgggagactcctttgattttatgatggattctgccaagaagaaattctttacttgcatagggtcaaatatattaattttttctcttatgacttctgggttttaagtcattcttagaaagtactttctccaagttcatttttaaaaatatttaccatctttaacccaactgaaatttattttgttttaatgtgttcgttttttagatggccatctagttaaaccaggtcataattttttaaatgccatctttttttttttttttttttaagagatagggtctcactatgtttcccagactggattcaaactcccgggtacaactgatcctcccacctcagcctctagtgtagc

SEQ ID NO: 220474 - DNA, 448 bp, Homo sapiens
ctactttcccaaagcagccactgaaaccatgttaactgaaataaaacttcaaatgcagtcaatcttcaaatggagtaaaggacaacagactagatcagaaagcccagttgcttccagtgttgacctgcatcacagagatgataagctgattgttaataaagagagactcagagtaggcctatgttgagctttagtgtgggctctgttaccaaaattgattctgaataaatcccttaagcctatatattcagcggcaaaatgtcagggttgtacgggtaataaaacatttagttccagctttgagccggttataggcataccttaaagatactataggtgcagttcaagaccatggcaataaagcaagtcacacatctttttttagtttctcattgtatatgagttatgtttacactgtatccggtagtcttttttttttttttttttt

SEQ ID NO: 220475 - DNA, 461 bp, Homo sapiens
ttgagacggggtccaccctggcccccaggctggagttgcagtgagctgagatagcaccagcctgggcaacggagcgagactctgtctcaaaaaaacaaaaaacaaaacaaaaaaaaaaccttccaaaagaagtttgagataattttatgtttagaaaaattagaaattggattgagtaaaatttacatattttacacaagaggactaacatctttataatatttaacctttcagtaaatttatgttttatgtttctcagcctatcttttctagtataggtgatttttttagtgtggttactattgtaaatgagatcctactactttaaaaaatgaaaattaaatctatcgcttttatgactttaaaacattagacttatgtaagtgtaaacattatttaaaaacataatgtagaaaattaaagtcccccataattaaaatccctttcccccagaaaaagtc

SEQ ID NO: 220476 - DNA, 1079 bp, Homo sapiens
ttgcctcaaattgccttccagaaagacagacccaattatactcccacccacagtgtgtgagtgtgtactgcttcctctttaacacggtgcactccagcctggggaacagagcaagaccctgtctctaaaaaaaattttaaaaacctctgatctatctggaatgtattttctaaattaccccaacactgtttattgggaagtctgtcctttattctatatgaaatcccatttttgccatacacctagtagcccttctgttgggtgccaggataagcaccctggccttgagtgtgctgtgaactctttattatgggttgtgatcttcctgcacattctagcactggtaccacattgtttggatcgccatagcttggactaaacttccccattaaactttttcaaaacttgcctagtatattgtgcaggcgggcacggtggctcacgcctgtaatcccagcactttgggaggccaaggtggatggatcacctgagatcaggagttcgagaccagcctggacaacatggcgaaaccccatctctactaaaaatacaaaaaaaaaaaaaaaaaaaaaaaaaattagctggctgtggtgataggaacctgtagtctcagctacttgggaggctgaggcagtgaacccgggaggcagaggttgcagtgagctgagatagcaccagcctgggcaacggagcgagactctgtctcaaaaaaacaaaaaacaaaacaaaaaaaaaaccttccaaaagaagtttgagataattttatgtttagaaaaattagaaattggattgagtaaaatttacatattttacacaagaggactaacatctttataatatttaacctttcagtaaatttatgttttatgtttctcagcctatcttttctagtataggtgatttttttagtgtggttactattgtaaatgagatcctactactttaaaaaatgaaaattaaatctatcgcttttatgactttaaaacattagacttatgtaagtgtaaacattatttaaaaacataatgtagaaaattaaagtcccccataattaaaatccctttcccccagaaaaagtc

SEQ ID NO: 220477 - DNA, 1054 bp, Homo sapiens
ttgcctcaaattgccttccagaaagacagacccaattatactcccacccacagtgtgtgagtgtgtactgcttcctctttaacacggtgcactccagcctggggaacagagcaagaccctgtctctaaaaaaaattttaaaaacctctgatctatctggaatgtattttctaaattaccccaacactgtttattgggaagtctgtcctttattctatatgaaatcccatttttgccatacacctagtagcccttctgttgggtgccaggataagcaccctggccttgagtgtgctgtgaactctttattatgggttgtgatcttcctgcacattctagcactggtaccacattgtttggatcgccatagcttggactaaacttccccattaaactttttcaaaacttgcctagtatattgtgcaggcgggcacggtggctcacgcctgtaatcccagcactttgggaggccaaggtggatggatcacctgagatcaggagttcgagaccagcctggacaacatggcgaaaccccatctctactaaaaatacaaaaactggctgtggtgataggaacctgtagtctcagctacttgggaggctgaggcagtgaacccgggaggcagaggttgcagtgagctgagatagcaccagcctgggcaacggagcgagactctgtctcaaaaaaacaaaaaacaaaacaaaaaaaaaaccttccaaaagaagtttgagataattttatgtttagaaaaattagaaattggattgagtaaaatttacatattttacacaagaggactaacatctttataatatttaacctttcagtaaatttatgttttatgtttctcagcctatcttttctagtataggtgatttttttagtgtggttactattgtaaatgagatcctactactttaaaaaatgaaaattaaatctatcgcttttatgactttaaaacattagacttatgtaagtgtaaacattatttaaaaacataatgtagaaaattaaagtcccccataattaaaatccctttcccccagaaaaagtc

SEQ ID NO: 220478 - DNA, 732 bp, Homo sapiens
gggtttcgccatgttgcctaggctggtctcgaactcctgaactcaggcaatccacacgccttggcctcccaaagtgctggaattacaggtgtgagccaccaagcccggcgaggtcttcccaattctgatggcaaggttgtataaatattcaccactatcttattcttgtacttttattatttctttctaaacagttaaatctgtgatctggctgggcgtgttggctcttgcctgtaatcccaacactttgggtcgccaaggtggaaggatcacttgagtccaggcatttgaggttacagtgagctttgatggcaccggtgcactccagcctggggaacagagcaagaccctgtctctaaaaaaaattttaaaaacctctgatctatctggaatgtattttctaaattaccccaacactgtttattgggaagtctgtcctttattctatatgaaatcccatttttgccatacacctagtagcccttctgttgggtgccaggataagcaccctggccttgagtgtgctgtgaactctttattatgggttgtgatcttcctgcacattctagcactggtaccacattgtttggatcgccatagcttggactaaacttccccattaaactttttcaaaacttgcctagtatattgtgcaggcgggcacggtggctcacgcctgtaatcccagcactttgggaggccaaggtggatggatcacctgagatcaggagt

SEQ ID NO: 220479 - DNA, 499 bp, Homo sapiens
tgtttgctgcttaccactgtcttaagttgtaattacgtatggtcttctctctaggtagggaacaacttgagactaaagacgttgtgactcacatgagtttgtataaatgaagaaaatgcgatgggacataagtagggtgtggggagagccttcatggggagatcatacttgacctgagtcttcccaaaagcaatccctctgtcttacaatacagctgtcaccacaattggcttgataaaatatggagtaacaaatgttaggttcacctagactaatcttcccttcctatacatgaagtacttggaggaaagagaaagcagtaaagtgattttccagagtcacacattctgacataggcagtgccagaccaaaaatcagtcacttcccataaggtggatatgcacactcacagaaagaacgagcctatgcatagaatgatctcattttcaagtaaaataatttttgagatacaaacatcagcaatgacaaccacacccca

SEQ ID NO: 220480 - DNA, 211 bp, Homo sapiens
aaagagataatattgaatccattctaatctatgggggaaaagtaaacccacttgcagattttgctatttcatatttagtaacatgcttcttgagacaaaccagtctgtggatgctccaacactgtcttcagcccctggccctgcacaccctcaggacagcttagcttgctggccacaccttgtgccaagacccagaagtcagaattcacag

SEQ ID NO: 220481 - DNA, 294 bp, Homo sapiens
ggggtgagactaatttgagtaataataaaactcaggtcttcctttcagactgctctgtgtgaattaagctctttctctattttaattcttttatcttgataaatcagctcaatctaggcagcaggcaaaatgaacctgttgagtggttacactgatgtggaaggacaagggagttggaatgagggaaagaggagtcagccatgaaagaaagattcaaatattctaagtatggactcttattccaacctcaatgcctggcaggttttcagctctaggtgtgtggggataggtgga

SEQ ID NO: 220482 - DNA, 508 bp, Homo sapiens
ttaaacctttgtacaagagcggggccagtcacccacatgatgctgtcaatgtgctttcaaagccccacttcaaagagggagatcaaatggggggtaattgaaagggacagcgatgtgagggggttcctgagacgccccccaacgatgactatgaatgcggcacacaccacccaaatgacaggaaggcaatgcgttgcggtggctggactccaggaaggagctctgcgggaacgatgaggtctgtgggttttgctgctgctgttgcttttgctgttggtgggctttgagaaaaacacgactggccgggctccctgccttctccttctcctgtcgaagtctctacagctaggaccctcctgtcctgacaggctcagctctgcatcttgaggtccctctgacctcccagctgaccctccatgtaacccaggctcacccaggactctttgggacctgaagatgctctattcatccatttgtgctgattaataaagtgaattctgaacatcac

SEQ ID NO: 220483 - DNA, 741 bp, Homo sapiens
ggatttatataacctcaatcttaactgtcactggacaactaagggccactaaatagctgaggaaagcctgctgcatcaaaggagagtctaaaataaacagaaaaacaaatgaaaggatttaccaagggctggacaggtgggattgaaatagatatgcaaggtttatacagccttctgttgtaagccactgctccagcaaaagaatatgggatctagaaagcagagtgataaggggaacttccaagatgacaagagcaaggcttagaggatagtcattctagattggcacaggaacatggagagctttagaagcaggagttacatgtggaaaaaagatttgaaattatcattgacagtttgaaacaggaggcaacaaagggatatattaagcaattttgggaaaaattgaaagtgaataagaaaggatatttaataagggcataccacttatctttgcatgaccaatatttacacattgtacaataagtaaaacttactgatttaatgaaaatagttcaataagatttgtagaggatgagaggtaggaaataggagttggcataagatgtgaattatcaacttcaatagcaagaagtcagatttgaagttgatcagtttaaaaagagaagtataaacacattatttgtaaatacgagggtaccttcagaaggcatagttgaaagagttaaaaaaaacccacttgcctctgagagtaagactggaatattagaagtggtggag

SEQ ID NO: 220484 - DNA, 999 bp, Homo sapiens
ggatttatataacctcaatcttaactgtcactggacaactaagggccactaaatagctgaggaaagcctgctgcatcaaaggagagtctaaaataaacagaaaaacaaatgaaaggatttaccaagggctggacagtatgattgaaagaagaccttatgcctagacacatcattatgaaattttaagacattaaggataaatgaagatcctagaaactttctgaggaaaaaatggtaacctataaaggagtaaaagtcagagtggcatcagatttttcattatgaatgctgagtgtggtagaggaatagtatcaaacttccgagggaagttttcaacattcaatattttcagcattaaattctgtatctgggaaagtattggtcaattgtgagggtgggattgaaatagatatgcaaggtttatacagccttctgttgtaagccactgctccagcaaaagaatatgggatctagaaagcagagtgataaggggaacttccaagatgacaagagcaaggcttagaggatagtcattctagattggcacaggaacatggagagctttagaagcaggagttacatgtggaaaaaagatttgaaattatcattgacagtttgaaacaggaggcaacaaagggatatattaagcaattttgggaaaaattgaaagtgaataagaaaggatatttaataagggcataccacttatctttgcatgaccaatatttacacattgtacaataagtaaaacttactgatttaatgaaaatagttcaataagatttgtagaggatgagaggtaggaaataggagttggcataagatgtgaattatcaacttcaatagcaagaagtcagatttgaagttgatcagtttaaaaagagaagtataaacacattatttgtaaatacgagggtaccttcagaaggcatagttgaaagagttaaaaaaaacccacttgcctctgagagtaagactggaatattagaagtggtggag

SEQ ID NO: 220485 - DNA, 538 bp, Homo sapiens
tcaaattagtgaagtaagaatgtaaataatggtaaatttggtattagaataactatccaattggaaaaaaaaggttaagctagatttttccctcacactataaataaaaataaattccagatgttttaaagagttaaatatttaaaaatgtaaacatgccagaaaaaatataaaataacactttgagaatcctgaggatgaatggcaagaggtttttaaaaagcaacatgcaaaatcttgaaatcataagataaaatacaacagatttgactatataaaaatgtaaaacttttatatgggacgcaaagttaaaagtcaagcaataggctaggagaaagtatttttgccacatactcagaatatatagagaacataaaaaagaaaaaagccaaatatcaatagaaaaatggtcagaagcacactcaaatcacagaaaaaaaaaaaaaaccaaaaagatcagttacacataaaaagatgctacacctccatagcaataaggggaattgtaaatagagaggtatttaagagcagggactct

SEQ ID NO: 220486 - DNA, 229 bp, Homo sapiens
catggagtttcgtgaccaccaagaaagtaaagtgcttctattttgtaatctcctagtgaatttttaaagatgactgatggtgtccaggcctgtgaacatggaaaactgaggtaaacccatcaagagacagttgcccatccatcttaaaaggcaagttaatcatgaaccatgaataaagccgctgtaatcattcacatacaggtttttgtgtgaacagaagtgttcactc

SEQ ID NO: 220487 - DNA, 319 bp, Homo sapiens
tgagagtgaatcccggttaccttgttatacaagggggtggattgagtcacatgtggctcatgaagtgagcaggtacaggacaggcctaaagtgtccccagtctgaaatactgtgtgtaatgactggtaaattttcactccccctaccccatatgaccctttttgggcaagagggggcagccctgcttgagcactcctcagtgggctccccagctgtttaatccgcagcaatttagaaagtaatgccccaatgccctttattaaggtgtcataaagggacattttccttcctctggacaccccatacaagacttatcact

SEQ ID NO: 220488 - DNA, 628 bp, Homo sapiens
atcactaccaatacagacccctcctgcagttgcgtcaccccgctggacttcaatcattgcctcaagaaccgggaggataatggcctgcccatgctcagcaccaatgccatgagctggaagacgatttctgcaatggagaaaaggggagcaagagagactcagcagcaaaggaagagagtgtttagaggaagaggggtcaacagtgccaaatgctgttgagaaatggagattcaaacaggatgggagtgatgaaacccaagaaagtggtctccttgtagaggactgaagctagggctgatacagggccaagacagtcttccatatgcataagttgtactgtaatagccagtttacatgtctgtctccctggagtaaaggtctccaaagtggaacttgtccaccctgttatccttaaagtctagtgcaagtcctggaacgtagtggacacttaaattttactgattagtgaatgggtgaatgaatgaatgaatgaatgatggcaaatgattggaagcagaggaagaatctctggcatctgcctggactagctactatccttcagctttttttcttttttaccgcaatggcccgcagacccaggaaagagacgacagagccccccttccct

SEQ ID NO: 220489 - DNA, 256 bp, Homo sapiens
ttccctgctgtctcacaaatcgcaagagtccaacgtgtggatataaacttttgttcatgggaggatctttctcccagtggaaaagcaactgggaaaagcaggacacactgcacagtgactgcagtttcatccaatgccaccacccatgcaggcataaataatgaacatggatgggggagtctggagctgctgaattgtaaggctcataaatgtttaaactttttccattaataatatttctgctttctgtgtatgt

SEQ ID NO: 220490 - DNA, 639 bp, Homo sapiens
gagcacagatgatatctcacaattttttttgagaattgtcagcctaaagatcactttcttattggttcttaaaaaaatatgagctaaaacagaatagtttatttttttggaattagtaccagttctgaaagtaaggggaataaacattttctactttacaaaataataacaaaatataccaatgaaattaaacattttgttaattagcattagtttacattttaataaaaataaataccttccctctttaaaaaagaatcaagtacacttatttttttaagtaaaatcaattcacattcagaattatagtgtagcatagcttaatagaattcattcacattaatctgcgctaaagcccaaatataatgctttcctttcaaaatgtaagcctttgtcatttaatttacatttgtacttttatagcataatgtctgtatctctaaaaattgtctgcaattctagtaatggcattataggaggctggttgctttgttgaaatgctcaattacttattccagagacatgaactggttattaacaaattaactgagaatttccatacactgcaaaattaaagttattaacaaaaattactattattccagtagtcatgatattagcattcttattccacatcag

SEQ ID NO: 220491 - DNA, 653 bp, Homo sapiens
ttgcttttgtacctctttagggcactgattttatattgctagtcttcatctatccctatctgtccctgtggtacctgtgagttcctgcaagtctctgtctctatctctatctctatttatctctatctatctatatctctatctatctctatctctatttatctctatatttatctcctttagctgtacttacttatctctacttagacttacttatctctacttacttacttgtctctacttatctctacttacttatctctgcatctttcctggaaaccttttctatgaccctgagtagagctcagaaatccaccctttaagcttcaccaagagaaaaacagggacactggaccctgcaccagattgaagggaacaggaagtgctctccccgccccaaagcaggaaaacaagagtttggcccttgcaaatttccactccacatcagcgtcatcctcaatttcctggaacattatagcaatgaatttgtggttatagctgatgaccactgatttcacttcagaaagtccaaatatagcccagaacagtgtcttaaaactctgttgtgaaggcttcattttgttttgcaccaatgtagtaggagtagacgttgaacattcccatcataaaggccacaaataccacaatgaaca

SEQ ID NO: 220492 - DNA, 499 bp, Homo sapiens
gggattaggcatggttcaaattttatctgaaagcagtattacatgtgggcacagctgagcagggacagatttcattggcgcttgatccattctattttttcttggcttgaaagaatctcaaggatcaacttctcttgtgtaaccgtgattacttttaaaatgcgacttttattttgttgactttgattgtaaagctttagtcattctgaagtcaaaggagtacaggcatgtgttgttaaaacttttagattgcttaggaaagagaggcgatgtgaagaaagcaaactaaaaacttagatcaatgtgttatacagcacaggtgcgaaagcacaacctgaaatggattattcacaacctccttatactaaaatacggcggcgcccccttgtccatggtttccctttccacggtttcaattaccctcagtcaactgcgatctggaaatattaaatggaaaattccagaaataaacaattcataagttttacagtgcatgctg

SEQ ID NO: 220493 - DNA, 465 bp, Homo sapiens
acaaagtatcacaaactgagtgccttaaataaacaaaaggaatttattactttgtggttcagaaggctagaagttggagatcaaggtgtcatcacaccatggtccctctgaaggcaccaaggatggatctgtttcaggactcctggcctgtagcagcataactccaatcttcacatgatattctcccgttgtatgtgttcttccccaattttccctttttataaagatagcagtcagattagattagggcctatcctaataatttcattttaacctgactgtctttgtaaagaccctatctgcaaataaaatcacatgtaaagtattggggcttaggactccaacatatagatatgttttatatatatggtgagatatatatatattttttatatatggtgagatatatatttatatatggtgagatatatatatatatggtgagatatatatttatatatatgg

SEQ ID NO: 220494 - DNA, 551 bp, Homo sapiens
atataaacaaacaaaaaacctttttaaacaactgtgatttttgtagttctttttatatttagatcatctgtgctctgttctatttcaatttggcattccattctcataaaccatgtagagaaatttaatcttgtgttgatactatcacaattggaatattagaaatgacactgaaattatacaattagccaaatgatacctttaccacagaatgaaacagaaaaaacaaacagttgtgagtaaaacaattttggaaatgaacacagaataaaaataaataggagagaaacaaatatgcttggaataagatatcaacaagtcttattttatacctgaatttgccttaaatatttaacagtacttaagtttatataaaaaaaaaccttatggggaacacttaaattaagaaattacattaggaagtactataatgaggtatataagttttagttaaattcacatatcagatagtataacgatgaaaaatctaatggcatttttctcactttcctacttttcttcattgtacacagagcttctatgcactgtat

SEQ ID NO: 220495 - DNA, 643 bp, Homo sapiens
ggacctaaatgtatatttataagagatattcttctctgctcctgggattttcattctgaaatacctttagtagaaaagcaaagcacataatagtagttgaacttttctgtaatgtgtttctggagattaggtcattatgcgggttttaaaagacatgttacaagcatcagatattgtgtttccattacatggggactcaataagtacttaaatgaaaccaaaaatacttttcatcgactaacgaaaagaagagcaatgcaataaaaatatgctagctaaagacagtttagttgtgtgtgaaatcatggattcacccagtccttaaaatcagaaaaaaatccctgagactcaagtttccttatgggtaaaacagggatactaatacttacactttggtattaactaaagagagcactaaagacaaagctcttagtacagtatagcagtacactgtagtttcctcttctttcacctggactctcctgacatctctctgatcaccccacttacatatacagatagctcaggaattgacagaaaggagtagaagaagttgggtagtacagcaggtttgagcagaaaacagactagagtttctatgtaaaatttttaggctattgatttgaaaatcagacttccccag

SEQ ID NO: 220496 - DNA, 527 bp, Homo sapiens
ggccaatagatgtaattttaatcgtaatcacttaagttcttccttatcactgaaatatgtgctcttctttattcttgaacgtcttgaatcatctgatgttgagggacctcctgaactggattttctttttttcttcttttcttctttctcagttttggcttgctggaatgctgtggcataaggctgtcaaagagtaggattctccccttaatcttctctgtcttctacttcttcagtttcttctactggttcaggaactttctttttttttctttcttctttggaggttcacgtacttcaagcatatttttcggacaggcgtaacttaggtgtccacttttcccacaaacataacacttagattcatcaaagtagttctgcctttgggtgaactcggctgcccttctgtcgtcaatagtgatgcttgcttttatcactctaccaaataaccgttgtttattgccctagtactgttttgtgcagagtattttatccaaaaataaaataaatgcaacctctttactctt

SEQ ID NO: 220497 - DNA, 526 bp, Homo sapiens
aataaattaataatttctactgctaaggacattttaagtgaaatgttttttggttttgcctgtgagcacgtggtgctgaagaatgtaattgctactggtacagcttggcactgctcgcttgattcatgcttaggttctgtcagtgcaaatgtcaacacagtgaaaaattatatcttagtattattatgaaaatagtcttggccttgcagaccttttgaaagggtgttagggtcccgaggaatccatggaccatacttcaagaaccactggatttgactatctttgaaagattatatcagagaccagtaataggaactgcctttgaggagggcaagtttgttttactgtcatagagcatccttttgaagtttttgcattgtttaccttagtcaagtgtttcttttttgcaatgtgaatttttattttgtatttcgtctttggaggagattgcagtgagccaagatcctgccactgcactccagcctgggcaacagagggagactccatctcaaaataaataaataaa

SEQ ID NO: 220498 - DNA, 437 bp, Homo sapiens
ataattcttcccgttggtgaaggtgtggtgagagtgtgagttggtaccttttgggagaataatttgataatacctatgatatttaaaaatacacatatgaggatggggggatatgggtatataaatgaaataattttagccatgaaattttatgggccaggcacggtggctcacgcctgtaatcccagcactttggaaggccgaggcgggcaaatcacgaggtcaggagttcaagaccagcctggccaacatagtgaaaccctgtctttgcaaaaatatgaaaaaaattagccgggcatggtggtgggcgcctgtagtctcagctacttgagaggctgaggcaggagaattgcttgaacccgggaggcagaggttgcagtgagccaagatcgcaccactgcacttcagcctgggtgacacagtgagactagctcaaa

SEQ ID NO: 220499 - DNA, 2598 bp, Homo sapiens
  misc_feature (1)..(1): n is a, c, g, or t
  misc_feature (3)..(6): n is a, c, g, or t
  misc_feature (176)..(176): n is a, c, g, or t
  misc_feature (418)..(418): n is a, c, g, or t
  misc_feature (1476)..(1476): n is a, c, g, or t
  misc_feature (2593)..(2598): n is a, c, g, or t
ncnnnntttatggctagatagtgctccattttgtctaagtaccacattttctttatccattcatctgctgatggacatgcaggttgcttctagatcttggctattgtgaatagttctgcaataaacatgagagtgcagatatctcttcgatataccgatttcctttcttttgcatntatacctagcagtggaattgctggttcatacagtagttctattttgagttttgtgaggaacacccaagctgttctccacagtggtggtactaatatacattcccaccaacagtgtatgaggattaccttttctccacatccttgccagcatttgttatcgtctgtcttttggatacaagccattttaactggggtgagatgacatctcattgcagttttgatttgcatttatctgatgatcngtgatgttgagtatcttttcatatagctgttttccatttgtatgtcttcttttcagaaatgtctattaaaatctttagtccatttttaaattggattgttaaattttttcatatagagttgtttgaggttcttacatattctggttattagtctctcatcagatatatagtttatagatattttctcccattctatgggtttgtctctttactttgttgattgtttactttgttgtgcagaagcttattatgtagatgtggtcccatttgtccacttttgctttggttgcctgtgcttataaggtattattcaagaaatctttgcctagtccagtgtcctgaagagtttccccaaagttttcttttagtcatttcacagtttgaggtcttagatttaagtctttaatccatttttattttattttggtaaatgttgagagatagaagtctagtctctttggtcttttagatgagatgcaagatatgcacatttacttgggaaatttatatataaagtataacttatacatgaatgcataaaaattaatctgtagctaagactagaaggaactagaccacaataagaatagaagcttttttagtagggatatattacttgtgggaattaggatggcttaaaaaaatagcttcatcatcaggaaatgaaaaaaaaagtcccatactcaacaaacttcaaatgatgtaaatgatttataatgtaattttcctgcagagtgaaatcatatgcttttgaaagtaaagtaatggattattctgacatggacaagtaattccacttattattaccttcgcattttaaagatgacatgaaatgtaaagatcatttaaatttaacaaatgacctctgattaccaggaaaaaaaggccaccttgcagggcgtgcagaagtgaacatatgtttaagagtgctattgcatttccaacataattagtcatctaactatgtattcaaatgaagctaatggatttctaagtacaattaactatgatttatctaagaacattgcagtttgaattcttttctcccaatttgttcntaattattcttttatataaatttgttaattatttatgggcgaatttcactttggccaaattaaaatctatttccacaatgcagcagctatcgaacagcaattaaaaggtggtgattgaagaaaatgcagctttacttattgttttccaaagggaaacattatttgagaagttaggcaaataatttctctcagttctactttaaaggaattaaagatgaatgagaactttaaaaatattttaagattaaaaaagtgaatatatactaatttattctataacagttttactttttattcatcttggtttcatttattggcatttaaagagaataaagtattgtatattcatgcattttcttttgagtttttgtagaaggatatgggaaagttaaaatatagcaaatgaatgactcattttataatttttagctaaatacagtgtgcttataaaatgtacatcaataaattcaacttggtttaaaaattagccaactatgtgtgattttaaaaattgatttggtatcagatacatgaaatactaaacaaaacttatctactgtaatattatgagataactatcttcaaattttaaaaatgctttagaaatgctcagcagtgtggtagagatgtatgtcagtattatcaataatttaaaacttattagatgctttttcagaaaaatacagtaatgttatcttgatgagcatggatttggactcagcataatcagtaaaatgagcctcaggaaaagtattataccatttctttttgttgagtttattatttcactttggtataagaattgctcattcaaaataccttaggaaaactttaaaattgataattcagcacatggacttaattcacatcaaaactcaatttgtctttgttatggaactttgagagattcctgcttaatggtataagagaaattcttcattaaagaagcccacacagttataccccacaaaaagctaatgctattgggcactgtagaagtgcctactgtgaggtctataacttgtaagaatcaagatgggtgatgtgttatgtagtttaattcatccatatgttcaaggcagttctggtaactctcaggtaaagtgcaggctcgagnnnnnn

SEQ ID NO: 220500 - DNA, 463 bp, Homo sapiens
cttcatttttgaagcctcctgagtcatgtaaaactttggttaaacaaatttgctatgattttctcttgttaacctgtcttttgttataggaatgtcagttgtgattgttatgatgggtgaggaaaggtatctgttcccccaacacttctttgaaaatttgtttatccaatgaaccagaatatcacctggcaaatcccacagagataatgagacaaaggactgacacgtattgatgaggaagccaggagggccagtgaggaggaaagaagggcatgaaaacccagaaaccaaaacgaaggagttttggatgtgagctgaacccacttcatatgtgtacaaaattacaatcttagtttttagctcagttgtcttatcttttaaggctatagcagaggtgaaatagggccaaaaggccaaacctagcccagcatgtatttttgcaaataaaggtttattggaacac

SEQ ID NO: 220501 - DNA, 469 bp, Homo sapiens
aaacttgcttcacaaagccatgtgcctttcttacaacatgatattcaggggcccttaattcatttgatctgaaaagttcccgtgcaggctaggtgttatgtaccataccttgccatcatttaaaaataccctgctgtggtttgaaataatgatctctgaggatgtgtgcacctcagaagactggtgcagaagcaagtatcacttttaaaatgagcctatgcgatccccagattaatatctgaaagctagctacctaataaagttttaattgcttaaggctactgggctagttgaataattgaaagaaagaagattgtaaattattagaattaacaatactaaactctgtggtaaatgtatagtgattgtttcttcaaagttaatgtgctgtgattttactgttattgtaattactttctcacttgagtgctggtttataaagctcagataaaataagcctgtagatatt

SEQ ID NO: 220502 - DNA, 159 bp, Homo sapiens
agatataatacgagatgtgccctggatttcagagacttgggaggaaaaataaaagaatataaaatgtcccatgagtgctttttctatattaggtagcaacattataatattttagataaataaaatttctttatagatgaaataaatgtaacatcatta

SEQ ID NO: 220503 - DNA, 469 bp, Homo sapiens
ggctgtgtagaaagaagtagatataggagactccattttgttctgtactaagaaaaattcttctgccttgggatgctgttgatctatgaccttacccccaaccgggtgctctctgaaacatgtgctgtgtccactcagggttaaatggattaagggcggtgcaagatgtgctttgttaaacagatgcttgaaggcagcatgctccttaagagtcatcaccactccctaatctcaagtacccagggacacaaatactgcggaaggccgcagggtcttctgcctaggaaaaccagagacctttgttcacttgtttatctgctgaccttccctccactattgtcctatgaccctgccaaatccccctctgtgagaaacacccaagaatgatcaattaaaaaaaaaaaagcaaagaaaaatttatatattactcatttattaataaatcagaaactacaagaagctatcaccc

SEQ ID NO: 220504 - DNA, 314 bp, Homo sapiens
ttcttctatttaagtggagcatgctatcttcatgtgccaacttgctataaggaaaagaaaaatcctgtcccatggccacatgtaacacctctcatcaacaggggtcattctttaaaactgaacttttcctcacagtacaacatagataagagacaagtcatgagagaacctagataaaagacaattaaggtgatctgatgcaaactcatccttaccaccagaaaaacaattctaagcacatgccaaaaaattattaacagatcttcaggcttttagtcgagaaactaaaaggaataaaaaattaataacaaagc

SEQ ID NO: 220505 - DNA, 424 bp, Homo sapiens
cgcaggggctcacgcctgtaatcccagcacctcgggaggccgaggtgggcagatcatgaggtcaggagatcgagaccatcctggctaacacggtgaaaccccgtctctactaaaaatacaaaaaattagccgggcctggtggtgggcgcctgtagtcccagttactccagaggttgaggcaggagaatggcatgaacccgggaggcggagcttgcagtgagccgagatcaggccactgcactccagcctgggcgacagagcgagactccgtctcaaaaaaaaatagtaatttcttgataatatactctaatcatttactcagcatatcattccacaaataaaactacaaatatttattgagcatgtactatgtgccaagcactactgtgagtgctagagatgaagtcgtgaacaaaaaaggctc

SEQ ID NO: 220506 - DNA, 364 bp, Homo sapiens
gcaaaaccggagaggctgtgggaagctaagcctacagcagcacacagctgaatgggaccagagtcacagcacaagccaccacgaaagttctgagcaggtgggtggtcctgcataagcactgctctctccaggggtacagagggactcttggtgggagagcactgctacgtgacctccatgtcaccaacctccagtggtttcacatgtgtcttcagcactctcagcttcctgcagtgaaagaaagcaaatgagatccctgagtgtgaataacaaatagattgttaactgtgaagtgctgtgcacacatatgtgtgtgtagataggaagattggattaatattagtaaatttatccacccaacttg

SEQ ID NO: 220507 - DNA, 566 bp, Homo sapiens
aacatatttggctgataattcaatcatcagaattatttctaataattccacatttctaggtctcttttctattgatttttctcctggttatgggtcattttcctgcttattatttgtatgcctagtaatctttcattaatatattattaatgctgaacattttaattgttaggtgctggcttttactgtattctttaaaagagtttagttttggcacataattgagttacttagaatcagcctggtccaacaactgctaaaaatgcaaaacttagcgaggcatgcacacctgtagttccagctaccctggaggctgaggtgaaagaattgcttgaacctgggaggtgaaggttgcagtgacccgagatcatgccactgtactccagcctggtcaataagagcgaaactttgtctcaaaaaaaacaaaacaaaacaaaaacaaaaaccagtatgtggtccatccatacaattcagccacaagaaggagtgaagtacagattcatgctgcaacatggataaacctttaaaacattatgctgagtggaagaagccccgagatgttcggg

SEQ ID NO: 220508 - DNA, 409 bp, Homo sapiens
agatcgtgccactgcactccagcctgggcgacagagagagactccgtctcaaaaaaaaaaaataaaagaattcatggaattacacttgtgaaatacttagcatagccatcactataggaaaaaaatctaaggccaggcacagtgcctcatgcctgtaatctcagcactttcggagtttgaggcaggaggatcacccaaggctaggagttcaaggccagcctgggcaatacggtgaaaccccgtctctaataaaaatataaaaattagtctgatgaggtggtgcacctgtaatcccagctactcaggaagctgagacacaagaatcactttaacccgggaggtggaggtggcagtgagctgagatcacaccattgcactccagcctgggtgacagagtgagacctgtcaa

SEQ ID NO: 220509 - DNA, 455 bp, Homo sapiens
tcctgcctttggactacaggtgtgcaccaccatgcccggctggtttttaaattttttgaagagatgaggtcttgttatgttgccagactccgtctcaaaaaaaaaaaataaaagaattcatggaattacacttgtgaaatacttagcatagccatcactataggaaaaaaatctaaggccaggcacagtgcctcatgcctgtaatctcagcactttcggagtttgaggcaggaggatcacccaaggctaggagttcaaggccagcctgggcaatacggtgaaaccccgtctctaataaaaatataaaaattagtctgatgaggtggtgcacctgtaatcccagctactcaggaagctgagacacaagaatcactttaacccgggaggtggaggtggcagtgagctgagatcacaccattgcactccagcctgggtgacagagtgagacctgtcaa

SEQ ID NO: 220510 - DNA, 380 bp, Homo sapiens
gatttcttatataaaattagaatattttgcataaaatttcattaaagggtcatggtagatcaaaagatcttacagatttctactatggccaggtgccgtgggtcacacctgtaatcccattactttgggaggctgaggtacacagatcacttgaggtcaggagttcaagactagcctggccaataaggtgaaacactgtctctacttgaaaaaacaaaaaaaaaaacaaaaattagccgggcatggtggtgggcacctgtaatcccagctcctcgggaggctgaggcaggagaatcgcttgaactggggaggtggaggttgcaatgagccaacattgcaccactgcgctccagcctgggtgacagagactccatctcaaa

SEQ ID NO: 220511 - DNA, 422 bp, Homo sapiens
agttaccttgttgcataaatcttagacacttacctatctatatgaaaattattctgaagttttactcttgctgtggaaaatgagtcctgtaaaaaaatcacatggtatgatcaggttcctctgccccctctaacccctttcatttaaaatagtggtttttttttcttttaatgcatttacaggcactttttcttttcttttcttttctctttttctttttcttttttttgagacagtgtctcactctgtcacccaggttgaagtacagtggcaagattccactctgtttcccaggctgttatcgaactcctgggcccaagcgattgaccttccttggcctgccaaagtgctgggattacaggtgtgagccactgcctggccctacagccatctttttaggaaaaaatctctgcttaaaatga

SEQ ID NO: 220512 - DNA, 392 bp, Homo sapiens
tactgagacagggtctctccctgtcaccctgcctggagtgcagtggcatgataagctcgtaacttaaaactcctgtgctcaaggatctttctgcctcagcctcctgagtagttgggaccacaggcacgcgccaccacgactggctaatcttttttttttttctttttaaattgagatagagtttcattcttgttgcccaggctggagtgcaatggcgcaatctcggctcactgcaacctctgcctcccaggttcaagcaattctcttgcttcagcctcccaaagtgctgggattacaggcatgagccactgtgcccggcctgtccatgcttatgaactccagtcatgaacactccttctgtgtctttctcctcacccttctgtgtctttctc

SEQ ID NO: 220513 - DNA, 688 bp, Homo sapiens
agataaggtaatttgtccaaaggtgagttcccatctgtactgactctgatcatttactcttttttggaccacagagtctcactgttgcccaggcgggagtgcagtggtgcaatctcagctcactgcaacctttgcctcccaggttgaagcgattcttgtgcctcagcctcatgcctcagcctcccaaatagctgggattacaggcgcccgcctccacgcccagcttatgtttgtatctttagtagagatggggtttcaccataccagccaggctggtctcaaattcctgatcaggtgatccacccacctcagcctcccaaagtgttgggattacaggcccgtgagccactgcacctggcctgatcctgtactcttctgtgtattgttttgtgtttgtttgtttcttttagagggtctcactctgtcgcccaggctggagtaaagtgatgcaatcatacttcgctgtagcatcgaactcctgggctcaggcaatcctcctgcctcagtcactggggtagctaggactacagacatgtaccaccacacctggctaatttttttttttttttttttgtgacagtttcgctcttgttgcccaggctggagtgcaatggtgcaatctcggctcaccacaacctccacctcctgggttcaagcgattctcctgccttagcctcctgagtagctg

SEQ ID NO: 220514 - DNA, 367 bp, Homo sapiens
cctattctggccatttgatagaaatgaattgtataatatgtagcctttgggtttggcttctttcacttagcagtcagttttcaaggttcatccatgtgtcaagactttattactcttttctgttttgctgtgttgggtcttgtgttgcctaggctggattcaaactctcaggattagtcaagtgattcttatgcctcagcctcccaagtagctgggactacaggcgggtgccattgtgcccggctaaaacttcattcctatttatggccttttatgcaatagtcccctcttatctgtgctttccctttccatggttttacttacctgtggtcaaccgtggtctgaaaatattaggtggaaaattcca

SEQ ID NO: 220515 - DNA, 423 bp, Homo sapiens
attttagcaaccgcgatttccaatgacattacagcattactgaacagcattgtacttcgactatctcttactgttacataggtttagatggctgctaatgtggtaagaagtgaagcctctcatttgctggctctgctgaaagagctgtggaactgtaaaacatgtagcatgttccacttgtctcatcagtgatcgctatatctggttagcgggaggcgtggcagttcatttccagattacatacttttccatggaaatattctggtttcttttcaagccctttcaaggtgaaaagtatctgaggatggtgcaggtggagtgtgagcttcctaggaagcaggatggagtatgactatgtaccaatagtgtatagaaaaattaattcaggaaaactcccatttctattctgttgatgcaattagg

SEQ ID NO: 220516 - DNA, 549 bp, Homo sapiens
aggttgtccaggaaacaaataaccaaaccaactcaatcatgcctgagtcattgagcctggtctaaactgtaacccacgtcaaaacaaaacaacagaaaccccaccccaggcaatgagactgctcgagtcctccctgggagcacatgtgtcctgtaccttctcttgtttaatcttctcagaaacccagaacagtaggtattattattactgttttacagatgtcaaaattgaggctcaaaagcgaagttagataggcctgctggagggactcactatgccagtggaacgttgagatttgaaccccaatctttgactccagaagcagtgctcttggtgtttccatgaggaaaatatttgtcatctaatccatttgtttctctccaatgagatattcctgatgagtaaaaacttgtccagacagggccgggcgcagtgtcttatgcctgtaatcccagcactttgggaggccgaggcgggtggatcatgaggtcaggagatcgagaccatcctggctaacatggtgaaaccccgtctctactaaaaaataca

SEQ ID NO: 220517 - DNA, 675 bp, Homo sapiens
ctctttgtctgttttataacaaaaggatcaattaaaaaagaaaaaaaaacaacttagactggcagtgccaggctggcagggacagcctgtctggtcaccactgtattctcagtggtatatagtaggtgcataaagaatctttgctgaatggatgacaagatgagtgactgaggtagcctgttcccagtatgatcctgagctcctgactctcatgtccttgtagcgcctactctctttgagtacgggctaaacttattgtttgcctctaatttagcaataggatgccacttctgagattaggttataaaaaagactatggcttctgtcttgtccctctcttactctctctctaacatccacagctgtgatgccacgagaatactcagatagcacacggacaggcccacatggcaatgaattgcaacttgccagcaaccatgtgggttagcttgaagtgaattctctagtcctgtgtcttcaggtgactgtagccctggctgaccatgtgactgaacctgaggagaagctgagccaaaggcacacagataagctgcacctggattcctgactacagaaactgtgaagtaataaatgtttgctgttcaaagccaagggttggcaaaatatattccacttgtttctgtaaataaagttttactggaacacgaaaaagtt

SEQ ID NO: 220518 - DNA, 308 bp, Homo sapiens
tgatgccctgggaaaaccagtacactggggaaggcaggctctgcggctgtcagtgtgagaattctccacccggggcctcttctgcttaggacagtctggatcacacggctccctaccgtgcaagaattgaagttgctgcagatccatatggaattgctgccagtaactcggacaccttccactggtaacaaccgggctgcctaaaccacggatgggggacaacttgagtttacagaacaggttgtatgagtgttttaggcatggtatatgaatctccttgttaataaaagttttcatgtgttgcagaa

SEQ ID NO: 220519 - DNA, 412 bp, Homo sapiens
aagcacgaggaaatatattcatccattcctctacttgatgaccaaaaggaataatgctttagatttggcaattttggttaaaaggatgaaaaacttttgagctatttaaaaagcaagtaactgggccaggcatggtggctcatacctgtaatcccggcactttgggaagccagggtaacagaatcactcatgctcaagtatttgagaccagcttgggcaacatagtgagacccaaccccacctctgcagaaaaatttttaaattagctaggcatggcggtgcacacctgcagttccagttacttgggaggctgaggtgggaggatctcttgagcctaggagtttgaggctgcaataacctatgattccacccctacacttcagcctgggttacagaatgagaccctgtctca

SEQ ID NO: 220520 - DNA, 555 bp, Homo sapiens
atttcacaactagcaaaagaacgtttgttttctttaaactggagagcagtgctgtcattgggttgttttagttttagttttgcaaggtaaagatttcttaaaaaaaaaaaaaaaaaaagaaaatcaaacctgacatcatctatcaccaccatttcatataaaaagtacattttagtattgaaaggtagacacaatctcaggttaaaggacagtgttttctgttaaataaactcagttttatgtgtagtgttaaaagtgagggctctgcagtcagtttgcctggattcaaatcctggttcttccactaactagctggaaataataatagtaactacctcagaaagttactataattaagtataatgcacataaagcacttagcatactttatggtggatagtaagagctcgtaaatattggctattaattaatagcttatttctctcacctttctgcagatgagtgatgaaaatggaattagactcccaactggtgacaattagatcacaattaggttaccaaaaaacttccaaataaatgactattttacttacc

SEQ ID NO: 220521 - DNA, 416 bp, Homo sapiens
caggccccaatgagcctggactagtgagaaacaatccatgctatttattcagatgatagaaaagccagcagggaagggaatggaaagagctcctgctgctcagaggaattctctctcccagactcttcagtgagagacatgggtagcaaagggaatgataaggaagttccaaccagccagcatgttccaggccacacccacttttaagggatgtttaatgtatctctatgcatggggtaatatggaagtcctcatcccattcccagtctgtatcaagatgcctcttctccccagctactcaggaggctaaagtgggaggatagcttgagcccaggagttcaaccctgcagtgagctgtgatcataccactgccctccagcctgggtgatagagcgagaccctgtctctatttaaaa

SEQ ID NO: 220522 - DNA, 641 bp, Homo sapiens
cagtttggaagggttatggtctttttgcagtatgcaagtcagatgcccaggacacactgtgatttgtgaggtgcacttgttgactttttcctgtgagggtttgcttcctaaggcgttgagaacccttccattatcttgctaaccttgctacggattatcctgagggagtagcagacaaggtggtgagtggaacttggttaatggaatgcctataagctatgtttttgtttgtttgtttgttttttaaacatgaaaccttatttcttctggagaccaagttaaaaaaaatatggagatttgctcatgtcaacaaagttatgtgtatagcgtttaaaactatctaatgtgatttatgattggagtggtgggggcagacgtctttgtctaaaatgagaaacgaagctcgttctggatcttgtgtctggaaaggagaaatggagaaaggacaggcatttatttgggttatctggaattctacagatgttcttttggccatactgcatttaaaagaaaaaataaattaaaaattaagaatgcattaaaaatcagtcattttgcattcatgccatcaacaagtttctgggtgcctagagcatgccaggtgctgttctaggcactgggggagacaaggtagagccgag

SEQ ID NO: 220523 - DNA, 218 bp, Homo sapiens
tgtaggtaatagaagcacctgctcacagagttgtgaatattaaataaggtaatgtacttgaagttcttaacactatgtctgctacagagtaaaagctcaaatactactcactaaatactgtagttattactggtgacactactacatttacattaaattaaacctcagccagtgtaccttaaacgttgaaatggctataaaaaaatcgaaaattttac

SEQ ID NO: 220524 - DNA, 268 bp, Homo sapiens
cctctggggcccttcacgataactgtgtgtcccttcagagtaatgttgacattttctagaatgttagcagtctgattgctgagaacggtcttcattctcgcagcagacatggcaaagaaagcaattaccagacatttttaaaacaactgtgggctaggtgttatgattcacacctataatcccggcactttgggacgcagaggtgggaggatcgcttgggcccaggaacttgagatcaggcaaaatagcgagacccctgtctctacta

SEQ ID NO: 220525 - DNA, 452 bp, Homo sapiens
ttgaggcagtgcacacagaaaggaaaggctctgtggttcctaaaggctcagactcttaactacagcgcactgtcctcttgtcaaatccttggtggctcaattctccttccttacttggataatcttcctggaaataggtttagttcaccaggggagcattccggggtgtgtggctcagacctgggtccaagtcttctcaggctttcccgaacccatcccctaccatcactcaaggaagacgtggtagtgactgattagcctaagatgttggtcccagagcaggctgcagtttggactgtgggctggagagggaaggcatggtgatggctttgaaggtgacacctcgatagcgtctgcaacaacggaagacagaatgccacaggatactacactgggtagctggagagcagggatttatgtctttaaatcaataaattatatcttatatctct

SEQ ID NO: 220526 - DNA, 1847 bp, Homo sapiens
  misc_feature (1846)..(1846): n is a, c, g, or t
ctcctgccctccactgactccagagagggagatccccagtacttgactccatcacgcagatgggagcaggcaccagctatggagagggatacagctgcgtctccacatgacccatcctgcatgacaccaaagccaccgccagacagtgcctcggattctatgcaaaacctgggaagcggagacctaccccagccccgggaggaagctagctcttcaggggaccgtctgaggactggagtttgatccatgaacctggcttcgaggccttgcttttctctcttcttcattcatattcattcccaacaccttagaaggtgttgcttaatttatttctagaaaagcagcccagagtcagtcattgaagccttccccaccccctggccaaaaaaaaaaaaaaaaaaaaactggacacattttggatctgttgggagcttggagtccagtggttggcatagttgtcacattgggagcagagaagaagcaaccaggggccctgatcaggggactgagccgtagagtcccaggatggcacccaatggcacagcctcttccttttgcctggactctaccgcatgcaagatcaccatcaccgtggtccttgcggtcctcatcctcatcaccgttgctggcaatgtggtcgtctgtctggccgtgggcttgaaccgccggctccgcaacctgaccaattgtttcatcgtgtccttggctatcactgacctgctcctcggcctcctggtgctgcccttctctgccatctaccagctgtcctgcaagtggagctttggcaaggtcttctgcaatatctacaccagcctggatgtgatgctctgcacagcctccattcttaacctcttcatgatcagcctcgaccggtactgcgctgtcatggacccactgcggtaccctgtgctggtcaccccagttcgggtcgccatctctctggtcttaatttgggtcatctccattaccctgtcctttctgtctatccacctggggtggaacagcaggaacgagaccagcaagggcaatcataccacctctaagtgcaaagtccaggtcaatgaagtgtacgggctggtggatgggctggtcaccttctacctcccgctactgatcatgtgcatcacctactaccgcatcttcaaggtcgcccgggatcaggccaagaggatcaatcacattagctcctggaaggcagccaccatcagggagcacaaagccacagtgacactggccgccgtcatgggggccttcatcatctgctggtttccctacttcaccgcgtttgtgtaccgtgggctgagaggggatgatgccatcaatgaggtgttagaagccatcgttctgtggctgggctatgccaactcagccctgaaccccatcctgtatgctgcgctgaacagagacttccgcaccgggtaccaacagctcttctgctgcaggctggccaaccgcaactcccacaaaacttctctgaggtccaacgcctctcagctgtccaggacccaaagccgagaacccaggcaacaggaagagaaacccctgaagctccaggtgtggagtgggacagaagtcacggccccccagggagccacagacaggtaatagccctagccattggtgcacaggatgggggcaatgggaggggatgctactgatgggaatgattaagggagctgctgtttaggtggtgctggtttatgttctaggaactcttcatgagcactttgtaaacaccctcttgcttaatcctcccaacggcccccaaaggtagaacttagctcccttttaaaaggagcacattaaaattctcagaggacttggcaagggccgcacagctggggcnt

SEQ ID NO: 220527 - DNA, 324 bp, Homo sapiens
aaaattagagactaacagtaaatttactttaatttttacgaataattctctatcaatgtaaaaatttttcatatacgcgtgtatgaaagaaaaacactactatttttccacattcgtgaaaactgcttaactgggacagtaaccgagcggccagtgaatatttaaaatactgtaaccgacgaatacgtatgcttctaggaccacgtggaatctttcccatggtaggtaagcaaaacaaatgtgcttcccagaaccctccaaactgctcgtgggtatattactacagattacataatgcagcagcgttccgggacgcaagcccag

SEQ ID NO: 220528 - DNA, 567 bp, Homo sapiens
acagttgcagttagcacattttactgaaactttactaaatacatagactgctttttggtaatctaagatctgaaccctcttcttaaattacatgaatttcttgataaatagctcttaatttgggtccttcctccaaagtaagtctaaaccccagatactttctcagcttcctctagttaaggaatcagcacttaatctatgctccgccaatgagatgcacctcctctgtatttggaactgagagtttgtgaagcaaagaagcagtgaccatggggtctttttgctggtgttagagaaggctgaggataaaagccaacacagaggagggaacagctgcattggtttccattgtccatagctgactgtggtgtaagctgaggtgtctgttcttcagaaaagctgcagcagggctcaccggactcatttttcacttgagttttgttctgtttctggatgtcagtttttcttcttcctgctagttttctaagcctagtcttacagatttctgttacctgccctaaatttgtttcattaatcccgcttcttgattaatccagaataggcttc

SEQ ID NO: 220529 - DNA, 522 bp, Homo sapiens
ctccgaatctggtgacagtgtgtttgcaccacctggcttccacccactctgacccttctaatttacttccctggaaaagcccaagtggtgtccaacatgaggctggggtcattcttccaacagcccgaccccaaggggcatgctggtcagacaacagcctcgctggtggggtggaggggacggtagggagcgagtgggcccggtgactcattgtgggtgcttctctgggattttggaggctttgttgtgttgctcagggcccttttaactctgtctgacctatgggaggggacagcaacgagggcttttatgactggaatgaactggaaacttggcctctgagagcccttaaaatgttttggaaacctctaggcatacttagggtacttccaccatgattatcatcggctgtgtggcttccgatcgctaattcgcaccgggcatctggcgaggccggcctggggaaattgggatggagggtcctgctggagggaatcctggcgctttgggcggaggagtgct

SEQ ID NO: 220530 - DNA, 335 bp, Homo sapiens
agattcagacaacgggttcaataagtaaaatcttccttgaacacccttccccctagaaattatcatgtcctatagatcatttcacagagttcctactctctctggggaaaaaaaaatcacagaaatatctcacaaaatgaagatattttcttcccataatcatagtcataagtaaaatatgtatttgaaatttgagatcaaaaaaaggtagaattgattttcatgaacactagacatgtgattcctgtcctcaacaatgtgacccgcaaaaccaggatcttatatatgcccttgttttggggaccagggacaagatgcaatattcttgattttaa

SEQ ID NO: 220531 - DNA, 426 bp, Homo sapiens
gaacgctataaatgaaagtaatggaaattttattatattctattatcgattgtgtgattagagttgttgagtggtaactcagtgtctcatgtgtgtgaaagagagagaaatgatgacagttgtaaaagcctaagatacacaagacagaatagtggttaggatcataagcttggaaattagaaccgatattttacttccagtgtctgccacatctcagtggtatgactttgggaaagtagtttaatttctctgagttacttcatctgtagtatgcagattacaatagccaccgcacagtgggtataaagatgagtaaggttatatttttgaacacgtagaagagtatctgacatacaataagtgtgtaccgttaaagtatacttaaacaaaatttaatattaataaaagctatatataggtatatgg

SEQ ID NO: 220532 - DNA, 320 bp, Homo sapiens
agggctgtaataagattagatgttgaacatctaaatggcagccccgccacgccaacacccagcatatttctctttatataaactactctgactcagagagggcctcaaagaaggattcaaagtatatatcatgaatttattttgattaagctatagaaaatacaggattgcattccaggtttttgtttaaaaactaataaaaatgactctttaaaaagtgcagagtagacatgtattctatttcattttcttttctggttttatctttgaatacaagtagttatagcccaggtattctttctcaagagaaaagttgaaag

SEQ ID NO: 220533 - DNA, 1988 bp, Homo sapiens
ttctgattagttggagtttaagttgtattcttctttaatataggcatttacaagaaattgctcaagttaagttttgcttatgtttgcaaatcaagctaggttcaggtcacatctgaggtcttgctggctatgtctgcttatagtttcttcaggcctggtctccattttaatttactttaccactgtgttggaatactgttgattaccccattgggctgcaaggtccacgaaagcaaggtcctcgcctctcctttggtcaccaaacatagtgcttggcactaaatagtggctcaatgattatttgtaaaataaataaatgaataaagagatttaaagttccctagaaagtgaaatgtctttctccttgactttacataccactcagaagattctggacctactagaattcttcattaagaattttgttttcctggtattttccagctatcccaacttctgttaacaaccgaaagttagcaggaatgggggaaaggccatatgatttaaatgcctccaatgagggctgctactgattaattttagatcccaagcatctgggtcaatgcctagtttcatggcaggtatgcaaatgattattttagtgtcattattaatgattttactaagagctgggagcacttgaaatgttcctccaaatgagatttgagatgtagaccagatggtcattttttaagagcatctatatattctattctacttttcaacacataagtttttatattaagattgattactaatgtacctaagcacccacatcagtattcagtaaaaaattagacgcattatgtattttttaagaataagaaatgctccattgagatgataataatctaaatgaaatataatcatccctgaagttgaatctagccattctgttttgctttaactaggttaaggcctctaagtcattttctttttctccttcccctggcaatatatcatgttctacagagcttaatattgtgtgggtacaacctcaggcataagaaaatggtctcatcagtcttagccccaaaatgctgtttggtcaggcaggatggcttaggtaagtttgatcacaaataaatatgtcaatatctactcattccctgaatcccaaaggtcagtgctcaggggaggatttgtcctaggagtatcagttttattcttcttggtcatgatggtgctgagaaagactaatatacactggactataatctttgagccagaggaaattgaatcaaaccaagtggaaagaatgtgctatttagtattagcagggtcagttaatggaaaaattgtgaaatgggtgaagttcatcattgatctaactcctgcagaacaaacctggtctccccagtcccaggggcatgcccgctggcctttgtttagaccttggcattttccgctggcttctctcagtttcttggggacttgattatgtgcactgaaacaaagccattctaggttttgaggtttctggttgggctctttccttccccaccctcaaatggatattagcttatttgatggatcaagctgtcctcatttgctaacagaaacggcttaaggaatttctgggtcctctcaggtaacatgtggatttcacagtgactttcttatgacaaaactcttccagtgtgtatgactcaaatgagtgagtttgctggtgtggatttcagtccaagtagtatggacagatagatccctgcctttgaattttatgaagcagtaatatataataaaaaagagagagaaactgacatagagttgcccgtttattttttctttttgccaagtaaaggcattatggaaaaagaacaagactcacctactaagacaatcattttataaaagaaataaacataggccgggcatggtggctcatggctgtaatcccagcactttgggaggccgaagcaggtggattgtttgaggtcaggagttcgagaccaacctggccaacatcgtgaaaccccatctctact

SEQ ID NO: 220534 - DNA, 464 bp, Homo sapiens
cctgacgtcaacccaatcaaccgctgatcagaaatgttttaaaaacaagaaaaacaatacaaattagtaaacagtacagtatagcaactctttacataacatttacattgtattaggtattctaagtaatctagagatgatgtagcgtgtacgggaggatgtgcataggttatatgcaaatactataccatcttatataaggaatttgagcatccttggattttggcatccttgtggggagtcctggaaccaatccctcagagacaccaaggaacaactgtataatattggctgtaaggttatggttgatgcttttaatcaacttgaagaagttctcctccattcctaattttatgagagttttctcatgaacatgtgttgaattttgtcagatgttttttatgaattagttaatatgatcatgtaatttttcttctttagcctgttgattgggttgacgtcag

SEQ ID NO: 220535 - DNA, 696 bp, Homo sapiens
cagctcgtaccgctaggatgtggctattcatccattttgcatcgctataaaggatacctgagggctgggtaatttacaaagtaaagaggtttatttggcttatggttctgcaggctgtacaagaagcagatacttatggtgccagtatctgcttctgataagtacctcaggaaactttcaatcatggcagaaggtgaaggaaaagcaggtatgtcacatggcaacagaggaagcaagggggggggggtaaagtcgagtatctggtgaagtggaaaggatggcccccaaacatcgcactactgatgacaagcaggcaactgcgttggagagggaggtcatcatggctgcaaggaagggaccggacccatataatatactacccctaaaggcagcttcaggcaccaaagaagaccctaatttagtcctctccatcaccaacaagagaagagtgggctgcatctgcgtagaggacaacagtaccatcacctgctttgggctgcacaaaggcgagacccagtgatgccccagctatggaacccattacaagctggtgccccgccagctgacgtactgagcacctgcaccaagttacccaaaatgtgctgcaaagtttcttctttccaataaagagtagccattgcattggctccttctcccattaaaaaaaaaagaagaaagggccgggcgcggtggctc

SEQ ID NO: 220536 - DNA, 406 bp, Homo sapiens
cccctaggaggaaaaactgagccacgtttttagggggtccttaggagcacgtagagcagagcccgcacatggccctggagccccttaaggacccactgtttttggagatgctgcaagtcccccctcagcagttgccctccacgtttgtcagatgggaagaccttggccctgggagttgaacatctgaccccgttgttatggccccagccaggcaatggggaggattggtgggcaggcctgtggggagtgtcccctccctgacagacagcagagggcgggcgaagcggatgccttcccttcccttagatgtcaccagtgtttccttttcttctgccacctgcttcacaccccagggaggagagagaccgagcatcggggtataggaagagaggtccgaaacccaagc

SEQ ID NO: 220537 - DNA, 621 bp, Homo sapiens
ccagccccagcatcgcgcgccgcagccgcggccccgcagctccgcccccggcccggcccggccccgggcccgctcgcccgccgccccgcatggagctgtcagccatcggcgagcaggtgttcgccgtggagagcatccggaagaagcgcgtgcggaagggtaaagtcgagtatctggtgaagtggaaaggatggcccccaaagtacagcacgtgggagccagaagagcacatcttggacccccgcctcgtcatggcctacgaggagaagtacggtgtcctcggcaccgccgggtggggcttagggccggctcagaggcttcccaggagcctgctgctggcttggcaggggttgttggggcagggcaggggtgtccgatggggcaggccagcccagcctgcagctgggtgaaaatggtgggcactgagtcccagggcagctgaggaccctggggccctttcctgttgttgggtgatctcggtcacttcctttacccacccgggcctcagtctctctgctgtcaaatgggccaccctgaagagtacacccatttcccagggtgaaacctcagaggggccgtaagaggtttctgttccagtgaagaatgttaaaatgcttcaca

SEQ ID NO: 220538 - DNA, 600 bp, Homo sapiens
ctggtatcaggaaggagctattcatctttttatttgtttatttgtagagactgggtctatattgcccaggctggtcttgaactcctggcctcaaatgattctccctccttggcctcccaaagtgttgagattatagttttcaccactgcacctggactagtttctttttaatttctgagtagtagtcaattgtatggctctcctataatttcttcattcattcatcttttggtagacatttgtgttgtttccatttttaggctattatgagtacagctgttgtgatcatttgtgtgcgagtctttgtgtggatatattttcatttcttttgactaaaaacctaggggtgcacttgttgggtcacattaactttgtagaaactgcattgcatctttgccgatattgaaagttgtcagcattttatatttttctgtgcatgcttttccccccaaaagaccaaaatgggaattgtttttcttttcattataaacttgtaaaggaattttaaagttctaagggatgccaggcaggaggttcatctatgtgaacagttattagtttgagatagataatgtcaaggatatccctaaaggcttttca

SEQ ID NO: 220539 - DNA, 949 bp, Homo sapiens
aaactccgtgtctactaaaaatacaaaaattagccagggatcgtagcacgcacctgtaatcccagctactcggaaggctgagacagaatcacttgaacccaggagtcagaggttgccgtgagccgagattgtgccactgcactctgggtgacagagcaagactctgtctcaaaagaaagaaagagagagaatattttggattcttaataatttcttagaaatcatggttattaagaatccaaaatattcttttatttatttatttattttttgagatacagcctcactctgttgcccaggctggagtggaatggctcttcacaagcatggtgtcactgtttcttaccaatacatgaacctgtcaagcactgcacacctcaagctttggaatcagactagcaaccatcactctctctcttttccacattgattttcacacagtactatgacagatatcacatctccaaaggaagctagtgtggtctcaatgctgaggctgcatgctctccccatctagtcacttacagtgcccagctgatgttgagcatcactgttttcctcgaaagtttaaaatagccagtggctcccttgatcacttgctgtggcacctcagactgccttggcacacgatttgagagccatggggttagaccgatgttaggggacacaacctggggttgggactggcccagggatactgagtggctctcaggatctaaacagttgtggggttcttgccacagcctctttcacatcaggcaattagcagatgagttacagggggaggctcctaggccccagttggggaagattctggtgtctataaaatttaggaaaacttaaaaaaaaatttttttttttttggcttgggattacaagccaagccaccagcgtggccaagatggtgaaaccctgtctctactaaaaatataaaaattagctgggtgcg

SEQ ID NO: 220540 - DNA, 893 bp, Homo sapiens
aaactccgtgtctactaaaaatacaaaaattagccagggatcgtagcacgcacctgtaatcccagctactcggaaggctgagacagaatcacttgaacccaggagtcagaggttgccgtgagccgagattgtgccactgcactctgggtgacagagcaagactctgtctcaaaagaaagaaagagagagaatattttggattcttaataatttcttagaaatcatggttattaagaatccaaaatattcttttatttatttatttattttttgagatacagcctcactctgttgcccaggctggagtggaatggctcttcacaagcatggtgtcactgtttcttaccaatacatgaacctgtcaagcactgcacacctcaagctttggaatcagactagcaaccatcactctctctcttttccacattgattttcacacagtactatgacagatatcacatctccaaaggaagctagtgtggtctcaatgctgaggctgcatgctctccccatctagtcacttacagtgcccagctgatgttgagcatcactgttttcctcgcttggcacacgatttgagagccatggggttagaccgatgttaggggacacaacctggggttgggactggcccagggatactgagtggctctcaggatctaaacagttgtggggttcttgccacagcctctttcacatcaggcaattagcagatgagttacagggggaggctcctaggccccagttggggaagattctggtgtctataaaatttaggaaaacttaaaaaaaaatttttttttttttggcttgggattacaagccaagccaccagcgtggccaagatggtgaaaccctgtctctactaaaaatataaaaattagctgggtgcg

SEQ ID NO: 220541 - DNA, 372 bp, Homo sapiens
tgtaaggcttaaaagaattaaagtaggaattgccgcaattcccttcctagacttattcccaaatatacttactatggactacctgcatacagcagccccttcacatatttttactgcctgtcataaagtagtctgggttacatttaaagaagctgccagcacttaatgcatagaagtactaaaaatttgttactgatgtttgaaaaatatagaaaattagaagcggaatggctgagtgtagtggcttacacctgcagtccctacatgttaggaggccaaggcaggaagactgcttgaggccaggagtttgagacttgggcagcatagcaaggctttgtctctacgaaaaattgaataaatggataaataata

SEQ ID NO: 220542 - DNA, 592 bp, Homo sapiens
aagtgtcataatagcaggaaaggagttgctatttcaaacaatttaacataagtttaaagagctttattagatcaggattacatttgagctaccttgatgctcagttatacaacttgttgattaaataaggattttttaataatcgaaaacatcacttatataaaaagcagcccaaataattcaaaccaattcagtgagcatgatttacatcccagttcttcagtgtgtttcactgatgttgatgctggcattccctttggcatctgaatctctcaggactgagcagacatttcaaactcactgtacactgcagccccatagcctgattcatgtgaaaccaagtcaatcgccatcaccaatatccacacatatttttacaaagacaaccaacttcttttttttttttcttgagacaggatcttactctgtcatccaggctggagtgcagtggcacaatcttggctcactgcaacctctgcctcccgggctcaagcaatcctcccacctcagcctccccatgtagctgggactacaggcacacaccatcaagcctggctaattttttgtattttttggagaaacagggtctcac

SEQ ID NO: 220543 - DNA, 356 bp, Homo sapiens
caagacaaagaaaaacaaagcaaatatttgattggttcaagtggaaagtccctgattacaggttagtgggcagtttgtgattagttaagtttctctaagttgggttttggtttgctgatgtaggaacacagaatgctggggccgtttcaacctaatggtctcccaattaatttttttaacattactgatgactgttaggagtctaatgtgctactcctcccagggaaaatggcattcctaggattaaaggaactcagcacatggagtgtgcgtagaaatttagacactaactgcaggctggtgggagagagccctttagggcagaatgagaaggcgtccggccaagggcaggagtt

SEQ ID NO: 220544 - DNA, 289 bp, Homo sapiens
tgggctgagcacgattgcagaagtgaatgacttttcacgttacgcttaactcttttctctcgggtgctcagagcacaacttaaagcattctctctgagccaggggaatagcatcctggaatgtaagcccttgaagatggaggtctgtaaaagaaatattcagtgttaacttggaattcagtgaacttttttcatattaaaggaaatttgtcaagaaaaataattgcacagttaaattgtgctacagttgttttcattaagaaagtagaaagaagaccctaacagtttaa

SEQ ID NO: 220545 - DNA, 605 bp, Homo sapiens
gtgtactgcaaaggaaaacagagcaaagtggaagatgacagtggactaacataaaccaagaagtagctccaatagcagcgtgctgtgcgggatgtagcatcccttcgagtcagcacttgatatgaggctggagattgggttaatgaattcttttaaatccccttcagaaaagagaatcaagaacaggttgaattcacctgggtcagataacacagtgtacactcaaagttttgctccaggagcatataaaccctcctgctctgttacaaaactgtccaaagaagtccttgatcatcgtgacattctgtagaacatcatcctggtccaatactttgatgacaaaatgttaactggacctagtgaacaggaatgaactggcaaataatctgagtgttccttatgacacatgcaccagagagaaggaggtaattcctacaaagattcagaggtcagaggcccaacaatctagggaatactgggacatcctgccaagtcaagagccagttattgcattttgtaccttctactactaagagaggtagcactaggtagtattatctggattctgaagtcagcatgtccacacttaggaatatgctctgagc

SEQ ID NO: 220546 - DNA, 363 bp, Homo sapiens
tttatatggtatggggacaatgataattatagagactgtggattgggtgggcttttgttaataatattggaaactttgaaagagaaaattacaggcttacagcagccagttgccaatctgaggcattcaatgaaagccacagggcctctatggcttcatttatgcagcaccttgacatctatgagtatagagcacacagcagaaaattaggccatagatttaattgtactgtgacagaactacacagatgatgtttagaggcaagattgatgtaattacactagtgggtaacaagaagagaatggaaataaggatgtcttgatacataggtatctgtggtaatggcaaatagatcctagtgtt

SEQ ID NO: 220547 - DNA, 413 bp, Homo sapiens
acacacaaagaagtcgtgaagcaatcaagtcagggacttgttgaaagtcaccttgtaaacataatttccaaaagcccaagggagaaaatagtatttgtgtgtatgtgtgtgagtgtgtgcgcaggcttgtgtctctgtgtgtatgtatgtatatgtgtgtgcatgtgtatctctgtatatgcatatacatgcaggtttatgcatatatttatgcatgtgtgtgcatgtttgtgaggtagtttgggtctgcatgtatgtgtatgtttatatgcatgagtatgcatgtttgtggtagtatgtctgcatgtatgtgtgtgcatgtttgtgtgcatgcatgtttgtacgtgtgtgcatgtttttgtgaggtagtgtgtgtgcatgttagtgtgtgtgcatgtgtgtatatgcatgtg

SEQ ID NO: 220548 - DNA, 349 bp, Homo sapiens
atttttttgagtaaactagtcatatcacatgagatttttgaaagagtaaagcagctctggattttagaaacaaatgaaactatctcagctctgcctctcaccagccaagtgtcctgggtaagttacttacctgctctgtctgtcaaaacagaataaaaaacctatttttgtaggattgtcatgaggattgatgaaatataagtagggtgcctgatacacagcgaattctcatttgatgacagccattaatactctttcgttttattaggcatcactctgacttctgtgtagcgagatgattggggtcggggtcgacgcggccgcgaatttagtagtagtagtagtaggc

SEQ ID NO: 220549 - DNA, 616 bp, Homo sapiens
  misc_feature (53)..(53): n is a, c, g, or t
  misc_feature (121)..(121): n is a, c, g, or t
  misc_feature (125)..(125): n is a, c, g, or t
  misc_feature (137)..(137): n is a, c, g, or t
aggctgatcctagaggaccccgaacatgtcgaggctgtatgaaaatgaatgtntaacattaaaataaaaatgataatacagtagaaaaaaataaacaagcacttaagaaaactagtcttangaantatcaaattttnaattaatgacaactatcaaaactttgagcaggatatcttccaacaaaaatacactcaaaagactatatacacacagactaacttcacagtagggaaactggactcagaaaatggcccacctactgtactagacctaaaggaaaacaaaagcgctgccctatagagttgtttaaagaggagggaatttttgagtcatactcaactgtgattcatccccaaagctcactggttacatgtagtgaaaattcattataatgtttcaacaagcaatatttcctacctttaagaatcacagctaaaaattcaaagcaatgaatatttccccatatttttgaaatacaatcctatttaaaacattttagttctttgcatagttgttattagtatataactaacatacaacaatttagccttcgtgttgtcaccaaacctagaacatcttaatatgtctgtacttatcacacctctcttgaaagtta

SEQ ID NO: 220550 - DNA, 146 bp, Homo sapiens
ttccaggaaatggttggagtttctcttggtcatcttatcagaacttcttgatatagaaatgaattttctgatgagtagatgataaaataatggatacaataatagagtaagatgctaaaactggtggatattctgtaatataaaca

SEQ ID NO: 220551 - DNA, 575 bp, Homo sapiens
gggtggacggctgggaggggccagtgccctccagtgatactgagcaaaccctcccagtccgagtcagtgtgcacacaaggtgcagatgatcgggccgggttttgactttgtatttagcagccgaatgtgtttctgagtcccagggatccctgcacctcgtctgggcagacaggtgactttgagggacagtgggccaccttctcccgctgcctgagcacgtcccgtagccgagacaggcgctatgctgttacagtgtgtggagtgccccggggagaggctgtgagtggtctagacgttgggtgttgatatccaccggtttgcctgtcccaaacttgggcctgggagcccggcagagtggctcaagtggaaaatgttctatatggtatatttatacatatagcatgtgggattcctccagcgagcagttgggcccctggcaagataataaagagaattcaatgagtgtggaataagtacatttcttacaggcaattttctttttctttcaaaggcagggtctggttctttcacccaggaccgaggtgcagtggtgcattcatagctcactgcagcct

SEQ ID NO: 220552 - DNA, 192 bp, Homo sapiens
aatgagctaggaagaaacataaagcactaagtagacatgtggcacacgggacatgcacaggcacggtcatttaatatttgctaagtcccagtagttatgagtgaggaaaggcctttagagaccatgggagctgaggctctgagcctggagctaaaagtcagtttcccagtttccagctctagaatctgaaca

SEQ ID NO: 220553 - DNA, 219 bp, Homo sapiens
cccaaaacctttaagctccttatgtcctcttcattgtggaactagaggtctggaaagagtggctgctataaaaggaaacactatattgtattgtcagattgaaattaaatagaagaattttatctatgcataatagatcattttaagagctactgtgttgttctccaaatagtaatcagaaatctgtattccactcttgaaaaaatgagctttgctgat

SEQ ID NO: 220554 - DNA, 295 bp, Homo sapiens
ccataaatatttatgaagctcctattatgtgtcagcacaccgttgttatgaggttgctaaagcatatacatattcagcactaaattgtagtgcaaaagtgggcttccaaactcaacatagtaaaggcatcagttctccccaaattaattttataggtccaatgcaattcttaccaaaatcctagcaaggtattttgtaatcatagatgagtttattctgaaattaattttataaattttattgtatattcataatgtaatttacattatacaaataaaaatatcttctgaaactt

SEQ ID NO: 220555 - DNA, 387 bp, Homo sapiens
tgcaacaagtacacagtccgtcttcccctcaagtcatttttccagattttgaatccatagtatgtggcaggaagctgaaaagatcagctcagaagctttaactggctgaactttcaggactgaggagataaggacctggaagggtctcaataaagaatccaggaaggccactctcaagttcagggacaaactagaggtttctaaacagagaccttaggttgtaactcaaaaaactagaagaagaacagcaaaataatctaaagtaagttgaaggaaaaaaataagaatgtagaaatcaacaaaatttaaaacagacaaaaaattgagccaaaagctggttctttgaaaagatcaacagaatctatgagctcatagctagaatgatca

SEQ ID NO: 220556 - DNA, 396 bp, Homo sapiens
aaggctgctccaaagattacaatgtgtaactttaacttgtcctattctactttcaaataataatatgatacttaatggacaatataagaatcttatggcctggggcagtggctcatgcctgtaatcccagcagtttcggaggccgaggcaggtgaatcacttggggtcaggagttccagactagcctggtcaacatggcaaaaaccccatctctacaaccctgtctctactaaaaatacaaaaattagccaggcatggtggcacacacttctaatcccagctgctcgagaggctgaggcagaagaatcacttgaacccaggaggtggaggttgcagtgagccaaggtcgtgccactgcactccagcctgggcaacagagcgagactccatctcaaa

SEQ ID NO: 220557 - DNA, 303 bp, Homo sapiens
cgtttttaaccaaactcggctgttgttggtctaaaacctgccctgggttttgagggagcggtgcttttgtgagcccagcttgccttgagtgcatggatgggaacctgaaaccagccagtcttgcctcccaccctctcaacttttccagtaaaaaatgtgacgggcactttttttccagtaaaactgttcccccagcaggacagcctatatgcagctaggttcctggcaaatgagcagggaataatagctggctagaggtgggcgggactgaaatacagctgtccacctttccggaaaacatca

SEQ ID NO: 220558 - DNA, 672 bp, Homo sapiens
tgactacaaacgggatgcacagggggacatttagggtgcaggatctgcgctgtacattagggtggtgaatacatgacccgttgcatttgtctgaacccacagaatggcacagtacaaagagtgaacttcaacaaatgttaaccaaacaacaaccactaacatcaaccaaaacgtcagaggatcccaagatgaaatgtggattgcgacaaatgaaactaactgcattacaaatgtatgacataacttcactgaaggggcggtgaaaaaggagcttacctaacaaactttggaacacggtgttttgacttgaaattgtaaggctaatgacaaaagaaactgtacataaatactgtactcatggggtatggggtaataattctaaatttgcttttcatgtgtacataggttgaaaaaataagtggatggataatggggtggctggagccaggtttcttatggtcagacaaggaagtcacagattaaaaaggaggactagagtgaaccttgtggtaatggattataatcagagacatcaatatcaactcatgtttaacttaacatatatgccaactgatacatatagaaacaattagagatgtatgtgtatacatgggttagtattcacacagatattacctagctctgtcccctgagagggcctaaaagcaacga

SEQ ID NO: 220559 - DNA, 613 bp, Homo sapiens
acatatgtaatgaatagaatgagaccgactagttattagacaaaaggcatagcaggggctgtgccaaagtggataatgcatccctgtaccttaaggcattaaagtaaaagaattaaaacaacctgcctgccaaaccaaaatgtctgtaggcaatattcaactggttgaccatcattatgcatccattgacttgtgacttaaaatatataccaccatttaaagcagtttctcaatgaggagtcaagaaatatcttgggaagctttttcaaataacacgcagtccctttaccatctgcctaattgaggaccactggtatactatgttggtatctagagctaaataataatgatcaagttgatggcaccatgtggctttagttactggccattgctaacagttttctttttgccagcagagaatgttaattttgctatggattttagcaaaactacacttgtgcacaattgctttattagagaaatgacaagagataaccatatgcagctctcaaatgacccacattataatgtctagtacatgggcgaaaattctgttttcttatttattattcatttattcatccattcaataaatatttaaatgcatgcaaaa

SEQ ID NO: 220560 - DNA, 362 bp, Homo sapiens
tatgaatataatgctgctgaatgtctgaattttggtgtcttctttaaaaactattgaatagtgttctttcagacagttaatttacttgtacataagcttgatccttttgaggtttgtttttaagatgtcaaagcaggtctagggtaaatccactcttaaagtgaggccattttccactaaatgtcccagatgttcaagaaggtctaccgactctgattggtcaggacttgattatcttccaatcttgtgtgagttctggtagttgttcagctcactccttcctgatagttgttcttccttcacaaactgttctttgccccacctgatggagtatcgttgaatacatgcacagtgtagtattc

SEQ ID NO: 220561 - DNA, 626 bp, Homo sapiens
agacaataatccaacagaatttataataggcttctttcggagttgctatcacctcacctctatcctctttgcatttaaaagaaaatcctctactccaaggagacatggaagtgaagcaaaattaagaaatattaagaattaaagatgagctagtggtatggggggagagggggatatgagggaaatactaattgaagtggagaaaaatatcatcctggaaaaaagatctagtatttttagcattaatttggtgacttttttgtggttgttggttatgggaaaattttgatgtatcagagctcttccgttaaagaatgagataactttgcccatcaacaaatgatcactatacccatcatgactaggctttttggcttagttttcctattacataatccctatgaatctgtccaggtattttttcctaacaatttctaccataccctacaccacactttgcacatttgggaatatgagccatatgaaggaatgtgaattcaccattgatatcagccaaataagccagaagcaaaaccatttttgactctaaaatactaaacgcaacaaattgccaggaaatagcaaaatgaggcccaaaagactagcatattctccacattttctga

SEQ ID NO: 220562 - DNA, 505 bp, Homo sapiens
aaggaaaatggagtggagatagaaaccaatattgatgggaaataaattcaatcatgaaaatatttgctacattaaaattaaaatactgaagtttgaaaagaaagtaggaagatttttgcttaacatatgcctccatatgctcaatatacagttcattaactaaatttagaaactgtgtctaaacgtttgcctttctaatatgcaaaaaactcacacctcaattcagaggttctcaagtctttcagtaaagacactgacaaaagcaccagacactcttttccaaaagacaatttaaaaatgtgtgcatacacatatacacagacacaaatttcacagtccatgggcctaaagttaggaactcccaatcttaaaaatataaagtaacattttaaactgttgtccgtgttagctgtctttgtgaatattcaggatatactctaatgcaagacttgctagatctttatgaaatgaaatgtttcaccaagataaggcagaatattagggg

SEQ ID NO: 220563 - DNA, 201 bp, Homo sapiens
acaggggcacaggcagcaatccagggattttgtacaaccttcagggaccaaacaaccttttggtcctcagtcccacacccacaggttcagaacccacctgttaacccttcatgttttcctctcactagccctatggggctttttccctcaaattttttttattgtggtaaaatacacacaccataaaatgtactatcttaa

SEQ ID NO: 220564 - DNA, 652 bp, Homo sapiens
caccatctcaatgaccagggttgtccagatggctcctaaaggctcccaacagggcatatcatgtgaggactgcatttcatctgtttgtaggacagttgtatgtacctttttcatacctcagaccctgtctaaatctgaagtggtggtatttgcttcctctcccagcctttcacctcctgtgcgttcactaaattcaccagtcactaaggcatgaaactgacagattttactctgaacgtccttttccttctgggagatgccaggtcctagacagctgtctccatttttctgttctttgcattctcactgctcttccctggcccctccttctgtactttaagtattagcttgactattgcagcagtcttctctttgatattcctgattgccatctccttctgtcatcgttcagtctacccattctcttgagactaatcttcctaaagcatggatctaaatatatcatttaggccgggcgcagtggctcacacctgtaatcccagcactgtgggaggtggaggcaggtggattacctgaggtcaggagttcgagaccaccctggccaacccgtctctactaaatatagaaaaattagccaggcgtggtggtgcacgcctgtaatcccagctactccagaggctgaggcaggaga

SEQ ID NO: 220565 - DNA, 481 bp, Homo sapiens
ttagtgtacttcgtacaagtatggagtttcctccgtaatgagagctcagagccttcacaggcaaaacaagggggcatgcactgtgatttgagggattttagaaggccagttggcaccaaatctctctcccatgcccactgtcaccaccacaagtccatttctttgggcaaagtattgccttctccatcttccttttttttttttttttttttttttaaattgagacagggtcttagtcacccaggctggagctgcagtgagctatgatcacactactgcattctagcttgggtgacagggtgaaactctgtctctaaaattaaaaaaaaattcataattctggatgtcttacaactttttcctcaaaatatggacatggaaaagtgtgcaaatcacgtaagtgaacagtttgatgaatttgtacggactgaaaaccctgttgtctgtctgaaataatgaagcctaaaatgatcctggatcc

SEQ ID NO: 220566 - DNA, 1185 bp, Homo sapiens
catagtcttttttactgaaaattagtgaaagcctaattagagtgaaagagtacatctgggttttgtttttttttttcttgtagaggaaaaaatgaacattacttgtgtaactgatggtagttgcaactgcatatttgccaatgtcacaaaatctaaaggaaaatgttatagtcacccgtggtttccttcttgcctggacactccattgtcccgggctgaaaagggtagcagtacagtgcatataatgtcaagttgtgggaggagtgtggcagattgtcattggtgcatttttttggtgatgtgtgtggttgttttgaggagtgggagctgttaagaacaccacaaatagaataaaataatatcgtgaagttatttggccgtttctaattctagacatttttctaaaaacagttgcaaaggaaagattacattgttttaaaaaaatttgaagtatgtttttaaataactaaattaatgttctttgaaattccaccaaaatgatgaagtcaccagatagcagctgataaatgtgtctgagcccagtgcgcccagctctacaaaaggcagaagaggaattttcaaatttgccagtgcccagtaagaggacatgaattttctagtaccagaggaaattctctttttacaaattttgtcagaggtatccttgggaaagtatttcatttgcttttaccctccaaattattttaatctatatttttaagagtttccattctcagttgagtttttcttgttcttctccttctgtcagttttgaaagtcttgcacaaaaacaatccaggtgttgttacagcagtgtgattaaaaccaggtcaggcctacactgaaatcccagttccaccactcattagctgtacgaccttgagcaagttacttatcctctctgatacccaatttttggatttttttttttttttttaaagagatgatcataacgcttaggacttgactctttgggagaattaagtgagttaagacataaaatgtgcagcatgtatttgtcatgttattagcgcttcagaaatataaatgtaaacattttggtacttcgtttatggagattcttatactagttaattttattaaaagcatgatggggaacaaaagatccttttcggataacctgtgtgagtaaattaataaaacactaacactttttaagattca

SEQ ID NO: 220567 - DNA, 163 bp, Homo sapiens
tttagcttaggtggaataaactgcatgaaaacattaaaccttttttgtgcgcccagtttaccatgaagcagccattgtactaaagttcatgaactttttctttttcccctcataagataataaacaaggggccgcaacatggagggaaacctagaaaggtaga

SEQ ID NO: 220568 - DNA, 266 bp, Homo sapiens
agagatgtgtggtgagggtcatcttggtaacaggcacatcacctgctatctttagtcagcctctagacaactccaggtattactgtcctctattttcagataggaagcaggcctggtcacaccccttggccttagggagtaggctgcagagccaagattctaaaccagccctgacctgactcctaggctgtgctttctcctgtaccgcactgccttccgtgggagagaccagcccggccacctgagtaatctgcacagccacccat

SEQ ID NO: 220569 - DNA, 439 bp, Homo sapiens
aagacaaagcatgaggctgagcagaggagtgagatcagcactgcccaaagactcaggagtcctgaacctctgcacatgtcccttaataacaaaatgggaaggggaaaacctacctggctctgggtaaaaccagagcagtcaatcaggaaaaaagagttctaataattaaaaggaagagaagccaggcatgttggctcacgcctgtaatcccagcactttgggaggctgaggcgggtggatcacttgaggtcgggagttcgcgaccagcctgaccaacatggagaaaccccgtctctactaaaaatacaaaattagccgggcgtggtgacacatgcctgtaatcccagctacttgggagctgaggcaggagaatcacttgaacccgggaggcagaggttgtggtgagtcgagattgcgccattgcactccagcctgggca

SEQ ID NO: 220570 - DNA, 525 bp, Homo sapiens
  misc_feature (36)..(36): n is a, c, g, or t
  misc_feature (52)..(52): n is a, c, g, or t
  misc_feature (67)..(67): n is a, c, g, or t
  misc_feature (160)..(160): n is a, c, g, or t
  misc_feature (162)..(162): n is a, c, g, or t
agcgtgacgctagtagctgcgtgggaatgttatctntcatcggctggaaagngatatctgtacttcntttgactttaagagcagtcatcatttttaccatctgatagagcttcagaatttttagagtaatccaaaatacagtgagtaaacgttctaggtntnctagtatagtgatagtttgaaatactctaggtgtgtgtctgtgtgtgtgctgaataaatgttataggttttctagtatagtgacaaattgaaatacggtgggtagttgggtgtgtgtgcgtgcttgtgtgggtgtttgccactaatttccgtaatgtcaagtcttgaactactgccattaacactagggaaaattctatatgactgtatgtttcctttttaaaatatgtaatagtatgaaacgcttaatctaaattccttgtggaatagataagacaccaaagcatagagaaatttaagttatttacttaaaagacccatagctgtttagtctcacatatgagtatagaactttggcctccta

SEQ ID NO: 220571 - DNA, 449 bp, Homo sapiens
accagaggtcactttcatagccattttggtttcgttgggttttagctggcttctttactgcaacccgttttatcagcaaagtctttatgacctcctatctcatcctgtgactaagaatgccttgaccttctgggaatacagcccagtaggtctcaaccttattttacttagcccctattcaaaatagagtttctctggttcaaatgcctctgacagaatcaggttctggtatgattaggggagggtactattggcctggagtataagagcccagtagaggaggtgtgagtgtgtatgtgtaggtgctctgtattagttagtttgaatataaaaggtgtgctccttaggtgagttctttgttaggactaggaattagctgaccctggacagagtagtccctccccagttagcaaggcctcagatgccagagcatcaaacatacaagaaat

SEQ ID NO: 220572 - DNA, 113 bp, Homo sapiens
agctggagttacagatgtgagccactgtactcggccactgtcttctatttctagtatttcctttttgtttttgtttattattaaagaataggcagtttctagtttattatagt

SEQ ID NO: 220573 - DNA, 377 bp, Homo sapiens
ccaaagcgggcagatcacctgaggtcaggagtttgagaccagcctggccaacatggtgaaaccccatctctactaaaaatacagaaattagccaggtgtggtggtgcgcacctataatcccagctactcgggaggctgaggcaggagaattgcttgaacctgggaggcgggggttgtggtgggctgagatcatgccactgcactgcagcctgggtgatagagtgcgactctgtctcaaaaaaaacaaacacaaaaacaaaataccaccaaaaaattaccaacacaaagaagtccaggaccagacagattcacagcagaattctaccagacagtcaaagaagaattggtgccaatcctgttgacactatttgacaaga

SEQ ID NO: 220574 - DNA, 645 bp, Homo sapiens
ccacttcacccagtaatatatacaaccgagtggttcttaaatatgaaaacagaaattgaatacagatgtaccattttttatcttttataccatattgtattttttctatgtttaagtatgtttagatacacaattaccatcatgttagagttgcctacagtattcagtaacatatctgctgtacaggtttgtagcctaggcaacatagtgagacctcatctctacaaaaaataaaaaaacaaaacaaaattagttgggtgtggtggcttgcacctgtagtaccagctatttgggaggctgaggcagaatcactggagcctgggaggcagaggttgtagtgagccaaaatcgtgccagtgcgcaccagcctgggtgacagagtgagaccctgactccggcaaaaaaaattttttaaaaaaagatgatatttgaggcagactggaaggaatttgccatgtggatttttatgtaaacagcatttcaagaagagagaaaggccagtacacatgccctcaggcaggagtgtgcttagtctgtttgaggaacaacaaggaggccagtgtgcttggaggagaatgagcgtaggacaaggaagagtggaagatgaggtcagaggggtaacaggccagatcttagagggcctca

SEQ ID NO: 220575 - DNA, 497 bp, Homo sapiens
gatatggttgggagaaggaaaaaaaatatacatacaaattgggaattaaggtcctggaaagcagaagatggaagatgtatctatctatgagatttatagaacttatgaactttctggcctttgattcttcatgcataaattaatgagtttaagatgatggctgaggtcatacttcatgactgtaacttaagttttattttctgttttttaaggtgtctactacaatagacccaaaagaaacgttaaaaagtcttttgttcaagaattagcttcactgtatatatttagtttacccatgaaaactcaaatttgggaaagagaatctgggaatgattcattctatacactggctctaatttatagacatcaaatttgcaaagttcaagtagctgtcgaaaaacatagtaaaatacctcaaaattgagtgacacatctaccatggctcccttttacaaacacaaaactaaataaggagggaagcttgtttgctgcataga

SEQ ID NO: 220576 - DNA, 267 bp, Homo sapiens
tatacaaccagatctcatgagatctcactaacaggagatcagcttcaagaagattaactaatggtgaaggatccacccacaccacatccactgttttcaggcagaagcctcttgcagaggcagaacctcttggagaacctctagtaggggagtgcctttttgggatgcttttgcctggacacccaggcatttgcatacatcttccaaaatctatagagaggatcccaagcctctagtctcatgctccatccaccagtgacttaacac

SEQ ID NO: 220577 - DNA, 288 bp, Homo sapiens
atgataccctgttgagctggtaggtaggaagaaccagcgaagcgcacagttaccggagaggttatttgcccaatgttgagaaacatatgtgtgtattagaaaaaatcacatcgactcccaggaatcctgcaacatactgcaactgtgatgctgaccagaatgagtggagatttcctcatgatttctctgtgtgagatgcaggttaaaaaaattattacttaatatatgaataggcagatattgaataagctattgcaatgaaaaaataaaagtatgccctagtgagta

SEQ ID NO: 220578 - DNA, 353 bp, Homo sapiens
ccttgagccttgaagaactttataaccagaacacccatcacatttcagaagtatctatttcccttgtggactgtgatagcgattttaaagttttaattatctttgtatctccaaagctaaggcaaaagtcaagtgcctagtaagcactcattcaaatgccactgaactgaatttctttaggaaaaagttattaatggtccctgttcaaatctatcctgaaagtgtaaaaagtcaatatatataatccagcaactaaaattctgaaatgtttaatactgcttttacatattaaggggggaaaccccagaactccccaatctcacagtataaaaataacacaataaaacagtaaa

SEQ ID NO: 220579 - DNA, 186 bp, Homo sapiens
ccaaattcccctttctcataaggacgtcagtcatgttggattagggccctccctcctgaccttgttttagcttaatctctgcaacttaacccttaacctcagtaaagatcctatttccaaatgtgttcacattctgaggtcctgaggattaggactttgaaaggattaaaacaggctcttctggca

SEQ ID NO: 220580 - DNA, 327 bp, Homo sapiens
ccaaatcaacttaaagagcaaaatggttctgtaattaagacaatgggagtgagagcactatggtttcaaccacagatggtgtaggataaggttttcaggtatgactgaaatggatgatgagtgaggacctggagcatggctgtcaaataagcactgtgatctgctacctctccccactccacgtccatgaaatttctaattgattatgtcactgtttcctgccaaatccagggcttcctcacagtccttctcaacacagcattccacacagccactaccaatctatcagagttagcacaaaactggctatcggtactttaatcagga

SEQ ID NO: 220581 - DNA, 464 bp, Homo sapiens
tatgcacatagtttgttttctcttgtgttgaatgttggcttaaaagtgtcctggactctggtgtcagctctggactggcagcttgcattgcccgcccacctgaatccccaggctgctggtcatggaaaagcttctgggtctctcatgtcagactctcggctgaccacaaatgatctgcacattgtcccctacctggaagacatgtctgagagagaagatcaaaaccccacctctacttctgaaagaaaccagccagcgttcacctggcaggaagtgggatcagggatctgcatgggcttccccctgcagcagacggaggctgcccttgcctgcccgttgcccactaagctattttggccctggaagggggcccattcctcctccatcagatactctcttggcagagctgacagtcaaggtggttcgagtttctacagtcaaggggcaggcatctgatccaaggt

SEQ ID NO: 220582 - DNA, 549 bp, Homo sapiens
actgataatattttatttaattctcatgatagtataataaggaagattctatagcctctaattacagaggaagaaactaaggctcagtcattgagtgttttgctcaagatcacacaactagtaagtggtcaagctggaatttgaatccaagttggtctgattataaccaatgctgatttttttttcctgttaccctaccacctctattttcacatcccaaacttaatcctttaggaaatccttgcagcatacccactatttgactacttctcatgacctccactactaccactctatctgagccaccatcatagcttgtcctggacattttgcagtatcttactatctggccttcctacacccatcgtggtttaacagcccctatagcctactcatagcagccagaatgatctctttaaaataaaatccagctgggcacagtgactcacacatgtaatcccaacactttgggaggctgagatgtatggattgcttgggctcattgagttcaagaccagtctgggcaacatggtgaaaccctgtctctac

SEQ ID NO: 220583 - DNA, 508 bp, Homo sapiens
gcacgagaaaacacagtgattaatatcctcagagagactatgagaagaaattagagtacaggacatgaacagaatgatactttctatgaaaggaacattcaggaaaccaaaaagctctttgagtaatcaaaactacaatagcagaaataaaaaaacaatgtttagaagataaagctgtgtaaccctcccagaaagaaaccccctcccccaaaaaaagatgaaacaataggaaatagagacaagatacgaaaattggagaaacagatcaaaaaaattttaatataactggaaaatgaaatatggtacaggccacataggtaattttaaaatttagccacaatggaaaaatttaaaaataggtaaaattaattttgttgtatatctgttttgtatttgcactgagaaaacatctcaaatttgattagccacatttcagatgctcaaaaggccacatgcggctagtagctataccattactgggctatgtagatctcaataacagttctta

SEQ ID NO: 220584 - DNA, 613 bp, Homo sapiens
tggtcaggctaatgtacactgtaagcttgaaatgcaaatttctaatttcagagtctaaatatttgtttctcagatttcattttgatgatggaatgtatactagatgcagagtttgcatcaatttttgtaatatattcatttatttacttaactaattttaatttgccataatagcaggagctttttgtttatgtttattgttgtatccccagtgcctagaatagtgcttagaacatagtagcacagagaaacatttgttaaatgaatgaatgaatgatagaataatggatgaaacatggaatatgaattttagtggaggtgacaggtaataagtataaaaatcaataaataatgtaatttcagatggccttaaagacagcaaaccagatttaggtgatagagaataactggagagaatgttgggatggtttttaaaatcttcataataaccctatgaagtaggtattttttatctcccttttttagaagaggaatttcagacttgcctagggtcacaaagtagtggaaccacgctaatctgatttcattaatttattccttattaaacattccttgagtgccgttcatcctgagccagaatcaaaaaaaaaaa

SEQ ID NO: 220585 - DNA, 361 bp, Homo sapiens
gatggggtaaagggaagtctgtttaatatttacttaaaagttaatatggacaactgagcagacactgcttgcatccctggaagggactgtgttgggacttatctagaccaggtctttatgcagaataaacagatgtaaagtggggcctttgattccacagggctccccaagggtgcttcatggcaaggtagatagagatttaaatttagtttgctgagttggctctactgctcatctctaccaaaacaatagggaccctgttgcatttatgtttgtgtatctttaagccctagaggcctctagcacaagactaggtattgaaatattagttgagataaagggaataaaagcagccaacaca

SEQ ID NO: 220586 - DNA, 448 bp, Homo sapiens
gagaaagtcaaggtgatgtggtggaatggagctgggaggcaggctggcctctgggatgttgggtcaggaccgtggggcagacttctgggcacacccatggaggagcagacactgctgcagccaaccaagggtctaattagatcctcacttccagagtgacctgtcccctcttgtatctgaagctccagggttggggagggtggggtcagggagtgtaagtggagggagtagctgcagataattagaaacatgctctacctggacaattccagccaaactgggggaggcgctggtggagcctgggagcagcaactcggtgggattggcttcctaggcccttacacagtctctaaagtgcaaacaacatatttttgccatgctatagtatttaattacacataaaaacagagccattaagctgaaattaaacccttgttggagtcactta

SEQ ID NO: 220587 - DNA, 289 bp, Homo sapiens
gagaaagtcaaggtgatgtggtggaatggagctgggaggcaggctggcctctgggatgttgggtcaggaccgtggggcagacttctgggcacacccatggaggagcagacactgctgcagccaaccaagggtctaattagatcctcacttccagagtgacctgtcccctcttgtatctgaagctccagggttggggagggtggggtcagggagtgtaagtggagggagtagctgcagataattagaaacatgctctaccgagtgagcaggcgccaccaggaccacccca

SEQ ID NO: 220588 - DNA, 517 bp, Homo sapiens
caggcaaaatgaagggaagccctgggttcttgtcctgcatccgcagccagctcccactttcctcaccctccaggacctgtaaactgtgaggctggaccagttatgtcaaatctgtcctcccccagagctcagtccctctgcccttgggtgtccttggcacaaggcaggctaggctgcaccagcttcctccatctccgtcctgcctcccccatccccaggtgccattcccacaccatctgaatcactgatttcctcgcaatcagacgctatcttccagttaatcacttcgcttgtatttaacataagaaagaaaaaccctttcattatcacatacagctggaaatcggcttcttgcaggaggcgtatccaaaggaattggagaagagataaactggtaattggtgaaagaattactttaattttttttcctacttgctgtcatgatgatgtccttagaattgtgagcccgtggacacttctgtacaataaatctgctattattacttctagaactaca

SEQ ID NO: 220589 - DNA, 469 bp, Homo sapiens
aaagcaaccaatatctcccaccttggcgttggaacctgagctgaaactctttgcaattcctgctccaagcagatggagataaaaatgcgcagctctgagcgttgagtgatttgcccaatgtcacacgggaactcaggcagagaaccctcctgactcagccagccccctttcccgtgggatcctgcctgatgtgagccttgaaagaaggtctgtccctcagtggagatttccactccaggcagcggctgcacacacacatggaaaagaaatagactcgaggtcagagcaaagccaacagtgcgactgctgacccagctctcaggagtggcgcacagcatggagagcagacaggcgggagggctcacagcctagcagccacgctgtttgtccaccacagagatctcactgggcttcacggtgtcctaccttaaatattaggttggtgcaaaagtaattgcagtttttgtcc

SEQ ID NO: 220590 - DNA, 298 bp, Homo sapiens
gaactcctaacctcaagtgatccgcccgtctcagcttcccaaagtgctgggattacaggcatgagccaccgtgcccggcccttgtctgttgttttatactttgtaacaactgtgagcaatctcttagctgataagaggagtggaaaaataccttgcctatcagttccatttccatcaccagttaatcagctgtgtgatcttggagccctagagagcacagtaaacatagaccatgaaaggtaaaagaatcacccactccagcttcttcattttatggttgaggtaaggagatccaggg

SEQ ID NO: 220591 - DNA, 452 bp, Homo sapiens
aaggagttattatttattgtcacaaaagcaactaaacaagtttcatgtgagagcattatttgtcttaaaataaggtgctaggaatcactccactctgaaggattcccttgtcttcatggcccagtttctctgacaccgtgtttattcttatgatgaccatggtgacatgaaaatccatggctcatatctcctgctcagggaacataatcaaccaggtgtcccagctgctgttcttctgggtccgccactgtgttcatgttaaggccacatttcccacaggctactcaagcagcaactgagcataacaggacaactaatgcaggtccatttctggaacacatggaactccacaaccaggggtcagaccttcatgacaggctgaagagttccttctcctcttctcccttttactttacaaacatttctccaataaatttcttacacatctaatt

SEQ ID NO: 220592 - DNA, 505 bp, Homo sapiens
agcagcaactaattactgaataccaaaagaaaaaaaaagaaaatgtgtgtgtttcataaattaaaatataaatgtacaattataaacacactttttttggtttatttttcagagctgtaaatgatcaagttttgttagatgctgtaagtatagtactctcaatttgaaattacactttgtccttgagttcttaacagattctagaaattgtcaggatacataatcctatataaagatccaatccttacttagtttatttaagagatttgtatgcatatgtgaactttctggaaagccttgtctattttgttcattttactctcattatcactcagaaactcttcacttctgaaatactaaactataatatcctacagtcatctgaatagttccagtccttgacacgtgtagatcttttatgcctttcagctccaattattgtgtcactctacagactgatatcaatgtttcattcttttcatgagttaatgaagactttcttacc

SEQ ID NO: 220593 - DNA, 652 bp, Homo sapiens
gactaaatgtggccggaagaggaagaattctacccaagaaagctgccgctgatctgctcaacgtctcggagcagtctttttttaagcagaagtcagtaacaagcaaacacaatgtcaatggatttattaatctgttaaactcttcattctgttacctgctgggtctcaatctttttgacctcaggacccctttacactgttttaaaaaagtatttgagaatcttaaagaacttttttttggttatatctattgatattttactatgttaaaaattgaaactgagaaattttaaaagttcactcaaaaataacaaacaataataaacctgttacatactaataaaaaggccatttataatgaagaataaccttactaaaacaaaaaaaaagtatgagatgaatgtttcacattgttttatttatctctttagtgattttttaaagtgaaaaccaaaaaaaaatttagtgagaagagcgacattgttttccatttttgtgaatctgtttcataaccagctttgatagaaaatagctgtgttctcatgtctgcttctgtaatcagtctgtcggggtaggttgttttgggggtcatgtatgcagaaaatctagtttcacacagttacatcattgggaaaggccagagaattgaaat

SEQ ID NO: 220594 - DNA, 592 bp, Homo sapiens
agaagcaggcccatccctttgagccgtaaattgcatttcaaagcctgtttcactagtggattttaattagcttaaaaggcccagcttttatgcagcaattgtttctcctgcaggtaaaggtgaaggcacttattggggagccagtccccagttttctcaaacgtagcttttttcttttttcttttttttttttttttgagacactgtgctctctcccagctcctcagtgtcctgggggcctgtctcttaccagccccaaatgaaaaatggaatataaggaccctagacttagcgtcagaagacccatggggtaatcttgtctctgctactcactagctgtagcatcctggccaagtttttactgtgggtaaaacttctcttctgttcttccgagtaagagcatttataagctccatgtgcacacaggtctctgctcatctgacattgcagaagtctctaggaataaatttgcttctctcctttcccccagccaccaagaacaatccttctacccacctctcctcagctcattgctaaacctaggacccctgggggctgcagacaccttgctctcaattacacagctaatctg

SEQ ID NO: 220595 - DNA, 280 bp, Homo sapiens
catgaaaagatcaccaagaaactagagcagtaaaagcaggtgcagaacagctgatgggcgatcccactgtgtgaactgaaaagcaaacaggctgagcctgcagggtggggaggaccgagtgttcatgcacatctctggatctaagtgtctgcaggagcaggctcagggaactgtggccaattttactttgttcaataggcttttctatatttataaaagaataaccttaatgcttttgaaaaagtaacacatgacataaaagctgaggaaataccagttc

SEQ ID NO: 220596 - DNA, 598 bp, Homo sapiens
ccaaaagtgagaaaaggagagcaacttggggacagtgaaatgatgatatataaaagagattatacaaagaaatgtgtaaacaaataggagaggctggtttaggggaattaagttgagcacaaatcagagtggagcaaaggagcatttacttgattcaaaattacagttaacacctattttgtgcaggttgctgagaaatggggcgtcccacatgatctaatatgcctatatcccttctgtccttcacttacttgttcattcagcactttgaacggtaactgttctggggacagtagtctaaatgcaaagctgatctctcccaatgccaagtcttaaattgacagtgatgaatgaaaaatctttatttgcatgcttgtggttttcttaaacagactacacgagtaaaatttagctgtttattggtcatattttttacccatttgaacataaattttgttactgggctaaaatggagaaatgctctccaggatattgagaaatgtatatactctgccattagccaaaaaagcaccacattctctttttaatgtacatgtgtgagctctctatctcttctacagaatgtgatgcatgggct

SEQ ID NO: 220597 - DNA, 446 bp, Homo sapiens
ctttattttctttctcttgctagttcaatgtaaaatttggcacaatacagaaatatagatatagaaagtaaggggcaagttttgggactatgatacaaatacatctgtcatgtagcagaaaccacctatccccacttagacaatttattttaatcaaaaagatgtcaggtttcagcatccatggagtgtgatgtatttttctcgttagatctactaataaaatgaattatatagatttttatatccaattataaacaattcttttaatgtgttactaggttcagttcactaattttttatttaggatttctttatcaatattaacaacaaaatttggtctctagtcttgcttttgttttttattgaaatttttgtcaggcattgatgttaatgtcttattgttacattaaaagagagctggatgggtttcttaattttctatgctt

SEQ ID NO: 220598 - DNA, 535 bp, Homo sapiens
agtcaacatgattagtcccttgatgcttgaatcctgatattattgggatgtttggatgttttaaaggcccagtcaatatgatgagtcccctgatgcttgaatcctggtattattgggatgtttggatgttttaaaggcccagtcaatatgatgagtcccctgatgcttgaatcctggtatcatttggatatcatgttgaaatataatccccagtgctggaggtagggcctggtgggtggcatttggattacagaggtagattccttggtgccatcctcatggtaatgaaccagttctcactttgttagttcacaccagatctggttgtttaaaatgagcctgacacttccttcctgtcttgcttccactgtctcactttttctctcaccatgtaacaagctgccttgtttctgtccaccttctgccatgactgtcaacttcctgaggccctcaccagaagcagatacaggcaatatgcttactgtacagcctgcagaactgtaagccaaataaacctcttttctttataatttac

SEQ ID NO: 220599 - DNA, 708 bp, Homo sapiens
gggaagtggaggaaccactgtccgcctgcggaggggcctcagtgttggccgtgctcatggcgccctcctcctggggctccctctcctctggtcctgcctctcctgcacgcccttcctgcctccttggtgccaggggagccagcccaggacagtctctgtgcctaggccctgccagcctggctgccctgcctccagccatggggggcaggcggggagggagtcgaccagtgcttgtctttgcagaactgctggtggactgaatgtggttctgggggtggccaggcctgagggtaactcattttggaaggtttgggatgtcacttcacttaaggagccttcagcaacatggagtttaagtggccctcttcactgtggccttgtggcttcatgaatggagctgctgtggtcagcatggctggccctctggagaggagggtgggccatgaggagaagatgctgtgtctggaggccttaaccctttcctcccttctctccctccctccctcctgtctctttctctctctgtctctttctctctaggtgcataaaaaaaattgctttcagataaagttgacatgcaataaactgcatattctccctttgcttttaaaatgatgatctgtttcagccatgcaaagcagggtataaaataatatttcagtgtaaccactcagcggaagaaataaaccattccagttgcaatacctg

SEQ ID NO: 220600 - DNA, 779 bp, Homo sapiens
gggaagtggaggaaccactgtccgcctgcggaggggcctcagtgttggccgtgctcatggcgccctcctcctggggctccctctcctctggtcctgcctctcctgcacgcccttcctgcctccttggtgccaggggagccagcccaggacagtctctgtgcctaggccctgccagcctggctgccctgcctccagccatggggggcaggcggggagggagtcgaccagtgcttgtctttgcagaactgctggtggactgaatgtggttctgggggtggccaggcctgagggtaactcattttggaaggtttgggatgtcacttcacttaaggagccttcagcaacatggagtttaagtggccctcttcactgtggccttgtggcttcatgaatggagctgctgtggtcagcatggctggccctctggagaggagggtgggccatgaggagaagatgctgtgtctggaggccttaaccctttcctcccttctctccctccctccctcctgtctctttctctctctgtctctttctctctaggtgcataaaaaaaattgctttcagataaagttgacatgcaataaactgcatattctccctttgcttttaaaatgatgatctgtttcagccatgcaaagcagggtataaaataatatttcagtgtaaccactcagcggaagaaataaaccattccagttgcaatacctgatgtaccgttctctgatttcaaacccttccttttctctgccccgactttgatgtttattcttgtgcatatt

SEQ ID NO: 220601 - DNA, 432 bp, Homo sapiens
caattcagttcaattctgatactcgtctacttggagttgacagcagaccccacaagtaaagggctcagttgcacaacactgcttccacttacttcagatgccaattgcaagtctgggcatctagtacttttgaccaaccagctataaatcaggggttccatgactcccttcttgggtttaataatttgctggaatgcctcacagaattaaaggaaacactttacttatgtttaccagtttatcataaaggatacaactcaggaatggccagatggaagagctgcataaggcaaggtatggcgggggtgggaggcaagggggtgcctgcagaccttctaggcttcctctgggcgtgccactctcccagcactaggttcgggaacctagaagctcatcagatcccaagagagtttatagagtttgattttcaga

SEQ ID NO: 220602 - DNA, 435 bp, Homo sapiens
aatcaaaataaagatgcattatcaaaaagtaaatgaaatccatgtcagaaaattaaattatttataattataccctgtgtgaaaagcagcatgtacattaaaggggaaaaaaaggaaaagtctgttactatacttcttgtaattctgatggggctctgggttactctgatgggactgtcaatcattggctctgcctctctgaccacagactaaatatatgaccagtctaacctgttaagcataacaatatggacactgggagagaagcctcttgaaatcctttgctgaacggatcatgtacaagctgccaagagttcatctctgtggaaagggtgtccctaaaagcaaagctaacacaaatgaaagcaaaagcaagaaacggagatagagagagaccaattactgcttgagcaactggaatcagtcatgtctgag

SEQ ID NO: 220603 - DNA, 327 bp, Homo sapiens
atgtccagccctctctttctatcttaggcatctctgagctcatattttctatctccttgtttctccggatatattctggatcatttcttcagttttatcttacaatcgactttttctttttttttttttttgctatttaacctacccacctctactaaaaatacagaaaattagccgggcgtggtggcggacgcctgtagtcccagctactcaggaggctgagacaggaaaatggcatgaacccgggaagtggaggttgcagtgagccgagattgcgccactgcactccagcctaggcaacaaagcaagactccgtttcaaaaaaaa

SEQ ID NO: 220604 - DNA, 402 bp, Homo sapiens
agagaaaaaaaaatgatgatggagattattatcagtatcatcaggctgagacttgcagccttgtgcccttttaggtttgagcccttgtacagggaaaaactgtgccagattctttatagatcctttttgtaccatcaagtagacattatccttaaactctgcagccttccctggcatcatcacaacaaccacaccgccaccaggaaagcctgtcctattctagtcaagcacctagggataggcatgcaaattgataacaaaaacaaaagattacaaaactgggaggaactgggcatggtggcacactcctgtaatccctgcttctcaggaggctgaggtgggagggtcacttgagcccaggagctggagaccagcctgagcaacatagtgagaccctggctc

SEQ ID NO: 220605 - DNA, 696 bp, Homo sapiens
gctattttaaaataaccttttggcaggtaggcaagactgactggcaagggtgcactcaagacattgtgtcttgtggagtggtccccaaagaattcctgacagaggcacctgacagcacaaattagctcttcagtgtataagcacaaagcaccaaaaaggctgagatttcttcctagctacatgctctctcccgctattgtttattacactccacccgctccatggtgaagctgacaaaggagatactattaatttcctttcccactgaataatcccctctgtaatttctacaacaaaaggtaaataggacaatcatcttcgaaaatgaattaggccagattggtagtacccaaaaggagaattaatgaccattgtcataaactctgaaaagctgttggcgctactgataatctagataattaagcaaaaatttgaaaattatttctaagattgtctaatgaagttcactaagtgtttttgttaggttatcactattgggcaccatggggaaagcaaaataattgtatagctaggtcattgccccaaaggaaaacaggaaagatgtcacatgaagtgtttaagaatcaaaatgtaattagctgagtgtggtggtgcctgcctgtagtccccgctgaggtgggaggatctcatgagcccaggactttgaggctgcagtgagccatgattgcaccactg

SEQ ID NO: 220606 - DNA, 449 bp, Homo sapiens
gcatgggaattttagcttattatgtttgcttaactggtgtttttttcacttatgactgtcagtttatgtcttaatgtattctcacagaagaatgcataccatttttgttccaacaagaacaatctgttagttgataagcactggtaataaatatcactgaacccacccaccccctgatatttcttcctcaagttttctatcatgcaaatcacaaaatgaaaattggtgcttttacaaatatttgaaagctctcaatgcaaaataataaaaatgagattctccctggctttctataatatattaggatatgtgactgaaggaaatttaatctgaatttagagtgttttaggttttggttggtttgaataatttgatttgcattttggtattaaaatgtgctctgatttctgcgggcatttgttctgaccagtcattacctcttcccaaca

SEQ ID NO: 220607 - DNA, 592 bp, Homo sapiens
taacttcagaattttagtgtatgtacaaaagtccacgctggaaaaaagatggaagttgtgtgcctttgaaggaattaaaactacctaactgcgaagagcaaagcatctctggaaatgaaaccatgtgaacctggccagggcggtgcgacggggaagcaggaggtgtggggttggtcccgcacgcaacctttgtggagccatcgaagcctgcctttagttatatctgtggcgttctcttgtaagtggaaatgtaattgtgtaccagtttcttaaaataaacaaagcttcatactgtgacagatctgtttcctatgaaaaccaaacaatgattccacagtcataatgatggcaaaatcttaaaatgtgctacatttgagaatagctcaccaagcaaaatatttaaagttaatgatggtgtagcaatgattgttgctaggctacagagttgtatatgtaatgtatagctgaaatcattaaatgacattttcctgaaagtctttctgttttagtaaaaaaaaaaaaaaaaaaaagagaaagaagaaaaagaaaaaaagaaaaaagaaaaagttttacagtgagggaaaagcatacc

SEQ ID NO: 220608 - DNA, 840 bp, Homo sapiens
  misc_feature (236)..(237): n is a, c, g, or t
  misc_feature (239)..(240): n is a, c, g, or t
  misc_feature (502)..(502): n is a, c, g, or t
  misc_feature (507)..(507): n is a, c, g, or t
  misc_feature (531)..(531): n is a, c, g, or t
  misc_feature (565)..(565): n is a, c, g, or t
  misc_feature (573)..(573): n is a, c, g, or t
  misc_feature (583)..(583): n is a, c, g, or t
  misc_feature (587)..(588): n is a, c, g, or t
  misc_feature (591)..(591): n is a, c, g, or t
  misc_feature (597)..(597): n is a, c, g, or t
  misc_feature (604)..(604): n is a, c, g, or t
  misc_feature (606)..(606): n is a, c, g, or t
  misc_feature (618)..(618): n is a, c, g, or t
  misc_feature (627)..(627): n is a, c, g, or t
  misc_feature (630)..(630): n is a, c, g, or t
  misc_feature (639)..(639): n is a, c, g, or t
  misc_feature (642)..(642): n is a, c, g, or t
  misc_feature (670)..(670): n is a, c, g, or t
  misc_feature (673)..(673): n is a, c, g, or t
  misc_feature (678)..(678): n is a, c, g, or t
  misc_feature (681)..(681): n is a, c, g, or t
  misc_feature (686)..(686): n is a, c, g, or t
  misc_feature (698)..(698): n is a, c, g, or t
  misc_feature (700)..(700): n is a, c, g, or t
  misc_feature (707)..(707): n is a, c, g, or t
  misc_feature (711)..(711): n is a, c, g, or t
  misc_feature (720)..(720): n is a, c, g, or t
  misc_feature (725)..(725): n is a, c, g, or t
  misc_feature (727)..(727): n is a, c, g, or t
  misc_feature (730)..(730): n is a, c, g, or t
  misc_feature (732)..(733): n is a, c, g, or t
  misc_feature (735)..(735): n is a, c, g, or t
  misc_feature (740)..(740): n is a, c, g, or t
  misc_feature (744)..(744): n is a, c, g, or t
  misc_feature (764)..(765): n is a, c, g, or t
  misc_feature (767)..(767): n is a, c, g, or t
  misc_feature (772)..(772): n is a, c, g, or t
  misc_feature (776)..(776): n is a, c, g, or t
  misc_feature (780)..(780): n is a, c, g, or t
  misc_feature (782)..(783): n is a, c, g, or t
gctagctgaacgactctcttaatctaccaccgctacactaactaatattagcaacaataatgactaatggcctgaagactgaagacatgaggaaatgttagaaataattgaaaacaacttgaagaaggaggataaagtgaaggtcctttgctgccagcatgatgtcgtatttataatatgtggaggagagagagctcaccatgctcaggtagattttcaaaggattctgtgaggcnntnntaacttgagaacctcttggattcatctctccactctggtttctacccccagaatctatcaagtggcctcactcctggattacctccagcacaagagaaagtaaggataaaatgaaagcaacataaatgggcagcataaaatagaaaaagcagctattgcatctccctcatttcagattatttgtcagatatgcccttccccacacatgtgtgtttgcttgttccattacatcacagttctgtccatctgcccgtcccactanaccangaatccttggcaatcaagaccatnactctcatagtacccaacacaataactgccctgnaatcattnccaataagtntttnntgnatttanttgagcnanttatagaagacnacattttgngcntagttcctntantatatacaactgaggccagaactgaacnatnccctnggnttggnttactgcaactnanactccangcanagtgcaatngaatngnacncnngnccctntctnacttcgccttttgtttcaanntnaaatntaanaaananncaaattaattccagcggccgtttctttaggagggttatcataaccttctactgcccc

SEQ ID NO: 220609 - DNA, 437 bp, Homo sapiens
gggaagattctacaaactctgacatgaggaaatgttagaaataattgaaaacaacttgaagaaggaggataaagtgaaggtcctttgctgccagcatgatgtcgtatttataatatgtggaggagagagagctcaccatgctcaggtagtttgagaagttgcagtatatctgtacacacaccctctattctacattgaggctcacaaggtaatccttttacttcatgtgtatatgtttctttgtagtaaagggcaggagcttcagcttttgaagtaaaaccaacaaaaacccttctggggactgtgtattaatggcaataagctttaattgaggggagagtgttttaattgtatttctatcttaaatgatagggattcctagttactgctgtcttattcttggaatactcttttcacaccagtgttgaaagtagggt

SEQ ID NO: 220610 - DNA, 2866 bp, Homo sapiens
gctagctgaacgactctcttaatctaccaccgctacactaactaatattagcaacaataatgactaatggcctgaagactgaagacatgaggaaatgttagaaataattgaaaacaacttgaagaaggaggataaagtgaaggtcctttgctgccagcatgatgtcgtatttataatatgtggaggagagagagctcaccatgctcaggtagaagcctctggtatgtcagaaccatgctgtcttccatgagacttcctttgtgaagagcatccatttaaaagacttttatgaatacatggtttcaatcaagtccccagagaacacatttgtcttctgagctgctggcagttttgagaatctgatgacctccgaggggaccctgcactcagccatcaaagtgttcctgcccctctggacactcataattcaatggtagatgcaggtggagttgagaacatcacccagcttccccaggagcttcctcagatgatggctgcagcagccgatggtttggggagtatagcgatagacacgacccagctcaacatgtccgtgacagatcccacagcctgggctacagccatgaataacctgggcatggttcccgtagggttgcctggacagcagctcgtgtctgactcaatctgtgtcccaggctttgatccaagcctcaacatgatgactggaatcacccccattaacccaatgataccaggccttggactggtacctcccccaccaccaacagaagtggctgttgtcaaagaaataatccactgcaaaagctgtactctttttcctcaaaatccaaatcttccacctccttccacaagagaacgacctcctgggtgtaagaccgtgtttgtcggaggattaccagaaaatgctactgaggaaattattcaagaagtctttgaacagtgcggtgatattacagcaattcggaaaagcaagaagaatttttgtcacattcgctttgcagaggaattcatggttgataaagccatttacctttctggttataggatgcgattagggtctagcaccgacaaaaaggattcaggccgccttcatgtggactttgcccaggccagggatgacttctatgagtgggaatgcaagcagaggatgcgtgcccgggaggagcggcaccggcgcaagctggaggaggaccggctcaggcccccatccccgcctgccataatgcactactcggagcacgaagccgctctgctggctgaaaagctgaaagatgatagcaagttttcagaggctatcacagtgctgctttcctggattgaacgaggggaagtgaatcggcgctctgcaaaccagttctattccatggtgcagtcggccaacagccacgtccgccggctaatgaatgaaaaagccacccatgagcaagagatggaggaagccaaggagaattttaaaaatgccttaactgggattctcactcaatttgagcagattgtggccgttttcaacgcttctaccagacaaaaagcttgggaccatttctcgaaagcccagcgcaagaacatagacatttggcgaaagcattctgaggagctccggaatgctcaaagtgagcagctcatgggcatccgccgcgaagaagaaatggaaatgtctgatgatgagaactgtgacagccctacaaagaaaatgagagtcgatgaatcagccctggctgcccaggcctacgctctgaaagaggagaatgacagtctccgctggcagctggatgcctacaggaatgaggtggagctgctgaaacaagaaaaagaacagcttttccgaacagaagaaaacctcaccaaggaccagcaactgcagtttctgcagcaaaccatgcaaggcatgcagcagcaattgctaaccatccaggaggagttaaacaacaaaaagtcagaattggaacaagcaaaggaagagcagtcccatacacaagcgttactaaaagtcctgcaggaacaattaaaaggtaccaaggaattggtcgagaccaatggccacagccatgaggattcaaatgaaatcaatgtgttgacagttgcattagtcaaccaagaccgagagaacaatattgagaaaagaagccaaggcttaaaatcagagaaagaagctctgctaataggtatcatatcaacgtttcttcacgtccatccttttggagccaacatagaatatctttggtcatacatgcagcagctggactccaagatatctgcaaatgaaatagaaatgcttttgatgaggctgccacgcatgttcaaacaggaattcacgggtgtgggagccacgctggaaaaaagatggaagttgtgtgcctttgaaggaattaaaactacctaactgcgaagagcaaagcatctctggaaatgaaaccatgtgaacctggccagggcggtgcgacggggaagcaggaggtgtggggttggtcccgcacgcaacctttgtggagccatcgaagcctgcctttagttatatctgtggcgttctcttgtaagtggaaatgtaattgtgtaccagtttcttaaaataaacaaagcttcatactgtgacagatctgtttcctatgaaaaccaaacaatgattccacagtcataatgatggcaaaatcttaaaatgtgctacatttgagaatagctcaccaagcaaaatatttaaagttaatgatggtgtagcaatgattgttgctaggctacagagttgtatatgtaatgtatagctgaaatcattaaatgacattttcctgaaagtctttctgttttagtaaaaaaaaaaaaaaaaaaaagagaaagaagaaaaagaaaaaaagaaaaaagaaaaagttttacagtgagggaaaagcatacc

SEQ ID NO: 220611 - DNA, 2739 bp, Homo sapiens
aggaagtagactggttaaggacatgagacccagaggaataacctggtgatggacagaagatggaaaaatttcttacatgaatgaaaagcctctggtatgtcagaaccatgctgtcttccatgagacttcctttgtgaagagcatccatttaaaagacttttatgaatacatggtttcaatcaagtccccagagaacacatttgtcttctgagctgctggcagttttgagaatctgatgacctccgaggggaccctgcactcagccatcaaagtgttcctgcccctctggacactcataattcaatggtagatgcaggtggagttgagaacatcacccagcttccccaggagcttcctcagatgatggctgcagcagccgatggtttggggagtatagcgatagacacgacccagctcaacatgtccgtgacagatcccacagcctgggctacagccatgaataacctgggcatggttcccgtagggttgcctggacagcagctcgtgtctgactcaatctgtgtcccaggctttgatccaagcctcaacatgatgactggaatcacccccattaacccaatgataccaggccttggactggtacctcccccaccaccaacagaagtggctgttgtcaaagaaataatccactgcaaaagctgtactctttttcctcaaaatccaaatcttccacctccttccacaagagaacgacctcctgggtgtaagaccgtgtttgtcggaggattaccagaaaatgctactgaggaaattattcaagaagtctttgaacagtgcggtgatattacagcaattcggaaaagcaagaagaatttttgtcacattcgctttgcagaggaattcatggttgataaagccatttacctttctggttataggatgcgattagggtctagcaccgacaaaaaggattcaggccgccttcatgtggactttgcccaggccagggatgacttctatgagtgggaatgcaagcagaggatgcgtgcccgggaggagcggcaccggcgcaagctggaggaggaccggctcaggcccccatccccgcctgccataatgcactactcggagcacgaagccgctctgctggctgaaaagctgaaagatgatagcaagttttcagaggctatcacagtgctgctttcctggattgaacgaggggaagtgaatcggcgctctgcaaaccagttctattccatggtgcagtcggccaacagccacgtccgccggctaatgaatgaaaaagccacccatgagcaagagatggaggaagccaaggagaattttaaaaatgccttaactgggattctcactcaatttgagcagattgtggccgttttcaacgcttctaccagacaaaaagcttgggaccatttctcgaaagcccagcgcaagaacatagacatttggcgaaagcattctgaggagctccggaatgctcaaagtgagcagctcatgggcatccgccgcgaagaagaaatggaaatgtctgatgatgagaactgtgacagccctacaaagaaaatgagagtcgatgaatcagccctggctgcccaggcctacgctctgaaagaggagaatgacagtctccgctggcagctggatgcctacaggaatgaggtggagctgctgaaacaagaaaaagaacagcttttccgaacagaagaaaacctcaccaaggaccagcaactgcagtttctgcagcaaaccatgcaaggcatgcagcagcaattgctaaccatccaggaggagttaaacaacaaaaagtcagaattggaacaagcaaaggaagagcagtcccatacacaagcgttactaaaagtcctgcaggaacaattaaaaggtaccaaggaattggtcgagaccaatggccacagccatgaggattcaaatgaaatcaatgtgttgacagttgcattagtcaaccaagaccgagagaacaatattgagaaaagaagccaaggcttaaaatcagagaaagaagctctgctaataggtatcatatcaacgtttcttcacgtccatccttttggagccaacatagaatatctttggtcatacatgcagcagctggactccaagatatctgcaaatgaaatagaaatgcttttgatgaggctgccacgcatgttcaaacaggaattcacgggtgtgggagccacgctggaaaaaagatggaagttgtgtgcctttgaaggaattaaaactacctaactgcgaagagcaaagcatctctggaaatgaaaccatgtgaacctggccagggcggtgcgacggggaagcaggaggtgtggggttggtcccgcacgcaacctttgtggagccatcgaagcctgcctttagttatatctgtggcgttctcttgtaagtggaaatgtaattgtgtaccagtttcttaaaataaacaaagcttcatactgtgacagatctgtttcctatgaaaaccaaacaatgattccacagtcataatgatggcaaaatcttaaaatgtgctacatttgagaatagctcaccaagcaaaatatttaaagttaatgatggtgtagcaatgattgttgctaggctacagagttgtatatgtaatgtatagctgaaatcattaaatgacattttcctgaaagtctttctgttttagtaaaaaaaaaaaaaaaaaaaagagaaagaagaaaaagaaaaaaagaaaaaagaaaaagttttacagtgagggaaaagcatacc

SEQ ID NO: 220612 - DNA, 3019 bp, Homo sapiens
ctcagcagatccccgctctcccgggcgccgctactcacacaggcttccagccgccacggggcgtcctctgtctgctgcagcggcggcggcagcagagggaacggcgactgcagcccggccgcgtctcccagctccgtgcccgggacagagtccgggagaagcaaaggaggaggaggacgccgaggctaggaggagccgcgccgcgcccggcgccccactccgcgcagcgggttgcctccgctccccatacggcggccccaggtcctttgctgccagcatgatgtcgtatttataatatgtggaggagagagagctcaccatgctcaggtagaagggatggtatgtgcaccacaaataacaagcagaagcctctggtatgtcagaaccatgctgtcttccatgagacttcctttgtgaagagcatccatttaaaagacttttatgaatacatggtttcaatcaagtccccagagaacacatttgtcttctgagctgctggcagttttgagaatctgatgacctccgaggggaccctgcactcagccatcaaagtgttcctgcccctctggacactcataattcaatggtagatgcaggtggagttgagaacatcacccagcttccccaggagcttcctcagatgatggctgcagcagccgatggtttggggagtatagcgatagacacgacccagctcaacatgtccgtgacagatcccacagcctgggctacagccatgaataacctgggcatggttcccgtagggttgcctggacagcagctcgtgtctgactcaatctgtgtcccaggctttgatccaagcctcaacatgatgactggaatcacccccattaacccaatgataccaggccttggactggtacctcccccaccaccaacagaagtggctgttgtcaaagaaataatccactgcaaaagctgtactctttttcctcaaaatccaaatcttccacctccttccacaagagaacgacctcctgggtgtaagaccgtgtttgtcggaggattaccagaaaatgctactgaggaaattattcaagaagtctttgaacagtgcggtgatattacagcaattcggaaaagcaagaagaatttttgtcacattcgctttgcagaggaattcatggttgataaagccatttacctttctggttataggatgcgattagggtctagcaccgacaaaaaggattcaggccgccttcatgtggactttgcccaggccagggatgacttctatgagtgggaatgcaagcagaggatgcgtgcccgggaggagcggcaccggcgcaagctggaggaggaccggctcaggcccccatccccgcctgccataatgcactactcggagcacgaagccgctctgctggctgaaaagctgaaagatgatagcaagttttcagaggctatcacagtgctgctttcctggattgaacgaggggaagtgaatcggcgctctgcaaaccagttctattccatggtgcagtcggccaacagccacgtccgccggctaatgaatgaaaaagccacccatgagcaagagatggaggaagccaaggagaattttaaaaatgccttaactgggattctcactcaatttgagcagattgtggccgttttcaacgcttctaccagacaaaaagcttgggaccatttctcgaaagcccagcgcaagaacatagacatttggcgaaagcattctgaggagctccggaatgctcaaagtgagcagctcatgggcatccgccgcgaagaagaaatggaaatgtctgatgatgagaactgtgacagccctacaaagaaaatgagagtcgatgaatcagccctggctgcccaggcctacgctctgaaagaggagaatgacagtctccgctggcagctggatgcctacaggaatgaggtggagctgctgaaacaagaaaaagaacagcttttccgaacagaagaaaacctcaccaaggaccagcaactgcagtttctgcagcaaaccatgcaaggcatgcagcagcaattgctaaccatccaggaggagttaaacaacaaaaagtcagaattggaacaagcaaaggaagagcagtcccatacacaagcgttactaaaagtcctgcaggaacaattaaaaggtaccaaggaattggtcgagaccaatggccacagccatgaggattcaaatgaaatcaatgtgttgacagttgcattagtcaaccaagaccgagagaacaatattgagaaaagaagccaaggcttaaaatcagagaaagaagctctgctaataggtatcatatcaacgtttcttcacgtccatccttttggagccaacatagaatatctttggtcatacatgcagcagctggactccaagatatctgcaaatgaaatagaaatgcttttgatgaggctgccacgcatgttcaaacaggaattcacgggtgtgggagccacgctggaaaaaagatggaagttgtgtgcctttgaaggaattaaaactacctaactgcgaagagcaaagcatctctggaaatgaaaccatgtgaacctggccagggcggtgcgacggggaagcaggaggtgtggggttggtcccgcacgcaacctttgtggagccatcgaagcctgcctttagttatatctgtggcgttctcttgtaagtggaaatgtaattgtgtaccagtttcttaaaataaacaaagcttcatactgtgacagatctgtttcctatgaaaaccaaacaatgattccacagtcataatgatggcaaaatcttaaaatgtgctacatttgagaatagctcaccaagcaaaatatttaaagttaatgatggtgtagcaatgattgttgctaggctacagagttgtatatgtaatgtatagctgaaatcattaaatgacattttcctgaaagtctttctgttttagtaaaaaaaaaaaaaaaaaaaagagaaagaagaaaaagaaaaaaagaaaaaagaaaaagttttacagtgagggaaaagcatacc

SEQ ID NO: 220613 - DNA, 1425 bp, Homo sapiens
actcctagtgtctttgctttgcttccctatagtgatcacaacataaattacttgtcttgtttgacttccttgttcaccaaagttgagcagattgtggccgttttcaacgcttctaccagacaaaaagcttgggaccatttctcgaaagcccagcgcaagaacatagacatttggcgaaagcattctgaggagctccggaatgctcaaagtgagcagctcatgggcatccgccgcgaagaagaaatggaaatgtctgatgatgagaactgtgacagccctacaaagaaaatgagagtcgatgaatcagccctggctgcccaggcctacgctctgaaagaggagaatgacagtctccgctggcagctggatgcctacaggaatgaggtggagctgctgaaacaagaaaaagaacagcttttccgaacagaagaaaacctcaccaaggaccagcaactgcagtttctgcagcaaaccatgcaaggcatgcagcagcaattgctaaccatccaggaggagttaaacaacaaaaagtcagaattggaacaagcaaaggaagagcagtcccatacacaagcgttactaaaagtcctgcaggaacaagaaatcaatgtgttgacagttgcattagtcaaccaagaccgagagaacaatattgagaaaagaagccaaggcttaaaatcagagaaagaagctctgctaataggtatcatatcaacgtttcttcacgtccatccttttggagccaacatagaatatctttggtcatacatgcagcagctggactccaagatatctgcaaatgaaatagaaatgcttttgatgaggctgccacgcatgttcaaacaggaattcacgggtgtgggagccacgctggaaaaaagatggaagttgtgtgcctttgaaggaattaaaactacctaactgcgaagagcaaagcatctctggaaatgaaaccatgtgaacctggccagggcggtgcgacggggaagcaggaggtgtggggttggtcccgcacgcaacctttgtggagccatcgaagcctgcctttagttatatctgtggcgttctcttgtaagtggaaatgtaattgtgtaccagtttcttaaaataaacaaagcttcatactgtgacagatctgtttcctatgaaaaccaaacaatgattccacagtcataatgatggcaaaatcttaaaatgtgctacatttgagaatagctcaccaagcaaaatatttaaagttaatgatggtgtagcaatgattgttgctaggctacagagttgtatatgtaatgtatagctgaaatcattaaatgacattttcctgaaagtctttctgttttagtaaaaaaaaaaaaaaaaaaaagagaaagaagaaaaagaaaaaaagaaaaaagaaaaagttttacagtgagggaaaagcatacc

SEQ ID NO: 220614 - DNA, 1482 bp, Homo sapiens
actcctagtgtctttgctttgcttccctatagtgatcacaacataaattacttgtcttgtttgacttccttgttcaccaaagttgagcagattgtggccgttttcaacgcttctaccagacaaaaagcttgggaccatttctcgaaagcccagcgcaagaacatagacatttggcgaaagcattctgaggagctccggaatgctcaaagtgagcagctcatgggcatccgccgcgaagaagaaatggaaatgtctgatgatgagaactgtgacagccctacaaagaaaatgagagtcgatgaatcagccctggctgcccaggcctacgctctgaaagaggagaatgacagtctccgctggcagctggatgcctacaggaatgaggtggagctgctgaaacaagaaaaagaacagcttttccgaacagaagaaaacctcaccaaggaccagcaactgcagtttctgcagcaaaccatgcaaggcatgcagcagcaattgctaaccatccaggaggagttaaacaacaaaaagtcagaattggaacaagcaaaggaagagcagtcccatacacaagcgttactaaaagtcctgcaggaacaattaaaaggtaccaaggaattggtcgagaccaatggccacagccatgaggattcaaatgaaatcaatgtgttgacagttgcattagtcaaccaagaccgagagaacaatattgagaaaagaagccaaggcttaaaatcagagaaagaagctctgctaataggtatcatatcaacgtttcttcacgtccatccttttggagccaacatagaatatctttggtcatacatgcagcagctggactccaagatatctgcaaatgaaatagaaatgcttttgatgaggctgccacgcatgttcaaacaggaattcacgggtgtgggagccacgctggaaaaaagatggaagttgtgtgcctttgaaggaattaaaactacctaactgcgaagagcaaagcatctctggaaatgaaaccatgtgaacctggccagggcggtgcgacggggaagcaggaggtgtggggttggtcccgcacgcaacctttgtggagccatcgaagcctgcctttagttatatctgtggcgttctcttgtaagtggaaatgtaattgtgtaccagtttcttaaaataaacaaagcttcatactgtgacagatctgtttcctatgaaaaccaaacaatgattccacagtcataatgatggcaaaatcttaaaatgtgctacatttgagaatagctcaccaagcaaaatatttaaagttaatgatggtgtagcaatgattgttgctaggctacagagttgtatatgtaatgtatagctgaaatcattaaatgacattttcctgaaagtctttctgttttagtaaaaaaaaaaaaaaaaaaaagagaaagaagaaaaagaaaaaaagaaaaaagaaaaagttttacagtgagggaaaagcatacc

SEQ ID NO: 220615 - DNA, 1008 bp, Homo sapiens
aggaagtagactggttaaggacatgagacccagaggaataacctggtgatggacagaagatggaaaaatttcttacatgaatgaaaagcctctggtatgtcagaaccatgctgtcttccatgagacttcctttgtgaagagcatccatttaaaagacttttatgaatacatggtttcaatcaagtccccagagaacacatttgtcttctgagctgctggcagttttgagaatctgatgacctccgaggggaccctgcactcagccatcaaagtgttcctgcccctctggacactcataattcaatggtagatgcaggtggagttgagaacatcacccagcttccccaggagcttcctcagatgatggctgcagcagccgatggtttggggagtatagcgatagacacgacccagctcaacatgtccgtgacagatcccacagcctgggctacagccatgaataacctgggcatggttcccgtagggttgcctggacagcagctcgtgtctgactcaatctgtgtcccaggctttgatccaagcctcaacatgatgactggaatcacccccattaacccaatgataccaggccttggactggtacctcccccaccaccaacagaagtggctgttgtcaaagaaataatccactgcaaaagctgtactctttttcctcaaaatccaaatcttccacctccttccacaagagaacgacctcctgggtgtaagaccgtgtttgtcggaggattaccagaaaatgctactgaggaaattattcaagaagtctttgaacagtgcggtgatattacagcaattcggaaaagcaagaagaatttttgtcacattcgctttgcagaggaattcatggttgataaagccatttacctttctggtactttgcattacataaggagttttctaggcattttgttatgttttgtgatgttaatatgagcttattccctttggccttcatgcaaaataaagtcttcatagtttggggctgga

SEQ ID NO: 220616 - DNA, 1806 bp, Homo sapiens
attatgtagaaccattccaatcctgagtgacaggatttgcaaagacagctgttgggctccacaaacatttggaggaggggaaaatgtgaggttggttgctacattctcctacttctttttactgaaaggaacagctgcgatcttcacatgtaagatgaagtaaacaaaagctgacaatgcccagcaccattcagcagtaagcattcaaatggatttttcctcaccgcgtttgcaggcccggcacagtctcagttccccacagcacagagaggaagcaaggtctttgcatgccctgttcacttggccaaacattgccctagatgtgcaattcaacccatataaagcaagcgtaattcaagagccctgactctttcaccatttcatgatggcttattactcgcacacggcattgtcaggttccagcaactctgtgtgcagcaggcagaaatgcagtgtttatctctgacaggcaaacattcttaggctcatcggcatgagtatccacgctgaactggctatcggggaagtagatccctgcatgggaaagtcaagtatccccactgtgtagagctggtccacaatggagaggaggaaaagttttgcattggaccaaatcactgccttagaaggaaagagattgcaatcccattcatttttaagatctgcaatgggttgggatgatacccatttaaaaaagaaaaaaaaagaggttacctctttggcctctttggcaaaggatatgaactagtaataaagcctcagcatcaaggcttgggagtctggctcaaagtggctaagactagaagcatcttctaacataaatatggcagcattaggaaaatagcttggcctttagagagacccagattatcttcaccttaaaaactaccaagaccctggtccagcaagaccaccatcacagcagtaaatacatagccaccaacttcacagaaggttttccactgagacattgtgaaaaccacaatccattaccggtggatgagtcccagctctcttactacctggagcttccaagcaagacttacctgtcctttgttccagattggttcctgggatcctggaccaacacaaagagaagaggaaagcctcaagggaaataaaagtgaaggtttcagtgatagtttaaatatatatttttaaatgttagcttttttttaaatacttcacggtgatggatggagtatttcaaccacaatggcaaagaatgaattaccggcagtgtcagagtttcttgttgctgtgggaagacagctgccatgttgagaggtgccttgtggagaggctcatgtggcgaggaactgagactggcttctatccaacaaccagtgaggaactaaggccctaaagtcctatagtccacaaggaactaaatcctaccaacaactacatgagtgagcctggaatctgattttccccagtggggacttaaggtacctacaacctggctgttatgggctaaactgcatcctgcccaaatttatatgtttgagtcttaactcccagcacttcagaacatggttttgtttggagacatagtcattaaagaggtaatgaagttaaaatgaggtcattaggatgagtcctaatccaataggactggtgttcttatatgaagaggaaatttgaacacagacacatatacaggaaagaccatgcgaagaagacacagagaggaaacggccatctacaatccaaggagagaggcctcagaacaagccaaccctgcagataccttgatctaggcatccagaattgtatgaaaatacatttttgttatttaagcta

SEQ ID NO: 220617 - DNA, 2492 bp, Homo sapiens
attatgtagaaccattccaatcctgagtgacaggatttgcaaagacagctgttgggctccacaaacatttggaggaggggaaaatgtgaggttggttgctacattctcctacttctttttactgaaaggaacagctgcgatcttcacatgtaagatgaagtaaacaaaagctgacaatgcccagcaccattcagcagtaagcattcaaatggatttttcctcaccgcgtttgcaggcccggcacagtctcagttccccacagcacagagaggaagcaaggtctttgcatgccctgttcacttggccaaacattgccctagatgtgcaattcaacccatataaagcaagcgtaattcaagagccctgactctttcaccatttcatgatggcttattactcgcacacggcattgtcaggttccagcaactctgtgtgcagcaggcagaaatgcagtgtttatctctgacaggcaaacattcttaggctcatcggcatgagtatccacgctgaactggctatcggggaagtagatccctgcatgggaaagtcaagtatccccactgtgtagagctggtccacaatggagaggaggaaaagttttgcattggaccaaatcactgccttagaaggaaagagattgcaatcccattcatttttaagatctgcaatgggttgggatgatacccatttaaaaaagaaaaaaaaagaggttacctctttggcctctttggcaaaggatatgaactagtaataaagcctcagcatcaaggcttgggagtctggctcaaagtggctaagactagaagcatcttctaacataaatatggcagcattaggaaaatagcttggcctttagagagacccagattatcttcaccttaaaaactaccaagaccctggtccagcaagaccaccatcacagcagtaaatacatagccaccaacttcacagaaggttttccactgagacattgtgaaaaccacaatccattaccggtggatgagtcccagctctcttactacctggagcttccaagcaagacttacctgtcctttgttccagattggttcctgggatcctggaccaacacaaagagaagaggaaagcctcaagggaaataaaagtgaaggtttcagtgatagtttaaatatatatttttaaatgttagcttttttttaaatacttcacggtgatggatggagtatttcaaccacaatggcaaagaatgaattaccggcagtgtcagagtttcttgttgctgtgggaagacagctgccatgttgagaggtgccttgtggagaggctcatgtggcgaggaactgagactggcttctatccaacaaccagtgaggaactaaggccctaaagtcctatagtccacaaggaactaaatcctaccaacaactacatgagtgagcctggaatctgattttccccagtggggacttaaggtacctacaacctggctgttatgggctaaactgcatcctgcccaaatttatatgtttgagtcttaactcccagcacttcagaacatggttttgtttggagacatagtcattaaagaggtaatgaagttaaaatgaggtcattaggatgagtcctaatccaataggactggtgttcttatatgaagaggaaatttgaacacagacacatatacaggaaagaccatgcgaagaagacacagagaggaaacggccatctacaatccaaggagagaggcctcagaacaagccaaccctgcagataccttgatctaggcatccagaattgtatgaaaatacatttttgttatttaagctaaacagtctgtggtgctttgttatggcaatcccagaaaactaattaactaattgactgcagccttgcaagggaccctgaaccagaggacccagttaagccatgtgcagattcctgactcacagaactaggagataacaaatgtttgttgttctaaggtgctaaatgttgggaaaatatgttatgtggctatgttgttttgcacatgtgccacataatgatgttttggtcaacaacagaccacacatatgatggtgggcccataagattgtaatactgtgtttctattatgcattctctatttatagatacacaaatacttgccactgtgttacaattgcctactgtcttcagtactgtaacatgctgtacaggtttgtagcccagaagcaatagactataccatacagtctgggtgtgtagtaggctataccatctatgtttgtgaagtacactctatgatgttcacataattatgaagttgcctagtgatgcatttctcagaatgcatgcccgacattaagtgacacttggctttatgtctatcatgcatttaagatattgcaatatagttaacttatgttttaatacacctcttaattctgttttgatcccacaccaaccaagatgcaaaactaattttttcgcccatttccataaaaaacacaattacaatgggcctaatgtgg

SEQ ID NO: 220618 - DNA, 560 bp, Homo sapiens
ggttgccaggggctggggagggaggtatggggagtgactgttcatgggtacaaggtttccttttttgatgacgaaaatgttctaaaattagattatggtgagggttgcacaactctgtaaatatactaaaaaccaatgaattatacgctttacacaagcgaattttatggtttgtaaattatatctcaataaagctttgagagcaagaacggatcagaagtgctcataaaagccttgacccagcactccccttctaggaactgagcagaagaaaatcatcagaagtgggcaccaagactgacataaggtgttcatcccagggtcatctataccagcaaaaaagttaaaaatgggctgggcgcggtggctgtaatcccagcactttgggaggctgaggcaggcagctcacctgaggtcaggagttctagaccagcctggccaacacggtgaaaccccgtctctactaaaaatacaaaaattagccgggcgtggtggcacatgcctgtaatcctggctactcgggacctgaagcacgagaatcgcttgaacctaggaggtgg

SEQ ID NO: 220619 - DNA, 586 bp, Homo sapiens
tcaaggccctactcaaacagctgccctcctcccacccctcacagtcctcactccctcctttaaaataagaacaccctttgcatataacacgagtgcttagaatgagctgggtggctattacatgcatatgactttgcagcttagaaaaagtgttatattatctttatagatagatatcatagatcagttatatattatcttttatagtgattcttccttttcactctcacaacattatgtacctttattgagattatagaggtcccatatactgaggtcctaccacgtgccaaatgctttattcttataccaatcccatgacacaggcatcataagtgtcagagaggggaggcaacttactcagtgttacacggcaggggtctcatttgaattcaggcttgtgtaatgtcaaagcctctataaatgtgcacatgatgtgtgcatgtatgtatgcttaatccgtgcgagtatacactgtgtatatacacacagcctccccttctgcactgtgtttgttctcttctctagcagtgtctagcatatggtaaatgctcaataaatgttagatgaatgaataaatcctgca

SEQ ID NO: 220620 - DNA, 520 bp, Homo sapiens
ccctcttccctctcagagtttgctgactgctgggaaaactttgtggaccacgagaaaccgctttccttcaacccctataagatgttagaggagctagataaaaacagtcgagccataaagcgacggcttgagaggataaagcagtcctgaagtgtggatgttttagagaatgacttaagaagtttgcagcttggacccgtatcccactcattatcaagaagcaactcaagatgactttccctggggcatgtcagttgcctcatagcctgctggtcctgtaagcaagcactaagctccacagtgccagttccttgccccaacctggccccatccaagtacagaagaccttcctttcctcctttttccatattgctttctgttctaagtgggtgaataattttataattgaaaaaataaagataaagtctgtaaatccagccgggtacggtggctcacgcctgtaatcctagcactttgggaggctgagatgctcggccaataaatttctattgtttatgaa

SEQ ID NO: 220621 - DNA, 418 bp, Homo sapiens
ttgggtttggtgctattcgtattcagggtcttggaatgcaactcccacagataagggggtgctgctggagtgaaatactgtgatataacctttttttcaggaaatgaagggagaagatgtgtacgtgtgtgggagaggtataagagacctaggttgccatattctatcacagaaaatgcataataactaaatctggaaaatgatgaatagctgtacaaccatattatttagcaataggaggtaaatacaggtagaagcagaagaaagaatgggcaggggttacctctatggagaagctggggtgggaggatagggtggggacttattttacgaactgtgtaattgcctaacttgtgaatatgtatttctgaagtaaaataaaaattaagttaaaattaaattttaaaattcaaactaa

SEQ ID NO: 220622 - DNA, 351 bp, Homo sapiens
aggcaccgctgacctccccaggccctgtgccatggtcgtccccgacttcgaactgatatgtgagatcatgctcatggccgagggctttctggaagcccgccttctggccaggaagttcatcaccctgtacaccttgtgcaaggagctgctctcgaagcaggatcattacgactggggcctgagagccatcaagtctgtgctggtggtggccggctccctgaagaggggcgaccccagccgggcagaggaccaggtgctcatgcgggcgctgagagacttcaacatccccaagattgtgacagacgacctgcccgtattcatgggactgatcggggacctcttcccggctct

SEQ ID NO: 220623 - DNA, 565 bp, Homo sapiens
gtcagtttcaatatcacctccagagagcggcttccctgacctccaacccattgctgatattctgtcttacaaccctatttgtttcttttatagctgttaccagaatttttaaaataataatttaaaaaaattatttgagttctgtctctagaagaggaaaggtcatgcttactttggtgacttttatttatattgtagatatgtatatgtgtaaatttatgtgtatgtctacatactgagtacatgcatgcatttatatgcatgtgttatacattaatgtttcatacatgtctacatacgtgtacatgatgtgttgtgtgtctgttgtgtgtgtgcatgcatacatgtgcatgtgtatattacgtgtgcatgcatgcatgtgtgtctcagtacctgggccctggtgaataaatgatcacctagggttagggttctccaagatcttcttgaatatacttaagaaagtgtaactgccccaaacgctctgggtcccgacatgagagtggccccgggaggcagatctgccaggcgtaaccctatgattactcctgaaaaactaacatgc

SEQ ID NO: 220624 - DNA, 598 bp, Homo sapiens
tgaaaaaaaggttttttaaatccaaatttggttttatcattctttttaaattcacaggcaacagcacctgggcagaccatgccatttcccctcctgaactcgggtgctttgaaagaagtatagggggccggtcgcggtggctcccgcctgtaatcccagcactttgggaggccgagatggccggatcacctgaggctagaagttcaagaccagcctggccaacatggtgaaaccccgtctctactaaaaatacaaaaattatctgggcatggtggcacgcacctgtagtcccaccattgcacttcagcctgggtgaccctgtctcaacaaataaataaacaataagtaaataaatggtatccagattgagaaggaagaaataaaactgtcatatgcagatgacataattgtttatatagaaaatctgaaagaataaacaacaacaaaaaccccctggaactaataagcaattataggccaacagtaggatacaaggtatataaaaatcaattgctttcctatataccagcaatggacaagtggaatttgcaattaaaaacataacaccatttacattactatccccccatatgaaatt

SEQ ID NO: 220625 - DNA, 473 bp, Homo sapiens
gagacaggtgagtcatgaagattactaaggaaagactctctccacaaccgggcttatcttttcccagagggagatttgttaagaggagctcaaatacaaacacgggaaggtatatagtttggaagaaagcatttcaggtgattctggtatctctatttcctaccaactgctttcatgttgaaaaaaaaaatgatccggactagaatgaaaaaagatttacaggttacgtccagtttatatatgacggcttctcatttaatccaggcaactactgtaaaactcatcagtgaggcgctctaagtttgcattacacttatttatccatcatttattatttttttcatatgcccgagaacaccaaggaagagaagacaaataatctagaaaggaaacacatgaaaaaagaaaatcaagccaggtgcagtggctcatgcctataataccagcactttgggaagacaaggcgggtggat

SEQ ID NO: 220626 - DNA, 420 bp, Homo sapiens
cttttctttgttccaatggatgtgggccatttcaactgtggttggacgctggaactttctgatgagccaagcttctaccacacagcaagcatccgaaataccaaaatagatcatggttgacagacagtttcccaaaagaaaatgagaacatcatcaagagaatcacggggagtggattttgggtagatttaaaatatagatttaggtttctactagggaaccaagaaaaacaactcttttgtttatatgttttttgtggacaagttttcttagatatctaagacaaaatacctactcactgattacattgtattgcttcattagcatgatttcaactccaagttcttctctgtgtaggccaaacaccccccttctgataataatttcaatccctgatttatcaaataacatagctctacc

SEQ ID NO: 220627 - DNA, 336 bp, Homo sapiens
aaataaagcttgagaactacctctagatgactcacacacaaaatacttcatggttatttttaccagtaagctttttgtgcacttgatgtagtttttcctgaactaagtttggctctaacataagttatgtgtaaccttggtgcctcatcactttttccccggatatgttttttcatatgttactcatgtagttcagtaacgagatttcagtgaaaaatggtaagagagaacaaattaataaatggtttttaaataaagctcaaaacaaatgataaatcaacctttatatgagaaatatgttcctgaaaatttgtaaataaatcaactccatacttt

SEQ ID NO: 220628 - DNA, 573 bp, Homo sapiens
ctggctggagaccaatcaactcaaactgataaaagaacaaccctgctctaaagaagaaaacaactaattccactgcctaaagaagaaaacaactaattccactgcctgcaatatcctggttaaccagaagtactgagtctgttcacatgacaacttcactgctagcataaccagcatttgagaaagccagtgcactaaatgaagctacaaccaaggactcccactttactcccctgccacctccactggagcaggtgctggtatccatggctaggagacctgaacgtggatcacatcacaggactcttggcagacagtccccagcatcagcctgcaggccagtagctccgctgggtggctagactcacaagggcaataacaatcactgcagtctggctctcagaaatccccgtccctaggggaagggggagagcatctcatcaagggaataccccatgggacaaaacaatctaaacagtaacccttgagttccaaatctttccactgaaacagtctacccaaatgagaaggaaccagttaaagtaattctggtaatatgacaaaacaaggttc

SEQ ID NO: 220629 - DNA, 318 bp, Homo sapiens
gcacgagataaaatctcccaactaactaggaatagaagaaaactccctcaacaatataaaggacatttactaagaacctacagctaccatcatgcttgatagtgaaagactaaacacttttcctcaaagatcaagaacagaggaaggatgtatactgtcaccactcttattcagtatcactttggaagacttaaccagtgaaatgtggcaataaaaataaataaaacgcatacagtttggaaaggaagaaataaggctatccttattcacaggtgacattatcatccatgttgaagatgcataagcatatctccccca

SEQ ID NO: 220630 - DNA, 475 bp, Homo sapiens
caataaaacatgcccattttaagcctacatttcagagttttgacaaatgtatcacttatgtaattacaaccaccacaatcaagacaaagaacatttttatcatccccagacattccctcatgctcccttgcagtcaatcttcaccaaccctggcaccagaataccactgatttgctttctgtcagtataaattagttgtcaatatagattgctttctgtcaagatagaattctgtcaagaatttcataaagatagaatcaaacaatatgtattattttgcttctggcctctttcactcaagataatgttttgaaatcattcagtttgttgtgtgtatctacagttgattctttttattgctgaatattactatgtgttatggatatactacaatgagtttattcatttgtttgttgataattgttacagctgtttccagttttacattatgaataaaacttctatgaacatgagt

SEQ ID NO: 220631 - DNA, 620 bp, Homo sapiens
ctagtatcaagtgctagtatcagccagagtccagtcataaaaatagagtgtatttaatattaggaacttgtaataaagatataagaagactgaaagagcaaaaaagtggatgccaaatattagaactacagacagcagctacctttctactacctattgctacaggcatgacacattcaggaactagaaacaggaaataattccccctcccaccttccagtccccaaggccttcccatttactgaacttaacaggaagctagctggcaagggaggctggcaaatgaagtttgtcaaaattccagccctggcacatcagagcagaggagaggaggatggacttagagttgagaacaggaggtacataaccaactcactcctcaatcaaaatctatctggatgaagtggagacatatccattaagagataaaaaataaagagactataaattccaattagattgtagcacaaggaattgtcttaaactctgtggcatctgaccctgtaacaagggcccaatgtatatttgttgattggttttatgagaaaaataaaaattgggcatctgctttgaccatgagcataggacaaaataaacttatttatttatttatttattta

SEQ ID NO: 220632 - DNA, 414 bp, Homo sapiens
aaaagtgctgggattataggcatgagccaccatgcccggcctcactgcttcttttcttttagtattaggtgccaactaaaagtgttcaccacgtctgttcaacattgcactagatgttctagccagtgcagtaaggcaaggaaaaacaataaaaggcttccagatcttaagagggaaatgtaaaaatttctttattcaaagataacataactgtctgtgtagaaaatcctacggtatctacaaagaaaactgttttgttaggactaataagtgaattttacatggttacaagataccaaggaaatacagaaaaatccattatatttctgtattctagtaatgaacaatcagaaattgaaattctaaaacagtatcataatctgtcaaaaatatgaaatacttagagataaattt

SEQ ID NO: 220633 - DNA, 553 bp, Homo sapiens
gaccacacagacagctttagcatcagaagagatggccacacccagagctgggcccccagtatccacaaaggaaagttcagcttaggaagaagaaatggggagagaacatttttcttccttagcacctgaatgaatgctttgcccagcagggctacctcccgccagtctctacctttgttgtaatgccaattcttatttaatgtctgccaaacacaaaaggtccatcaggatcacgtggaaagaaagtgaaatgctggcggtgccccctgggtgtaggcctgaaataagatgaacaggaaataaaacataactgcagggaaggcgggccctagacaaagaatggcagtgggcttgcttgttcctcctctttgctcccttcctttcaagcctcttgctttgagagggagaggcttgtgtgtgttttgtatgggttggtagtgtgagaaggaagtcaagatgtttgggaaggatgaattttgagggaggatgttaaacagaagaacagccaagtatggggaaggattgggaataatggccctaaatgtggcagagt

SEQ ID NO: 220634 - DNA, 565 bp, Homo sapiens
tcatggttacaggcacctgtaatcccagctacttgggaggctgaggcaggagaatcgcttgaacccaggaggtggaggttgcagtgagcggagatcacgccactgcactccagcctgagggatagagcaagactctgtctccaaaaaataaataaaaataaataaaagttgtcaatagattaccaaagaactcaccaaaaagattgagctgagctcattaattccttgctgtagtgtgggttctgtggtgattttattattataatgtaacaccaagccacattgtcagttagtaacttctcaaaatgttgagtcagtggacaccgggtagggtaaaaagtctttgtgcctggtgcggtggctcatacctgtaatcccagcactttgggaggccaaggcaggcagatctgttgagcttaggagtttgagaccagcctgggcagcatagggagaccccatctctacaaaaaaaaatgagtaggctatggtggctggtgcctgtagtccccactaaggaggctgaggtgagaggatcccttgagcccaggaggcggaggttgcagta

SEQ ID NO: 220635 - DNA, 382 bp, Homo sapiens
caatggtaatgactgttccgccgatttttcatttgaggggaaaatctgaatacttacttttattattcatttataactggattgtttacttctccaagatactgctacttttgggggaaaacaacactaagtcaaatgacagaaaaaaatatgaacataaatgattctgctgctcttcagtttgctgctgtaaaatgtgaacatcctggaggggtgcctggtgcagcagcttaggcacttgcctacagacctaatgtgatcctgcctgtgttctaaggttacctattacaaaccgtaaaatgaggactaagagtcatgaacaagtcccaggttatctacattacactaaataaatcagataatgttttctggcttggtgaat

SEQ ID NO: 220636 - DNA, 384 bp, Homo sapiens
tgagatggagtcttgccctgttgccaggctggagtgcggtggcgtgatctcaactcaatgcaaccgctgattccctggttcaagtgattctcctgcctcagcctcccaagtagctgggattacaggcacgtgcccccatgcctggctaatttttgtatttttagtagagacagggtttcaccattttggctaagatggtcttgatctcctgaccttgtgatctgcccgccttagcctcccaaagtgctggattacaggcgtgagccactgctcctggccacacttgattttctgttccatgcatcagtgtttctttgtgaaggaatgaaaagcagccttaaatgtgtagcttgataattgggttgttttacagccaattcttgg

SEQ ID NO: 220637 - DNA, 824 bp, Homo sapiens
caagagtggctacatctggaaaggaaaatgggttgcagataggtggagatttgcatgttttagtctttataaagttctatcatttgtctttatggtaaacatagtatttttaaaaacatgtaaatattttaaaaaactaaatcaaatgaaaataaaactgcgcaattcaatagtatgtactgaaagcattttaaaatattcatacactttgactcttctatttctgggaatctgtcctaaggaaataatcagaaatgtgtgcaaatgtatattatgaagtagtaagtgctctaacatagccaaaatatattcgcaagctactgttaaatcccattatcactctagaaattgtaagtgcccctttcccaccagaaagtttttcatagcaggtatggggcccctctctgaataaggccataaggactactcactcctatctgcctaaagtaggtgggcagctgtcccatatgttgaacccatctgagtttcctctccatggaaacaaggttatcaaaaccagaactaagtcactaaatataactgtttttccttatctaaacacatgtaattaaattatgactctcaaaatacataaattgggaaaatcgaacaatttatattatctgtgctactttcttccagtgatgcatataattcagagccaaattctggaaattgtggatttttttccttttatttaatgttattattatttttagagacagggtcttgctctgtcacccaggctgcagtacagtggcatgatgatagcttactgcagccttgaactcctggattccagagattctcctgccttagcgtgc

SEQ ID NO: 220638 - DNA, 397 bp, Homo sapiens
taccagtgtcaggcaatctggactttccagatgccactgagatggcacctgtcaaaagagcagtggttccatttctagattgtgaatcttcagataaattctgccattttcatttcacttcctgaaagtcaaggttggtttgtgaaaagttaacagcatgctgaatgtgaaatatcaaccctcactctaaactttccctgttcagagcatcagatgaagacttcattgggttttatactggctttctttttggtagtccactgaagaatccagggagtttgaaagttgttgtatactgttaatgattgtctgcccatgtcctgcctgaaataccatgactgtttatggaaagtatctttaataaagctggatacagtttggcttggaaaaaaaaagt

SEQ ID NO: 220639 - DNA, 544 bp, Homo sapiens
aatttcagatttgactttattttttactggagttttttgaaattatacttttaaatttccaggtagtttattttgttgttgttttttagcatttcttacaaacttctagttttattgccttgtcaaagagagtatggcctgtacaatttgtgtgcattttggagatcatggatgttttcttgagacctgatttttagttttaatacatatctccaggaaactgaagaagaaagcatattctctgaagggaacaaaattcaatcagatgtattcatttgaccttacaaagtataatattatggacctttaattttaatttacttgattcattaaggctaagaaagatatgttcgtctcctattattgtatttctgtctgtttcttttgtttctaacagtttttgctttgtttctttttgatgttatttggcaaatgatctttttatatttaagggaaaaaatattttcctttaaaggcttgtatacctttgtgaattttacctgattttgttgtaatagtttctgtagaaatacatagttcagta

SEQ ID NO: 220640 - DNA, 524 bp, Homo sapiens
ttgctcgattttgtaatctcccaaaggaaggaatacattggaaatagcaatacagaagaccagcaaaggctatcattaggatggtgttgaagaaacaaccagcaggcctggacagcagcctgtccaggttggagcagaggtcaccaagaaagaaatgcaaagcatagaatatctgatatttgaacacagtgagacaagattgatacttctggcatacaatttgctaataaattaatggtctttatcttgaaaaaagaaaaaaaaagagaaacaattttaactccagggaaaacatgattctctaagaaaggaaatgaaatcatagtatactctgaggctaacagggcataatacttacatagtcttaaagatgtaaattctgacatttaatcgaatcaaattacataacagaactagttaagaaggctggccacggttgctcacactacccagcgcttcagaaagatcacttgagcccaggaagacctgcctggttgacagagtgagaccctgtctctaaaatt

SEQ ID NO: 220641 - DNA, 594 bp, Homo sapiens
  misc_feature (12)..(12): n is a, c, g, or t
  misc_feature (42)..(42): n is a, c, g, or t
  misc_feature (451)..(451): n is a, c, g, or t
atgtggctcccnaccctcaaggagtttccggtctactggggncgtgtaactagacaaggccaagcacaacactgtaagttcatgccataatgcggttggcacagggccctgggtggcggagtgctgtgagaacacagtgggggacatgcagtgcaccgggcaggctctgcgaggaaagtcaggatgaaccaacacatgggacaatgagtggggctaagctaagagacagatgggagttggtctgtgaatgaatgaaagtgggaaaaggaaaagaaagtttgtttctccttccatctcttcctggaactatagtcctcggctggatacagtatcactaagccatgcttttatttatttattttttttgttttttttttgagacagggtctcactctgtggcccaggctggagtgcagtggtgtgatcatggctcactggcagccttgacttncctgggctcaggtgatcctccctacctcagcctgcccaagtagctgggactacaggtgcacaccactatgcctggctcatttttgtattttctggtagagacagggtcttgctatgttgcccaggctggctaaaaggtcctat

SEQ ID NO: 220642 - DNA, 485 bp, Homo sapiens
actggcctcctgcaggtcttcgaacttgccaacgtgcacccaccgcagggccttcgagagtgccgctccctcccctgggaggtctccccagctatccggggttctccccgacacttcctccccatccccattcagttatcaaagcctatgccaaaaaggcctcccgtctcccgagtccctgcacacctttcgcagtgtgtgttgaatgccttgccctctgtctcctgaacctgggcctaagatcccggagagcagggcagctccctgtgccccgtcatcgtccatacggacctggcccgcagtgggctctgtcactaaatggataaccagtgctggggagaagacccagatgatgtgctggtgaagagtgaggcgttcattcagcttgcagaaggaggcttaggaaggctttatagaagaaaggaaatgtgagcaaagatgtcgttgaaagtaactttttttgaattaaaaatattgtattaaca

SEQ ID NO: 220643 - DNA, 825 bp, Homo sapiens
tgtggctgacaaggtaccttttggatcatgccctgagtactacaacacagtagtttgctcagtcactctgaatttaattattacaagaggtccaagtttttgttggggcaattttaaccaggttttcttgaactgatgacatatatctgtttcaaatggatgctgatttcttccaaaatgtataaataaatgagtaaataagagatgagtatttaaggtcctagtgacctctatttaaatgaagagaatgtcctacacataaatttataagtatacagttgatctgcattatccatggggacaagttcctggactcccccagatacaaaaatctgaggatgctcaagtcccttatgtaaaatggtctagtatttgcattaacctatgcatagcctcctgtatactttaaatcatgtctatattacttatacctaatacaatgtaaatgctatgtaaacagttgttatattatttaaggaataatgacctgaaaaaaaagtctctacatagtctgtatagattcttcctcccttccctggagtatttttgatccaaggttggttgaatccacagatgtggaacccacagatatggagggccaactgtattttgatcttcccaagtattaaccaaggagcaattcagactactatctactatcatggtataccatatttaacaatttcaaatgccttaagtctttttgttgcctcaaggaaatttgactatgcacttaatatatgtaataacctgcagtatcaacttgtagtcatctcttcagcatcagagctaaggatttactaaaagcattcttccaaaaataaa

SEQ ID NO: 220644 - DNA, 402 bp, Homo sapiens
gactttctgagaaaatttatgttcgactgctatttcttttgcagcacaaatagtatgtttctaacaatttggtggcctgtacaaggaccccattctcctcccagagggttttccatcctctcctgtgaggacacatgccccactgcctcattgcagtagcctcaggggtaaggaatggagacccccctagtgtgatgaataaacccggactctcagcaacatgggaagaaaagacctacaaataccgtggtgaccagataactctgtccacagaccaagattgataaaagcaaaggagctttgtcatggtgagctacttctcataggagtcaggatctgcatctgaagactatacaaagataaataacatggattaaaagcacaatcatcattgaaattaaa

SEQ ID NO: 220645 - DNA, 474 bp, Homo sapiens
ttttttggtgttccctgtcctgcttccccagaggaagccagaagaagaccccagttgccatgaactccgccgtcactagccgtgagcactccacttactcgcagaggagtgatgtcgtgctcagctcccaacctatggccaaggcaggaggacagataggcagcccgggagtcccgcagcagctgcctggcctatgacatcttggacatcctgccatgttatctctgtatcttcttggggattcagcacttcctcacagccctggggggcctcatggcggtgccattcatcctggccaaggacctgtgcctgcagcaggaccccctgacacagagctacctcatcagcaccattttctttgctccagcatctgcatgctcctgcaagtgtttttaggggtcagtactggaggctggaagtctgagatctggatgccagcatggtcagcttctgaggggtgctcctttcctggct

SEQ ID NO: 220646 - DNA, 350 bp, Homo sapiens
ttttttggtgttccctgtcctgcttccccagaggaagccagaagaagaccccagttgccatgaactccgccgtcactagccgtgagcactccacttactcggtaaggcccggtgggagacagagggagagaaagatggggagcaggaagaagggctgcggggaggtcctactgccctgactccttcttagtgctaaggcctagcctcatgctttagatcagggttcagatgatgagacccatgcagcactccctccccacctccagcgttagtgccccttagtgtcacctgtggtcaccatcacaacagacacagaatccgccccgaataaacggtaaattacaaaggag

SEQ ID NO: 220647 - DNA, 398 bp, Homo sapiens
ttctggctgtttgtcaattgaaatacacactgtgcttctacgggtcaacaatgtgctaggttctgccaacactgcagggaataagacacatgtggctgctgtcttcagagatgacaatatggctgtgtgtgtttgtgtggggaggtttcttaagtttatataaaataccaacaaaatgattttttttgttgttttgtttttttttagacagggtcttactccgtcacccaggctggagggcagtggtgtgatctctgctcactgcaacctttgcctccgggttcatgcaattctcctgtctcagcctccagggtagatgattacaggcacacacctccatgcccagctagtttttgtatttttagtagagatggggtttcactatgttggctaggctg

SEQ ID NO: 220648 - DNA, 379 bp, Homo sapiens
tgaaacatagcaagtaaattgtttattgttattgtcatttttgagacagttttgctcttgttgtccagactggaagtgaaactccgtctcaaaagaaaaaaaaaaaagttgggaaaaacatggttctccagggccgtggcaagccaggcttctgcactactgccaagaggagtgaacttgagctgcttttcgtttcctccacacaacatggtgaggagccaaaggaagacagtgatctaagtcattccccaccttcaggcggcaccatccctgttttcaaatccctaactgcctcactcccctaaagcattttttccccgctggaaacagactggaacacaattaagcaatgttgatcactgcttcagtcaaaagtggt

SEQ ID NO: 220649 - DNA, 548 bp, Homo sapiens
aaaggggtttggaagtgggagtgattgggattcagggaaagaaaactggtggtgaggagaagaaaggaaatgagaaataagcccataactggtgttttctaatgagatctatgttttatgtcttcgagatctttatatccttcatgaaattgctctgagattcctcctttagggaaagtttggcctatgtaataaattcatacacagaagttttacaatggggaattgtatttgcattgaaaataagggtttttatatatttttgacctaggattaaaagccagtctaattttgatgtaattcataattctctcttttagaaaaaatggctatatttataatcatcagaaaatggctccatcttactttcacagagattctctttgtgcttagagtttgaggaaatctatgatatcactacattatttagaatggaatctggaggaaaacaaaaccctgttttacacacgaatgtatctgaatatgtgtcacaaatgctactatcatgtatttatggttattcttcatttcttatatgctgaatgact

SEQ ID NO: 220650 - DNA, 580 bp, Homo sapiens
cctcagtatattccttttaaaaatataataggagctgggcacagtggctcacacttgtaatttcaatcctttgggagactgaggcaggaggatcatttgagtccagaagttcaagaccaacctgggcaacaaagcaagacctcgtctctacaaaaaataaataaataaataaataaatacattcaaaaaataaaaaatctgggtatggtggtgtgtgcctatagttctagctactcaggaggctgaggtgggaggatcacttgagcatgggaggtcaaggctacattgagccatgattgtgccattgcactctagcttaagtgacagagcaagactccatttcagaaaaaaataaacaaatacagtcagacatttagcatcctgacttacacgttaaatatgtcaccattcctgggccccttccttatttatacagagtcctttataaacaggctggaacttggaaagtatcattatatacctaataaacttactatttttaaaaatgatcatgtttagtgctgaaaaagttgtggtgacagtgttatgttattagacttctggtagcactataggttgg

SEQ ID NO: 220651 - DNA, 424 bp, Homo sapiens
gtgtatcgttccagtattaggatatgtgctgctgaagcaggcactactgtatcttaggtgggtttatctaattgccactggctgtttcttcctgagtatccatttgagctctcttccctccaaaatctgtttctcttagcccaataaataataccagcaacccattactcatactagaagcaacctgggggccatcctagatactttacctcctctaatcattaaccaaatttctactcatagtaccttctaaatactttcttttccatcctccctgtctttgtctcaccaagtctctctctaatccattctccaggctaccagttgagagctttctaaatgcagctttcatcactcatgaacctttgtgattgcttcagattcttcaatggcatctcttgctaaaaagatatgcctaagcata

SEQ ID NO: 220652 - DNA, 431 bp, Homo sapiens
aaaatgggtctctctctctctctttctctctctcacacacacacacatacacacacacaaagtagggttccatcactggtaaacaaaatcatcctgactgaaaggctgggctttttgttttggctatttggtgctatctggtggagtaggtgattggtaagtattcgttagatgggtggaggtgtggatagacgttgacatgaggcagttttcttccttcatcctgcttttcaacttttgaagcctaagtacagtcttattgtacaatatggtgactatagttaataacattgtatcatatacttgcaaattactaagagaggccaggcatggtgcccggcccctggtgatatcttttaagttcctggatccatttgtacttgaagttcatctctagactttttagttatatgactcattagccagagtct

SEQ ID NO: 220653 - DNA, 445 bp, Homo sapiens
ctcagggaagggcgcggtggctcacacctgtcatcccagcactttgggaggctgaggctggaggatcgcttgaggccaagagtgggagatcagcttgggcaacatagtgagaccccatctctgcaaaaaaatttctttaattagccaggcgtggtggtacacacctgtagctccagctactccggaggctgaggcaggaggatcacttgaatccaggaggttgaggcagcagcaagctgtgattgcaccactgcactccagcctgggtgacagagcgagaacctgtctaaaaaacagagctggcacccagcaccggcagatgtgagccctggggagaagcaggggaagaaggggtagggtgtgtggccagctgggtggcccttcgcaaactgctgtctcttatgaaaaataactaagtgtagttttctattttgtattaatgatt

SEQ ID NO: 220654 - DNA, 446 bp, Homo sapiens
cagatcattaaaaaatgtccattctgaacaggaagcaattgaaaaacagtaacaaaaacatgaatagagtcagggacaaattccaaagggtctaatattctgtcatctgagcccagaggagaggagagtgtgacacagaggaaaaatagctgaagaaataagggctgaaaacacccaaaatttggtgaaagacaaacatagatgtaagaagttcagtgaatcccaaacatatcacatcacaatcaaactggtaagaatcaaagtcaaataaaaaatgtcgaaagcagttaagaggaaaaggatccaaattactatgggtttctcaccagaaacgagggaggtcagaaggaagtggcacatttttcagatgctgcaagaaaagaacgtttgacccagaattctatattcaggaaaaaaaaaaaaattcctttaggaatcaaggcaaa

SEQ ID NO: 220655 - DNA, 457 bp, Homo sapiens
acgcatccctgcctgtctccctttttcctggtgaagcaaatactgatctgtctctgtagattacttttcatttctagaattttatataaatggaatcatataatatcaactccttttttatggcatctttcattcagcataattatttttaggttaattagtgctgtttcatgcattagtgttaattactttttattgatgagtattattcaattgtttgaatatttcacaatttgtttatctgtttaccagccagtggacatttgagttgtttccaggtattggttatttgaataaagttactttaaacattcaatcaaagtttttgtgaacatggttttcatttttcttgggtatattcctgagagtgagattgctgggtcatagggtaaatgtatgtttaactgctaaaaaaaaaaaagtcgacgcggccgcgaatttagtagtagtagtaggc

SEQ ID NO: 220656 - DNA, 500 bp, Homo sapiens
ttctaggctatgtggtttgtttgtacatttttcaaattgttgcaaatctctaaaaaaaaaatccaatatattattgaaaaaaacctggctgggtatggtgactgaaatgaaatgaaggccgggactaatcagggaggaggatggtgagtgagatgaaggagaatatatgccagaggaaggcggtctaatcaggaacaggatggaggtgaggaaggggacacgtacccctcccgggataatccctaagaaaattgacaatagacgctggagggccagcaagtccatagattcagaaactaccagcaaccgcggggtggcataaacatgccagctatgggtttccacccagaaaccaagtactgctctttgcgcttttaggagacagactgtgtaactacgaaacatgtttttaggagactatttactgtcaagaagaaatgttcacggcaaacggcgaagtgggaaaggctacacaaaatggatgcatgtacaacataatt

SEQ ID NO: 220657 - DNA, 498 bp, Homo sapiens
caagctgggcagcttcagcaagacgctgggcatcaagctgaagaaaaacatgggcggcctcggcggcctggtgcacggcaagatgggccgcgccaactccgccaatggcaagaacggggactcggccgagcggggcaaggagaagaaggccaagtcgcgcaagggcagcaaggaggagtctggtgcgtcggccagcacgtcgccgtcggaaaagaccacgccgtcgcccacagacaaggcagcgggcgcgtcgccggcggagaagggcggtgggccgcggggcgacgcctggaagtacagcacggatgtgaagctgagcctcaacatcctgcgcgccgccatgcagggggagcgcaagttcatcttcgccggcctgctgctcaccagccaccggcaccagttccacgaggagatgatcggctactacctgacgagcgcgcaggagcgcttcagcgccgagcaggagcagcggcgccgcgacgccgctactgcggccgc

SEQ ID NO: 220658 - DNA, 281 bp, Homo sapiens
tgagccactgcgcccggcctgtgctttgatttttaaaaagtgcttatccctctagccttgtgcttacttttccgtatagtagcctcataatttcctatcattctttcttactttacatgtaacagtcccttacagttcctttactcattgaaatcttagtggctctttattttcaccctcactgtgattacaatcctagattctatctcactgtcttgttttccctgccttcaacttcttaaatctttagtccctgagtttcagaatggcaaacacataaa

SEQ ID NO: 220659 - DNA, 553 bp, Homo sapiens
ttctctgttatatgaattatatcttaataaagctatttttaaaacccaaaagaatgcagcaccaaagcaggcaaaaatttcatctacataaagcaatctaacaggattaggaataccaagggatccattttatattataaatccaaagataacacagcctttaactcagatggatcattattggtcactagctgaacagtcaacaatgtgaaactgcaatgcttgatcagacataaaatgctttgtgcaatcagaaatcctacaacagacctttctgaggaaaagtacaagttgttgctttcctcagcacatgtaaatattgggtttacagcagaaacagagccagagcaagggttaatgatgcaaagttgggagttgagggaacaggagttggatgatgtaaaaggtctgcctcctctctttccactgctgcaccccatgtgtaaagtctgcgaattgacaccagggtcatatgggtctatctgtccccctttggtacacctctatcatgtagcaatgaaaaatgtaaataaaggaccttccaactgtgaaa

SEQ ID NO: 220660 - DNA, 417 bp, Homo sapiens
ttttattaaatcccgttttctgaagttttttaatatagaaaagtggacactggaaccaaaggccaaataatagtattttacataattttgtatcaatgcagttgtagtataatttcatttaaaatattttgcctgattatggctctacttaccttaaaggtttgagtatgtttggtgtgttggaaaatacattacttaagaagcagccagcatagtggataagagcattggcttggcaaccagactacctggattcaaatcccagtagtactactttgtactactttttagacaagttattaaacctttcagtgactcatttttcctcatctgttaaatgtcaataataatgctccctaacttacagggttattgtgaggattaaatcacttaaaatgaatgaatgcttagaatagc

SEQ ID NO: 220661 - DNA, 503 bp, Homo sapiens
attgttttcaagataccttgttacaatataaaagaagcgactaagttccaaggtcatgtaaattttaattttatccatgagcaaaaggagggctgctccaagtaaaataggactgatttttgttttgggtcgacccaatttctcctacaaataggtgccaacttctctgaaaattgagactccgagctcggctttactttgggcaaaacacaattattttggggctctgagatagagaagtgagactttaatccaaaccttccagggaaagacatcagatttcatttttagccctccgttcctcccacactcagaatttttcttgcctgacagttatggaagtcttttgaaaaagtcctcattttggcattatcttgacaaccgatgatacctcatgcaaatctagatagagggggaaagaatattataacatggattttctttttttttcctgttcactaagttttttaactgttaaaaaattaaataattctcatttctta

SEQ ID NO: 220662 - DNA, 907 bp, Homo sapiens
gtccttatatggtgctttttttgcaatcccagcttgtggcgtactgtaataaatcaaatcctgcctaaaaaaaaatacatttatggttgaattgctaggtgtgataaaatgcaatcattgaacaacataagccttctttgctcctcatcacaattcaaatattaaatgttttgctattactattcagtaaaaattcagataaaatgtagcactcacgtttattctagattgcattgagattttgagtggcatgtacattaatgttataaaaagaggccgggcatggtggtgggcgcccgtagtcccagctacttaggaggccgaggcgtgggaatcgcttgaacccggggagcaggggctgcagtaagccgaaatcatgccactgcgttccagcctgagcgacaaagggagactctgtctttaaaaaaaaaaaaaaaaaaaatctaagaaatagagtgtcttgcagaatctgaattttttttcaatgtaatgcactagaatgcaagccagactgaaaatactgtatagagcagtgttttttctaatactctaacatattaaactaaaaatgtacttattcatattctttcattgtatgtaaactttgttcatataaatctatatggccaatgataagaaatgagaaaagttaaatttgttcttaaaaaataaaaatttttataaattaagttctatttcttccaaagttatcgatataaatagcaaagaaggaaataattgctcttgaactattcattttctgatctgtctttccagcctgggaaacaagagcaaaactccatctcaaagaaaaaaaaaaatgatcgcctttattatggagattttcaaaactatattttaatcaatccatatatatccatcatccaactctaatcattaaattcgt

SEQ ID NO: 220663 - DNA, 451 bp, Homo sapiens
aataggaggaataaattctagtgttctagaacaccatacattgactaaaattaacaatttattgtatattttcaaagggctagatgagcagattttgaatgttccaacacaaagaactgataaacgtttgaggtaatggataagctaattatcctgatttgatcattacacattgtacacaggtactgaaacatcacactgtactccataagtatgtacattatgtgtcaattaaaaataataaaagtaaaaatatacacataagtgtacagatatagtaatgcataggcattacaagcttaacaattatgccattgaagctttctataatttgattttcacttaaatttcaattgatccccctgcaaattaaatgctcttaaatgaaaaagttcctatatgaataatataataaactctgacttactttaagttaaaagacattaattta

SEQ ID NO: 220664 - DNA, 134 bp, Homo sapiens
ctatttcaacttcctttttggcagatgaggaatttgaggccccaagtgatgaggaactcacattaagtcacatagcaaatgacacagagagcaaacctgtaatacacgagacctgcatctgcactcatcatctt

SEQ ID NO: 220665 - DNA, 225 bp, Homo sapiens
aaaatttcactggcccagtccagggctgcttgagtgttactgttttgtgccacaatatgatgtggccagactacttttctagtttcgagattattttggagctttatattgggtatgttcttatccaactatcattaggggcattgatctctgatgcccttttctttcttatcttccaaatggcaggcagtaaatggcttattaagcaagtataagattcaagat

SEQ ID NO: 220666 - DNA, 105 bp, Homo sapiens
acagccacaccttctgactctctttctgtagtacttgtgacaaggcctttgcccgtgatgtccccttttcacagactcttctttctacctgccttctcctacctc

SEQ ID NO: 220667 - DNA, 525 bp, Homo sapiens
atccaatcaagtttcagtattttgcatggcattctcactgcctcactttgccaggcatcgtggagttgaaaaacaagtcccaacagaatttgctcaaatatatctcatcgtgtgaaaggaatcacagagaactggatgatgtaatattgactgcctgttagtaaagagaataagcatgtccgccaaagaattaagcccaagagccagagatgcagaggaaatgatgagagggttgaaatggtaaatgaagatgtcaagtcatatgatgtgtggacccaggcgctgcggcagcacctggaacctttataagcacctcttccagaatggtacagattttctctcacaaaatgtacgactatatatcacactcttctgtttgatcatctttattttcgtatgtctacatgctaccatcaagcaacatcgtttgagccagaacaaaggctgctgccttccttcagttaacagcaggttttatttctctgccctgaatcctatgtagtcaaataaatacttttgtcacag

SEQ ID NO: 220668 - DNA, 395 bp, Homo sapiens
tgcacagaggggcaactgggtcagattcagggtctccagaaaaagttggggcccagggatagattcaggaggaacccacacagttttccagaggataagactctcagcggggcacggtggctgacgcctgtaatcccagcactttgggaggccgatgagggcagatcacctgaggtggggagtttgagaccagcctgactaatatggagaaaccccatctctactaaaaatacaaaattagccaggtgtggtggtgcatgcctgtaatcccagctactcgggaggctgaggcaggagaattgcttgaacctgggaggcagaggttatgatgagccaagatcatgccattgcactccagcctgggcaacaagagctaaactcggtctcaaaaaaaa

SEQ ID NO: 220669 - DNA, 422 bp, Homo sapiens
tatgtgcctgtaatccagcactttgggaagctgagtgggcagatcacctgaggtcgggagttcaagaccagcccggccaatacagtgaaacctcgtctttaccaaaagtgcagaaattggccgggtgtggtggcacaagcctcctgagtagctgggtttggttttccccagggccatatgtcagcttatttaccctcctcacttggtgtctcccagcctgccagcccatgctgttcatccagtatctgctgaatggtgattacctattaagtggaactaacacaaaattgcttatctaaaagcaattattggtgattatttccttgcagtggcccactagagggcgccattgttaagtgtaattccagtaggtgttttgtgttttttttttttaatggaataaactgaaatctttacatggt

SEQ ID NO: 220670 - DNA, 320 bp, Homo sapiens
atttctagaattctgcagtcaagacatatgaactgccttcatctttatcaccaagtattacaaccagtcgtaaacaacggtcaggacagctcttttgcaaggaggtcaaagtcctgccaacatcgaatcctgcagaatactcttataagtaaaacctcagtacgtaaatacaatccatatttaaccaaaacaaaagctgaggctcagagaagttaaatgaagtgccaagggtcggggagggctttggggtgattcaagcacattacatttacggtgtactttatttctattattacactgtcatatatcatgaaataatt

SEQ ID NO: 220671 - DNA, 614 bp, Homo sapiens
gcgatgagagggtattgtctacagtggctagagatgcatgaaggggtcacggtcacataggaagctcctcagagctgggccagggacaggaagtgacacatttcaccagcccccactgctaccacccgctccaaaagagaaggcagagccagcactaggagcctggatgggaggccaagagcctggattccaggccaggatcccagatgggagtccaggagccctgatgggaggccaggagcccagatgtgaggccaggggcccagattcaaggccaggagcctggatgggaggccaggagcccagatgtgaggccaggagcctggctgggagcccaggagcccaggtgggaggccaggagcccagatgtgaggccaggagccctcatgggaggccaggagcccagatgtgaggccaggagccctcatgggaggccaggagcccagatggaagcccaggagcccggctgggagctcaggagcccgggtgggaggccaggagcccgggtgggaggccaggagcccagatgcgaggccaggagctcggatttgaggtcaggagattgagaccatcctggctaacatggtgaaaccctgtctctactaaaagtacca

SEQ ID NO: 220672 - DNA, 532 bp, Homo sapiens
cttccactcagggttcatccgtcacgctcctttcgccttgaggggcactgagggccctgtgggtgtgtggggcccgcgtaggggaggctgaactggacacacacttggctcggtctgctgggagacgtttcggggttcccagtcatgtcgtctctacctgtaggagcagcagggagtctcaggacaggatggccagggccagaggtcacctggtgaggcggacatgtactcccaacctgggaggtgtggggactgcaagagaaacagagctggcagtgggaggctggacgtggtaggcaatgccggtcctggagccgggcccatgaccgttctcacggcggcgagctgtgatggggaggctgccttccaggtgccaaggttagaaaacaaatccggggcagccctgccgggagaaagctggtattctacaaaggcgcgtgaagaggtgaacacgggtgaacacgcagtggggaaaatggcgcgggttaattgtttattaatcacaggcagctcaccaataaaaccgtcacca

SEQ ID NO: 220673 - DNA, 506 bp, Homo sapiens
acttcctggttcaagatggcatctgtgtcctcgcctgctggaaagggccaggagcctttctctagcctcctttatgagagcagtcatcccatcccaaagtcctcacctcctcataccatcaccttcggggttaggatttcaacagataacaaacattcaggccatagatagcgccgtgtcttacagcaacagtctttctcatgctccttcaggcttcccagtgctggagtattgtaaacaaaaagaaaaagagcaggaagatagtctgtctgttcacatctctctttgattggccctataccttaatctctaacagtcagaaaatcctttatgctaaaattaccttaggattatttatgtgagaattttctccttcatagtcatacaaacatttttgtgccaatttcccctattttattggtatgccactcttgtgtatttcatgtgcagctttttcaatttagaaaaatattttctctaaaattaaagaaatgtgttttaaaatc

SEQ ID NO: 220674 - DNA, 373 bp, Homo sapiens
aataacttttcatcagtcatcagttcagcaagtgcactactgtaatgagctgttaagcatctttttgaaattaaagacagcttacaccctgatccctatctctgtaatgtctgcatgccttgaggattagattaagagtgtatttcaggcaatgttacagtaatttatttcttgggacgtctgtatatatataatattttattcagtaatggattgagtgtttaaatatagagacagaagaggtggaattggagatctttcttggtgtttaaccatcatttaacccatctaacccaggttttctgttgttttgaagaataaaatgtatacatttattcacttttaagtaagtgaaatctcaggaagtcccgtt

SEQ ID NO: 220675 - DNA, 433 bp, Homo sapiens
aaatggtccaattgcgcaggcttctcactctgtttcaagaagtttagacttcagccaaagaaaggcagggactactgttactgaaggcttttaaaatccaagggtggcttgatccctctgattgcagcacagtgaggaggtcataggaggtgagagatgagagggggtgaaagaaggcagtggagaaagagaaaaaagaatggattagggggatgttgagaaagtagaattgacatgattttgtgactcattgaatgtggggaatgaaatcaagtatgctgcctgaatttctggcttggacatctggtggacagtggatcattcattaagaaggaatgcataggagagaataagatgaaattgcctggggacaatgttatgtttaggaacttgagaaaacccaagtggaaatttccagaagggagttgaatat

SEQ ID NO: 220676 - DNA, 1295 bp, Homo sapiens
ctagtatatattattactggcattgtgtacttctggatatggtgtatgagaaaggacacaacattacttctgaggtattcttgccaaaatatatattattactggtgaaattaacattgatctctgggttaaagtggtgtcttccaggtttctccactaaattaccatttttccctcagtgactaacagatatcttggggaaatactttaaaactacgcaaatattgccaggcgtggtggcgtatgcctgtaatcctagcactgtgggaggccaaggtgggcggatcacttgaggtcaggagttcgagaccagcctggccaacatggtgaaaccttgtctctaccaaaaagtggtggtgtgcgcctataatcccagctacttgggaggctgaggcaggagaatagcttgaacccaggaggaggaggttgcagtgagccgagatcctgccattgcactctagcctgggggataagagcaaaactctgtctcaaaacaaaaacaaaaacaaaactatgcaaatatcctgtttcttgtaccttcacccactagttttagcatctatggatgattcttgcctgccacaattattactatggcatttgcctattagtgattttctgtttccttcatttcttctctattaataggaattcttctctaagagagagttattctcctccctcatttatttttttatatcaatatgggctgatgaatatttattttattttatgggttataatcgaacactgtcattatttattttgttgctccagtggttccagctctgggcattaggagcttaaacaggttggctcctgtatcctttcaacatgcctcattatttttagtgctttcttgctttttgatgcttactttttaatctaggctcatcttgtactttctttgccccaaccatggaattgatcttttctccaaagaactctgattccttttattggaaaatggacttaggaaccaagatcttggcattgagtagtctcattgctactggggtttcattgcttctgcgtcctctcagtggacagagtttggaaatatatgcaggtatgctaacacacatacatatgtttatatttgtaaattataaaattgtataattttaaatttctgtattataaaattatacatatgttataaatctatgtttatttcaacatatatctgtataactattaaggaccacaatgaatacattcaaaggtaaatgtgtgaatatctctaaggcatacttctacttatctcctaataataaagagagtaggtccattac

SEQ ID NO: 220677 - DNA, 530 bp, Homo sapiens
ggctgggagtgcagtggtgtcacctcgccttgtatgtcatcgccggttgtgtgcctaacatacatacaaaaaggataactcgaatttagccatcacgcattttcaaaaatactgcttagaaattgaatgtttggagaaaagatataatctggggtttctacacggtctgaattgggttcatttccgtttagcaaacatttattgagctcccagcgtgggtcacagaattcagtaaacctgatcccgtgttcaaggtgctatattccgatgcagggcagggcgatgcagtgaaagaatggtgaccacagcagtagcatgctaatagcctggtgggcaggtacaggttttgcatttctttggcgagatcacttttgagtgtctccactgggtggcagaattaagacccgtgaacgtttaatatctcctgtatatttagtatattatgaatatatactgattaatgaatattaagtgcgtgttgtatatcttgtgcctcatgaatattaaatatgacctggtcttgccagcct

SEQ ID NO: 220678 - DNA, 394 bp, Homo sapiens
tggaaaaaatgcatttcagaaacagctcagctgacttctggtgccgaagtcaaggcttcttgcctgtggctaaatttccttctagccgggcacagtggctcatgcctgtaatgccatcactctggtaggccaaggttggaggactgtttgagctcaggagttccagatcagcctgggcaacaaagtgagatcctgtccctacaaaaaaattagctgggtagggcagtgcgcacctgtagtggatgtggtggttgcacaccggtagtcccaagtactcgggaggctgaggcaggagcatcacttgagctcaggaggtccaggcttcattgagccaagatctcgccactgcactccagcctgggtgacagaacaagaccctgtctccaaaaaaaaa

SEQ ID NO: 220679 - DNA, 363 bp, Homo sapiens
gtttacaccacaaaaaatttaattatcagtcatgtactatctgggtcaactaaaattcttcttcatctgtcttcactctaggatccaacgtgaaggaacagctcctctcacgaacactgttggtctcctggatggagaaggaatgtggtgaaccctgagctgactctcagggcctttgttcagaacattttacttctgctcatatgtcataggacaaagcaaattacatggctgagctggatgcaaatggggaggggaagaggactcttcccacagggaggggcataagtcacacagccaaggctgatgtcaacagggcagggatgtataatcctcccacagggaggagtagctaatattttt

SEQ ID NO: 220680 - DNA, 601 bp, Homo sapiens
acagattcaaaaaatgctatactgaaaaatctagaaattacaatgatacactctgggaaaattgtgttgaatgatttattgaaagtgagaatgcatcagaagagtgtgataaactgatttaaagaaatgcatagtattcattataaaaaagttatcccagtagtttcctattatattattttatatataattttgaatatggagtaaaaataatatgaagtattgatacataggtatttgactatttgacataaatttctaaaagcattgatttgggctaataatttattttttaattttcaagtttcctccttgggaaaatggaaggctgtatttgaatatacaaggcagtgggtgttgggtgtcaattgcttgcaagtcctgtctaatgtgtcaggagccagtggatgggttatctctacaggaatataatcaataaggtgtgtattcaggtcgagctaactgcttgtcactttttctctctcatgaagtgcagctaaagaaaatagtcattctcttcttaaagtattaagatccaggccaaaggaaatggaatagctagcggctgtttaaaatgtgggaaacatagcactgctaacca

SEQ ID NO: 220681 - DNA, 425 bp, Homo sapiens
tcatctgtgctccctaccctcagtccactgtcctgagtcccatgcaggatgggtgccccgtacacttggcattgattacctgtccttgtctgcccacatggtctacaccgtgggtctgcatcagtataagagtcctgatcccggccaggcgcggtgcctcacgcctgtaatcccagcactttgggaggcagaggcgggtggaacactgaggtcaggagtttcagaccagcctggcccacatgatgaaaccccgtctctactaaaaaatacacaaaaattagccgggcgtagtggtcggtgcctgtaatcccagctactcgggaggctgaggcagaattgcttgagcgcaggaggcggaggttgcagtgagccgagatcgcgcaagtacgctccagtctgggcaacaagagcgaaactcgatatca

SEQ ID NO: 220682 - DNA, 523 bp, Homo sapiens
cttggcctcccaaagtgctgggattacaggtgtgagtcaccgagcctggccctttgttttaagatgtagaattttaaacactcagtttagtaagactacatttatctagaaattagtcttttatcaatctctgagtacaatccagactcaaaataaacaagatgtattttaatgtattccctaaattatttatttttcttgagacagattctaggtctgtcaccctggctagagtgtagtggtgtgatcataactcactgtaaccttgaactctcgggctcaagcagtcttacccattagcctcctgagtagctaggactacagatgcatgccaccacacccagctagatttttttgttttttgtagaggcagagttttgcagtgttgcccaagttggtctcgaactcctggcctcaagcgatcctcttgcctcctaaagtgctggaattacaggtgtgagccactgagcctggccctaaaaactgtgtggtgcctactatgaaggactctgatctgacaata

SEQ ID NO: 220683 - DNA, 384 bp, Homo sapiens
ataaaatagaccattcctcctctttgcctttttgaaaagggcaaatattttacctgtataagactgaaaattcattttcacatctgtttctattgccatcttgtattatttgcagaatttactttttgggttcctttggataaagcaagcactggccttgttataaaatgagggttatctcaggtgaattacagttcttcagataaccagtttcaagtacaaatgaggacaagaatggctgaaaactggtgcaccacacaactgggtttgccttttgtttgagagtgaaaagagctaaagaaatagggatggtaggtgccatgctacgtggtttatattaggtgtcagtaaaaaaagaactgagttgtatatatgggaaacttc

SEQ ID NO: 220684 - DNA, 489 bp, Homo sapiens
taaaagaaccccatctgaaaatgtttagatttcctgtgactgtcccgtgaagagggagataatctgtgttcacggaactaagaggagagggagagacttggttcaggtccaggaggccaagagtggagagaaaaaggaggacaacatgagagctattcagagaaagctgtgacatttttatggatgaaatagaaacaaataggagtttgtttctttgcacttcagtgatgtcttcttgtttgtatttttggacaacactcaagccatgtggaggctctggcctcgttctagtagcagtggtttgtggtctttggaggctctttggcctgggaccgggcgcctttggttctcatctcccttgagttggcttctaccaggatgtgtgatcctttggaactctctcttcctccctcggagcttccatagcttatctcaaggtggaaataaaacctcctgctgggcctgcctcacagagaaataatgggtatg

SEQ ID NO: 220685 - DNA, 641 bp, Homo sapiens
ctggaattttccatttaatatttttggaccacagctgatggacagtaactaaaactagagaaaatgaaactacagataaggggggcggggggactactgtattctaattatcttttttgcctacctaggggttccatattttgatgcagtttagttggatatcaggcaactacacatgggtagacaaagaaatgaacacctttgcacctgaacagcaacagctaaggggacacacacagagggaaccactgaattctaaccttggctgaaacttaattgggtgtggattggggagaagatttctgggtgtattgtgtgtgctgggagtaatctatcaagtattgattgggttcaagtgtaggtgctgaggagttaccctcagcttctccattcccctaaaaattctctaggctgaaatagcctttctaggcattcactcaagtaaggtggagaaactgacccatgtaaccgggaaatgactacaaccaggaggagacactgaggctaatgtgttgcctataaagtctcatcctcaagttgatgctatccaagaacaaataacagaacccgtgcgggacagggaggcttcctgaccagaggaccagcagcagtggaaaaaggcagccggggaaatgtacccc

SEQ ID NO: 220686 - DNA, 433 bp, Homo sapiens
tgcggtggctcatgcctgtaatcccagcactttgggaagccgaggtgggcagatcacctgaggtcaggagttcgagaccagcctgaccaagatggagaaaccctgtctctattaaaaatacaaaattagccgagcatggcggcgcatgcctgtaatcccagctactcaggaggctgaggcaggagaatcgcttgaacctgcgaggcggaggttgcggtgagccgagatagcgccaatgcactccagcctaggcaacaagagtgaaactccatctcaaaaacaaataaataaataaataaacaaataaatgaaaagaaaagagatttattactccatccaaaacagttaaagttcaaaaggctgacataagcttcaggttcatgagccatttatttctggattttcgtaacctttctttaaaagtcttatacta

SEQ ID NO: 220687 - DNA, 498 bp, Homo sapiens
gtggaacctgtgttgaaatgatgcatgtggttattgatgaagttgtagatgtgagagctggttctgctcatgtctgactaacacagaggcttgtgataattgtcccttctttctcccaggccactgaaatttgtcatctatgaatgaacagactaaaacagatgtcttaatgattttcagatctaatgttctgtaatgctgtgaaatcaataatgtgagatgcaacataacatagtggatgggagcacgtgctcctgatccagatgctttaccacatactgtctgtatgaccttaggcagggaacttagccttttcgtgtcttagtttcctcactgtaaactgaagataatagtacctacctcatgttgtaaagaggaatacgcgagttaaatatttgtaaatgatttgagtacttgtgtctggcacatagtaatcattataagtgctttaaatgagtaagtacaattaaaatacagattgctcccaatttaaaatga

SEQ ID NO: 220688 - DNA, 470 bp, Homo sapiens
actctggtttaggagggtgtcccaatggggcatggattggacaatgctctccagcacttccatccaaaggatctagggcttcactcaggcagcgcggtgggaaggggagactaggatcagcgtgaaagatgctcattaaagaagacaagtgctgtggagagtcagaggaaatgtgatgattttgtctaaaacgcatctgggctttcctggagcctctccctgccggctgctgggtagggagatttccttttactcaacaacacacaggacccctatgctgtcctgggaagccaagttttagggcctcctgcctcctggctactctgcagaggaccaagctcactgtggcagagccccctcagagcccctgcccacggggaagttgggtgggacccctcccgcccttctcactcctgtccttcagctggagcctgcagggcacacacatggcgccattcattctggtatct

SEQ ID NO: 220689 - DNA, 356 bp, Homo sapiens
catgccatggggagagtatttggaaggaataagtagtagggacaaacatggctgggatactcaggggattttgttggttttgactttatgtttccttaaatccaaagttaaaatagtttaattgcaatcatcactgactaatccattaaggattttaaagaaaataataccacgtgactcctaaagacccttttgtttgccatttctagttttgaaaggttttaaccatgatttctttttcaagaaacatttcaattgtattttttagtatttaaccaaagaacatagagtgattcttcctcaagaggaaattattatagaagacctatttatatatatatatatcatattcaact

SEQ ID NO: 220690 - DNA, 429 bp, Homo sapiens
gatgatgtagatttcatgaagttttgggggtagactgaggaaagactcctatccactcaaatcagcaaaacttttccctaaaccctctttcactaggatgtcctgattatttttttacgcaaacctaaacagttttgagagtaaaagaagaaactgttaataacgacatcaggactttgggagaccgaggcaggcagaccacctgaggtcaggagttcaagaccagcctggccaacatggcaaaaccttgtttctactaaaaatacaaaaattagccgagcatggtggcacgagcctgtagtcccagctactcaggaggctgaggcaggaaaatcgcgtgaacccaggaggtggaggttgcagtgagccaagatcgcaccactgcactccagcctgggcaacagagtaagactccgtctccaaaaaaaa

SEQ ID NO: 220691 - DNA, 523 bp, Homo sapiens
gctgtcttcctggctccattcctctcattccttgcagagccagggaggctggaaattatagtagctggttcactaggactctgtgaagtcaagccatgggccctaactctgcccagaggcattgccctggcctctgaagcatctggcagtctgcttgatctgctacccattttccttctagggcctggagcctcccatacctttggaagttgtagctccaccccttagctgtgaaaccctaggcatctaacatctgtttctcagtttccctgtttgtgaaataataatagtgcatgtttctcagggtgctgtgatgattaaataaggtgctgtaaaaagcacttagcacgtagcctggcccatagtacgtgctagtaaacgggagccatggtgatgccaaggactgttacccatctccaggccaccccatcctagcaatagcctgttagctttggtgggatttggagcctgtggccagcaagtgtgagccttgtctttggccttcctgctactgttgtctggc

SEQ ID NO: 220692 - DNA, 414 bp, Homo sapiens
aggtagctataaactgttgaaggtgggagaggtcaacaaaatgaaggtttgagccttcttctactctggggccccccacctctgagtcccagcacttccccccagctccaagccaggttgagggggggcaggggggcaagggggcccaaggcagctgcaggggctgtgttagtaaacactttcctgggttcccattttctttacaccccccacccttctctactccctgatgccccgttatacactcccacccccagcatccccttttctgtggcctgcacaatgagctcattgtcccgggtgtgatttgaataagggatcggtgggcctgttcccagcattgtccaaggggctgggaaaaaccccagcgcaggcaggaggaccagaccagacagagacagatgcctaaattag

SEQ ID NO: 220693 - DNA, 202 bp, Homo sapiens
ctgggcagaagcacccatgcatgacgaagctcttgggttagggtccagtctgcctggagctgaggatgcttgtaggagaacagtaggcactgaggccagagatcagaaaggacttcctatgttgcgataaggccagctcctgcctctcctaagaagtactgggtatggctgggcgtggtggctcatgcctgtaatcccagca

SEQ ID NO: 220694 - DNA, 1066 bp, Homo sapiens
tggcagccaagcgcggtggctcacacgtgtaatctcagcactttgggaggccgaggtgggcaaatcctttgcttgaggtcaggagttcgagaccagcccggccaacatggtgaaaccccgtctctactaaaaaatacaaaaattagctaggcgtggtggcgggcacccgtaatcccagctactcgggaggctgaggtaggagaatcgcttgattctcgcttgattatcgcttccgccaggaggtggaagttgcagtgagccaagattgtgccactgcactctagcctgggcgacggtgcaaaaactccgtctcaaaaagaaagaaagaaagaaagaaatccccactggctccccagggctctaagaactcaagccaaagtcctctccgccgcccaaagacctggggctggggatctgactcttccccacctctctgatctcccctactccacctcctttccggcaacattggacccttgctgctcttctaacttgccagcaagcctccactcactcggagcctctgtctggatccttcttgcactcaggcatcagctgggtcattcccatctccaagaggcctccccggcatcttccctctcccaggcactttgaaggacatggaacttgctctgggacatttccttgttcaggagctgatcagtcactgcgagcctcgggttcagtggagcatcagctccaccaggacaaagatagttttctgtcttgttcacagctgtcttctcagagcgaaaaacagggccttggcctggcgcggtggctcatgcctgtaatcccagcactttgggaggctgaggcaggaggatggtttaagcccaggaggtcaaggctgcagtgagctatggtcccatcactgcactccagacgaggcaacagagcgagaccctgttttgctttgttttgttttgagacagtttcgctcttgttgcccaggctggagtgcagtggtgcaatcttggcttatggcaatccccacctcctgggttcaaacgattctcctgcctcagcctcccaagtagctggaattacaggaatgtgccaccac

SEQ ID NO: 220695 - DNA, 366 bp, Homo sapiens
tggcagccaagcgcggtggctcacacgtgtaatctcagcactttgggaggccgaggtgggcaaatcctttgcttgaggtcaggagttcgagaccagcccggccaacatggtgaaaccccgtctctactaaaaaatacaaaaattagctaggcgtggtggcgggcacccgtaatcccagctactcgggaggctgaggtaggagaatcgcttgattctcgcttgattatcgcttccgccaggaggtggaagttgcagtgagccaagattgtgccactgcactctagcctgggcgacggtgcaaaaactccgtctcaaaaagaaagaaagaaaagtcaacacgcccgcgaatttagtagtagtaggcgg

SEQ ID NO: 220696 - DNA, 531 bp, Homo sapiens
ccatgctgaggaaggccatgcaacatggaacagccatgcaaaagcactgcaatcaacaatcctacctgaactaagccttcatgtcatttcagggcagctaccaaacttgtgagtgaaaagcctccagataagttaccaatgaaaagtccatttttcacatggaataggaagcaagaccatgtgctaggaataaggaaattggaattggatagaggacctgataaaagtgggaacgatttagaagagcatctgtggtaaatgacaagaagactgcagatagttaaggaatcatcaagccatatagagagcctggagcaaactggaaacaacaatctcccaaacagtctctaggctatacattaactaagataaaggtaggcctagtggtgcatacctgtaatcccagcactttgtgaggctaaaggaggaagacgacttaagcccaagagtttcagaccagcctgggcaacatagtgagatcctgtctctgccaaaaataaaaaattagtcaagcatggtggcacataccta

SEQ ID NO: 220697 - DNA, 289 bp, Homo sapiens
tacatatcgaatcgagctcgtacccaggtcttttcccctcaaattagaagaaaaagataatagagaattgttctattttcttacccctagtgttcataatgtgcagattacatacagtagaactgtattcagtttacctgagaagatagaattcatcaacccaattccatgattagggtatgtgtatggggttctggctgtctttaggtgggtgctagaactggtaactaagttgaagctaaattgctttttagttcattgatttagatagtacattcagctgcgttca

SEQ ID NO: 220698 - DNA, 508 bp, Homo sapiens
cagaaaaaaaaaaaaaagaaaaaaaaatcacgaggcaaagaacagtatactttcattttagtcaacagtgccaacttttcgtagttatttgagaactggtcacatacgtatattgtgtcaacaaaatagtattgccttaactttctggaaagacaagtcttaggataattgaaactcgaggggaaaattggcgttgttttcaaaggttaaaaaatcagattagaaattgtggccctggaccaactttaaatttcccctcaaattagaagaaaaagataatagagaattgttctattttcttacccctagtgttcataatgtgcagattacatacagtagaactgtattcagtttacctgagaagatagaattcatcaacccaattccatgattagggtatgtgtatggggttctggctgtctttaggtgggtgctagaactggtaactaagttgaagctaaattgctttttagttcattgatttagatagtacattcagctgcgttca

SEQ ID NO: 220699 - DNA, 437 bp, Homo sapiens
tatttttaattattatggatacataatagctgtataaatgtatgggatacatgtgatgttttgatacaggcacatagtgtgtaataattgtatccaggtaattggtgtattcaccacctcgagcatttattatttctgttagaaacattccaattcaattttcagttatttttaattatacaagaaaaatttgggaggctgaggtggcaggatcacttgaggccaggtgttcaaaaccagcctgggcaacatagcaagaccccgtctttacaaaaaaaattttaaaaatgagctgggtgaggtggtgcacacctgtagtcctagctactcaggagactgaggcaggaagatcacctgagctcagaatttgaggctgcagtgagctatgattgtgccactgcactctggcatgagcaacagagtaagacactatctct

SEQ ID NO: 220700 - DNA, 495 bp, Homo sapiens
tctactcactatttggaatagtgtttctttggggatattttaatattactaattaatattacttatttgttattatttattactttaatattactttaatattacttatttagtagtgttattacttaaacactatttggaatagtgtttctttggggatattttaatattacttattaacctattagactttatgtttttgttttgaaaaatttttgcttctcttaatgattgaattcccacttaaatttagaatttggacaggttctctgtattataattccagcctatccctttagtctcatattcaaccacttccctgtacttctgccttattagactgcttggtattttcagactatggtccatactttcctttattgactcctttcctcttgttggaatctcacttatgttgaaggccattataaatgcttcctcctctatgtctttcgtgagctctctacccaaattggtcgttttgcacttctcttg

SEQ ID NO: 220701 - DNA, 430 bp, Homo sapiens
gcacgagatttgacttacatttcttactacgaacatacaacaaaactacaataagtatatcaaagataaatacatcggtgaaacattaaagaaacaaactcaagtaatatgtagatacatagttatatgttaaaatcatgggtaaaagcccaggcacagtggctcatgcctgtaatcctagcactttaggaggccaaggcaggcagatcacttgaggtcaagagtttgagaccagcctggccaacatggtgaaactccctctttactaaagacacaaaaattagccgggggtggtggtgcgagcctgtaatcccagctacttgggaggctgaggcaggagaatcgcttgaactcaggaggcggaggttgcagtgagctgagatcgcaccactacactccagcctgggcgacagagtgagaacctgtctta

SEQ ID NO: 220702 - DNA, 357 bp, Homo sapiens
aattgccaaatggctctaaaataactatgtattctgacctcttcatcaattctctcctgggcaatatttccataagaaaacgggaagaatggtgctcatgcctaggagacctttttatttctccaagttatttgctctcactgtaccttgcaaaggcaaggccctgttttactgacttcaccttcctgtcttcaattttcacatcagatctaagggatacctggttcacacatgttaaaatcccagctcatttttcacgtcagtttattgacatcagtttctgtcagtattgttgggagcaggcaagagttaaatatttaatacctttctctctctactcttacactcacaagctaa

SEQ ID NO: 220703 - DNA, 480 bp, Homo sapiens
gaaggggctgggatgtctactgacatgtgtgtttttcttggtcatcaggatgcaatatcagcttaggcccaggagtgctgagagcagcctctttgggaactgggttgagcacagccagtgctctcagcagccaggcaacaaattggaaagcctcagtctgtgcctgataaatgcccgtgggtgggtttcccctcccctcccggcatcaggctgataactggcgctctgcccctccggcttcccgagacactgctgtttacgtgatgcatgattcacactcatttattgccagagagtacgatgctttgccttggtactttattgagagcacaataaaaataaagatgagctactaataaaatgtcaaaagaaaatgtcaattagtattaccaaaaagaaaaaaaaaagagaggctgatgttattgtacatcctctcagtgaattccctctaattagtcaaataaatatgcagtcctccca

SEQ ID NO: 220704 - DNA, 508 bp, Homo sapiens
ggggaaatgctccatggctctcaacaagggtgagataatactcttagctttatttctgatactgctctttgacatctgttggctatttttcaaacttcagcacaccacatcagtatcttcaagggaaacactcatggtgacgtaacaaaccccttccttcactgttgcatcttcaccaatggctcagagcctaggtaatgtttttctcaatgcattatccagcttcaacactgctatgggactttgggcaaatcatctaagctctgttatgtctcggttttctcatctctaaagtgaagataacagaactttatacttcatagggttgagtgtttagcccaccaagtgatcaataaaggttggctgtctttaggttaatgtcccataattatcccaattttggtaaggaagaattctcctaagaaatcttttcaaaggcatatttaagatgtaataaatcatgttactgacttgcaaacatatttatcctttcaaagaaggcttccct

SEQ ID NO: 220705 - DNA, 427 bp, Homo sapiens
cctctgatgtattgattaatgtattaatacctctgatgtattgatgcattgattgcttaagttgtttctcaggaacttagggtcagctcttgtccggcttgaaccagttgagaccacttggcctgtgcaaatgcccaagtggtggccttttgatgtcatagagccaaaaactcctccctcagatcatgctaacaccaccattttctgaatatgtgtcttatgaagagccatgaaccctgactgtttggcagatcacagaccacctcatttttcccactgttgttcacctttccctatgtcttaggccaatccacttctttaccccatatatatccttcaaccctatctttggagaggtggatttgagagctattctctcatctccatactggattgccctgtgaatcaatatattctatactgcaaa

SEQ ID NO: 220706 - DNA, 480 bp, Homo sapiens
gttcactgttgcgtgccagtcacggagaacaatgcctagcattgaggcactcggccagtatttttttagatgcatgagcttaattttgcaaggcttgctgggacctctgccctagtttaactgtgcacatttgaaagcatcgggtgagcttggcttcttgttgtaaaaccagggatttatgttgatgaagagttcgatcagggtagactcatactctaaagcatgttttcttgtgaatagagatgtttacaaagcacaaagcagtgaatttgctaatagttctttttactggcatcagctagggttctgaatttagctgaagcttatacttaccatgccatggtggaggttttcatttcctaatatgtacatgcatttgtctaaaagtaattagtttgtcttcagttatgagccacaagaggtcaggaccaccactatggcacctctccagaaaggggcgtgcctgataagcacaaaaaa

SEQ ID NO: 220707 - DNA, 353 bp, Homo sapiens
agaaagtactttgtaagccacgtacccccctttttaaaaaaaataatgccagagacagaaagcaaagtggacccacttactgagccccgtggccatgccctgtggcaggcttttgtgtgtgtccttgagaaggaagtgggattacccccctcttacaacaaagggaggcccagagaggagggcgcgggtccctcctgggtcttcccatgcgctgctgtgccctctctgggctgagtgccccaaacagtggcgcggatagtccgtatcccttggtttccctccaggcatccctcctaggtcctgtccccagtgggattgacctgcatttcctgttccgagtctttgtcatacta

SEQ ID NO: 220708 - DNA, 500 bp, Homo sapiens
tttttctttaattggtgacacatgctgtttttggtaacaaaatcatgtaaccactcccttaataagtgcactctccataatttgactttattttaaagagcaggtttttagttccagaaaggtacaaatagtagtttaatagtcttctatttaggttatgtacttttttttcagactgagtttcgctcttgttgcccaggctggagtgcagtggcatgatcttagctcactgcaacctccgccttccggtttcaagcgattctcatgcctcagcctcccgagtagttgggattacaggcgcccgtcaccacacccggctaatttttgtatttttagtagagacggggtttcaccatgttggctaggctgatctcgaactcctgaccttgtgatccacccgcctcagccttgcaaagtgctgggattacaggtgtgagccactgtgcccggcctgggttatgtattttaacagtgaagtctgcttgctcgcttgggctatg

SEQ ID NO: 220709 - DNA, 451 bp, Homo sapiens
gtgacataaaactactcttaacaaactcaaatttattaattaaaaaaagactaatggcttgataagatgttcacagtgttaagtaaataaaaaaagacgctagaattctatttcttgctaaaatatatatatacatgtatatataatacatacacaaatatgatatgtggatatagcattgtattaatgaatataaaactaaaacaaagctctccagcactgtatatacagaagtgatctgtagatgacaggatcgaatccctgcgtgatttgtattctttgtgctcgtctctatttttcactgttccacaaagaacatgtattatctctgtaacaagaaaaagaagaaaagaaaactgcattatatcattcaaaaagttgtctagtggtcacaaagacactattgaagatgcatgttgaaagtttgaataaagttggtttttaaaatgca

SEQ ID NO: 220710 - DNA, 506 bp, Homo sapiens
  misc_feature (25)..(25): n is a, c, g, or t
gaacgaaactcagagggtagggtgnaggatgtcaacagagaagttgacagagcagccacagaagctgaaatctcagaagtgaatagtgctaagtgggagaacgggaggaggagaaaataagctgcctgacaccagcaagtaagtgcaggtcgccatccttaatttctattttctagattatagaatgtggaatatgtcaactgatgatctagctcttcacagtgttacgtgtctcaaggaaaaaatgcaggtaagcatgttttataaactgtaaaggggggtataatgtcagctgtaaggctgtaatgtcaggctactttacaaccctgtgataattttgacttttgggggaaagaacaattttagggtcagcaaatatgctgatttacctagaagcatgtatttttaataacataccaatgtagtttttagatttagcaaaaagtaattatacttttaattgctattaaaaaattatattattgaccgggcatcacggctcacgc

SEQ ID NO: 220711 - DNA, 532 bp, Homo sapiens
tttctatataagagctgactagagagaaatgatccaacatcccttgtttgactgtaggtcatgagactgtcattccagagagggccctgccccacgtccagagaagaaaatgctcagagacgaagacaaatctagacagaccttgctgggttcccactcagtctattcacattagatcaagccctttgtgtccaatcctttttttagaggactgttcatacgttattaaacctaaacataaaaatggacaatttcccccatcgttgggtcttcgttctaaaggttcttatatgtacacatcacataaatttgcataccgtttctcctattaatccatctgtctcatgtcagtgacttctcagcaaacctttaggggccaaggggccccacactctccagcggcaggcacaatgggcctggggtgcagttgtggacactcggaccctccttggagctggtttagctgtgctgtgtgcttgtgggaatggattgccatgatttctgggctctaataaattgtgcttcaatcgac

SEQ ID NO: 220712 - DNA, 559 bp, Homo sapiens
cagaagagcatcttcgctgatcactggtggatgtttggtgtgattgttagaaccgggatggggggtgggtggagttcgaatttggaagtgttaatgcagtgtttttaaaaactgcaaaaaatcctggagtcagtacgaagtaacttgttttacgattgcacaaatgggatcatgctgtgaaatctttgaagactttttctcatattaacatgtacaaacatagcaaattactttggaagttaggtaacattccatatggctgtgttatttatttaatcaggtcatggcaatgaactggattatttccagcgccttttggttgtttctgttttttggcttttgctttgtcgatgagaacaaggactttgttcacaccatattttccagctaaatttagaaaagtgcttgacacatagcggtgctcctttattgcatcagtgttggcagcagacgcgttcatacttttacttgtgtactagggataaattcttcgaggtaggattgctgggtcgacacaaatgtgcttaaaatggacagttactgccaaattgctctaaag

SEQ ID NO: 220713 - DNA, 571 bp, Homo sapiens
tcagcagactaactgaggaatttgcctttttacagaagctttagaacagcccaagttggagcttccagttcagagacagagtcttctggtatatgtcagttgaaatgtggcaatcatgttttggttttacagatgtaataggtatggtagttccagagatggtttatttatttatggccctgtttactccagagagttcccaaattaggcaagagtattcatatggcttacatagatatatcattgccttcggaagttttaagtcattcttctatgactcagaattttcatctatcttttcttgttctgacagggaaaaaaaaaaactgcagtgctgaaaatgcaaccaattcaacattgaagtctgtaactactctcattctacggactcaaatttggaagctgggtaggggggtcagagaaaggaggggtggaaacagacacgaacacaattagttctaattcatgataacaaccatagtcaaatattttagtaacacagcaaagggagagagcttccctttgctgagcagccggggaagagcttcatgaagagagtgacatctgcact

SEQ ID NO: 220714 - DNA, 541 bp, Homo sapiens
ggcctctcaaagtgctgggattacaggcgtgagccaccgcacccagcctgaaatggtaatatttaagatgagcagttaagactccagttttacagcattggccaagtgtctaattataagcttcctggtccaggtttgagtctatgatagttcaaatagatatatggaagtagaatgaaaatattatgcttactataattaagatagtagtaatatcaaggaagaatccacatgttcagaactctttcaacaaactttttaacacattgagatattcttagttatttagtcatctttggtctacaccggaggtcctcaaccctcaggctacagaccagtacctgtgtgtggcctgttaggaaccaggccacacagcaggaggtgagcagccagtgagggagcaaagcttcatctgtatttatagccactccccgtcactcacattaccgcctgagctctgtctctgtcagatcagtggtggccttagattctcataggactgcgaaccctattgtgaactccacatgtgaaggatgtagat

SEQ ID NO: 220715 - DNA, 553 bp, Homo sapiens
tccctaggtccataagaggattgcctaggttgtctttcaggagtttttatagttttgggttttacatctaagtctaatccatcttgagttgatttttatatatggtgtaagaaagtggtccagtttcgatcttctgcatatggctagccagttattccagcaacaaaggttattttaattgagaaaaggaaaatatttagatcaaaccttattaaagtgactgactctggataactgagagactttatatgaggctttttggctgtatttgtttgtaaacatatttcagctgaacatgtgtgctgtgattttgaaaacactgactactctatagtacatttgatttagcagagattattagctttcttcctagactgccctgcaaaatgaaggaactcaatttattaggccagctctggggtttcttcctactcccaaatcccaggtctacactttctaggtttacccagagaaactgctgagtggggattccctgcatttcttctatttactagctcccaagtgatgatcatgtattattaaggactcattg

SEQ ID NO: 220716 - DNA, 389 bp, Homo sapiens
agtttgtctcaaaaaaaaaaggaaggcgggcggctgtctcaggacacctttttttgtggtcagggctctggcaggctgaatgtgtgggtggggtggcctcccaggtgtaatctgagatgcacccagaaggctgccctgcctggaaatagccaggctgaaacctgaagtttagagggccattcttgtggtctaaaaactttcgggaaagattccacattccccaggaaggggggcgtcatagccaatcattcatttctctacctgccttagtttcgtcagataagaagcttgactgcaaacttcagaaatgcaaagactgtgtctgtcttcactgtgtagacatggggcctggtgccaagtaggttgaaataaacatctgttgaataaaa

SEQ ID NO: 220717 - DNA, 315 bp, Homo sapiens
ggagggagacctggtgccctgtctgtctagaatctgcagctccctgctcttctgttgaattctccttggtcaccccttttggatacattctgtttgctgctgagaccctgactgctactgagaatgtctcaacaatgaagggggaggctggatgcggtggcttatgcctgtaattccagcacttggggtgggcaagtttcgtcagataagaagcttgactgcaaacttcagaaatgcaaagactgtgtctgtcttcactgtgtagacatggggcctggtgccaagtaggttgaaataaacatctgttgaataaaa

SEQ ID NO: 220718 - DNA, 357 bp, Homo sapiens
gcacgaggatggagctaaaagccacagcacaagaacttcatgatgcacacacaagcttcaatagctgattcaatggccaggcatggtggcacacgcctgtaatcccagcactttgtgaggccaaggcgggcggatcacctgaggtcgagagttcgagaccagcctgaccaacatggagaaaccccatctctactaaaaatacaaaattagccgggcgtgttggcacatgcctgtaatcccagctactagggaggctgaggcaggagaattgcttgaacccaggaggcggaggttgcagggagccaagatcacaccattgcactccagcctgggcaacaagagcgaaactccatctta

SEQ ID NO: 220719 - DNA, 485 bp, Homo sapiens
aaagaatcacccagaaagtcacctgctggttccctttgacttcttgtgattactgaaacatcatccagtatgtggagtactgtggtaatttccatgacaactgatcctgattttccagataaagagaggaagctagtaagtgttaggaactcaaaaagcgtagtaagctaagttcttgtgatgctaagtagaatttttagctgaaaggacctttcagcagcaactgcctgattaaacctcttcctcttataggtctggagaggttaagcaacttgcctaagggattgctgtgtttgtggaataaactctggatcctcagcttagtatctctctgtgcctcctattctgcatgacttttttcattatatctcggctgaactgtgagctctatgaaggcggaaaccatgtctgtcttgttgatgagtgttttcccagagcctggcataggatctaagtattttttgagtgaatgaataaactgggtg

SEQ ID NO: 220720 - DNA, 270 bp, Homo sapiens
tatcctaattttccccactcaattcgatttttgagatgaactggcagctgcctattaccttttactttttcctctctaagtgatacttttagtaagcaatttacagctacctccaaggtgaatttgtgtgtaacttaattacattcacttataccctcattataattacagtagcttaaaatccccatctgtggaacaaaagatgtttccatttatcatgtttctattgtgtataagctgtccttaatattaaacaccacaatactctca

SEQ ID NO: 220721 - DNA, 229 bp, Homo sapiens
aacgccccgacagtgttctgaactgggttgaacacacaaaggatgctacaattttccacttgtatacaggtccctccaagacttcgcttctcaccatgattctgacattgatatgaaaacacacaagatttcacttctcaccatgattctgacactgatatgatcactgaatgaccgttttcagcaattcgggcctataaaagtgtgaaatagattttttttgaaagtc

SEQ ID NO: 220722 - DNA, 474 bp, Homo sapiens
aatcttaaaattcatatggaatcacaagttaccccaaacagtcaaagcaatcttaagtaaaaataatgaaacttggttgcatcacactgcctgatctcaaaatacattacaaagttgtagtgatcaaaacagcttggtactggcataaaaatcagcacacaaatggaacagaaccaaaagcccagaaataaatccatgcacttatggtcaataaatctttgacaaaagtaccaagaacacaaaatgggaaacgaacagtctcttcagtaaatgatgttggaaaaacttggtatccacatgcagaagaatgaaattggacccttatctcacactatatacaaaaatcaactcaaaatggattaacaacttacagaacacctaaaactgtaaaagtactagaagaaaatataggggaaaactctatgacattgatctgggcaatgattttttgaatctgaccccaaaatcacagac

SEQ ID NO: 220723 - DNA, 421 bp, Homo sapiens
tgtgttctcattgttcaactcccacttatgagtgagaacatgcggtgtttggttttctgttcttgtgttagtttgttgagcaagagggacatttttaaagagaaaagtaaaccatgagtttatattggtatttccaactcaaatttaagataacaagatttttacttaaactcctttattttagagtgtatctcctctcatatgcttaatattagcaaaattattcattagcttcttcctacaatatacttacagaattttacaatgtcaataacaatactatcaccaataaaactgctgaatatagttttatatttcttttgcagttacttttgcccttagaatatgggtcccattggaaatatacaaatgttttaaagtcactataagtaactgctttgttttccaattgtgtgtttat

SEQ ID NO: 220724 - DNA, 512 bp, Homo sapiens
  misc_feature (27)..(27): n is a, c, g, or t
  misc_feature (109)..(109): n is a, c, g, or t
  misc_feature (120)..(120): n is a, c, g, or t
  misc_feature (132)..(132): n is a, c, g, or t
  misc_feature (151)..(151): n is a, c, g, or t
  misc_feature (156)..(156): n is a, c, g, or t
  misc_feature (161)..(161): n is a, c, g, or t
  misc_feature (168)..(168): n is a, c, g, or t
tacaatgtcaagtgttcagatcctgtngccattgtgtatttttaaagtgcgctgaatttcgttcttttattgaccgaactacgaactgcagaaaaacaacttttctgtnggaactttacntaagattttctnaaagttccacactccggcntaagnatgcntgccttnagcattttgggcatagttctgttgatacagtgaactgtgttattgtttatcttctccagtttcctctgagctttgcagattagagtccttgcctgattatttttgtatagtttctggcacgtaatagtcgctcaaaaagtgttggagcatcgaagtacagatatttatcagcaggtttctcaagaaaaacaaagagtgtgttttggagcagaggtcgaaaggtgaggccgggagcagtgactcacacctgtaatcccagcgctttgggaggctgcggctggaggatccctggagcccaggagttcgcgaccagcctgggcaacatactgaggccctgtctctac

SEQ ID NO: 220725 - DNA, 445 bp, Homo sapiens
agatacagcctggtaattataaatatgagggaaatgaatgcagtgtggtggcaggcacctgtaatcccagctattcgggaagctgaggcaggtgaattgcttgaacccaggaggtggaggttgcagtgagccaagatcatgccagtacactccagcctgggtgacagaatgagactccatctaaaaaaataaataaaaagtttttaagggaatttaaagcatagaaccaggagactgaagtgagagtttatttaagaacaccaaataaaacaaagtacagatgatccctgatttacaatggtgctacctttgattttttggcgtcacaatagatttattgggatgtaatcccttcacaagtcaaggaatatttatatacattatagagggaaaataacataagtctgctatgttaacagttgcatcccattataaaaaatatatt

SEQ ID NO: 220726 - DNA, 353 bp, Homo sapiens
caaagtatttatctttttttttcattgctgtatccccatatccccagtgcctagaacagtgcctggtatataataagcactcaaatattcattgaataagtaaatatggaaagaaataaaggaggaaagaaagaaatacccagtaatacccagcctggccaatgtagcaagactccatgtctacaaaaaatacaaaataaaaaaactagccaggcatcatggtggtgcatgcctacagtcctagctactaaggaggctgaagtgggaggattacctgagcctagaaagtcgaggctgcagtgagcacggtcgcattgctgaactccagcctggatgagagagcaagacctgtc

SEQ ID NO: 220727 - DNA, 518 bp, Homo sapiens
aattatgagcagctatatttgtagctctgctaagggaatgtagacatgtctacatatgaatacagccctcacctgtatagacactaaaatgtaattcaggtatttcatttcattctctcatctcctcacttcaattttaggtgagaataccaattcaattctccatacatcaaatttccttctcctgaaaaatattataggatttgtggacagaattacttttatgtaaagtcttcatgataactgaattggactacgttgtgtttgcacccatataaatctaaacaagcctgagagcagctttatctctaactttctgtctgactttctcctgatggcagcatgacggggctggtcagtgatttccgggttctgtgtgtggtatggagggaaaacatcaaaaagagggcagagcacattccctcccagatttttccccaataaatgatcaagtaacttttcctgatgatatgaagacagaggataaaataaagattgattgtttttatactgttaaa

SEQ ID NO: 220728 - DNA, 373 bp, Homo sapiens
ctttgtccatcaaatgcaaggctactgctcactgatctatctctccgaaggttgtaataatattagaaaccacagctcatctttcattgacttttgagcctgactcagaaacaggagtataattattaatggctaaactactttatcttatcttgggagacaaatttcagtcatattagatatcaaaatattttcagggcacacatgcaagataatatgtaaataacaccaattaaacatttagtttcattctatagattttggctacaggagttgcccattccatggttcaagaaaattgctattaatagagctttcacatactgaaacctgtttttctactgactttcataatgaaattagagatgtttct

SEQ ID NO: 220729 - DNA, 528 bp, Homo sapiens
aacatgtcgaggctgttgctcaggatttcttactcctctcactgcacttccgtaaaactctccaagtgaggtttcaggaacacgcctttagaaggatggaaagaggtgttttgcttgttatagctaaaataaagactaggaaatccggggtgaaagaatgttaattgggtttattggtttagttatgtggtttttttttttttttgagacagggtcttcctttgctgtccaggctgtagtgcagtggtgccatcatggctcgctgcagcctccaactcctgagctcaagtgatcctcctgcttcagcctcccatgttgctgggaccacaggcatacaccaccatgcctggctaattttttaaagagatggggtcttgttatgttgcccatgctaatctcgaactcctgggctcaagcaatcctcccgtctcagcctcccaaagcactgggatcacaggtgtgagccaccacacccagccaagagcagttcttttttttttttggagacaggattttgctcttgttgcc

SEQ ID NO: 220730 - DNA, 530 bp, Homo sapiens
aatgtgcctttagtttggtttaactagagcatagatatgtgaaggtataagttcaggaaagagttgatagagtctaaattttgatatgagcataattttgaattaaggaggatgtattgggggctgggagcatatgattaccatatgcccaaagataacatgggaattcttcctcaaatttatccgttagaaaagaggggaataaccatgtattcagacctttatcgtactctcatattacagggttttcactgtcctttactttgaacaacaacaaaccaaaaaaggttaatgaaataaaatgaaacaggtgagaacaaatgtgcctgcaaagacttcagctcatgtagttagaaatgttcattgagaacatcagacagaatatttttaaggaataaacataaatttagtccttattctcagcaatatgacttcactattctgaggactgtatgtgattttaaacaactggcttaaagatctctttaagatgtcaatataagggttacatgaataaaaacctataagag

SEQ ID NO: 220731 - DNA, 676 bp, Homo sapiens
tattcaaaattgagaaaattgggtggttataggattaattaaagaagactttgttttctcacattgtcagtgtgttgactttcaaccttagacttactcccatggccacaagatggctacagagtctcgaagtattgtgtcctcacattataatacatagaggcaagcctatgaaagtggtccctgtctgtgtgtgcgtgtgtgtgtgtgtgtgtgtgtgttttaagaataaggaatactttcccagaagctcccctgtaggcttccatacatgtcttatccagaatcagttcatgtcgccggtagggtctaccatgataatgatagacaaacacatttgaaagaaactaatggatttaaccaggttatttatatggaatttacattgcagtgaaacttcattgctatgacttggactattatttactaaataattactattgtatttatattaaggaatactgatatttaccatttatgtatacagagttcctcaatttaaaatcacatccacttgagtatgtgtgtgtgtgtctgtacatttgcatgtataaaagaaaaacaaaatgtaaacatcatttcaaggtgaattaaattacttttaatttctcttcccattccaatagtcagtatttctaaaaatcaaagatacaaagataaaaatgctttgtatttg

SEQ ID NO: 220732 - DNA, 516 bp, Homo sapiens
gagaagagatgaagggcaaaggtgagattctgcaaatccaaacgggaaagaggaacgagaggaggggacggagaaggtggggacattctattctacgcttctcaaattaagttcaaaataaaagggaaggtgtggcttgagtcgctcttcaaaggggaggaggagaaggaagaaagtccatctttttatacgaaattcaaaaaagcattttacattttaaatattcacaataaagtaacttctagtcagtgtaactcacgatttatttacaaagagccttcaacaggttactttagttgcacagcagtgtgtggggggggaaacgtccctcttcccatctgtggcagcgcccgcccgcttcgctccgaggtcccccatgcggtgagcgtgaacccttccacagcacctctcggcgccccctaccccgccgcccgcgggggcaaaatctgggggcgagggggacccgggcgctgaggccgctgcccgcctatggggacgcggctgggaccgtggccc

SEQ ID NO: 220733 - DNA, 366 bp, Homo sapiens
gatataaaggcatcgatacgactttttcattttcttattatttcttttccctggctaggtgagttggctgttttatattggcactaagagtttgataccactactagaatagtcaagtatttgacctggccatgagtaaaagatgtttgattgacagatgagtctatctgtgtcaaacagctttaccttgagaaaaatcacaactttgaaagcagtaacacttcaaaagaatattgaagattgtggccactttcccccacctctccccaaaatctatcttcattcaagttcattataagcagctcctttgggtaatttgggttgcgtgctttctccaccccttctgtcgtcttctcgcagagcgtc

SEQ ID NO: 220734 - DNA, 524 bp, Homo sapiens
acaacaattagctgggcatcgtggcacacacctgtagtcccagctacttgggtagccgaggtgggaggatggtgcaacctccacctcctgggttcaagcatttctcctgtctctgcctcccaagtagctgggattataggcacatgccaccatgcctggctagttttttgtatttttagtagggacagggtttcatcatgttgcccaggctggtcttgaactcctgacctcaggtgatccacctgcctcgtcctcccaaagtgctgggattacaggcatgagccactgtgcttggcctctgcattgaattcttactgtctttactttgtaaaatgttttttaaaaatatataaacagttgcataccatgcattttggttgcaaaatataatacagtgaacacccaggaaccctccacccaaccctaagaaccagagctttgccagtcaattgcatccacctgtatattcctcccacctcctattccctgccccctctctgggacaggtgacccatcctaagtag

SEQ ID NO: 220735 - DNA, 554 bp, Homo sapiens
  misc_feature (4)..(4): n is a, c, g, or t
  misc_feature (31)..(31): n is a, c, g, or t
  misc_feature (45)..(45): n is a, c, g, or t
cagnaatataaggtgaggttgttttcttgcntcctggggttttgntctggttgggcttgtcccaagggagtgctgtaaaattgtgaaaggaaggtggggacagagctttgaggtccttgtagagagaagacaagagctatggaccatagaaccagagactatggagagacggaggagaagggcagggttcagaggtatttctgtatgttttgacataaaataagtgccatggagattacatgcaaaatggcatgcaaatgaggcctggtgccttttggggtatgaatcgtagaaccttgcttttgcaagaaagggaacttggccaggtgcggtggctcacgcctataatcccagcactttgggaggccgaagcaggtggatcacttgaggccaggagttcgagaccagcctggccaacatggtgaaacgccatctctaccaaaaaatacaaaaaaattatctgggcatggtgatgtgtgcctgtaatcccacctacttgggaggctaaggtaggagaattagcctgggcaacagagcaagactctgtctcaaaa

SEQ ID NO: 220736 - DNA, 369 bp, Homo sapiens
tagacgctgccagaattctttggcacaaaactcctctgagtcagagcctaacgctgttagcaagggaagaacagctgcaagggccacacatctgtgagtcttttgagaattttatgatgaataaaaactatccgttacacagactcatacattatatattaacctaacatgtcttcaattgcactgctaaccgtctcttttcatacttttttctaacgacaccccaatcccaacaataaattaaaaaatctgaaactttgactatctagtagcactgcatgccgtttcctagtcgtattcctattccgcctttggagtagccattcccttattcctttactttcttaataaacttggtttcgctttaca

SEQ ID NO: 220737 - DNA, 438 bp, Homo sapiens
cattttgaaaggtcgttatgccaataatggataacatttattaagcgccatgtgtgtcccaagtgctttatgaattgtatcactgaatcttcacaaccctgaagaagggattatcatcatgcctatcctgcggatgaagaaatcaaggcgagaaggttaaacactgtgcccaaggacggataataccataggggacagatctgaacccaggtggtctacttggaaattctacattctgtgtgacattagacctaggaggtctaattttgtgaggaaaacaaaaatatccaatgtacttttcagaaaatctattggggaaatagtgatcaattgcatcatattatacatatcctattgatatcaggggattgtaagtcacggagagcttatgctgcattatgaaaatgtggaataaaataaagcatgaataaaaacact

SEQ ID NO: 220738 - DNA, 366 bp, Homo sapiens
tgcgggggtagagtttaaagattttgaaatgactctacatgtatactggaatttaacaataaagtgagtggctggcagatggtggtgagagacacaactagctggatttcctaggccgactaagaattcctaagcctagctggggaaggtgaccacacccaccttcagactttcacttcctctccaacgtattagagcaagttgtatctccaaagggatctaaggaagttctatgctgtgtccttgggcatctaggctatgaacccagggagtcttgcccgtggtgtccctcccaatttagatatacagctctcgacatgggcagttatgtgggacccgttccccaccatccttgccagggaccca

SEQ ID NO: 220739 - DNA, 581 bp, Homo sapiens
caccatgcctggctaactttttaatttttggaaagcttgggtcttgctcttgcccaggctggcttcaagccatcctcccacctcagcttcccaaaatgttggcagtacagccttttctttcttttttaaatcaaggtaaaacctacacccagtaaagtgcacagatcttaagtgtgcacctcagtgagattttgcacaaacacgtaagtgtgtaaggcaccatccagatctccagcagtcccagaagtctccctctagcccgtccccatggtacctgcctccaaaggttacttggtgttctgatttctatcacaagtttttcctggtgttttgttttgttttgttttattttgtttagagacaaggtcttgtcacccaggctggagtgcagtggtgcagtctcggctcattgtagcctcccaggctcaagcgatcctccctactcctcctgagtagctgggactacaggcatgtgctaccatgcctggctaactttttttctaaagatgagatttcagtttgttgtccaggctggtctcaaacttctggcctcaagtgatccttctgccttggcctcccaa

SEQ ID NO: 220740 - DNA, 384 bp, Homo sapiens
ctcttcctcttacccccaatcaacaacaacaaattagtcatggcaaatgtcctggttcctgctcataatttcatttcagttaacctttttcctaccctgaccttttgactacctgagttgtgtttacctcaagagatctggattctagtactgctttggctgttgtattacctaagtgacttaaatcatataattcctttgaaccttggtttccttatccatgaagttcttcttgaactaaaggatctgagtctggtagacttgcatgttcgtggctcatttggatattagtttaatcccctcccacctaacaaatttcttcctaagttacgacttgcttcatggcagggtcatgttgtctctagttgattgggttgacgtcag

SEQ ID NO: 220741 - DNA, 694 bp, Homo sapiens
tatcaaatagctctagcaccttgtgactccaagtgtggtctgcaaaatggctgcacccccatcacgtgcagctgttagcaatgcagaatctcaggccccgccccagacttgctgagtcagaatctgaattgtacctaggtcctctaggtgactcacatgcacattaaaatacaggaaaaacttctagaattgcacattaaaatcacctgggaacttttacaactacagatgtccacctccaccaattaaatcagaatctttgggggacagggcccagacactgatatttctaaaaagtgtcccaggtaattagtatatttccccaaaatttcctgctcttaaaagtcaccttcgggtgacttgttgaaccaccaggcagcactcctactgaattgtaatcttcagagaggtgataaagatttagattttaaaagcaccccaggtgactcctgtggtcaggcacagttgggtaaaatggctctgccagaatggactggatgggggaccggaaacaaacacaattcggtacatttttattaatactgatgaaaggatcgactgagccaatagagccacctgcaataaagaccataaacaaaggctcacagagaggtgtagttcttcactcctaagcctcatccttttctatattgtaaggcttctacaattacaattcgtccacttttataattga

SEQ ID NO: 220742 - DNA, 1645 bp, Homo sapiens
  misc_feature (927)..(927): n is a, c, g, or t
  misc_feature (1641)..(1643): n is a, c, g, or t
gtttgtgtgctgtgtgctcgtgtgtgtgctgtgtgtgcgtgtgtgctgtgcgtttgtgtgtgctgtgcgtttgtgtgtgtgctgtgtgtgcatgtgtgtgcgtgtgtgtgccgtgcgtttgtgtgctgtgtgtgcatgtgtgtgcgtgtgtgtgctgtgcgtttgtgtgtgtgctgtgtgctcatctgtgtgctgtgtgtgctgtgcgtttgtgtgtgtgctgtgctcgtgtgtgtgctgtgttcatgtttgtaaaattacatatttatatatataagtatttaaaatataatgcaatttatttacatattggatttttctcatttctccacacaatctcttgtctctctgtctctgtctctctctctctctcaggcacacacaaacacacactctcacacacatgcacacacacacactctctctctctctctctcacacatacacacacagagacaggagattttttattagtggctttatacaatacataacacaatgccctttacagaagcactgaataatcttgacaattacaaatggattcctttgaaatattgtatgaacattaaaccaaaaaaatttatttgtgttaagaatagggtaacaaatatgaaagtgattttaataaaggtcttcctaaattttgctaatcaatgtatgcatcatagaggggtattatcttcctcaatcaccactaggagattaggagaaaaaaagaatagtgactgaacagacgtgtaagaatgatacacaaaacctcatagtaaaagtggaaaagaagaaacattttgtaaacctgaaatgtcttggaatataattttccatgtggaatctggctcaaatggcatgtcagatgccaactggagcacacaggcatgtgagctacagcactgtctaaaggatgccactagtctcaatatattnccagtaacagtgagttggtggaaagagctgttctggcctagtaactgaaggcaactaccaggcagttaaatgacagggcttcatgactgagactgctattgaaaaagaagaaggtttgtgtgtctgatgggtgaactcatgcaataatactaatatgggggcgggcatgggccgggggagttgaaaatgagaaaaagcattatatgaagatatcaagcaatcaatgtgaataagatagactcagagtagcaaaatgaaaagtaacaaggaatacaagaacagaagtctaggtgagacttcagtacatgatttaagacagaaatcttacacttttaatcaaaatgttgcaatattaagagttggaagaaaaaatgtaccttgttttgtgctgctaaaagaaatatctcagttttcataactggctctacagacttccatcactttctaaattggtaatgcacaaacaaaaatggcaaggaatttattcacttatttatttatttatttagagacaaggtctcctgctgttgcccaggctggagtgcagcagctgcaatcagggctcactacagcctcaacccctctgctcaagcgatcctctcacctcagtctcctcagtagctgggaccacgggcatacatcaccatacccagctaatttttcattttttgtagagacaaggtctcattatgttgcctgggctagtcttgaacnnntg

SEQ ID NO: 220743 - DNA, 928 bp, Homo sapiens
tactcatatttggttgaggtataagttttatatgtagagttagacttctgtattttagaagatttagttgacatggtcatatctactatcctaattttattttaaattatgtgttcatttttcacatatgatttgcatttgaaaattagatgcttctatattctgtcatcttttattcacttcatctttatgagaattacacttatttaaaggagttttcctatatataattcattatatattcaatattattccaaaatatttctcaaatatgtgaacattttggtattctaataatgtttagaagtagttttataacaattgttagagattgtaaatatactttaaagttatgacagatatgtaaatacattttaaaattatgacagacattcagatgttgagacagaaatccttgaaaatagttgtcaggactatcggttatatgttttaacctctgttagaaatggcatggggaaaaatttcatggcttcaaacacatttttaggagaagaaattgttgaaatacaatttcagcaataaaaggctcacctttatatgacttacctgtcacatttcctgtaaactgtttggagattgtttttgttactatgaatttctctgatgctttctttaatgaacagtaactgtatttacttgaaacacattgcttggaataatgcttgaattattctgagatgactttgattcatttgaaatggaaaacacttgaaaatgtaaaggtttgtttttcaaaaaattgtaattaaatagcttaattattgattgcaagagtccttgaatggtatcagtgtatctggagatcaagagtttaacatttcccttggttttcttcacaatggaaaagtctgaagttttattttgtcttaataaagcagtcatggctcttaaaactcaaaatgtgtat

SEQ ID NO: 220744 - DNA, 382 bp, Homo sapiens
tcccaaaggctgtgatgtatccaatagacacatgtgtatttttagtaaaaacctgctttgctatttgaaattataaagttgattttttttttcagtgggggacattaacaccaagaatatatcttttaaagcatttttaaaataagctccaaagctatgcgattccacttaagaatggggaagtaacttcctggccaacatggtgaaaccccatctctactaaaaatagaaatattagctgggcgtggtggtgggcccctgtaatcccagctacttgggaggctgaggcaggagaatcgcttggacctgggaggcggaggttgcagtgagctgagatcgcgccactgcactccagcctggcaacaaagccagactccatcta

SEQ ID NO: 220745 - DNA, 701 bp, Homo sapiens
agtgattttctttagcttttgaaattaaattcataatattacaattctgaattcctatgtatgtatatgttaagaatcctttaatgggactgactttcatatgtgtgtggctgcattctgaaatagttgtctaggtgatacataaagcagtgagtgctatttgtaagatatatttatatttaaagtcttcatacagttattaactagctccaatattactgaaatgatttctccaaatatcctatatttaattatcatgctggcaaatttattataactttgggttgaaaaaatatattatgatacatatccactgattaatgccacctatctgctttcctgaattcaaagtttatgattatttccataaatgtatttatcagtataatcaaaaataaaaataacataaataaaatttctgtgagctttacacatctaatgtgcaatgattataaatctggtcttatacacatggtaaaaaacatttaagtcacaaaagtatacttcaggtttaagtataaatctgaaattaaattctcagatttaagtataatttttaaaaactttggtaattgtgtccctactgttaaatttattgtatagttttcactatatcatctgaccttttaatgtttctagaaacttgtgtgaggtctcatacttcatggctaataaagtatttatttttctattcttgaaaa

SEQ ID NO: 220746 - DNA, 528 bp, Homo sapiens
tctgttcactgctgcagtctgggggtgtggtgggcaggccacaaagcagggctggctgagggccaggtcagcctgggatcagagcgccgggcacctggggacacctcaggctttgtcccgcttcgtgggtgttcgttacctagccttgggccctgatggtcgtgcaggtgtgcctgggtgctgtgtgcccacaagcactgagaccagtgccagcaccttatgcagggcctgcaaggtatggccgctgtgctggacaccctggggtacggggttgtgccggacacgcccatgatccaaggagcttggggcttccggggaagcagagctggatccaggggtgcatcagggcccaggaccacagctgcccctgaaggcccctgaggcttctcttccttctttgaagtgcctttggagaacatatattcagatgtcaaattgccagttgaaaggagaacatattttatttgaattggatgaaatgtgatccagaagtcatgttgcttaataaaagtgtgtggttttgattca

SEQ ID NO: 220747 - DNA, 460 bp, Homo sapiens
tcttattaagtgactctgtacctcaaagatcatttattctttggtgaatgaattttccattttagaaatcttagattccattgtatattacattatctcttcatattagttacacagaccagtggaccagactagttgaaggttgtctggacattttattttatggcttggaaattttagtgaaattaatgaaggaaacttccagggataagtcagaaataatttgtgtttagctttaaaatgtgttcatatgcttatgtttaaatagaagtttagtagatttctaaattgcacatcatgtttaatttcagcataatgaaaaaaatttaaacaaatatgtcatcatcatgtatactttgttgagagcagagatttttttcccccttcttcctgtcttttcactgctactattaccctcttttttgttagagactagcatttttgaggctgagtttcttta

SEQ ID NO: 220748 - DNA, 279 bp, Homo sapiens
taatcacttctttagggcccccctcttaataataatgcattagcaacacctgaattttggaggcgatctattcaaaccataggtcaggacatccaggccatcctggctaacacggtgaaatcccgtctctactaaacaaaatacaaaaaattagccgggcgcggtggcgggcgcctgtagtcccagctactcgggaggctgaggcaggagaatggcgtcaacccgggaggcggagcttgcagtgagtgaagatcgcaccactgcactccagcctgggcg

SEQ ID NO: 220749 - DNA, 197 bp, Homo sapiens
tgcttattgcaccatgatccctgaagattggatccagttctgtggaagctggcagaataatgggcccagactgaccagtgagctcactgagggatgttactagttggtccattgctcatctgccaggtcagagacaggtgggaggcaagagaactaattaaattggcagtggacattttacctctaaaatgtagggc

SEQ ID NO: 220750 - DNA, 518 bp, Homo sapiens
ttggtgttgatgacaatgcctaagaatagtcatagcactcagttacctttctgccttcaacttagcaaatataaaagatgtattaagacaacaatgaatcctgcttagaatcttccatgtaccattcagttaaagaaagtatgtggaaatagatacactagtgaatagtaccagatcattaatatttgaaatcaaagagtttaaaacaaggagtaggatttagattagatatacagagagctaatccttcaaattctggcctactagaagagaatactgagcaagattgtgagaaaatgatttgatgggagaacctgggacttgaagcttcccacttatgcttgtcaaccattacttcacctatccatctccctcaggaaaaaaaaaaaaaaagcaaagttaagagaatgacatgctgcagagctgcaataacattaaaagacaattcatcgttttagctctatttatcttatgtaaaatgctagagaactcataaacaagatatactcttagcagag

SEQ ID NO: 220751 - DNA, 102 bp, Homo sapiens
tcctgaacataaacacgtacactatatagtttgctgaaactctaaagaaagtgctttcattttaagatgtggatatatggatggttagatggatggatgtac

SEQ ID NO: 220752 - DNA, 238 bp, Homo sapiens
tggctattctttcatggtacaaagggaaattaagtcccagagtaggagtgtggattatctgagcctgagttgttggcgaatggcttggagtgcctttaaaaaacaaaaacaaaaacaaaacactgggcgttgtggctcacgcctgtaatcccagcactttgggaagccgaggagggtggaccacaaggtcaagagatcaacaccatcctggccaacatggtgaaaccccgtctctact

SEQ ID NO: 220753 - DNA, 578 bp, Homo sapiens
tcatcctgcagtttctgcaaaacttgtagccaatgtgttttcagtagctgggttggagcatgtcagtactatggatctgcacactgctcaaatacagggattcttcagtactgctgtgaatgacttacatgtggagcctgcagttctgtgatggacctgagagaatattgcagactggaggaactgcagcattgtttcacccaaagcaggaggagccaaagagactccaccattcatggacagacctaacatggcttgccttgcaggagaagtgttggggtggataggatgtttctggttggtgatattaaagactgggtggctgtccttgtggatgacatacccaatgcatgtggcacaacacatgactctgcagacaagctactgtctgctggaaccactaaagtttataccacttcagctctgaggctgttattttacaaacaccagtccccaacaagacaacatgattttgctcttacttgtttagccatgttcctctatagctccatgtattggtctgttttcatgctgctaataaagacatacccgacactgggtaatttacaaaagataga

SEQ ID NO: 220754 - DNA, 140 bp, Homo sapiens
tcagcaacccctaatattgcctgtggagtggtgactggttaaatactcctcaacagcaagctgggaatgcatcaagaccctattaaattcctggggtgtgggtggctctgcaagaaaacaatcagagacacatgaaaagg

SEQ ID NO: 220755 - DNA, 616 bp, Homo sapiens
acatctcagacaaaagggagctgggcttgccaccaggattcaaaacaattggtgaatgaaaactgattctttgcaaggagcccggttaaaacacatgacaagcgttactcatgtaataacaaacagcagggcagttcttactggtgatgaacctatatattaatggcattaggcattttatctgatgttgtgaaagaactgggatatttgtgtgggtgtaagaaactgattccagctccctttgtcagcagcaatagaaaggtagaactctgccagtcttctcaaggatggcgagttcatggtccctttgttcactctaactttccacttctgggctgtggaaacctcaaccacagatccatgcagtggttcttatcaccagcacttaaaagtatacacactgatacttctgtgctagaatgatttgtatgtttaacctcatagttgaagaaactgattgttagaaggactcaaaagtttactccaatgaactccacatgtaagactttgatttaaccaaactgaaatacactaattaaacagaagggattctagatttttccacatctacaaataggacaataaaggccttctgatgatttacacaaaatgctaa

SEQ ID NO: 220756 - DNA, 421 bp, Homo sapiens
cacagaagaaacaaaaatggccaataaatatatataaaaaatttccactggtaatcaggatatacaaatggaaataatgactttggcctaaaggtggcagaataaaatattattttaaaacaataatgttcagtgttggtggggtttgaggaaacaaacaggcactctcccgatggaagtagacatgtttagagcacattttcacagtactgccaaaacttgagaattttgatatccttttataccacagatctgcatccagggaagtattctaaggaaacatatcagtcagggtccagtcaactgacaaccggcacaggaagttgtcatggatgtacatgggcagagctgcaaggatgttcacggctggcctcattaaagcagcaagaaattgggaatgacttggtggcctcctcaaggc

SEQ ID NO: 220757 - DNA, 1274 bp, Homo sapiens
atttttttactgagatggagtttcgcttttgtcgcccaggctggagtgcaatggtgcgatcttggctcactgcaacctccgcctcccgggttcaagcaattctcctgtctcagtctcccaagtagctgggattacaggcatgcaccaccacgttcagctagtttttgtatttttagtagagacggggtttcaccatgttggccaagctagtcttgaactcctgacctcaggttagccactcgcctcggccttccaaggtgctgggattacaggcgtgagctactacatgtggcctctgcctcatatttatccagccagtgtagacctgggatttggagtcagacagatctgtgttaagttcgtgcattgtcatttgccaatttttgaccttgtacaagttacttaaccatcctgagccccaggttccttggctgtggtagtgatatagagcacctctctcctgaggttgtctgtaaggattagatgagccaaggcatggtatataatggtacttggcatataagaagcatttagaagttctgatatatgtgtaggaaaccccatcatccttgtttatgccatgtgagcagtttgacaaagctctgagttgaggcaggagagtcatcatgctatttaatgacaaatgctttcagtgtttcaaaatggaggtaaatggaaacttgatgtttttctcaaacaccattaagttgaggcaaggcttggaggagcctcaggaagttctcctttcctgtgactgcgggtctcgggaacggtgttggaatgcccctgcccgctggcttccttctgctgctttggggcctgtctgcagacaggccagatcccagtcatctgaaacaccactcagaaggcaggaatgtgcaatccgttccaagctggaagtgactttcatgtgacaggccgcaccactctgtgactctgtaactaattttccctgccctggaagctctccagattcctgggatgtgatcaattgaggaaaccacttcaggtcacattcaggagagtgctgtatctggaattgggtgtgagagctcccagcatgtggaaaattcagactccaagtttctttatgtttttttctactcttttcaggctggtcttgttaggtaaggaacatgcaaagaaaccctcaaagttgaaagaagttaagacaaaaacaagagctggaattccttgactgaagaggtcattgtacatggcaaacaaatgctcagcttatctttacttaactgaaataaacggaactaaactga

SEQ ID NO: 220758 - DNA, 639 bp, Homo sapiens
ccaacacacagcattcaacagactaagcacttattttcaagttactaatttttaatttacgaagcccttatgtgcaacatgacagtgagcaagagaggtacaaagctgaacccccagtctcttgaatatgaggggaagctgggaagatatcaacaggtgataaaaatatgctacaattaactgtggtgatgttgcacaactctgtaaatacactaaaaatcactgacttgtacactttcaattgatgagaaaactgagatatacagagatcaagaatcatccaaggtcacacaatacgaggtggggtcagaatgcaaacccaggcagtgtgcctacctagcccagactcttaaccactaagatgtcactaaagaagcatcaacatcaacaggaaacactttaacactacctaatgtccaacaacaaggattgattaaacacattccagaatattcacttgacagaattaatggatggatgggatggatggatggactgacaaatggatggatggatgaataaaacagtgggtgggttaggggatgaacgagtggatatataaatggttgagtgggtagaagggtggaggatggatggaggatggatgcatggatggatggatggatggatggatggatg

SEQ ID NO: 220759 - DNA, 460 bp, Homo sapiens
aatgctgatcatcattttaaagtgcttagactttgaaagcatcagctgaaattttttacaatgccgctgccacttatttaatactgttgaatgaaaaacaacatgccaaacagatgggataacctttttattccacacatttgtccctcttcccctactagtacagcttgacagaatggatgtttttgttacctggttcctttccagtatattttctgactgccaattttttcatttcaaacaagccttatttagatagtttaatagtgaataaaccaacataggacttttgtaattgagtagtttcctgtttacagagtttataaaatgtaacctagcagaaaaaatggaatgtgaaaaagtagacttttttgtgtgtgaagacctaaagtgaatctgcaaatataggattataattacatggtttccaaaattcaaaccacaaaatatttccattatt

SEQ ID NO: 220760 - DNA, 369 bp, Homo sapiens
ggtttctctctgggttgttcatatgactcagattggcctgatgggataaagggaagacatgctgtccctgagcaaagatgatgtatttgacagggccttttcctgataacatggaagtggaggttagcttggagcaatgaaaaactcctctagtagcatttgaaatattgctaaatatcaatcatggtactaagttatatctattagcccagctaagtgtttttattatatcatttcttttttaaccttctgatacactgctatttcctttgtttaaaacatatgaggtaggtattattattattatccctgttaaaagataaactgaggcatattaaaattttgaagagtttatttgaacagattggg

SEQ ID NO: 220761 - DNA, 347 bp, Homo sapiens
ttaaaacaaattttttctatgtttttatatgttctatctacatgtattttggcaggggcaagtaggcaaaaagaaaacaaatcaattaatacctcagcccttaaaaacatcacttactatgagtcatgagttgtgcttgaatattttagggggaaagggaagtcacgaagctatatatagactagatgtggtatattagaagcagccaacaactttttcaggaatttctagttctaccacagtaatgtagacctaaccgcagactcagtaacactttaagtcccaatcaaggataccaatccatggcttttcactaccttattcttaacccacaaagaaagagcaaa

SEQ ID NO: 220762 - DNA, 407 bp, Homo sapiens
tgaggccgggcatggtggttcacacctgtaatcccacctgtttgggaggctgaggcaggtagatcacttgagaccaggagtttgagaccagcccagccaacatggagaatcctgtctccactaaaaaaaaacaaaaaacaaaaattagctgggcatggcggtgcatgcctttaatcccagctactctggaggctgaggcaggagaattgcttgaacccaggaggcggaggtttcattgagccgagatggtgccactgcactccagcctgggcaacagagcaagactttgtcttaaataaatcaataaataaaagaggtgacacttgatctgggtcttagaagaggcatctatatgtggcaaaagtcactctatcacattatagaaggtagatgggaccggaggctgt

SEQ ID NO: 220763 - DNA, 2858 bp, Homo sapiens
  misc_feature (824)..(824): n is a, c, g, or t
ggcacccaataaatacataattattagaatgaatacattctatcacaatgtcttaattcaacagattcttggcacctgtggatttaacactggtagtttctactatgtacaaatggctttctagggtcatggcattcaggtatcaaagaaactgatgttttcagctcatgttcacatagttactcttacaaagtaatataatcctggttctactacttacaatctgtgtaaccttgaacaaattccttaaactcttgtggagctgctgtgaaggttaaatgagttaattcacataaatacttaaaatcgcatctgatacacagtagataatattcaataaatattagctctgtgtgtgtgtgtgtgcgtgtgtcatacttatgaaaagaaagccaacaggtggtaccaaaagtgaagataaaataagatagtctaatcaagtgatggttttcacacacacaaaaaggatgttttatggtggaaaatgttattctatagctgtgttcttgaactttaaaagtagcaatgatcttgaaataaatctctcagaaatgtgaagactgtacttcttgctgaaatcaatataacagcctaacaggtgtctcctgtcttgataaagtaggccattcctaaatctatcccatgctgtggatgttattcccactgctaaaacaactttactcacagtctgttcaatgctaatctcaaatataatctcatcagtaaattcttttcctaatcattttccaagatacctgattactcctgtctttgaaatatccaaatagtctacagccgtaccatcctgaatgtgccctatctcntctgaaacatccaaataacctcgaacttcttattctactacatagtaaaatcatttgtgtacttatcctactagattatatgagactgcttcttgttcatcatgcattcaagatttactgagtgcttgtcatatgcgaggtacagaggatacaaaggcaatgaggacatgcaataaataatgcagcaacaccatagcagtaggtacactatgcagagatggcataaatgaggatgatctcttctaccacacatctgcagtatctagaatggcacaacatgtatggtagggacccataagtatttgtcaactttaattcctacctgctttttgaagtttttccataccactatagcttccctttttttttggttctcctcaaggagaatggtatagacagaatttgctccctaaaagtctgtctacaccattctgcacatggtatcttttaatctatgtgttagcatcacaggctgttatttaatattttacatataaatatgtcctatcttccccaactataaaacatgtgttcaaaagagcaagaaatcctagagcactctgtacttattactaagcatttagtatctgttcaatggtcctacaatttccgaaagcaaccaaaatatgtcatgcacctatttacatagctgatagcatcacttctgaaccaccccacctgtgctctgggttctctatgaaacaagtagctttcacataggtgttcttaaagcaggaggccaaagaaatgtctgctggaagcatgagactatgtcattgttctcaagctaggagtccagaacttagaaattctgacagatttagctcttcttccatctagatgcctgggtcctctgagaattcagacacaaatttgtataatgaattcacccagatattttgctaagctaggtgcctataagataatatgcacacagaaagcactcagtaaatgacagtttcctttttctccaatcttacaaggtcctagatcctgttggtaactaagaaaaggtaaatgcaactatcaaccacttaattccaatgctttgactatccaggagaaattaattcctggttccctgttgattctaatctaggagacagcttaagggagctcatgggtcttgaagcttataaggtgtacagtaagtcttcacttaatgccactgatcattcttggaaactgtgatttcaggcaaaaatacatacagcaggtccttgaatagtgttgtttcattcaacttcattccattgtaatgttgatgagaacaaaaaattggttttgttatatgtagttttgcttcaagtcgcagtttcaaaaaacttatgttaagtgaggacttaattcacctgaaagcttatcacacactcaaatataacaaataggaaacattatgcaacttgaatacaagagtatgttcattggtttctatagttatcattccatgtacagtattcacgtgaattattggatgaaaagtccaattatttacatatttggatacaatcatactatactagaactgaagaccatacaggtctctgttccagcattttctggctacctcatggcactgcataatcacttccacccaaatctagccaaatctaagtttaagcacttctgtatctattccaagacaaactccctttcttgtttaatctcagtgactcttacttctagagagggcactcttccttctatatctcttccacctctaacctttctaaccatcaagaacatacaatagatagtagatctcacattaatatcaagtcttgactccctacttcccgtcattcctcacaggacagaagcagagtgggtggtggttatgtttgacagaaggcattaggttgacaacttgtcatgattttgacggtaagccaccatgattgtgttctctgcctctggttgaccttacaaaaaccattggaactgtgactttgaaaggtgctcttgctaagcttatatgtgcctgttaatgaaagtgcctgaaagaccttccttaataaagaaggttctaagctg

SEQ ID NO: 220764 - DNA, 734 bp, Homo sapiens
ttgggggaaagtagcattttgaaataatcctagagcattctccatagccaaggtttactcctcaacggaaacaactttaccagagccttagttgaccatggagaagggcagttagccccctacatccctctctagctttcttgtgttacttagtggaaggaaaaaaaggataagaaacacttctgaagtccaattcagggacttgagcccactaaaagactgaaatatacttacctcctccacaccttaccaccacatcaacacagctccagaataatcacaatgggttacaatggaaagagctgcaaaacatagactctatttaagaaggaattcttagggaaatccaatgtggagaaaacaaagacactgaggaaactaaagtctctggcatctatagctatggaaaacatgaagcacaacccatctgctaggcagattgacataaaacctcatactaaagacctattttcctcagttctcattacctgatacatcatgtttgacttttaacaaaaaatcataaggaaggctatacaaaaagaaaaggaaaaacacagtcagaagagacaaagtaagcatctgaactagactttgacatgaaacaaagtttggaataatcaaatagataattaaaaataactatgattagttatgttaaggactgtaatagaaaaagtataagcatgcaagagcagatgaataatataagcagaataatgaaaactctaaga

SEQ ID NO: 220765 - DNA, 476 bp, Homo sapiens
gggttcaagcaattctctgcctcagcctcccaagtagctgggattacaggcgcccccaccatgcctggctaatttttgtatttttagtagagacctggtttcaccatcttggccttgaactcctgaccttgtgatccactggccttggcctctcaaagttctgggattacaggtgtgagccatcgtacccggcagccctggtttcttcttagttttattggtctgtgttttgatcagcacagtcacttttttgttctctttcctggtaagcagggagtcaaaacaatagcaagaaaatgccagaaatagaatttctactactttgtaaactctaggctcgtgggtctcctagctctcagtacctggctcactgtaggatgggtagatgggtgaatgaatggataaagaaaggaagtttgttcaccggagaggagatgaatttcagtaagtttcatgtaacagtgatcaggagaaat

SEQ ID NO: 220766 - DNA, 409 bp, Homo sapiens
attaagtttgctttcattgttctatgatgtattaacaatgtttagcaaacacaatttaaaaaaaaaaaaagaatgacaaattttaaacatatagaaaacaatggagaatggtactggaaaacctatacatccatcaccattcagtccaatgtcaacattctgtcacaattgtttcagatctttttatgtgtatttcaaaatttaaaaacaaaaataaaaacatacaaaaaaactaaccaagccacagtgaagccacctgccagcccttccttcttttgttgtgatgataaatgttctgaatttggcactcttattcacatttagattttatacatttaccacttattattgtatctataaatactatatatattttacaagttttaaaactttatatgaggccaggtgt

SEQ ID NO: 220767 - DNA, 454 bp, Homo sapiens
caggcgctgaagacttggattggtttagacctagaaggaagtggcatttgattggttattataagtgaaaagggcccctccccgggtgagatatgccagccccataattaggacctgaaaatctctgccaggcctgcctttgtgacgtggcccagtctacctcagctatggaacaggccttgactggtgaggcccaaagccggtggccccgcagaggcgggagtggggccatggctgaggcgcctgggcccagtggcgaatcccgaggacactcagccactcagctgccagcggaaaaaactgtcgggggaccatcgaggggctgctcaagctccgtgctcagagtgtcccagttggtgctccaggccatctccactcacaaagggctgactctggcagctctcaagaaggagctccgaaacgccggctacgaagtgcgcaggaagagcggccg

SEQ ID NO: 220768 - DNA, 391 bp, Homo sapiens
attgttatgaaagtaaatatttatatcagagttgacaaactttgtctgaaggtcctgagagtaaataaatattctaggttttctttttttttgagacggagtctcgctctgtcacccaggctggagtacagtggcgcaatctcagctcactgcaagctccgcctcccaggttcacgccattcttctgcttcagcctctcaagcagctgggactacaggcgtctgccaccacgcccggccaatattctaggttttgcaggccatatatggtaactgttgcatattcttatttttctaagcagctttttaaagatgttaaaatcattcttagctcaaaggccttgatttggtccatagaccataatttcccaacacctgacttgtatttatca

SEQ ID NO: 220769 - DNA, 609 bp, Homo sapiens
gaaccttggaggacctattgcttaaggtgtgggcgaaagaaagtaagttagggcaagagactaaggtatgccagagacccaggacaaaacacagtgcagagtgatgtcacagagccaaatgggagtgcaagctatggcaagccctcccaagtatgtgtgggttaaatgtgattaaattcaaaatctctcaacccaaaaattttctccacaaaggaagtagagaaacaaaacagttcattattgaataagcattaaaccagaatgtgatgtgtgaatataatggaatggaatggattcgaaagaaatggaatggaatggaatggagtggaatggaatggacccgaatggaatggaacagaatggaatggaatggaacgcactcgaatggaatgaaatggaatggaatggaatggaatggaatggaatggaatggaatggaatggaatggaatggaatggacacgaatggaacagaatggaacggaatagactcgaatgggatggaatggaattgaatggactctaatggaatggacatgaatggaatggaatggactcaattagaatgcagttgaattgaaaggatccaaaaggaatgcaatggaatgca

SEQ ID NO: 220770 - DNA, 213 bp, Homo sapiens
tttcctgggatgtaggtacaaggatgtccgctgcagactctttgcagtaaaaaattagaaacaagcaaagcctgcctcaacagcagactggttaaataaattatcaaacgtccataagacagactactttgcagaggatacaaaaaatgcaggaaacctttatgagctgatatcaaactatctcccaggcacgttatgtgaaaaattagcaaa

SEQ ID NO: 220771 - DNA, 589 bp, Homo sapiens
taggattttgaataattttttctctagaattttaaaaattggtttcacaacgtagtcttcatcaacgagttattaatggtttttatataaatcaagtagctgataagtatacagatgctgtgttgacatttctgtggaaagagatactttactgacttggaaaaggttcgtgatcacacctgtctataagtgctgccctgagagtcccagcttgggaccttgacagaatacaagagtaaagtgtcgtgtgcgatcctgagcagaggggagtgtacgcaggcatggagactggcgcgtctggaggatttgtggacagaatggtgtcaaggattgcagcagacctggagatagacagtaaaaacttgctgaactcctgagtgaggtaaaggctactgacgcctctctttgagggctttcatttttaatgattgaactgtgtttctttttttactttaggggctgaatcgtagttttcctaccatcacccacctacatcctacacacctggacattttgaggctaactacaaaagcagtgtagcctgttcctgacattttatcctgaggatgcgtgaaaaaaaaaaaaaaaa

SEQ ID NO: 220772 - DNA, 770 bp, Homo sapiens
ggtggggggaagacaaggaaggaacaactgcctgtgagccttgaacaagctacttccattttctggctctttagtctcctcatttgtaaaatgagggggctggagtaagtaagctctataaggctctcagctgtgacatctatgcataatcacagaagatcgaagtgtacagaacaccatggaaactgaagagagattctgaaaggaggctttaagaggtcacttgcatccaatgctgcagaagtgtcagagactgaggacttaaatgaagccactgattagcaatttaaagatcctctccaaggtaagacagggtctcactgagtgcagcggcacgatcttggctcactgcaacctccgcctcccaggtccaagcgattctcctgcctcagcctcctgagtagctggcattacaggtatgaaccatcatgcccagctaatttttgtgattttagtagagacagggtttcaccatgttgaccaggctggtctggaactcctgacctcaagtgatccgtctgcctcggcctcctaaagtgctgggattacaggcatgagccaccgtgcctggccgctttctgcatttttagtgtcactcaacccttgttgtctctgattgtcaaggcaacgactacgtgtaaagtaatgtggacagagtcttggacagagaaatgcctcagaaatgttttgtgatgaagatgaaggagaggcgctggaagcagaaactggggagggggtaggattcgtgtctccacttactctccacccca

SEQ ID NO: 220773 - DNA, 382 bp, Homo sapiens
ggtggggggaagacaaggaaggaacaactgcctgtgagccttgaacaagctacttccattttctggctctttagtctcctcatttgtaaaatgagggggctggagtaagtaagctctataaggctctcagctgtgacatctatgcataatcacagaagatcgaagtgtacagaacaccatggaaactgaagagagattctgaaaggaggctttaagaggtcacttgcatccaatgctgcagaagtgtcagagactgaggacttaaatgaagccactgattagcaatttaaagatcctctccaaggtaaggcggagcttgcagtgagccaagatggcgccactgcactccagcctgggtgacagagcgagactccatctcaaa

SEQ ID NO: 220774 - DNA, 406 bp, Homo sapiens
tgtgaacgctgcgagagaaactatataaaaatccaaatgcttctgtagaacgcttgaaaggtgatcctccaaaatgaaaattatagcgttagggtggtgggactacggtgatttgttttttatttcacaacattttatttaaattccccccctatgattaaaaaccaacaaagccaacgtgtcggcccggcagggagccctggcaagggggagggggcggggcagcgccaggcgagagggcgcctgcacccacggcccccgcagggcgctgagctcaccggctgtgccagccacagaaacctatgagatctcgagaagctgaggcgtatcggtgactcagccttcgtgttgtgctgtgcaacaatagcttttgtcctttgcccaaaaccctaggccagtgtgctaa

SEQ ID NO: 220775 - DNA, 569 bp, Homo sapiens
agtttcctgctgtcatccatgtaagacgtgacttgctcctccttgccttcatcatgattgtgtgcagcagctgcaaggcctgcgtgatggaaggcgagagcccctggccggctgccctggccacaggccacgatcagctgagtgccttgatggctccataacggctttctcaatgagcaagctacttttcataacaacaacaaagcaacgacgccttgatgccacattcatgccaccgccctcaccacttggcccccgcagcctcggaagcctgcccacctgcaggtgtggtttgcacaggacggcacatccctcctcgtcctgggtttaagcttaaacacacagatggagagaccaaggagctgaggcgctaaggagatgacctaaggttgcaaagtgaaaagcaaggccaaggaggggcttcatttcaaataccagatgcggggccggccctccatccactcctcggaacgcggcactccgcggcctcccgggtagacggtctccaccactacttgcttctgttcatctctgacggcagagttaaataaaattaatactattattga

SEQ ID NO: 220776 - DNA, 477 bp, Homo sapiens
agtttcctgctgtcatccatgtaagacgtgacttgctcctccttgccttcatcatgattgtgaggcttctccagcaacgtggaactgaagtgacggcagccctgtgactgttaacccggaaaactgcgagaggctttcccatggaggggtcctcacacctgggttcacccctgccggaagacactgctgcattgtgtgcagcagctgcaaggcctgcgtgatggaaggcgagagcccctggccggctgccctgatggagagaccaaggagctgaggcgctaaggagatgacctaaggttgcaaagtgaaaagcaaggccaaggaggggcttcatttcaaataccagatgcggggccggccctccatccactcctcggaacgcggcactccgcggcctcccgggtagacggtctccaccactacttgcttctgttcatctctgacggcagagttaaataaaattaatactattattga

SEQ ID NO: 220777 - DNA, 528 bp, Homo sapiens
atttgctaaagtcctaaaattttgtgtatacatgttggcctaaaatatttttgagggctcacaggcatattttcttttgggaaaatggaaactgcctaatacatgagatgatttatatacatgctgcattttacaagcggttagggaaacacatgtctattttttttctaaatcaaataatccgtgtgtgcaccatgctaccttgaatatcagattatcagatttaccatccctattagggatataaatgttccagaagaacataagagcaaatttttagaaagattaatacagaatctaaagattgaagggataagatgatttacattaaatctgtttccaggatatcctagttgggaaatcaacctaaatacccgaaaacttaaataatccaagacagtatgcatttgcttaacagactttttctccatcatttgtctgtgtttagtaagataaaagaaagacttgcggccgggcgtccgaggcagcgggtcacctgaggccgggagttcaagaccagcctgacca

SEQ ID NO: 220778 - DNA, 457 bp, Homo sapiens
cagtgattgctcccttgctcatataactgtttatttttcctatagttaatagctacttgttttttcatttgttagtaatgcaaattccgtctccctaaccccaccactgaatgctccaagagatctaacaaatgcctatcaatatattttcctaaaatcttgaacacatcatcaattaattccattttctttccttggaaacctttcttctgcagctaatagtattcaattttcaatggactagttgctctctaggcccagtagctcttgtcatgggatttatttttgctgtttttctatgttaaatcctttgtttcctggattctataacatttgtctttgttgattatgcacttatttggttaaagcatatgttccagatgctttctgaaaaaatatacacgagccaggtgtggtggctaatgcctgcagttccagctacctgggaggctgaggt

SEQ ID NO: 220779 - DNA, 346 bp, Homo sapiens
tactcagtacatcatttacaaaaaccagacatgcaaagaaacagaaaaatatggcctgtatgcaagaaacataatcctaaaagtttattctttaagaaaagggcttcaaaatacatgaagcaaaaactgatacatctgaaaggagaaagacaaatccacaactttagttgaggccttcagtgcttgatagaacaagcaggtggaatatcagtaagaatatagatgaacaatactaacaggcagctagatttcactggcatttatacgacattccagccaacaacagcagaatacattctcaagtgcacacgcaacattctctaaaataaacaatattctgggccat

SEQ ID NO: 220780 - DNA, 121 bp, Homo sapiens
cttcctgcctgttctcttgagagcactgatgtatcagttacccagttcagtggaaaaaaaaaaaagggtaggggtggaccagtaactgaggtagttaacacaatctgttctcccatttttt

SEQ ID NO: 220781 - DNA, 320 bp, Homo sapiens
atgctccaatcttatcttttctatctaccacctgagtgactttgggcagattcttaaactctctgtatatcagtgtccttattttaataatatttgcttataaaaggttattgggataattaaatgagctaatacaggtaaagtgcttagaacagtgctagacagagtggattgtacaaatatcatcactattgttattgtatagatatagctattattttataggataataattgctatattgtgctctatattactattttagtaggctctcagtaacaaattatggaataaatacttgcagataattatttgtactg

SEQ ID NO: 220782 - DNA, 408 bp, Homo sapiens
ctttctgcatagtaaaataaataattaactgaatgaacagaaactgaatgaacagaaattctcctatagaacgggagaaaatatttgcaaactatgcatgtgacagggaattaatatccaaaatttgtaaggaactaaacaacaacaaaaaagacaaataatcccattaaaaagtgggcaaggaacatgaatagacatttttcaaaagaagacatgaaaatggttagcagaaatatgaaaaaatgctcaacatcactattcatcagagaactgcaaattaaaaccacaatgagacatcatcttacacaagtcagaatgtctattattaaaaggaaaaaatttaacagatattgtcaaagatgtggagaaaagggaactcttatacactgttggtgggaatataaatta

SEQ ID NO: 220783 - DNA, 179 bp, Homo sapiens
tctttcacatctaatcatttgttcatttcctccaattcattccctagtcctcatgccctagtgtatatatatttcaaaacaccatgttgaacatgataaatatatgccttttaaatttttcagttaaaataattttttttaaaaagtatatgcaggagacacagactgttgtagtggtt

SEQ ID NO: 220784 - DNA, 264 bp, Homo sapiens
gcctgaatctgatgcatattaagattctcctttgtggaagaggtaaatgcctataatgctgtatctaagaattgaagccagtgtgacatgccttgaaaacctcaaactgtactttctttcctatgtgcatcctaacttctccaggttggatgcagttcattgacccagaaggtatctgatggcatggagttgacatttaaacaaactttctgactcaggtggttcaagaaaaaagttttggttcatcagaaagagaagtttgtt

SEQ ID NO: 220785 - DNA, 477 bp, Homo sapiens
aatagccacaattagctgaaaaggctattttaaaaacttttccaactgcgtatctgtgtgaagtcaacttacttcaacaaaaaagtttggatgtagaagcagctgtaagaattcaactgtttattataacaagatactaaagagactgtaaaatgccacccttctccttggattgttttggaagttattcttcataaaaaatgttaacgtgggcatgagcccccacacctggccttttcagtttttttatttttattttttctttgagacggagtctcgctctgtcgcccaggctggagtgcagtggcgtgatcttggctcactgaaacctccatctcctgggttcaagcagttctcctgcctcagctactctggaggctgaggtggaaggatcatttgggcctgagaggtcgtggctgcagtgagctgattgcaccactgcaccccagcttgggcgacagactgagagcctgtctc

SEQ ID NO: 220786 - DNA, 468 bp, Homo sapiens
cagtaggcagggtagtgtgaggggtgggtactattgggggggtgcccagaaacatttgaaagatgggatcatcgcaagattggggaggaagctggtcccccaagtcaaaagtgaccatgggggttcaggggggaggagccccttttgctgggagatgaggtgctgcctcaagaagtcagggaggccaggtgtggtggttcacacttgtaatcccagcactttgggaggctgaggcagcaggatggcttgagttcaggaatttgagaccaacctgggcaatggagtgagaccctgtccttacaaaaagtggaaaaacttagctgagcatggtggtatgtgcctgtagtcccagctactcaggaggctgaggtgggaggatcgcttgagcctgggagttcgaggctgcagttagctgtgatggagccactgcactcagcctgggtgacagagtgagaccctgcctcaaaa

SEQ ID NO: 220787 - DNA, 587 bp, Homo sapiens
ggtcaaagtgaacctttggatctgataagaccaagtacatactcccatgctatagtgttttcactaaaacacttttagttttataatttaaaattgtacctcatggcattggaggtgattagacttttcctacagatggaactgtgtgttggatctgatttttagttgggcagcaaacctacccagaaccatctacttgcccagttttatccttacccacagccgcctcatatttctacagcactttatgtttcacagtaattttccctccttgattctacaacttctacccctagaaacctgtgttattttcatcccttacagaatcacagatctgtgagcggaacgttgtgttcacaaaatactgttgattattttaccacttcaatggttgtttcagacaaccacccttttcttttcattattgcttaaatatatcagtgcatggtgtcatgggttacagctaataaaaatcccactcgagtgactgcagcctggcttggtgggaagtgacactgcgagctgcaggccgactctgaagaggcaggttttagatgtgccatgatgccagggattgatcttggctc

SEQ ID NO: 220788 - DNA, 472 bp, Homo sapiens
taccacgtacaaactggaaccaaaccaaggtaatgagaaaaggtgaaaaggggacttgtccagacttttctcccttttggcaagttcaaaagtcaaacctgaaggcgggcaaatgggcagaacatgggaggatgctagattttctcatcctgtgaattcatgacaaggagtttttatcctagctctgagagttccaaatgggaactggaagttacttcactctccatctctcaaggattgactcaatgagcttatatccatccataatactgagctgttatcatgtgtgagtttccctttaaacattgaaacagaaagaaaatgacagtaaaagttacaatagcccctccatgaaatcattaaacaaagtctatgaacattaatattcccactttgttagcatttttgttagtattaacatgcatatcatgaagcttccctttttattataaataaattgtacatcaagttc

SEQ ID NO: 220789 - DNA, 457 bp, Homo sapiens
  misc_feature (436)..(436): n is a, c, g, or t
aatattccaaatagatcaaaatttgaccttcaagtgacgaggcaaaaaatataatagatagggttgatcaacttcattaggatgacattggcctttccacagaaaccaaggctatctaaagaatgtaaaacatattttaaagatgaaaaggttctggagatggatggtggtgatgactgcataacaatgtgaatatatttaatgtcatagaaccacacactaaaaattagattaaaaaggttaatttttatgttatgtatattttactaagtttaatttttctttctttttttttttttagagacagggtctcactctgttgcccagcctggagtacagtcacatagctcactacagcctcaaattcctgagcttaagtgatccttcagccccagcgtgtgaagttgcagtgaccagtctgggtgataaagcaagnctctgtcgcaaaaaaaaaaaa

SEQ ID NO: 220790 - DNA, 178 bp, Homo sapiens
aggcacgaggaaggttttgcaggaaagtcaagggagggtttggggggttgggggacagaaggcaagggcgggacaaaaggaagtggcagatgtttctaaagtgacacccccgtcagcacagtttatattcaacctgatgattactagcgaagcaataaaaaaatatttaacaacctca

SEQ ID NO: 220791 - DNA, 339 bp, Homo sapiens
gccttgtttgctgtgcagcggatactctacaggtacatttcctttttggaaccaaaagggagggatttgacaatattgatggtagatcttttttctttagcaagaattaaggattttggtgggtggggggaggcttctgtggggaccaagacaatgtactgtcagtcaggatttaagtcgaactacctcatcccttgccccagagaacagttgatcgtgttttaaaccaaaaggtgcggaatggagagagggaggcggtgcattgcagcttccgatagagctttttatttttggatatcaggaaccaattttgaagatttcttaagaaagtcatttaca

SEQ ID NO: 220792 - DNA, 390 bp, Homo sapiens
taaaattatttttcaggccggacatggtggctcatgtctgtaatcctagcgctttgggagaggaacaaaagatcaataattttttcaaacctacagaaataactatcatctcctatgttaactgaatttatgttcatgaaaaatcaatgagttattcattccacaattattcaaccaagtatgagctcgctggctaacacaatgggatttgcaatgggtatgaaaatgagtttccaggccgggcacggtggctctgtgaagtcctggctttattatgctactaaagaggaggcatgtggttctaacatatgaataataaacagtaatattttaaacttttttctcttttttaaaattatttttcaggccggacatggtggctcatgtccg

SEQ ID NO: 220793 - DNA, 636 bp, Homo sapiens
ccactgcactccagcctaggcaacaagagtgaaactctgtctcaaaaaaaaaagaaaaattatttttcttttttattgttattgttagagatagggaaggcctcgctatgttgcccaagctggtcttgagctcctggggtcaagcgatcctcccaccttggcctcccaaatcattttaaactcttgattataaacttaaatctttactagtacttcagatactggtatataataggtaactaaattaaagttaaattcccttctcacgtaaagtttaagtttcattcaataactcaatttggggagaggaacaaaagatcaataattttttcaaacctacagaaataactatcatctcctatgttaactgaatttatgttcatgaaaaatcaatgagttattcattccacaattattcaaccaagtatgagctcgctggctaacacaatgggatttgcaatgggtatgaaaatgagtttccaggccgggcacggtggctctgtgaagtcctggctttattatgctactaaagaggaggcatgtggttctaacatatgaataataaacagtaatattttaaacttttttctcttttttaaaattatttttcaggccggacatggtggctcatgtccg

SEQ ID NO: 220794 - DNA, 185 bp, Homo sapiens
agaccactgttctctggagtggatctagaggttaaaaagtcaagctattttgaaccaactacttagagtggcacattctttaggggaggtgagcagggatctattgaattatcatattgctggttaatcatgattaagaatctatagaaccccgaccgggcgcggtggctcacacatgtaattgc

SEQ ID NO: 220795 - DNA, 623 bp, Homo sapiens
gagtttaaagaaacaaactgttatgtttcacagtgaatttaattaaaaatgtatgtagatatagttgatttttcataatacaaaaggacctaggacctatgtcaaagtactctccaaactgatcataaatgttttaaatattttttgctttaaacagcaagttcatctgtgatacataatggagaattccagaaaagatcattttagagtttggtttcaaattttattccttttttccaaaacgatatttgtatatagaaattcgaaaaattaaatgatatcctctacactgtaatacacacagatgtctctgggtgaactgctgactacataaatagatctttaccatagtaacctaaagaccatactgttcaagaccagagatttacaggttcagaaactcagactcatcagtgctcaagggccagtctttcacttacttgggactgcaggtttttatcaacaatgtgcatgacatattttaaaaagaaaaatccatttgttaatgtacaatgaaagttataaccatcaggtggattaggtaatatctaagtttattatttaacctgttggcaaattacatgggaaattacagtgatcaatagtttgcctattagtcgtag

SEQ ID NO: 220796 - DNA, 482 bp, Homo sapiens
gagtttaaagaaacaaactgttatgtttcacagtgaatttaattaaaaatgtatgtagatatagttgatttttcataatacaaaaggacctaggacctatgtcaaagtactctccaaactgatcataaatgttttaaatattttttgctttaaacagcaagttcatctgtgatacataatggagaattccagaaaagatcattttagagtttggtttcaaattttattccttttttccaaaacgatatttgtatatagaaattcgaaaaattaaatgatatcctctacactgtaatacacacagatgtctctgggtgaactgctgactacataaatagatctttaccatagtaacctaaagaccatactgttcaagaccagagatttacaggttcagaaactcagactcattcctccccacagtcatcgacccttaccacgctagtcctacctatctccccttttatagtaataatcttata

SEQ ID NO: 220797 - DNA, 1227 bp, Homo sapiens
  misc_feature (1207)..(1207): n is a, c, g, or t
gctgcggcttcccagaggcgcgagtcgcttttccaggagccgaggcccaaacggggccgggcctgaagggtcccccggccagcccgcggccgcgccatcaatcgccgccgcctcgtcccgcttctcggctgaggcgccgcgcggccaggcagcgggtccaggcctcagccgcgcgcccaggggcctccggggccctcccgggtcagcatgcccggggtgaaactgaccacccaggcctactgcaagatggtgctgcacggcgccaagtacccgcactgcgccgtcaacgggctcctggtggccgagaagcagaagccgcgtaaggagcacctccccctgggcggccccggcgcccaccacaccctcttcgtggactgcatccccctcttccacggcaccctggccctcgcccccatgctggaggtggctctcaccctgattgattcatggtgcaaagatcatagctacgtgattgctggttattatcaagctaatgagcgagtaaaggatgccagtccaaaccaggttgcagagaaggtggcctccagaatcgccgagggcttcagcgacactgcgctcatcatggtagacaacacccagtttacgatggactgcgtagcgcctacggaccacgtgtacgagcaccatgagaccacgcatggcggctgcagaggacgaaagaccatgaactactgtgaagactggccagaggcacagaggatttcagcctcgctcctggacagccggtcctaacgagacgctcgtggatttcgataaccacctggatgaaattcggaatgactggacaaacccagagatcaataaagctgtcctacacttgtgctaggcaggcaccgctgtgactgggctccgggcctttccactacgttgaagaagaaaacctatttttaaatgtaaataaaatatctggtagcctgtgtggaaagctgaccgttttaagaagtggcatgtgccttgaaagggggcagaatgttcagtcggtcgtgtttttaacacagagtctctagaagaggtgcagacatcccgtctgactgtccctgtggactctctcagttgtatgttgctataatcctccaaatcaaagctctttctgcttgtgcaagattgttcctattaaacagttttaactaaccttttataatctggagagaatactttttaaggctttgaactattaatcttaganaaaaaaagcaactatcgccc

SEQ ID NO: 220798 - DNA, 1127 bp, Homo sapiens
  misc_feature (1107)..(1107): n is a, c, g, or t
gctgcggcttcccagaggcgcgagtcgcttttccaggagccgaggcccaaacggggccgggcctgaagggtcccccggccagcccgcggccgcgccatcaatcgccgccgcctcgtcccgcttctcggctgaggcgccgcgcggccaggcagcgggtccaggcctcagccgcgcgcccaggggcctccggggccctcccgggtcagcatgcccggggtgaaactgaccacccaggcctactgcaagatggtgctgcacggcgccaagtacccgcactgcgccgtcaacgggctcctggtggccgagaagcagaagccgcgtaaggagcacctccccctgggcggccccggcgcccaccacaccctcttcgtggactgcatccccctcttccacggcaccctggccctcgcccccatgctggaggtggctctcaccctgattgattcatggtgcaaagatcatagctacgtgattgctggttattatcaagctaatgagcgagtaaaggatgccagtccaaaccaggttgcagagaaggtggcctccagaatcgccgagggcttcagcgacactgcgctcatcatgtgaactactgtgaagactggccagaggcacagaggatttcagcctcgctcctggacagccggtcctaacgagacgctcgtggatttcgataaccacctggatgaaattcggaatgactggacaaacccagagatcaataaagctgtcctacacttgtgctaggcaggcaccgctgtgactgggctccgggcctttccactacgttgaagaagaaaacctatttttaaatgtaaataaaatatctggtagcctgtgtggaaagctgaccgttttaagaagtggcatgtgccttgaaagggggcagaatgttcagtcggtcgtgtttttaacacagagtctctagaagaggtgcagacatcccgtctgactgtccctgtggactctctcagttgtatgttgctataatcctccaaatcaaagctctttctgcttgtgcaagattgttcctattaaacagttttaactaaccttttataatctggagagaatactttttaaggctttgaactattaatcttaganaaaaaaagcaactatcgccc

SEQ ID NO: 220799 - DNA, 347 bp, Homo sapiens
aacataagcttctcagagattgtaagctactagagggaagggaccatgaaccacgctggattggattttgaaccacactgccaagccaagggcacagcactagatacttccagaataataagtgcaccatggactctgaatccagatgatctgggctcccactccagctctgcaacaggctggatgtgtgatcttagtccagttatgtcatcgatatgtgctttagttttgtcatctgaaaataggaatactgaagtgggaccattgctgtgaagattaaataagttactatttgtaaaatgcttagaccactgaataaaagtcttcccgctgatgagcaacagatt

SEQ ID NO: 220800 - DNA, 283 bp, Homo sapiens
gtactgaaatctcaactcacctggtgtcactcccagggcacaggctaggacaacacgcacccgtccctggagaactctgggctggttcccccttctccccctgctgaccccctcttagtctacctccgctcctcccttcccccaccggagaacctcccagggtttccatttcctcccggataacataacacgtgctgccctgtgaggaggtgctaaagtcaagagcaaggtggcagggggctttcgagcaagaggcgacctgacttcagagaccctcagtccc

SEQ ID NO: 220801 - DNA, 691 bp, Homo sapiens
catctttggatgcggctattcctagaaaaactaccattttgggggaaaaacgtttatacaacaattccatattgtctccaatgcagcaatgggttaagtcacaattacactggaatcaataagagaaaaagaaaatagtttttcagaggggctgggctggcgattcttttttcactcatcttaatgctaaaaagaccaacatttgtcacaccgataatattttagagggctttagccctcaactacctctagctgacaggaccatcagtaacatcagaatgagaagatacagaaaattcttaaggcattctgggcataattgagtccaagctacttccctgggaggctctcaacagtgtcatgctgactccaaggcctggaactttcttatttttttacgaatcattagaatatctctcaaccagagctggagttacacaagccaccaaggccacagtgcactctgtgtggtctaaggcaagagtaagattttgagaaccaattggtagatcaccatcaccactgatcaaacttagtactaagtccaagatctgttcccttcttgagatgggagaaataagaatgaaaaaagaagaaagcaaacaagtaaatccctgaaaatatgatgaaaaggtgctaaaataacaagaacacaataataatgataaagagaaagaaaaaagaatcaaag

SEQ ID NO: 220802 - DNA, 1384 bp, Homo sapiens
tctttcaaaattttacagaatgttatcatactacatatatactttttatgtaagctttttcacttagtattttatcaaatatgtttttattatattcatagccttcttaaacattatatcaataattgcataataggcaacctctagcgattaccataattttgctcattgaaggctatctccagttgatcattgggatgagcatctttgtgcatgaatcctattgctgtatttgggaaaattttccaaggttagattccaataaatatctatttattattaaatattaaaatatctatttattattaaaaccatttataaggctttttcataaatgtatagcaaataggaattattaacttgagcataagatatgagatacatgaacctgaactattaaaataaaatattatatttaacccttagtttaagaagaagtcaatatgcttatttaaatattatggatggtgggcagatcacttgaggtcaggagttcgagaccagcctggccaacatggcaaaaccacatctctactaaaaataaaaaaattagctgggtgtggtggtgcactcctgtaatcccagctactcagaaggctgaggtacaagaattgctggaacctgggaggcggaggttgcagtgaaccaagattgcaccactgcactccagccggggtgacagagtgagactccgactgaaaataaataaataaataaataaataaataaataaataaataaatattatggatggtgaagggaatggtatagaattggagagattatcttactgaacacctgtagtcccagctttctctggaagtggtggtatttgagcaggatgtgcacaaggcaattgaaatgcccataattagtttctcagctttgaatacactataaactcagtggctgaaggaggaaattttagaaggaagctactaaaagatctaatttgaaaaactacaaaagcattaactaaaaaagtttattttccttttgtctgggcagtagtgaaaataactactcacaacattcactatgtttgcaaggaattaacacaaataaaagatgcctttttacttaaacaccaagacagaaaacttgcccaatactgagaagcaacttgcattagagagggaactgttaaatgttttcaacccagttcatctggtggatgtttttgcaggttactctgagaattttgcttatgaaaaatcattatttttagtgtagttcacaataatgtattgaacatacttctaatcaaaggtgctatgtccttgtgtatggtactaaatgtgtcctgtgtacttttgcacaactgagaatcctgcagcttggtttaatgagtgtgttcatgaaataaataatggaggaattgtca

SEQ ID NO: 220803 - DNA, 960 bp, Homo sapiens
agcagtggctcacatctataatcccagcacttgggaggccgaggcaggtggatcacttgaggtcaggagttcgagaccagcctggccaacatggcaaaaccacatctctactaaaaataaaaaaattagctgggtgtggtggtgcactcctgtaatcccagctactcagaaggctgaggtacaagaattgctggaacctgggaggcggaggttgcagtgaaccaagattgcaccactgcactccagccggggtgacagagtgagactccgactgaaaataaataaataaataaataaataaataaataaataaataaatattatggatggtgaagggaatggtatagaattggagagattatcttactgaacacctgtagtcccagctttctctggaagtggtggtatttgagcaggatgtgcacaaggcaattgaaatgcccataattagtttctcagctttgaatacactataaactcagtggctgaaggaggaaattttagaaggaagctactaaaagatctaatttgaaaaactacaaaagcattaactaaaaaagtttattttccttttgtctgggcagtagtgaaaataactactcacaacattcactatgtttgcaaggaattaacacaaataaaagatgcctttttacttaaacaccaagacagaaaacttgcccaatactgagaagcaacttgcattagagagggaactgttaaatgttttcaacccagttcatctggtggatgtttttgcaggttactctgagaattttgcttatgaaaaatcattatttttagtgtagttcacaataatgtattgaacatacttctaatcaaaggtgctatgtccttgtgtatggtactaaatgtgtcctgtgtacttttgcacaactgagaatcctgcagcttggtttaatgagtgtgttcatgaaataaataatggaggaattgtca

SEQ ID NO: 220804 - DNA, 681 bp, Homo sapiens
ctgggatgcttacaggaagctcatgggccttccacaatctcgggtcacggactacagagctaaaataacacagaaatttaggcctgtgggttctaagcctggtcgcagagtcgagtcagtcctcttctgtaagaaggctgggaatgcagacagcattcactgccctgacactccctccctgccccttcctgccaaagccatatctcagtaagcaaaggaagtgcttcttgaattgttttgagtaggttcctctgaaaacccgagaaaagtcctgcagccgcagagcccagtccatgaagactccaacatccctctgttcaaccctgtaatggttctcagatgtcagaagcagtcgaatcatttggaataaaaagacacctggacctctttccaggagcatcccgccaaatgggtcaagggtggagctcagaatttgcatttttaaaacaagagcccaagaccacgcttgatagtggtgtccaaacgcccattgccctaggttaaaaacttgaaggaatgaaaaagtgaatgccttatcaaaatcacccctgtaatatttcttgttaaaatttgtacaaggccggatgtggtggctcacgcctgtaatcccagcatactagggaggctgaggcaggagaatcgcttgaacccgggaggtggaggttgcagtgagctgccact

SEQ ID NO: 220805 - DNA, 482 bp, Homo sapiens
tctgtatagaatatatacctatacacatacccaggggaatgctgtttattgttttacaatgtgggatcatttatacatcttttctctcctcatctcaacaccacctcatagaaactcctccaagctatctggcatactctgattttccatgttcattggttacatactatgccatggtgtggacgtgtaataatgtgttcagcttttccctcttgggaggcaaccctctgtttcctggcttttgctccaacaaactatgccataacacccatctttgaaatgtacagtttcagagcaggaggtgaagttggatgctctttcattcaatcccacagttaagataaataaggatcagaaaagtaaaagaacatgcccaaggtcacacagctatttgcttggtgctttgtaaaaatttgaatagctattatttcacatgctcttcacaagcagggcaagtattatcaggtcaaccttaaaagtgg

SEQ ID NO: 220806 - DNA, 480 bp, Homo sapiens
ggggaaaaaaggaaatagtgtatgccttcaagggtcttatttttgacaagcatttatattgcactacagtacagcatatacttaaatattaatattgagtgtaaaataccaagttagaggtgggtcttttaagtgagatttgccaggagcaaaggtctcgtggagcagccgttgctcttgccagatggtacaatagcttcagcatctgcatctcaagaactgaatcagaaatgcacagtcatagatcatggatctgtgactgaagccttcctaggcttgcctcattgtgcctaacatagtgtctggtttctagcagcaggatgagggcagaaagcgagctctggtagataggtctgtgtttgtgccattttgctttcctctgtgagctctaattttggttctctgagttctgttgcagagtttcttcctgttggtgaatgctaacttttaaaacatcacatgaaaaatacagggaagtca

SEQ ID NO: 220807 - DNA, 599 bp, Homo sapiens
attattgagagtgattgtttttaaaacctagttggctttcatctaattcattgccattttaagtgtgtattattttagagcaaacttagaaaaacagcacatttctagtaacttacgacattcgatgaatgataaatgttcaagttagactaaaggaactttattccaacttctagtaactactttcttcatttttctctcatcagtttaggtcttaggatctaccatctgttacttttcagtttctcatctaaataaaacaagatctgctgttcatattgtttaatttctcaggaagggtacattttgggctttgggtttatactgcgagccttttttttgtttttcttgtatgtatacctaagtagtcatatgttttcacatggtcagagttttgataataatactctacctagcttctgaacagtttaataatagatttaatccgtgagaggaaataccctcgaaagttactatagaaataacaccttactatctggtggcatttacttagttcttagaactgactaattagtttatcggttaaagtaatttgctattatattgtaaaatagtacatttgaggctcacttataaaa

SEQ ID NO: 220808 - DNA, 624 bp, Homo sapiens
  misc_feature (2)..(2): n is a, c, g, or t
  misc_feature (4)..(4): n is a, c, g, or t
  misc_feature (6)..(6): n is a, c, g, or t
gncntnttggccgggcagcatctttggagggctggagtgcaatggcgcaatctcagctcactgcaacctccgcctccagggtttaagcgattctcctacctcagcctcccaagtagctggaattacaggcatgtgccaccacactcagctaattttatatttttagtggagacggggtttcaccatgttggtcaggctagtctcaaactcctgacctcaggtaatttgcccgcctcggcctcccaaaatgctgggattacaggcctgagctactgtgcctcagatacatacttaatttttatactgagaatgtgttcaaagattttatgataatcaaaaatctaaaaactttggtctgtttgaggacttgtagattgtactcattagccccctgctcacaactacattttattactactccatagacctcttaaaagttccaggtttttttgttgagacagagtcttgctctgtcctccaggttggagttcagtggcacaatctcagctcactgcaacctccatctcccaggttcaagcgatcctcccacctgagccccccaagtagctgggactacaggtgcatgccccacgctggctaatttttgtattttcagtagagacg

SEQ ID NO: 220809 - DNA, 184 bp, Homo sapiens
tgcacttggattgattgttatcttattgatttaaaagaacccttgtattttttaaaaatatgctttttgtcatataatgaaatatttttgaaaatatgattaaatgtttttttctggcttattgactgtccagtgactttgtctatggagtttattgttgcaatatggaataaaatatgtttat

SEQ ID NO: 220810 - DNA, 829 bp, Homo sapiens
  misc_feature (664)..(664): n is a, c, g, or t
gggagacacagactgtaaatgagtaacaggaaaacattcctatagctgtaattgctaggtcaaaattacctgaaaaaatataaaaggacagagctttagcttactttataccaatgactatcctttcagcaaataaacaacaactaaaacccagcaatattaactcaataacacgttctgttttcctttaaggaaaaattttcttaaaccataatatcatggactcaaacttttatcaaagctcaaagctaccaacttactaaataggccatcttagaaatgtctaaggtagacagtttgtcaattgagacaaaatttctgcaaagctagggaggaaacaggtttcatagttttgtacaaaacaatgagaactaattaattttataccactttccataaattcaagtccagagtaaatcagatacacctgtatttttaaagtaaccagaatgggagaagtgggggagaagcaatttaacaagttatccagacttacattatccaggatgaaagtcacgtgataatcttgggtctgtcttgaccacaaaaacatatgcaccaaatcaaaatttaattacactgtataacatagtttaagttgtgcttcatattttattgactgctttgcttctgacaggacagtttcctgaaggaaagttccaanaattgaaaagttacaacacccacataccaaagactgtttcctgaattttgttacaggaagtgacatctgctataattttaacatttacttcccagtaggagttccatttaaaatgtcttgttgaacattatttgttcagcagtacccctaggcaaagcttttctt

SEQ ID NO: 220811 - DNA, 455 bp, Homo sapiens
tgggtccagggtctcaaacccctcgtggcctatggaacaccaagctctgtgcctaagggtggaaggctgccctgccacactgcaatctaagcccaggacataaaacccctcgtggcttgtaaagaatccagggctctgggcataaaacccctcatagcctctggaatgtgtccagactcgctggccccttgctccttgctctcccaagatcataaactggttgtgtcttgagtgaaaagaacctgttctcctttatctcaactagcagagcatacgctaaaccgtcatagctacgcttggtgcaccactacctttctacccccatgtccgcacgtcctcaccacctgcttctttgtttgattaccaataaatagtgtgggctcccagagctcggggcctttgcagcctccatacaccagcgttggccccctggacccatcctatgtactcttaac

SEQ ID NO: 220812 - DNA, 619 bp, Homo sapiens
gaggtttatctgtgagcctttggactgctgtatggacaacatactctgcagtagcatgaagaagtgagtgaagaccctcccttgaaccgtttgccctgaaagaacagaagtcacatcttgatatctcagtgcctttacagtgccagggatggggtaggtgctgagcgcctggtatgtgctcaccctatgctgtacaacacacagaaagccccacagggtttgaactgtaattaggtagagggtgtgtgggactcgccttgggtctctgactttggcttctgctcccggccttggataggctgatattttctagtagatatcagagactccggttgatagcaccacaatggcttttctcccaactttttgttttacgtattatcaagccaacagagaagttgcaagaatagcacaatgaacatgcatatacccttcacctggattcaccacttttgtttcatttctctcagtatatatgtttgtgtgtgttggagacatatgacattttacctcgaaaccaggcatctcctaggaaaaagagcagcctcccatataacaacaatacaatgataacccttaaaaaactttgcattaataaatcccattagtaatataccat

SEQ ID NO: 220813 - DNA, 115 bp, Homo sapiens
cacctccttttcctcacaaaggcttagagaccaccatcaacacaaccaccagggctggtgactttgttactgactcctactacatcttaattgttttagggctaagacaattctt

SEQ ID NO: 220814 - DNA, 368 bp, Homo sapiens
atactaccctggaccaaatcccacacaaggttcatgccgtttggtgcattctagcaatgaaccatgtagaaataaagtttagagagatgaaaacagaaggatttctgtggacaaaaggaatagcgctgcacctctgtgtaaaacggttctcagctgtaataatagaatactagttccttaggtttgtccttaggagacatcttgggagagttttttcttccctctgctgtctttaaggagttaaagggccctcttagcctgaatgatcctgaaacagacccagtcccaaattgcgtgatgttgggcaggagtggggataggccctacctgagaatagcatactgtctagaataagacttctttctttg

SEQ ID NO: 220815 - DNA, 197 bp, Homo sapiens
cgaactcctgagctcaggtgatccaccggcctcggactcccaaagtgctaggattacaggcatgagccaccacacccagccaggagcctgcattttaaactcgcactgcacctagctctctgagagctaaggaagtccttctgaataggtacttcaatgattcccaaaactttttcttgccatggcacacgttaaaa

SEQ ID NO: 220816 - DNA, 188 bp, Homo sapiens
gtttatgtaacccccatgctcggccagagcgggtaagcctgtgggcagcagctccctgggcaggcttgggaggggccagccaggggccccagaggggtttgggccgggccaggcgagagccctcccctcagccagtcactccagctctgtgccaggctaggggtgggactggaaacaaagtgttcaga

SEQ ID NO: 220817 - DNA, 487 bp, Homo sapiens
atcacatgtaagagggatgtttgaaggaggaataactggtcaaggaaattgggtcatgagtggcaacaggaaatttaagaaggatgtagtggccaaaggtatcatacatgcattgtatatgtatatagatatatatctttcaatgtatgtggatatatgtctacatacatatacaatgtatgcatgtagatatacattgaaagtatagatacatatctatatacctacatacattgaaagtgtatatagatacacacacacacacacacacacacatatacaattataagggagggggactagaataaagaaacctatatggttgcaatactttgacgttgtatttagaggtaaaaggctaactctaagtaggtaggttaggtgtatattttgtaattcctacagcaaaaacatagcccagatatgaccaaaagccatttaataaaacaaaacactaaaaaatattcaattaatccaaaagtaggca

SEQ ID NO: 220818 - DNA, 304 bp, Homo sapiens
gaattcaggcatttggcaacctcattctgaattgtcagtacccacaagtcaagcagtgagacccacttgaaatgctggtcctgtacacaaagtgggtgagcactgtattgaaagacagtcctttccagtgctttcccctgaaattccttgtaaggaccaggagacgcctgcagtcggcctggtgggaagtagtgggcctggctttggagttaaccataactcattttgctgctccagacagtcctcctcccaccccaccccaccccacctcaaaaaaaaaaagagagaggagggggttgtcttt

SEQ ID NO: 220819 - DNA, 330 bp, Homo sapiens
aggagggcatgttggtgagtgtgcctgagtggagagggctgccagtttaagagtatgatagacggagaataaccagtctcttaataagaaggctggctgggagcagtagctcatgcctgtaatctcaacactctgggaggccgaggtgggtggatcacttgagaccaggagttcaagaccagcctggccaacgtggtgaaaccccacctctactacaaatacaaaaaaattagaagggcctggcggtgtgcatccataatcccatctactcaggaggctgagccagggtaatcgcgtgaacctgggaggcggaggttgcagtgacccggg

SEQ ID NO: 220820 - DNA, 629 bp, Homo sapiens
ccgtggctcacacctgtaatcccagcactttgggaggccaaggcgggtggatcacgaggtcaggagattgagaccatcctggctaacacggtgaaacctcgtctctactaaaaatacaaaaaattagctgggcgtggtggcgggcacctgtagtcccaactacttgggaggctgaggcaggagaatggtgtgaacccgggaggtggagcttgcagtgagccgagatggcgccactgcactccagcctgggcgacagagcgagactgtctcaaaaacaacaacaacaacaaaactaaagctaaagctctttgcaggcctcctgttctgagagtgtccggtataagagctgctgacagctttctgacatgggccgtggcagcacccagacctagctcccccagcagatagtgggaagctcgagttgcacaaagatcaaagctcatttcaaggtcagattcctgctgtaggagcagctgagcaatgaaggaaatacatcagccccctcagctatattcttagcccagggcctacaacctagtgagttaagggctcagaaagtatgaagcacttttcaatgtaacagtttatgtgcatctttcattaccagcatggaaccaaccctgccccat

SEQ ID NO: 220821 - DNA, 599 bp, Homo sapiens
ttcttccatctactcccgctacccaactctaggtaaccactaatctactttctgtctttacacatttgcctagtttggacatttcataaaaatgtttggatcttggttaaccaagggtaactgaatccccagaaagtgaaactacagataagggaagacttctcagagtccagaaatattaaatggaaaattccagaaacaattcatatgttttaaattgtgtgccattcttagtagcgtctgagtagcatggtgaaatcttacactttcccactccaacagaatatgaattatccctttgtctagcacaaaccaaaaataaaattctaagccccccaactaactgcatggacccctcctctcagcccagggcattctaaagtaaacctgaaacagtagttcaggccatggtgggaactgtccataactttgacctatttttctgttgggtgtcttgctgttttctttttccgccttctttttttttcttttttgagataaagtctcgctgtcacccaggctgtagtccagtggcgtgatctcggctcactgcaacctccaccccttaggttcaagcgattctctatctcagcctccct

SEQ ID NO: 220822 - DNA, 449 bp, Homo sapiens
ccatgccttttataacctagtcttgggagtcacacactgtcatttctatcacaatctattcactagaattcagtcactaagtttagcctatatgcaatgggaagggaaataaactccaattattggagggagaagtgtcaaagaatttgtgagtatatattaaaaccaccacatatctcgagaactttgtagagaccttaatatgctaatgtgaatccagtagtatgggtaccatttcccaagcatatttgaccgctgaattcatttttgtggataattttgcagaaccagtgttccattgaagacactttgggaaacactggtttaacactgccatcacaaagaaaaacatacgtaaatttcttcaaggctacaacatatcacattattagcttgttatcctggtgctcgatttgtagatcttaaataaataccgactttactcagtg

SEQ ID NO: 220823 - DNA, 409 bp, Homo sapiens
aaactcctgccctcgtggagctgatattctgatgaggagacgcacacaattaacaagcaaataattgaatagccagcatgccagatgttggtaagaggtatggagaaattatttgtatttgcaggggaggtggcataggtgtctggctacttcaaatagaatgattaagggtagagtcaaccgaaaaagtgtaatctgagcaaagactagaaagaagtgaaggttactgaggggaggagccccagctatggttgatctcagaaccctacctagaccatactccacacaatcagctggacttattgctagtcagtattgtcacagggaccccctagcagcatgctttctgctctgatgaccatatggcagatctgctaccttaaatgtccctctactagggaacccaatc

SEQ ID NO: 220824 - DNA, 478 bp, Homo sapiens
cagaatgtcttgcattgtacatgtgtgtctgcagtatgactttgccactcccctgtcgagggttggcatctatttctccatccacttgaatctgggcaggccctgtggctgctgtgagcaatcaaatatgtgatcctataccatttgtagcatagcccttaactggtctagctgattctatttctggcttcttagaagcccgtcactatgtaagaagtatagattcccagagatcaccttgctgcgagttgctgaatacacatggaaaagccctggaagataagatacaatgaggagagaggaaaggtctggtgaaggaacatcaaggcatgagatgtgtgcgagaaaccatcttgggagtagatccatcctcagtttcttacttgcccagctgatgccacatagatcagggcccccctactgggcatagtccttcctgaatttatgacccatagtattatgagaaaaagtaaaaaat

SEQ ID NO: 220825 - DNA, 347 bp, Homo sapiens
gaggccgaggcaggaggattacttgagcataggagttcaagatcagcctgggcaacatagtgaaaaaccatctcaaaaaagaaaaattagccaggcatggtggcatgcacctgtggtttcagctacttaggagcagaggtgggaggatcgcttgattctgggagttcaaggttgcattgagctgtgatcgcgccagtgcactctcgcttgggtgacagagcaagaccttgtctcaaaaaatttaaaacaaaacaaaaaaaactggttatttgtctttttattgttgaattataagagttttaaaaaatatattctggaaacaaatcccttattagagatatgatttg

SEQ ID NO: 220826 - DNA, 532 bp, Homo sapiens
aggtgtgagctaccatgcctggcctattcactttttttctgtttcctttgatcctcttgcctatcccgtctgccctgaaactttcttcttgccatgattctctttcattgtgtcccccaactctggagatccccaggttgagtcagcctccttcccggacttcatatcctcctaagagtgggcatgccccaaggttgtgccattgatcctcgaattatttcactgtatgctttctccttaggagtcacctgcttttatgacctccctttcacctttatgatcatgacctcagatctttttccaatctaaccccttcacctctaagtgcgtggcccatatcttcaattcatgttctgacatctcctcctgaaataaactaccttcatataaaacttgtcttatactgagtttctcatgtttctcccaaaccccttaactaagttcattgacaatacttaacatcacagaaaagtttgtgccttttgacctaatattctcactcatgctaattagccctaaggggaaaaaaaat

SEQ ID NO: 220827 - DNA, 559 bp, Homo sapiens
acttgagtatgccaaggaaaagagttttatacttggataaattaattttctgtcagcttgataatcaagtttaatgtaacaggagtagtatgggtcaccttgcaatactattagttggatgcctcatttaattgacgtgaattcaaataatgatttaactattcagtaaagaacttaaatttatcttggaagtatactcttattcactaattggtacaaagaccgaggaggggacactgggctcttgactgtgatacagtgaagagactagggtttagtcctatttttgtaagacaagatattttacctcacttggtctcatttctcacctttaaaatgagggttttaattagattagtggttctcaaacttttgggtctcaggatacttttttactcttaacagttacaggattcccaagagtttttgtttatgtggattaaatccagtgttaagatattagaaatagaaactgaaaaatattccatgtgtattaaaaataacaatacctatatatgttaacataacacaatttaatgaaaaaaataagagtttaaaa

SEQ ID NO: 220828 - DNA, 525 bp, Homo sapiens
tatcaccctgaaggagcggacgcaggaagcagggaaaaaccaaggactgggctgccggcggggcagaaggccagaagctaatgacctaaaacggaacaggctgtgagcaattcgatcaaactcgaaatgcaactttccaacaatgttcttaaaccgctgtagccccagcttgcttggcttggggtgaaaagtgtgggagaaagtcttcacggcctgcagacttgcttgccgactgaggttgatccggcagttttccgttttgttttgagcgcgaaagcgtggctggctggtggagctccaatctattccgcagcacaaacggcccttctgaggctctgctccccgaggctggcggaaggaagggcactggctactccggtacccaccgaaacaaaaccgacaaacgcaaccgaattaacactattgcttgtttgggtcactgaagaaaacttttcccgtgtcgacagaattctagcccgactttcgtttggaactcaggatcagacctttacaaaattaccgacc

SEQ ID NO: 220829 - DNA, 548 bp, Homo sapiens
tccttttgtggttttggaacttgaggtaaacaaggtgatactgcgtggacccggatgggattgcttctctcccttggtcttgtcttgcatgtgagattcaccccacagctgtgcgtggccatgggccatttgttttcatgcgtctatatagtgttccactgtttatcgacttatccattctgttgctggtgaacatcagggttgcttctgatttttggctattgcagaaaatgctgctgcaagtgttattacacaagtctctgtgggtcctaggggtggaatcgctgtgtcatggggtgtacctgtgctcagctctaccagatcgtggcaaatggttttcccacatggagctctgattgcagtctgcctgagttactgtctactaatttgcatttccctgattattgataaggctacgcatcttttcttttttctcttttgtagagttggaatcttgctatgttgcccaggctagtcttgatctccttgcttcaactgatcctcctggcttggtctcccaaagtgctgggattacaggcatgaaccac

SEQ ID NO: 220830 - DNA, 323 bp, Homo sapiens
gtaatcacagcaacaaccccaaataccacatttattgtctcttacaaagcatcataagttacattaatcactggttttaactacattctgttacagtttggactctagtaactaggcaaatacaaaccaacaaaacagcatataaaaccacatggaacaaaaagcacactactctccaatatgcattttctggagccaatctgatatttaactgggataagacattctaaatagcaactgaaatattgatataccagaacatcatgaaataaatatttttcccaactctgaagacattcctttcctcatgcaaaatttaccaa

SEQ ID NO: 220831 - DNA, 533 bp, Homo sapiens
atgatggaaaattaagaacatgtaagcaattctggcccaagacaggagtagggaggtggtgtctgagggttacttcccttccatgagattgtgcgaaggcagcacttcacagagcgtgggcgtctcctggcccgtccacagtgggtcctccacaacgcccctgacacaggctgagcaaacccttttaatgaagaccaattgtgctttatttgagttggaataggtacggaagtgctctctctgagtttctgacacaaataacaaacaaagccatggccagggtcccaggctcctcaggatttcaagatgtccacatctggggagaaagaagtggacacaggtctgcctcccagctctgggttcacatggtgagacagagctcttgctggctctttccagtgtctggttttgacatcacaaagggctgtggacttttatgatctcgtataagagattcttccattctccgcattaaaactgtcccctgaaagggatatgatctagccaaggctgtgacacaagagacatgtgaa

SEQ ID NO: 220832 - DNA, 233 bp, Homo sapiens
cagaaaaggtcatataatgtaaaggggtcaatttatgaagaagatataacaattgtaaatatatctgcacccaacatcagagtacctaaatatataaagtaaatgttaataaatctgaagaatgagatagactgcaatatagtgtagtagactttagtatgcctctttaaataatgaacagatcatccagacaaaaaatgatatagaacttgaactacatcttagaccaaatg

SEQ ID NO: 220833 - DNA, 503 bp, Homo sapiens
gctaagagctttaataaccacatagtctccatatcttcttctcgtaggggacaaagaaagaaaaaatctcttgggcgtggctgcatttgctggcatcagggatagagagaaatgccagcactccctggggtagataatttaggggagtcctctgcatctgtcctgtggtctttcacagctcatgttttctcggaacgatggacgcacaatgacgtcctcagatggtttctcaggcaagtttccagtgaacatgactttgtcccattcatttgtaactgggcagaagctgggtcccagattcttcctggtggaggcattcggagagcaacaccctggccttaacacactacatatctttgaatttcacacgggggcagccttctgggaaaaccactgacagatttctcatggaggagtcagctggggttgggaagagttgagcgctcatgatcctctcgtgggaaatataacattaaataaaatatttctcgaatcctagcaat

SEQ ID NO: 220834 - DNA, 381 bp, Homo sapiens
agtaagaagcaggattggtaggaatgagggaaaaatcacactaataggccatatctgagttttacattttatttcattagtggtacagggtggaccaaagagactctgcattggatacagccctatagcaactgatctttgatgactttggagaagtaaaaagaaaaaagaaacttttacgcataaccttgtgtcataagaaacataactgttaactgggaagaatttctgctaatccagaaattcttggcttagcagaaaggaagatcttagctccttcctcttataaacctcctgccagtagtgatcataagaaaaactcatcacattcaaacatgagcagtagtcaaagaggaattaacacaggatttgtataagtat

SEQ ID NO: 220835 - DNA, 494 bp, Homo sapiens
gcactgtggtattctggatgagatgattctgggacagaaaaggaatactgggtaacaactaaggaaattcgaataaaatattaactttagttgacaatagtgtattggtattggttcattggttgtgctaatgcaccatattgaagtaatgtaagatgttaaaaatagagggaattgggtgtaggatatatagcaactctactatcttttcagcttttctcaaaatttaaaactattcttaaaaggtcactctccttcctcctcttccacacaaccccattgcgttattcagtatatattgcatcttattttggcttcacatatctagaaagttgaggaatatggaaaagagcagggaaagtaaaagataggaaaggttaaaatgtctaagtgacttaaagttacctagctcaacaaagacaacagtgtcaggctttctgaaaattgtttcaaaaggctttcacaagtatgtcactgagtagaacacaaaacaa

SEQ ID NO: 220836 - DNA, 521 bp, Homo sapiens
gcttttatttgtagatgagacatttatgtgattgagtgaattagccattagacattttcattctagctctacagctgcaaagagggagggggaagatgtcttgagtcttgttcccaatttatcactaagtgcatcagaaatctgtcttccaacacccttggaaagaacagggtggtttttagatgtttgtgctcagacagcgggcaacagcagattaaataacaaggcaaaaatactaggaatgctggtagaaatctatgaccgcaggttaaaaaaaaagaccactcaagtaggccagacccaggagacctgggaatctagaacctggtaagcagtctggaattgggaaaggagaaaatctacttttggacccaggcattagaccgcttaagagaatctatcagtccaggtgatgagtgtgtggctgcaggccagcaggctgtggaatggcaagcagataccttttatatatttcttttaaaatatcagttaaaaaaaggctatttatattccataaaact

SEQ ID NO: 220837 - DNA, 409 bp, Homo sapiens
taattcattcaacatttattgacaatgatcatttgtgaggtactctgcaaggggcagaggagtaagaattggtccctgccctcaaggaactcacagtctagggggggatacagacacaccaatcccagtgccttatttaacaacattcttgcagtggaagaatgaacacagggctagagaagcagagcaggaaagacaatctgtgcttaggaaaactgcagatcaattcatcaaatgctcactactgccctgtgctgactttagttaaacatcagtaggcttcaagaggcaacagcttcttatgcttcttcctgctctctgcttttactcccctcacagccttaccagcaacgtcttcagtggtaagatttagtagaaactcctagagcccttttggaaagacatttgg

SEQ ID NO: 220838 - DNA, 412 bp, Homo sapiens
gggatattaaatgattatgaaacttagctgcaatggctaacagagtaattataaactttttggtgtcacccggcttcttctgataacaccagagagtgtagatgtagaaattgtgctattgaaaatttaaaatatctggcatggatgatcagaaagcctaaagagcagatttgaatgagcctctcatttcctacggccatagagaagatatagaagagaactaagtccaaggtttgattgtgacaattgcggagttttaattctaataaattctcaacatctctaggtctcttatgctgatagaaaagtatcagtggaaaaggggtgaagttttaaaccacaagacagagacgtttgagcagcatagataaggctgagaattttcatgttcttcccagtcccaccatcaatt

SEQ ID NO: 220839 - DNA, 434 bp, Homo sapiens
tcttgattgttctcctttgataaaggaaaattagtcccctgatcagtgtcagtagatgtaaagcaattttgctttggaccagagactttcagatatttataggaggttgtgagagtgtcagtgagttgaccaagttctcacagttagacagtgtggttagcaaatactagatctcagtccattgctttgtccacttcaatacactgactcagcatagtttactgcctctatttatgtcataaagtagtttttgttggtctactatgtgttagtataaacatacccaatttcacttcaaatacagtgatttcgttatactttttgtattaaaaatgacaagaacaaaaggtggtagggaggaagaaatggaagaaggaagggggaatggaagaaataaaactggaaaacaacctaagtaaatgaaaagaaagttt

SEQ ID NO: 220840 - DNA, 440 bp, Homo sapiens
gtaggaaactacttaaagatgtcccacaactcactgatgctctgttcatttttattgtcagccatttttctctctgtgtttatttgcagtttctattgcttttctttaagtttactaatcttttcttcttagatgtctaaactgtgattaatcctatccaatatatgttttatttcagaaattgtagattccaaaaagcttaatttacattttaaaaaatattttccccttccttaatatgttcaatatttcttctatcttcttaaatatatggaatacagttataactataatttctgtatagttctcttcattgacttttctctttatgagttatattttcttgtttctttggctatccggtgattttttgttgggtgccagacattatgaatttttctttttaggtcctggatagattaatattcttatagatattc

SEQ ID NO: 220841 - DNA, 476 bp, Homo sapiens
gaaatccaaaatagtctttatattctattcagaaaatatggtatggatagtggtactactaacaaggctatttaagaaattagttgcaaagtattcattgagcttaatagaaaataacatattttaaagaattaaacctcatcataaaatactttttgtctttttttcctttttgtggagatcaaggtcatgctgtattgctcaggcaggtctcaagctcctagggtcaagctatcctcccacctctacctccctaagtactgggattacaagcatgagccaccacacctggccctaaccataaaataaaacaaaggttaaccttattataatgactagaaatgtaaacagtgccatttaaatattattccttttaagacaatacttgccaaattagtgtcctaactctgtcttccacatagtaccacccaaaaagtgctccatgctcaagtaagtttggttaaatgaagtagatt

SEQ ID NO: 220842 - DNA, 270 bp, Homo sapiens
agataggcctgggttgctggtgggcagccgggtgggtgactgtgtgtagagccacctgctccaggcccagccccacctcctgtgctctcttgcttaggacatcagtgggaccctgagtgctttggtgggaccctgtctgtggcacggggtggtagctgtcccatccttttatatacctgcaaagggttggggatctcaaagagcttttgtttatgtgagtcacatctgtaaatttaccccatgataaataaaatatttttttgtttttga

SEQ ID NO: 220843 - DNA, 136 bp, Homo sapiens
caattcaataagaagttacagcacagtctcacacatatccaattaaccttggcctttagtcaacatctgggttctttttgtcattttcaaatactatcacccagaggtgctatgatttatattggggaggggatta

SEQ ID NO: 220844 - DNA, 294 bp, Homo sapiens
gcacgagcaaggagaagcattgttatctcccaggtttctaatctataaaaagaggataagaaacctgggagatgacaaggagaagcattgttttgtttcgtgctttcctttcactgattttctggtactcaacaatgaaaatataaccagaaaaattatttcataactaggaaaaaaaccgtgaaaacatgctattttaatatatttatcccataatatgactatacatttcagacattcgttacctaagttacagacatctaatgtgaaaatttgtcagaagtatgaaaagta

SEQ ID NO: 220845 - DNA, 508 bp, Homo sapiens
aggttgccatgagctgagatcgcgtgccattccactccaggctgggcaatgagtgaaactccatctcaaaaaaaaaaaaaagaaaagatttaaacataagacctgaaattataaaacagctagaagcaaacatagggacaactcttcagagcattggtctaggcaaaagttttatgactaagacctcaaaagcacaggcaacaggctgggtgtagtggctcacacctgtaatcccagcactttgggaggttgaggtgggaggatcagttgagcccaggaattcgagaccagcttaggcagcataatgagaccctgtctctacaaaaaatttaaaaaattagccaagcctggtggcacgtgcttgtggtccaagctactcaggcggctgaggtaggaggattgcttaagtccaggagcctgggagatcaaggctgcaatgagctgtgattgcgccactccagtccagcctgggcaacagagcaagacacttgtgttaaaaaaaagaaaa

SEQ ID NO: 220846 - DNA, 409 bp, Homo sapiens
aggtaaacaatgcagagtattgttaacttggctgggtaaacaggtaagttctcagcccccctggaaaatccatgatctcctaaagtaaagcaatttaaaattgttcacattatttgtgtgtgagtgtgagggggcgctttatcaccctccacctctcatccccccaccacaagcagttgccaaattcaaataatttttccttcaatgcctctcccgtgtgaccgctccttttttttcaaaagtaaatcctatgtctgggaggtaacccgatcaccgcggaaagaacgccgacatggaaatcttaggattggtttctcgttccaggaagttgcgctactttgggcaaatcacgtcacctctgggactgtttctaatcagaataaagaaagggctggaccaatctttcaga

SEQ ID NO: 220847 - DNA, 295 bp, Homo sapiens
aaaaaaagcgcagaatctacaatgtatgttcaatctacataacaatctagaactaaaattctagataataccaatgtcatggagagagggaggcggagactgacggacgtggcaacatgtggagacatttctcctgtcagaaacaagatgtagatgaagatgaggtttagaaatcaagctgggtggccgggcgccatggctcacacctgtaatcccagcgctttgggaggccaaggcaggcagatcacttgaggtcaggagtttgagaccagcctgaccaacatggtgaaacccg

SEQ ID NO: 220848 - DNA, 351 bp, Homo sapiens
  misc_feature (249)..(250): n is a, c, g, or t
  misc_feature (252)..(254): n is a, c, g, or t
aacaatataagcaacagaatattagataattcaaacaattaaattaatactcataaggcagtgatataaatggcaacttattaatacatgggggagagtaaacaaatctcctatgcagaaaaattccaaataatttatgcaaattctcagccattcacgaggtacagcataactccccaccccttgagtatgggctctgcataggaatttcctgccaaagaggaaatgctgtggggtggggggaggggnngnnnaaggtaaatttacagtggaaaaacctgacaaataccatctcagccaggtgatcaagattaacattaatagcgataagtcatgttggcagtatgtagc

SEQ ID NO: 220849 - DNA, 537 bp, Homo sapiens
atctcaagaaaccactttctttgttcatccctatgaagcaactcctcatccatttaaatttgatcatgagatagcagcaatctagtcacattttcagggttcacttctaattcaagttctcttgctgtttctaccacatccacagttacttcctacaatgaaattttgaaactgtcagttataaaagtcagaatcaacttcttccagacccctgttaatgttgctattttgatctccttccatgaaacatcagtgtttttattggcatctagaatgctgaattctttccagaagattttttctttgcccagattttggatctgggcaaagaggccaggaattcttcctaacatctgcaatgcccaggagagctcctccacaacaaaggattatccagccaaaattgtcaatagtgaaaaggctgagaaatcctatactggagaaagcatgtggaaacagagaagaaaaaaaaattaaaagacagaatgggaacatattaggtcaaaagacagaggagtcaagcatatgaaatggcta

SEQ ID NO: 220850 - DNA, 714 bp, Homo sapiens
ggaaaaacaatcactctgctctttaactcaatcactcccccacattttgcatttttgatgtctgaatttacatcttttatatcacttatcccttaacaaattattgtagttgttattatttttgttttgtattttaaccttcttactaaaaatatgtaagtggtttacattcaattattactatattagagcattctgaatttgtctgaatatttatttttacctgtggatttataccttccaattttttgcattacatattagtgcccttttctttcactttgaagacggttctttaacattttttttaaggcaggtatggttacaatgaattccttcatcttttgtttgtcttagaacgttttaatctctccttcatttcaaatgagagctgttctggatactacattcatggttgacagtttttttcttcagcacttgattctattatcctactctctcctggcccacattgcttctgctgagaagtctgctgccaggcacattatgtattatatgcttcctttttcttagtgctttcaggacctactctttgtttttgacctttgaaagttcaattataatatatcttgtggttgtcttattcagattaaatcagattagtgcgctttggccatcctaaacatcttaatgtttctctaagtttaaaaagttttctgttatttctctgaataattttctaactctttttca

SEQ ID NO: 220851 - DNA, 610 bp, Homo sapiens
actaacagcaccaatgaatgcaaaactttatggaagcctatatatatgctacctgtttatggcagtaaacgtgaagagaagaggtgtttatctttctcttttctcctgaatacttctgaattatatctcaacacttagaatattagcagccagccagtactctttgttttccctctcgaaaatatgaactttaaatcagatatttttgcaggagaaaataagtttagtaatctggggtcttgttatgaggcagaatatgcatcaataagcagaataaaatgcattcagctttcaggctaggcctggacaataacgaccctgcaaatcagagctagaattctaaatgctgtgcctgggaatctgcccagggccttttgggctctcatttttgctgttttgtatttgatatttcatttatatgcatcaaactaataccaactttcatatttgggcaaggaaaggaagagagaatggttgctagaattaaagaactccaaggaactctctaaggaacatagctcctaataaaggtttcagagttccatatttttagaaaacatgtatgtattgattatctacaaagacattcaacacacctccttaattctag

SEQ ID NO: 220852 - DNA, 547 bp, Homo sapiens
ctgcaggctcctgctctccagatcagacccctactctcagagccctaggcccagtgggtgacagcctgtgagacaggcctgtgtggggtggccctagccccacctcagcttccaacctgaccttgctgcatgacctctggcccagccctctccacctggagtgccatctctctttgtgggatgggccaggtgggctgtgtgtgggggagggcaagtatataggtgtggtataggtggaaactgccacagtaaccagcagcagctcagagccgggccacccaattttgtatgccagccccagctgtgcctaggcacgtggtgtgtgcaaatgaacgaagcaggcagccctatgttaaggaggcaggtccagagctcacccaggcacagcacaagatgagtgcctggcctcagtgagcgagcactggctgctatgaggctgtggtgtggaaccttgacactaggggccactggcctggcagtgtgacctctaccttatcaaccagagcagtgcaacagaggcagacctcagtgtggtgtctcctgtgaa

SEQ ID NO: 220853 - DNA, 752 bp, Homo sapiens
atgtgtaattcatgagaaaatctatataatgcattgattaccatgtatacttaggtgtttaatcttatttttaaaccacatttcctcaaatcttaaaattacagaagtctgaaactttctactatttataaattagctggaataatttactttcatggaagctccatagagagggatatggttatataactttaaagtctgccttagagaatgatcaacagaacataaaatattaaagtaaaaacactccatctatcattagttcatatgagaaagaaaagatacatactcttgcaattcagaagtttttcctgtaaggaaaaagaaaacttatgagtcttgaaatcaattcacatctgagtcactgaacttcctctgtttgattccaagacagaaatcctacccacctcagccattaagagaatcccatctcttactaataatcattccaaaagaaaaactctgtgaaacatgtttttccctgagataatcagataataaggatttaaatagtttcttggaggaaaaaatataatagaattcaggagagatccaattattcctagaaattatagactagtttataagtagaaagaaagaaatctcataaggccgttttcacattacttcatatgaccattatactttcttccgaccactgcctaagtttataattttagtaaatgttcctttaatttgcaccctaaggtattaatatggccacctgagtatctcattcagttgtatggatg

SEQ ID NO: 220854 - DNA, 841 bp, Homo sapiens
attccggattgcccacgaggcgagtggtggtcatatgtgataggcacgtgttcacacaccctcctgtgtacccccccagggtcaccgaagtccccacacgctggctctccacacctctcctgttccagaaagcatgtccgaaagcagtccaggagattattaaggggtcgccatgaatccactttggttttaaaaccattcccgaatgtcctagtggattgtgttgtgctgcctaagctgccggctgcaggagccagagaagtgacccccgcgggagcagcggcaggtggatctccacggtggctcgctttgtttttgttttgttttttcttttaagacggagtctcactctgtcgccgagtggaggttgcagtgagctgaggcctgtgggaacctggggcgacagagtgcctgcagagaggcggacacacagggacatgacaggggaagctggagggtgagcaagagccaggccatatttatattttcgtaattttatcctgggaagccaccaaaggatgctaagcacagactttaagcatggcaacatttatatttttataacttttcctcaggtagcagtttgttgaaagaatggaatggggaggatggtgcactgggtcacccggaggcaaggagccctttcagccaactcagaatgaaggggagccacagctctggataaatgggcaaagagcaggctcacaagaaatgggtgcttatttcacaaacctcacatgtcccagcagggtcctgttcaagcagtctccatccaattagatgaaattcctcaaggacacaactgtatgttctaaatagctcatgtcttctttactgcagt

SEQ ID NO: 220855 - DNA, 370 bp, Homo sapiens
ggtgtgatggtgcatgcctgtagtcccaactacttgggaggctgaggcacgagaatctcctgaatccaggaggctgaggttgcagtgagccaagatcgtgccactgcccttcagcctgggtgacagagtgagactctgtctcaaaaacaacaacaacaacaacagcaaaaatgaacataggtcaaagcccttggctctgcccatggcaggaagatgaaataaaatctttgtatttagtagagaccattctctttcagggcctatgccattacagtaaaggtacattggaagtaaaactgtttccctttccccaccactagggaccacagggagatttgccttggggctaagcagagcagaagattaaaaa

SEQ ID NO: 220856 - DNA, 166 bp, Homo sapiens
taggaagtgaaacgcagctggataggtaggtaggcttaatccctgaaggattctctttcgactatcccgattaaacaggcaagataatcagctaaatgtgaagactggataggaaatgtagctttgaggggaaaagacctgggtaccggctcgattcgtatatgtc

SEQ ID NO: 220857 - DNA, 367 bp, Homo sapiens
aaagggttcctaaaagatgggagctattagcaaaataatgagttatctaataaaagaaagaaattttgaagtaatgagagtgaagaacaacttgagagacaaagttcttgagaaggtgaaaagggatcagattcacagtacaagtacaagcattggccttagaggccactgtagttaagaaaacagatagaggataggaagtgaaacgcagctggataggtaggtaggcttaatccctgaaggattctctttcgactatcccgattaaacaggcaagataatcagctaaatgtgaagactggataggaaatgtagctttgaggggaaagtataaaacaattttgttaggatgtggaaataaccctgg

SEQ ID NO: 220858 - DNA, 437 bp, Homo sapiens
agatgaaatgtttatcttattatggcacctaccaaaagggggaagaaattagggagccctttctgacagccaagcaggcagcatccaccaataatcctcaatgggactcagacactgctctaggaaagtggccgagaaaacatttttagggatgcacagtggaagatctgaaaactagaggcaaatctctcaattacattaagttatcaaccataaaccaagggtctgaagagaacccttctgttttcctggaaaaaactgagagaggctttaattaaacacacatctctctcctgactctataaaaggatagttaattttgaaagacaagtttataacccaagcagccccaaatattggaagaatgctgcaaaaagttagctattgcaccagacagtactctaaagaaaatcctgaaagtcaccaccttggtcttt

SEQ ID NO: 220859 - DNA, 557 bp, Homo sapiens
actgcgcctggccggaactgaatttttaattgtatttagttttaattaatttaagtgtaaaactaaaaataattttaaaaagaattgttgaaatgatagtattttggatatattggggtaaataaaaagtagtattagaattatcttcaccttttcctttttcctttttaaatgtggctactagaaaagttaaaataatatatgcagttcatattatatttctattggacagcactgttgtagaaagatatacaataagcagagaacagtgttcctctggggattgagatggaggagattgggaagaggaaagcctttggtcttttgttttataatgagtgtatgtaatcattattacttttaaaaatgtttgatggaaaatgtaaaaaggaagaaaggactgacaacatactacaatgaattttaaaaaggagcaacaaagggaccaagacaaaacacaaatcacttacgttactttaaaaggttgagtattttaaattactgttctctttttttcaaataaatgggcagtggaaaggaaagttgtcatttctata

SEQ ID NO: 220860 - DNA, 465 bp, Homo sapiens
tgggagacagagcaagactcctccaaaaaaacaaagttcaaggaaaaaaaccatatatatatgtatatatagatatagatatagtatatagatatgtattatgtagaatgggatatatatgtgggtttggtattatttgtggttggcatcttagaatgtatcccccatgaataaagtggaagggggctactgtagttgaaaaagagagcctttgtagttaaaacaaacctgagttaaaagttatgctttttactagctgtgtgatcttaatatctttcagcatcagtttctatacttgtaaaataggggcagtaatatttgccacgcaaggtggttgtgaggatttaacatattcatgttaatttcctttctcccattttagacaggtaagagcctgttttggtaatttagactggaaatggcaatggtaattcagaaaaagaaataaattttaattattggtgg

SEQ ID NO: 220861 - DNA, 450 bp, Homo sapiens
tctgggggcagggcggggtggctcacacctgtaataccaactactcgggaggcagaggtgggaggatcacgtgagcccaggagttggagaccaccctgggcaacagagcgagacccagacactacaaaaaaatataaaaattagctgggcgattgtagtcccaagtactcggcaagctgaggcgggagggtttgagcccaagaggtcgaggctgcattgagcccagatggcgccactgcacaccagcctgggagacaaagcaagaccctgtctcaaaaagaaaaagaaaaacaaaaaccagtatgggatgttcctgttaggcaactaagggtgaaaaatcagagcacgacgcatagcttctcacagattctggtgtgcgtgccacaccagagaataaggaactccatagcctgaaagggaactgaataaaaataaacataaaagagaata

SEQ ID NO: 220862 - DNA, 381 bp, Homo sapiens
tgagccaacatgctcgactaaacacagctgacttctagctgtgcacatagctcatagtggcagaaatggtgaagggcaacgtataaagtggcataatggcatgaggctttatgtttcagaagcatccatcagtgtgtttcatatgggaatgcagtgtgcttactctaccaagcaagttgattaatagagtattgctcttgcatactgacatgaggaatttctaaattatactctatatatttgagtactaactgtgctccaggcagcatgctaagtgtgggagattagaatgaatggaaagcctggggatggatctggctcacagacctattttgtttgacctgtgcagtatttaaaaattttgacttcatggctttcagc

SEQ ID NO: 220863 - DNA, 489 bp, Homo sapiens
cctaggctggaatgcagtggcagatcaaggcttactgcagccttggccttcctgggcttagctaatcctcccacctcagccttccaagtagctgggatcacagctgcatgccaccacaccccactaatttttgtatttttctgtagagaccgggttttgccatgttgcccagtctggcctcaaccccctaggctcaagggatccacttgcctcagccttccaaagtattcctgggattacaggcatgaggcatcacgcccagatcatatgaaagtttttaatgttaatgtttagatgtatttatctttctttttaaaattagttgattatttttagagatagggtcttgctgtgttacccaggctggactcctcagctcaagagatcctttgacctcagcattctgtgtagctgggtctacaggcacatgccactgtgcccggctagatctttcctttttgatagctttttttttttttcatagcttaa

SEQ ID NO: 220864 - DNA, 382 bp, Homo sapiens
ttccgggagtatgaagtaaatgaatgaaggccaaacttgagctggttcttgaaaaccctctctcccctcttcctctgggtcttttcaaggaaggaccaaactggcacggtggctcatgcctgtaatcccagcactttgggaggctgaggtgggtggatcgcccgaggtcaggagttcgagaccaccttggctaacatagtgaaaccctgtttctactaaaaatacaaaaaattagctgggcgtgttgatgggcacctgtaatcccagctactctggaggctgaggcaggagaatcgcttgaacccaggagttggaggttgcagtgagctgaaatcacaccattgcactccagcgtgggcaacaagagcaaaactccatctca

SEQ ID NO: 220865 - DNA, 627 bp, Homo sapiens
gtttgggtttttgtcctgttaattatgaacaatgcttggcagatgataaaaaaactcacatatttattgaattaaatggccatggcaattgtagaatacacatgaatttcagccatagctgttatgtttctcccttggcccatctgtccctggtttaaatacatctcacctgacaagaaagttctcttaaaagtagccacaactgcttacagtgcattactctaagcaaatcacccatgtctggctattagcaggccgtgtgggagaaggaaatactgtctgtataccaacgtgatcagcagtaggctgcatatacaacagtggttctataagattataatgaagctgaaaaattcctattgcctaatgatgtcataccccgttgtaatgctcatgatattgtggcagaacactttactttgtctatgttaagatacacaaataccattgtgttacagttgtctactgtattcagtacagtaacatgtacaagtttatagcctaggcccagtacactctaccatatagcctaggtttatattaggctataccatctaggtttgtgtaagaggctataccatctaggtttgtgttagtacactcttaggatgtttgcaccatgacaga

SEQ ID NO: 220866 - DNA, 494 bp, Homo sapiens
gctatttttaaattccatagtcatatactaacaatttaacactaaaatattctttgtatttcttaaactaggtatacagtatgtaatacactgaagtgtagtaagatggtttattacgcacaagactgtgagtgcaaactatctctaatctacttctcactacatgtatgacctgaagcaagtaacataccttctcttccccattttcccatagggctgtggtgagaattaaatgcactaatgtatgtcaagtgcttagaacagtgcctggcacttaataagcacaccataaatgtcatctactttaattatgtaattattatttttatgagaaatgacatcccagctcagacaactcagtacaaatcctgataatattaaaatttcaatttactttaccagtgagctcaaacatttaggaaagctgggctaatagcccaggttttacactaaacagtctcagtgtttacactatatctaccccattcacgaat

SEQ ID NO: 220867 - DNA, 158 bp, Homo sapiens
agtgaggtatttggggtttttcagacttacttgattacagatctggagtatctcaaaacagttgttttgtggaaaacactctggcaaactctgagtcttagtcattaaaaatagtttttgggtaaacaacagtgtaatagaaatggaaattactggtt

SEQ ID NO: 220868 - DNA, 308 bp, Homo sapiens
acttttgagacatgttctctccacagcttccacccacgccccgccacacacacacgcatacacacacatacccccgcagagggagaccctcactgagtgagcagccagttctgtaaaaagcagccggatggggcgaaccttccctgggccatctgaaaaagagctttgccagtctttcctctcttttcttgcttcattgctcccagcctcttcctttcaaacaaaaatcctacaggatttaagttggctagatgctatgaacatagctacaagcttgaaatgtttattgtcactagttattttaagtc

SEQ ID NO: 220869 - DNA, 288 bp, Homo sapiens
tatgctcaggtttctggttttaaaatgagaggataatcttttatggaaaaatttaaacacattgaattaattactgagacatgaggtaaagaggtatatatttttttgcttcagtgtattttgttctgctaaaaatatacataaccatttggtctgttttttgccccagttttacctctgtttttgaaactgatagaaaaaaactcattcccctccaaaatttccatatgagacaaataattggcagatgtttatgctactcaaaaataaagtgatcgatcgcatctg

SEQ ID NO: 220870 - DNA, 412 bp, Homo sapiens
gatggtggtgcacccctgtagtcctagctactcaggaggctgaggtgagtggatgacttgaacacaggagtttgaggctgcagcaagctaggatcacaccactgcattccagcttggttgacagagtataaccctgtctcttaaaaaaaaaaaaaattggtgcagtagttcaggtagggagacctttgtatgtgttgacgctatctatctcatgtaaggcagtttaatatttattcagtgatactaatcaaaataaagaattcagtaagtctatacattgtctaaattgtgttaaacttaataattcccaggttgtaacataaattaggctttaatataatgcgttttggtttctaaaatgagatgagaacatataatttgcactctctgtagtcacagcatgagactgctt

SEQ ID NO: 220871 - DNA, 381 bp, Homo sapiens
cagagacaggatctcactctgttgcccagggcagagtgcagtggtgtggtcacgattcactgcagcctcagtttcatgggctcaagccatcctcaatcctcccacctcagccttccgagtccgagctgggactgcagtgtgcgccaccacacctggctaattttctttttactttttgtagagacagggtctcgccatgttgctcaggctggtcttgaactcctgggctcaagtgatctggccgccttgacttcccaaagtgctgagattacaggcatgagccaccacaccctgcctgccttccacttttatgttagcacatgtgctgtgtgtatacagcagcttttcttcctttttgcttttctcttctgtcccctgcta

SEQ ID NO: 220872 - DNA, 482 bp, Homo sapiens
tttggtttagggttctccagccccccaaacgctagcctcttccatccacaccatcaggtcctggcaacacctcatctacgagcaggtataaggtgacggtaccacagcccaggtagaaggcccaggaaaacttgacctctgtgaaacggtgatatggttagggtttgtgtccctacccaaatcgcaccttgaattgtgtccccataatcctcacgtgtctaggtagagaccaggtggaggtaattgaatcatggggccggcttcccccatgctgttcttgtgatagtgagtgagttttcacaagatatggtgtttttttaaggggctcttcctgccttcgcttggccttcttcctgccactctgtgaagacagtggcttgcttccccttcaccttccaccatgattgtaagtttcctgaggcctccccagccatgctgaactgtgaatcaaataaacctctttcctttataaattacccagt

SEQ ID NO: 220873 - DNA, 524 bp, Homo sapiens
tcagtggtttgggcggtggtttagtacttgcctctgtcacagattctacaactcccacccatggaaccttcaacaccaagtcggggcttcctggaagaggtcctggcaacacctcatctacgagcaggtataaggtgacggtaccacagcccaggtagaaggcccaggaaaacttgacctctgtgaaacggtgatatggttagggtttgtgtccctacccaaatcgcaccttgaattgtgtccccataatcctcacgtgtctaggtagagaccaggtggaggtaattgaatcatggggccggcttcccccatgctgttcttgtgatagtgagtgagttttcacaagatatggtgtttttttaaggggctcttcctgccttcgcttggccttcttcctgccactctgtgaagacagtggcttgcttccccttcaccttccaccatgattgtaagtttcctgaggcctccccagccatgctgaactgtgaatcaaataaacctctttcctttataaattacccagt

SEQ ID NO: 220874 - DNA, 184 bp, Homo sapiens
gggagaacactacagggacatgcaacaaatggtacatgtgagcttttcaagtgaactactttttttctaatgaaccataaagctgccatggaaaagtatgtatgtcacaaccagacaaaatgcagatcaaaaatggaaataattactctgatgacagaatgttgggagggagttgtgtaaatag

SEQ ID NO: 220875 - DNA, 177 bp, Homo sapiens
aatccacctctgtccaatcctaaacaaactcttgactctgtgactgaccctcctgtgtccctcttcaatccaccatgctctgtgggtgttcagtctgccagtatctgcttttccctctggactctccaggcagctggcacctttgcaactctgtggtgcttcaggtagggaccctca

SEQ ID NO: 220876 - DNA, 284 bp, Homo sapiens
acatcaggcaaatctcaaatgagggacattctacaacatacctgacaaagactcctccaaatgctcaaagttaccaaaacaaggaaattttgagagactatcacggccaagaggcgcctaaggagacatgatgactaagtgcaatgtggcatcctgggacaaaaaaggacatcaaggaaaagtgacagaaatctgaaaggagtatggactttagtgagtaagaatgtaccagtattggttcactaattgcaagaaatgtgccatactaatgtaatgttaataat

SEQ ID NO: 220877 - DNA, 394 bp, Homo sapiens
aagcatttgctaattttaagaaattgtatgtaaaacagaatggttcttgtgtttcagtctcagtcttatgtgagacttctgagaatacttacctggaattttaaaacttggaacctctgatgacttcataaaacaaaagccctggtgttatcctgggacagttagtgatttatgtcctctaaggattgtgacagtggagatcagtggcagagatgccatcaatgaaccatagatttacctcaaacagaatttgtcactggtttgacaatattattcccaccagtgtcaacttaatatcttttcagtataatttctgatcgttacaagtgaggtacaaagtgcagtgggcatttaaaggagggcgagattatataccctgtttaaggggattggt

SEQ ID NO: 220878 - DNA, 505 bp, Homo sapiens
atgagcatagacattactgatttttgaccctatcaagtgacgcctgcttgaggcaccctgcagtacctgccagtgccttcagacctggagcccccatggaaaatttctgtcttatttcctgctaccaccacgatccttttcttacttctcaaacccatctaagccatattgataatattttgtaccatcaaatactttttgtagaaaagcactttttataaacaaagcacaactaaactcagggcaagagatggctgaactcatcacctgataacccttcttttccacctcctgcctcctcctgcctctaccatgttgccttttccacctctgtggctcatgaccacacaggatgccaggcgaggtcaaatacaaggttgctaggaaaaatcagacaagaaaattaagcaatggccaattcttgccagaaaacactgtgatacccctttgggttttcattgcaggggtcttgagggccacccacacaggtgacttaaatctttca

SEQ ID NO: 220879 - DNA, 204 bp, Homo sapiens
tctcctgtctcccgccgctcccagagacaatgaccatgtttgaaaatgtcacccgggccctggccagacagctaaaccctcgaggggacctgacaccacttgacagcctcatcgacttcaagcgcttccatcccttctgcctggtgctgaggaagaggaagagcacgctcttctggggggcccggtacgtccgcaccgactaca

SEQ ID NO: 220880 - DNA, 315 bp, Homo sapiens
tcatgaagaaaggcagccacatggctctagccataggccggtaatgaaggaaagaaagggtaggcaagcttccaacttttaggataaaaagaagggcagaaaaatcccagcataacttcccttttatatctgcaaataaattggaaaccaaagactagaatataagactgttaagtatttgttaagattctagaaaccatgtaacatctcctgtatttttgttgtccctttgtggttcagtacaccagcatagagtcagtttcattaaaacctttaagacaaaaagggtttgcatgcttttccttggccaaaata

SEQ ID NO: 220881 - DNA, 573 bp, Homo sapiens
cagagttaaaaattgtatgtatataattttttatagatattgccaaattgtcttccataaaagttgaaccaattcttctctacttttattttgcattctgagtgtggcagaggcaaagctatgtgcataccatagctttttctccccctgaaaacacaactaaactacattgttttcctggcctctcatgcatttaggttggggtcatattacttccctccaagaaaaacaacagttggtatgcctcctccacacttcccacaactgtggaagccagtgatccagatagcatagctattaatacaagatgggtgaaagctgctcaaccgcatcagacagcatgagtggtaagattttattgtgtcaaacgactgcattagttgtgttttgttattatggcagcatagcctagcttagccctaactaattcaataaataaagttgagcattatttgtacatttaaaagcgttttttatgtttgctttacagtggctttccacttttctatcagagaatcccccctcccttatgtaccatgctatattaataaattggaaggagctgctagctca

SEQ ID NO: 220882 - DNA, 468 bp, Homo sapiens
tagatattgccaaattgtcttccataaaagttgaaccaattttcactaccaccagcaaagtaggagaggacttgtttatccacaccctctttaatgtatgtaatcaaattttgggatatctgccagtctgttagggggaaatgatactcttctctacttttattttgcattctgagtgtggcagaggcaaagctatgtgcataccatagctttttctccccctgaaaacacaactaaactacattgttttcctggcctctcatgcatttaggttgggggccagtgatccagatagcatagctattaatacaagatgggtgaaagctgctcaaccgcatcagacagcatgagtggtaagattttattgtgtcaaacgactgcattagttgtgttttgttattatggcagcatagcctagcttagccctaactaattcaataaataaagttgagcattatttgtacattt

SEQ ID NO: 220883 - DNA, 412 bp, Homo sapiens
tttagactagggcatggaggccttttccaggtctagccatctacagacctgtgaggagttaaatataccttgcatttctagaacatccttatttaattctcttcaagttctttccaagccctttgattgaagtgagctgccttgatcctatctgggagtctgcagccagcaaagccgctctgcaggccccctgccattgtcaagtccatatttaagaatggcagtggccgtggtgcccaggctgaaatttgctgtacacatttggcaacatagagtgcaatgtaactacacattactgatctaaacccatcggacttatcagtgggctctgacaggtacttgttggctgccttcccaggctgggaaggtatcccggagccagccaatgtgatgccctcccctcccttttgat

SEQ ID NO: 220884 - DNA, 413 bp, Homo sapiens
tcttttatttccaatctatcccttgcaagattaccgtaaatttctgtcatttttaagtaggattatattatctcattttacttatagctatcatagtccctgaaagcattttatccctattgcactgaagacattgtttcctgggggacaaaaaactgagatgtacgagaaatttacagtcagaacttctatagttgagtcacagtttcatatcctactgacgtgctgacttttggagtaactttctaatcattattggttaactttctttatattttaaagggagaaagtgatagcatgcttcagatgtaacagtgtttggtaaacataagtatatatcagtttttgtcattggggaaatattcatagatcaaaaaatggtcgacgcggccgcgaatttagtagtagtaggc

SEQ ID NO: 220885 - DNA, 595 bp, Homo sapiens
agagaggaagggtcagtattctcgagctaataagtccatattataccaaggaagaggaaagagctcaccagagttgtggataagaatcaaccttcaagaaggaggagaaatagcttggtctcatcttgtctcttttctgttctctcttgcttttttctttgttctatcctctacaatattgaaaagtgtaaaatacaaacactataggattggccatctagagtcctgggttttagacttggtctggtctgctataatcaacagtgtgatcttagacaagccacttggcctcctgggaccccagtctcctcatttggaaataagaaggcaaattatcttaagagtcctttcttaggctgattcttggaatcacctaaacaatccacaaatactaggacttcctggaataaaattaggaatccagatggtctaatactaatgcttagacccactccttcaccaaggcactagataccccaaatgaaacacctggacctccccaggaaccaaggtcctctggatcctctggcctgacagtcacaggaggatggtctgagataagtctgtctggtcctaaagtaatgcatacttgaca

SEQ ID NO: 220886 - DNA, 558 bp, Homo sapiens
acataattaaaattaatgtttagagaattacatgtctttaaattgctttcactttttcagactatttaaaatgtaaagatgcttattttaccttggtttaaagaggacactccattctatcatacaatgaacattataattttaagtaaaattccacttttataaccagttgggtttcttcacagcttagtgacttataaataaacagcaactttaaactcttccagtattcccccaaattcaccaatacatgagtgaatacaggtgtatgttttaaaatataaaatgattttgtatataaatgtaaaatagtcctaaaagcaataatataaaccttattaagaccagaaagcaaataaatggcctgtaaccctaaaaatggaaacatcagaacctacagcaaattttgaacactggagacgtgacacagaatgtggttcttcccagccttaacactgccactacccagctaggaaacaccagagaagcccttggtcctctctggacctcagtttcttcacccaaaaataaggcagtaggcatattaggatcctctac

SEQ ID NO: 220887 - DNA, 375 bp, Homo sapiens
gacagagcaagactccgtctcaaaacaaacaaacaaacaaacaaacaaaaaactggcttgatctaagtaggatcgagtggaaagggaatagatcatcttatgtggctgaactagacccacttatgtggtgtagctcttgtagaaagcagctgtcagcctgaggtagggaagaactcttgtactgttggaacaatggtcagaggctgaagtgggccacctgtctgggttctaagttctctgtcactgaagggttctgagagaaactgtcttgtcttgtcttgtaaagaaaattgcagtaagaagagtttgatgcttataagagagagcacctagtaggtgccaggcaacccctttgtgtgctatcatttctaattt

SEQ ID NO: 220888 - DNA, 201 bp, Homo sapiens
gagcttttagacataaaaaatttaattttttggaaatacagaccccatgatatcacaaaatttcttcactggcttaacttttgtccagtcaatttcaacagtcagaactaagttatttgatcactggacaaaaggttaagtaagctacgcatatttaattgacttttttttaaattattggtggcccttctgtttttactc

SEQ ID NO: 220889 - DNA, 421 bp, Homo sapiens
ccgtctcaaatatatacaattgtatgtaatattttcagaccatggttgacagcaggtaactgaaaccatggaaagtgaaaccttggataagggagggctactataatgtggagagaaatgttctaatatctatcaaaatgttgaatgtatatatcctctgatacaactattcattttctaggaatttatcctatagataatatgcacacacatcccaaataacatatgcaaatgcttatatattgcagcattgtctgtaataacaaaatattagattttggcatatccatgtaatagaatactaatatgcaggcataaaacataaataaggagacttttttcttacaataacataaaaggactactgtttcttgggggaaaaaagtacagaatgttaagtatagtgtacacaattttgtga

SEQ ID NO: 220890 - DNA, 365 bp, Homo sapiens
cacggggaataactgtctactattgaaaaaaatgtagtatttatcagtttcttgtgcttgtatgatccattttatgcaacgtaaaataaacgtttttgaggaaaggactcatggttgaaaatgcttatcttcagagatttaatcttttgaaaaaaaaatttatcttcagaggaaaccattgtgttttgtagtccaccaaatccgaaacagtttgtcatccaacactgctatgagcatttggacaatttgctatataactttatgttactatattaggtaaagctttcctcactaaaaattaatagagatgtttgaaatctaaagatttttagagtacaatttttttaaagaagttggtggtagga

SEQ ID NO: 220891 - DNA, 574 bp, Homo sapiens
tgaacattaaaatgatgttgaatttaaccacaccatagagatgataaagtgcagtttccatgctacaggaaataaatccacataataggatttccaggagagaaaatcaatacagaaataatagaagaaaactttttgagttaaagaaagatttgagttgcccaattatagggaaaaagggaatcaggcaaaattagggaagagctccttcttggacattcctagggacaaagaataaagagcctggtggccctcagagtaagtgacagcatttaacgacagaagtcccagagcaatatctgaaggttttaagagggaaaaggttgtaacccagggatccttcactcatccaagccactggccgtatgatataaccacagaaagacattctcagccttgcaaggattcagacatttgccacccatgtatctttcctgaaaaaattatttgtagaaatagtcccaccaattaagaagggaatctaaatgccagaaattaaagatgtaatgtcaaagaaataatgataaggtataaagccaataaaatatagagttttacaataaataattgctaa

SEQ ID NO: 220892 - DNA, 500 bp, Homo sapiens
tctgctcttgaggatccccgtacatgtcgaggctgtgacaaatgctgtcaataaacagaatggcataaaaactaaaaagccatgaccttgagtaagttacgagagtagagtgaagattataaagcctgattaggaagagtttaagagatgacgggaagagagaatatacaaacagagagacaactctttcaagaagtcttagtataggctgggcgtgctggctcatgcctgtaatcccagcacttggggaggctgaggcaggtggatcacttcaggtcaggagttcgagaccagcctggccaacgtggtgaaaccctgtctctactaaaaatacaaaaattagctaggcatggtggcacatgcctggaatccaaactgtgggcccaattactcaggaggctgaggcaggagaatcacttgaacccgggaggcggagcttgcagtaagctgagatcgcgccactgcactccagtctgggcgactgagcaagactccatctc

SEQ ID NO: 220893 - DNA, 838 bp, Homo sapiens
gtgggattcagtttggaacatattgcctttgaatgcttatcaaattaccaaagtggagatgtcaaataggcttccactgtatgattctgaagtttagaggacagttctaggctaaagatataaatttgagaatcccaagaatatggggattatttaagacttcaaattggatgaaaccagcttgagaatgtaagtggagaagttatgaagactcagaactgacctttggggcatcccaatgtttaaagggcaattagatagaatcagcaaaggagactgagaaagaggagcctgtgaagttgaatgagaatcacaggaagttatttcccagaaggcaactaaagaaagtattccaagtaggaaggcgtgactgtgacaaatgctgtcaataaacagaatggcataaaaactaaaaagccatgaccttgagtaagttacgagagtagagtgaagattataaagcctgattaggaagagtttaagagatgacgggaagagagaatatacaaacagagagacaactctttcaagaagtcttagtataggctgggcgtgctggctcatgcctgtaatcccagcacttggggaggctgaggcaggtggatcacttcaggtcaggagttcgagaccagcctggccaacgtggtgaaaccctgtctctactaaaaatacaaaaattagctaggcatggtggcacatgcctggaatccaaactgtgggcccaattactcaggaggctgaggcaggagaatcacttgaacccgggaggcggagcttgcagtaagctgagatcgcgccactgcactccagtctgggcgactgagcaagactccatctc

SEQ ID NO: 220894 - DNA, 269 bp, Homo sapiens
agcagctagtaaaggggtcattaggccctcagtgatgacacagtccaacagatctaacttttcttcatggatcatttgtgagactggtgacaattaagggccattgttctttttgattaagcagaacttgggcattcataccaaacaaaagattttgtagaaatagatataaatgggccctaaaataggaatgcaggtgcaaacacacaatgcagctgcaaacacacaatgcggctgcaaacacacaatgcagctgcaaacacacaatg

SEQ ID NO: 220895 - DNA, 434 bp, Homo sapiens
taaattcactggaagttagtaaaataaagattacatttttattcctatgtaagttcactgaacccttaaattctattggtgggtcctgggttaagaagcagaagcaggattgtaagcggagtactaaatgaggaaatacattaattagaaagacaggaggaaggaaaagactccctttctccaagactaagtggaaagaaaactggggctgttcgagtggaattaattttagagccaaatatactcttgctccacagaacaaaataaaatgctattttaaaaaaataagttaaaatagatttcaagcagactgcctcatgaaagtctttgaaaacagaatgtgctgaattttgaagtgattgacaggatgaagtgttttttaaaatttctaatgtatatttcatcataaaaaagtgagtgaaagttcaaaaaaa

SEQ ID NO: 220896 - DNA, 2131 bp, Homo sapiens
gtgataggatgttaaccaccatgataaaaacttacaaaagaataaaaatcactaggaaatcagatgagaacgagaaagaaataaaatcttatcattacaaaaaccaccaaactgcaaagatagacactaagagaggaagaaaggaaaaaaggatatacaaaatgacaacaaaataaaaatcatatcaagtatcttctcagaccacagtgaaactagaaattaataccaagaataactttggaaactatacaaactcctggacacatataacttaccaagactgaaccaagaagaaatacaaaacatgaacggaccattaatgagtaacgagattgaatgagtaataaaaagtcccccaacaaagaaaagaccaggactgcatggcttcacagctgaattctaccaatctttaaaaagaaaaaatactaactcttctcaaactattccagaaacttgaaggcggggggtgtgggagtggaatttgtccaaactcattctatgaggccagaattaccctgacaccaaaaccagacaaggacacaactaaaagagaaaactataggccaatatccctggtgaaaatagatgtaaaaattctcaacaaaatactaacaaaccaaatccaacagcatatcaaaaagattatacaccatgatcaagtgggatttatttcaggaatgcaaggatggttcaatacatgaaaatcaataaatgtggtacatcacaacagcagaatggacaaaaaccatatgatcatcttaggagatgcagaaaaagcatttaatcaaatcaacatcccttcatgataaaaattcttaacaaattaggtatataaggaatgtacctcaatacaaaaaaaaggccatatatgacaaacccacagccaaaatcatactgattgggggaaaagtagaaagctttttctttaagaactggaacaagacaaggatgtctacttttaacactcttattcaacatagtactgaaggttctagccagaacagttagacaaaagaaataaaagccatccaaattggaaatgaggaagtcgagttgtccctgtttccagatgacataattttatatatagaaaaaccttaagactccacccaaaacttttagtactgataaatatattcagtaaagttgcagaatacaaaatcaacaaacacaaatccatagcatttctatgcaacaataacaaactacctaaaaaagaaattaagaaagcattcccattcacaatagctacaaacctccacccccaggaataaatttaaccaaggaggtaaaggatctctacaatgaaaactacaaaacactgatgtaagaaattgaacatgacacaaaagaaagaaaagacatcctatgttcatgaattggaagaattaatattgtccaaataaccatattatccacacaatctgtagattcaatgcaattcctatcaaaatataaattacattcttcactgaaatagaaaaaagattcctaaaattcctatgaaaccacaaagactctgaatagctaaagcaatcctgaccaaaaagagcaaagttggaggaatcacactacctgggttcaaaacatactacaaagctatagtaaccaaaacagcatggtactggtatgaaaacagacacacagggcagttgaacaaaatgcagaacccataaacaaatccacattagccctaactgacttttgacaaaagtgccaagaacacacttggggaaagtacaccctcttcaataaatggtgctgggaaaactggatattcatatgcagaaaataaaactaggcctctatctttcaccatataaaaatcaactcaaaatggattaaagacttaaatgtaagatccaaactataatactaccagaagaaaatataggggaaatgagtcaggacattggtttgggcaaagattttatgaacaaaacttcagaagcactggtaatgaaagcaaaaatggacaaatgggcatatatcaatctaaaattgctctgcacagcacaggaaacaaatgacaaggtaacaaccaacagaatgggagaaaatattcacaaattatccatctgaccaggagtgaataatcagaatatataaggaattcaaacaattgaatagc

SEQ ID NO: 220897 - DNA, 464 bp, Homo sapiens
aaatgattcgtatcagtgtttggcacatatggtgtgctttgaagatgattgttgttgataaaccaagtcccaggagtgtatgattttgcagaagtttatacatagctctggactgtcagaactgtgatttaaccaaggttctcttctctctcccctgcccctcttgaactgcactgcctaagaaatgttggttgcatggagacatatttttaattaaatgtaatggttcagtctttaagaaaaaattatagatcgagaccatcctggctaacatggtgaaaccccgtctctactaaaaatacaaaaaattagccgggcgaggtggcgggcacctgtagtcccagctactcaaaaggctgaggcaggagaatggcgtgaaccccggggggcggagcctgcagtgagccgagatcgcgccactgcactccaacctgggcgacagggagactccgtctcaaaaaaaa

SEQ ID NO: 220898 - DNA, 873 bp, Homo sapiens
cagtcttaaaaatcaaactttcctttctactcaccaccaaatttttttttttccaattgggggctttctcatacctactatataatgaaatacagtttcacagtctccctactctccctacctcccaccactccaatcaaaagataacataaaataatcctaaagggaggtgagaggccatttcagtctcctaagggatttaattgttagacagcaagtaaaaataccagttgtccctggggtatgttaagactgtaaacagagggagggcctgacctttctattgttgggtctaggtttacagccacatcttcatctttattcccagtaagcccaccttggtactgtaaatctccttcttcttctcttacctcagctgacatgtctggggaacgtgttcctttccccaaagatggtgtcttcctcaggcaatctgcccttcactctgaatctacccatctttccccaacagttgctagaagcacaaagaaaagactgttggtgccaagtctctggttgtgtagaggactgaagtgagatttttctgtatttcagagtagtagtgtattcattatatattcttcctgtattctccaccattaaaaaaaactgtgagaattctgtgaggaatagggtagagatttcaagtggaggttatgtgaagacataggctagagctggcttgctaccaggtatcaaataatagaaagcacttaaggtagaagctaatatcctccttcgttggattttagagtagaactaaaagagtttgatggattgatgtaatcgttcagatttaacagggatgaagtttaggattaagtttaggattaaaaagcccaattgcgtagactatgtaatggaggaagttgg

SEQ ID NO: 220899 - DNA, 611 bp, Homo sapiens
caattttgggtcctttcttttggcagctgcgatgcctgggccatctgctgtcaccatctcctgggagagatgatctcgaagagaagagcccagagaaagttcatccaaaggaagaaagttctttgttgctcccaccaaaacctcactcttcccctagacttgggctcctatcacagccttggctttgatccctgagagcctctttcctggacagtacagtgcggggagatggtgcaagcccatttcgacttcacacgcatgtgaagctgccaatgtgtgcttctgtgggaagagcagttaagagccggggttcaaatgcaagcactaccatttacaagctatgcattgaaaaactaacctcccggggctgcagtttcctactatgtaaaatggaaatcaatataaatataaatataaatgtatcatagtcatggagagcctggagtgcctgtcacattctcagtgacattcacaagtgttatccactgttactagactttgatcaaatttttaaaggggtgcccccacttccaaattcagaactctcaccacttagaggttgaaagatatcacccctgacaggtgccacagaacacccccagatgctcaga

SEQ ID NO: 220900 - DNA, 751 bp, Homo sapiens
gtattttcagtagagacgaacgaggtttcgacatgttggccaggctggtcttgaactcttggcctcaagtgatcctcccacctcggcctcccaaagtgctgggattacaggcaacttagtataatgtttctatttgttgtttttatcagtacttcgttcctttttgtggcccggtaatactctgttgtatggatatactacattttgtttatccattcatcaattaatggacacatatttctagtttttggctattatgaaggaaggagattttgatggcaggatagatggcatgagaaccagctgctgtggggaatgggaggggtgaaaggattacaaaactgctgagtttagaaacatgaattggattggtgacagtcggcacagttgtgttcttttctggagcagtactcagcagcctgcatgtaggaatgtagaaggtaagtggttggattgatcctagttctgctattatatagagaaaaccaaggctgaggtcattttagtgacttcacaaatgtagagaagtcagctgggcagggtaactcaccctgtaatccaagcactttgggaggctgaggcagaaggattgcttgagcccagcagttcgagaccagtctgagcaacatagtgagactctgtctctactaaaaataaaaataaaaaaaatagctgggcatggtggcatgcaggctactcaggaagctgaggcgggagaatcccttgattctgggagatagaggctgcagtg

SEQ ID NO: 220901 - DNA, 676 bp, Homo sapiens
gtattttcagtagagacgaacgaggtttcgacatgttggccaggctggtcttgaactcttggcctcaagtgatcctcccacctcggcctcccaaagtgctgggattacaggcaacttagtataatgtttctatttgttgtttttatcagtacttcgttcctttttgtggcccggtaatactctgttgtatggatatactacattttgtttatccattcatcaattaatggacacatatttctagtttttggctattatgaaggaaggagattttgatggcaggatagatggcatgagaaccagctgctgtggggaatgggaggggtgaaaggattacaaaactgctgagtttagaaacatgaattggattggtgacagtcggcacagttgtgttcttttctggagcagtactcagcagcctgcatgtaggaatgtagaaggtaagtggttggattgatcctagttctgctattatatagagaaaaccaaggctgaggtcattttagtgacttcacaaatgtagagaagtcagctgggattacaggcaacttagtataatgtttctatttgttgtttttatcagtacttcgttcctttttgtggcccggtaatactctgttgtatggatatactacattttgtttatccattcatcaattgatgagacagcatatac

SEQ ID NO: 220902 - DNA, 421 bp, Homo sapiens
tgtggcccctcctctagaaaatggagggcttttgttagatgtcccacccaattttatttgttgtgtgcacttgatgtcttaatttctcagtgttcattaaacaagccatttcaatatgtcaaccccatggcggcttctgtggcccctcagttgtcactggagacctgacaaattagttttcttattctgcaaagaaaatggggtaatgtcatgaaagatatcttttttttttttcagtaaagaaatacccctgatgaagttaagggaggaaaaaaaacacttctgccaagtgacagctgtggaagttctgggttgaggtgtgcttttttagaggctgtgagaaagtatggttgtttgcatgattatgccaaggttttcaaggtttctatagtgttggattttctacttcaagactacaggt

SEQ ID NO: 220903 - DNA, 360 bp, Homo sapiens
tatttttagatgataccattcaaatttttgttttgcgtgtggttgcataaacagctttagaaaggaagagaacattttaatagaatctgacttttgttccccatttcccctaggacatttagctcatttagaagttattcagtatctagttttcactggtttgaagcttttgaataaaattgtatatcccaaagagagaggaaagattagacacaaatcctgcatttagaacggtgcttaaatataattctgtgtcacttgacatttagtttgctgaagggtaagactttgtcttcatctttctgaaaatagatactgtgttctactgtttctgtttttaaataaaattgtggttctaca

SEQ ID NO: 220904 - DNA, 433 bp, Homo sapiens
atactgcttctgtgaacacacaggacaacagactgtcttccgcagtcatacactcagtcatattctcaaataggtatacagttcaaatgtataaatcagtagtcttacatgttacagagtgggtggatgttcctttgccaggggattaaaaaaaaaaaaatcccaagtcttaatactgctttctcccacacgaatagtctatgatggtgtatttttggattttgtacatgtttatagtttttttcttttcacaattttgaataaactgttgactagcttgagtatggtaagcctctacttaaaatgtaaattttgctatttttggtgcatttaatattttaatatttgtcttaattgtgttaattttcagagctgtgtttatcaccagatttagtatgttaacttttcaatgttcccacttattaaaaaaaat

SEQ ID NO: 220905 - DNA, 547 bp, Homo sapiens
gtcatcaggaatgccacatccttttcaccaattaggcttgtcatactgatgaataagtcttttatgacgttggagatcctgaaagctttgatgtaactttaaaacatgcctgtgaatgtgcaaaaagttaggatccatgaagtttctgtttgctaaagacaggtatgtcaaagacagcagctgtataagctattaagctgatttcgtagtgaaagggaaagaccacctacttacagcagtgagaagacaattaattctttttatagattttcagatactgtaaatcttagttttaaatgggtgaataccaatttgttacttttttcagcccgtcagacattgaagtggcacttaagggcggctatttgaaagagacgatttttgatgttttctcagtaatttttagctcagttggatcagagttaccagttgatctactgtgggcaatttcacttggaacacagaaacaacaaacaggtacaaccttgtgtattaataaccaggacaatgggataactgctatcctttaccagagttgggagtacag

SEQ ID NO: 220906 - DNA, 612 bp, Homo sapiens
aactgtgtgtcaaatgctgttgcaactctcttttccttaaagtttgttagcaggaatttcatttctcttagttatagcttaaccttctagtcatcataggaatttgacatgatcttgggacagcaggctgtgaataaggtggcccctaaaagcttttctacagcttgtaattaccctggacttactgaaactataggagttcttttagggcttttgtagggatttaaaaatggtaataaaggaattgttgaacttgtgtgtaacactgagctcatggttcaaaacagcaaattgtgaacctttaggttgcaaggccagagctaagaacacaaatctctagagttagggaaattatgtactgattgagatacagggtccaaacttgaaggcaagcctcacagttgagtaacacttctttctggccctaccaccttcttaattggcttctaacaggaagcttaacctctgcttaaagagccacttcactgcccaactccaggaggagacagtgtggtttgagagtggtccccactgaagttgccgtgcacagccttgggccatttgtagcagccctgctagtattcagcttgcttctctactgaaccctggcat

SEQ ID NO: 220907 - DNA, 455 bp, Homo sapiens
ccaaaaaagagttatctgggcctgactatcaacagtgctttacacaaaggagttagggtgctctatcatacaactatctgatgattcttttgcttaaactgattctaccccatttcttatggctgcgtgccacactcacctttagtagatcagaattccttgcctagagcggctggctgctcttgactttgtgttgctgtttctagctttttcatgttttgctcagtggtagggacaggcaggccaatttagtagagcttgacaaagtgaagcctggtatcttctatgaggctataaacgttgtctaaagacgcaatttctggttctgataaggctcctggtaattcctggactggaagacttggctgtcattgttttgctgttaagtaccccttccactcaaatgcaaaagtaaaacacacacatgccaccatccttcccaaccaaaccaaaac

SEQ ID NO: 220908 - DNA, 437 bp, Homo sapiens
atctttttgaagaacattcagaggaatattttgaagccaattgaggcctgcagtggaaaaccaaatatcttatcataaaaacttgaaagaagttatctctgaaaatgctttgtgatgtgttcattcgtctgacagagataaacctttattttgattcagcaggttggaaacactctttttgtagaatctgggaaggaacatttctgagcccattgaggcctatagagaaaaatctaatatcctgtgataaaatctagaaacaaaatatctgtgaaaatgttttatgatgtgggaattcatctatcagagataaaactttttttgattcagcaggttggaaaaactctttgtagaatctataaagggatatttcagaacccattgaggcctactgtggaaaattgaatattctgcaataaaatctagaaacaagctat

SEQ ID NO: 220909 - DNA, 429 bp, Homo sapiens
ctcacctgattatgtgattgagtcctgggaccagtggggccagtgaccaacctcacagcatatgactgtccacccaccagtctctgctgccttctgagagccacagcaaccctgggggaaaggcaaactcatcaccctggggcccagagacctttgccttgtctgttttggatgggcagctggtcatcctctcaagcatagtgcggtatcagaaagaaaagtgaagtgataaagaatttatttcccaggtaaaatcaccaggcttctggctacatgtcaatatatttcaaaatccaaactaactcattggaagggtgggggaaaagagaggttgagagaggtttggcatattttggaatattcctttggaattttggaacatattttatttctgaataaagcaaactgtagtcttccaaaaacacatat

SEQ ID NO: 220910 - DNA, 328 bp, Homo sapiens
tgagaaggaggcaagtcagtgacgtggggaattattatgcacagttcatttccttataatttaactctcagagtaacaaaagcataatgtatagcctagttttcgggtctgatttacaacagtttaaactaaaagatgatttctgcctcacccaccccccttctaatcacttctgctatcagcaacggagaattttgtatttcatcacgcgctgcgtcctcctagggacacagatctgagaagaggaaattttaaaacagggttcctgcagcagagatggatgcaaattttcactttctgcttcaaatttcattatggccttgctagt

SEQ ID NO: 220911 - DNA, 219 bp, Homo sapiens
ttattattatatgatacctaatgtttaactgatattttaagccatgtaaacaaagaatacttctgaatgtttcactaaatttcttgagtttttttttttaacttaacctcactaggcctcaatattcagaatgtgaaacaggggagttggattggtgattgctgatatttttttccagctgtaaaataaaggcaatgggtccatttaacctttacgatt

SEQ ID NO: 220912 - DNA, 351 bp, Homo sapiens
atgtacctgtgacaatatagtttcttgaccacatttatttatcgtgagttattatgtagtgacagatattaacttaaggaatgacatgcttaatatgtttgccacaattccatacattgatgaggatgctgcttttctgactaaggagaatttttgttcatctaagaacatctcccctggagagtgagagcccaagtcggctctgccttaaattcatgatctgattttatgagggtcacccagaacccactgtgcccttaacactgaagcctaggagaagcctgggctccttcaaggggaagaaagatgggcctgaccatcctatggtgggtgataacaataaagtgctca

SEQ ID NO: 220913 - DNA, 508 bp, Homo sapiens
tgaggtcagacgggcccttgggctcccgggcaggagcacccggcctcccagctccagaagctgcgcctcctccagctcgcctgcccccacgctgcccagtgactctcaggaggagaggagctgatgttcctgcacccatgatgaggaaatcaagactcggaatgtcctggtccctttccacaaggcctcgccttatccgctcccacaaagggcttacctcttcaggaggatctggccccatggtcagagaagtgagtgaatatcagctgtggggcacccagagcagttgccatcttctgctctgtctagcctgggagtcctggaaggagactgcagcctgagtgcctcccgagccagctcctctccaggacatcaccttggcccctgggtgtcccaacagacagtcagcacacaaaggttacctgatgcccaggtaggaactgcagctatttttaaactgagatttcctacaaattaaaattgctttgagtatgtgtgaaaaaaaaaa

SEQ ID NO: 220914 - DNA, 439 bp, Homo sapiens
gataccagccagcatgcttgtagtcccagctactctggaggctgaagtgggaggattgcttgagcccaggaatttaaggctgccgtgagctattatcgcacctgtgcatagccactgcgctccagcttgggtagcagagcgagaccttgtttaaaaaaaatgataataatgagatatcatacattctttgattttgtactaagtcattgaaatccagtctgtatttacattcacggaatgaatgaataactcatttctcgaatcgtttttgtatgttagccgaataggaaatttggcttgattaaaaagttgttatcatggcaaaatgatcccttctccctttaatacttaaccacagacctgacccatgtaaagaggagcagcccgcgcacacagctgttcagctctcagttttcttctccccctctaacctcaagtt

SEQ ID NO: 220915 - DNA, 127 bp, Homo sapiens
gagagagatgaaataggtcaagttgaaacgtcacacagctgtctattcttacctagatttgatcctttttcttaaacaaatgctcttcaaattgttggaggctgtattagtctgttctcccattgct

SEQ ID NO: 220916 - DNA, 512 bp, Homo sapiens
gggctgaggttggttactatggcaacattctcaaaactgcaacaatcccattacggatgctaaaactatagtcatttcagtgggagggtagcatggggagtgggtggtagtctttttatttttattttattttttttaaaaaaacctctcccacttccaaatcttttgcattcatttattttaagctttgcagcttagggtactaaaatgagaaacaaaaagtaaaaaagagtgtcatgtctctctccattaaatttctgtagtcctttatcagctccctttgtggggatacccagttttctacctactcttttattcatttatgctttcagttattccccaaactttcattgagacctgtgttatgggtgaataagagaatccttgttcttgtttctccttttaaattataaattctttgaagccattaattcacttcactgtaattcatttaaacaaatacttattgagcaatttgctttgtatcaagaatcatacttgcataagaagac

SEQ ID NO: 220917 - DNA, 463 bp, Homo sapiens
acgtagaaagtattagtgtgttaacatgtactgaggggtcgctgaattccagacactgcagaatgccttctccacattagtttacttcactcttcacaaccctctatgaggtatttcactcctatttgacagatgagaaaactgaggctcagagaggttaataatctgcctaagaccacacagcaaggaaatggcagaatccagacttaaatccaggtccatctggttcaagagttcatgcgtttagccagtatcctgtggaggtcacatcagcctttagtttctaattgttcaataactcccctgagtctccaaaaaggactgcaaactctgtggcctggcatcaaagtcctcctcgtattttctgctacaatttcccacaaatgtccttcggccgcctagattcctgccatggtgaaggactaatttgtcctgaaaacatcgtacactttctctcctctga

SEQ ID NO: 220918 - DNA, 450 bp, Homo sapiens
caaaactgttaaatcaactttgccgatttcccttgggaatccctggaggccactctaagtggtaatcccaagtttaagaaggaaatggggaaattttgctgagagtaaagatgtcgccgaactttttgaagggatttgcttcattcattcatttagtcattcaacagacacctgttgaacccgactgggtgcagaggggccagtcacaggacttattccagatgaacttttcttttgaaattagaatgcccttgtggaagccaaaggaggagcagaggcctaaaataatgtcaagtgtcaaagcaaaaagaagtgccattggctactacagtgtgtgatgataacaagagaggtgcgaattaggaattaaaaacgtttgaaaaactacaggccatatgctttgaaaccagccactttttccatctttcatctccctctcccctccggttt

SEQ ID NO: 220919 - DNA, 782 bp, Homo sapiens
cgcgtggcccaggcagcagccctggctcacagcagccgggtggttaattttctccatcatgcttctggtctgatggttctttcctccctatactaactcggatgagctggaaactgctgttgaggaacctggggagactttactagaagagtacctggcactggggtttcccaggcgcccttcatagcacctcccacagtctgggctttcatggggctgcgtgtctgcagctcctcagggcggggcagcctgctctgccccgcgccggccccctggcagctgtactgtgggtgcaggcaccccacgtctagcatcatgcctggtattggggagggtgctacgtaaatctatactcaagggctcctcagagttacaaagtgagcaggtctctgtggggaatgggtggtggatgctggaagaggctggagagcttggagcctgctgccctccaggggccagggggagatgcggtggtgggggaagactgtgaatggccacagctggatagactcggtgaaaagctgtgtgattccactcataggagggccctggaggtgtcagattcatagaggcagaaagcagaatggcggaggccaggggctgggggaggaaagaggagtgcatgttttgtggggacagagtttcagtctgggaagatggcgtcgctctggggtgagtggtgatggttgcacggcagtctaagtgcgctcaccgcccctgagctgtgcgctcacagggattaaaaaggtcaattcgatgttgtgtatatttgatcacaataa

SEQ ID NO: 220920 - DNA, 1260 bp, Homo sapiens
ggttcaagcaattctcgtgcttcagcctcctgagtagctgagattacagccatgcatcaccacggccaggtaatttttgtatttttagtaaagacagggtttcaccatgttgaccaggctggtcttgaactgcttgactcaagcaatctgcccgcctcagcctcccaaagtgctgggattacaggcctgaatcaccacgcctggcctatctttctctttttaaaattactttggtgcctgatacatggcagcactcagaagtctgcagaaggactgacttgctggacaactgaccgccagccctgtgaagagcagtaacagcagccacctgggcagtgtccattgaaagttcaaggaaggttcccttgccattcgcacatacacacactcacaaactcacacacttcttttatatgcttaacaatttaaaatctctcaatgggccaagatttttttctacaactactgagagcgctgatggtgcaaatatccaagggagaggtatcacactaccaccgaagttagagaaactcttttccctccttctagacccttacccttcaatctatcataatttggcttcaggctctaataatccactgaaattgatctggcgaaggccactgttttggacttcttgaattttgtaccatgtgtaagtattatgtattcaaaaagagttgcatttaaaagttctgaagagaaagtgctctgggcagtcaggtggttctgccatgacttgctgggtagctgtctgtgcctcagttttcttctctctaaaaaatgagacggctcaagatcaccatttgagatcacatccagctctgaaaaaagttatgttctgtgtcttctgtttaagaaaatagaaaatgcaaataaaaaaagaatgacgtatacacggctcagtatgcatcttaaagaatctgctcttccccaagggagacctccgagattgggcggggccaaagcccttttcgccatgaaaatagtgaactggaaaccgatttggtgtgaaatattttgaaaaggccgggtgtgatggctcacacctgtaatcccagcactttgcgaggctgagacaggcggatcatttgaggtcaggagttcgagaccagcctggtcaacatggtgaaaccctgtctctactaaaaatacaaaaattggctgggcatggtggtgggagcctgtaatcctagcttctcgggaggctgaggcaggagaattgcttgaacccaggaggcagaggttgcagtgagctga

SEQ ID NO: 220921 - DNA, 327 bp, Homo sapiens
tgcatttccgaggcttgaacaagttaaggcaatgggaaaggtcacacaatgagaaaatgcagggccaggatttaacccgtctgagatgttctgactgtgctatgctgcctccccggacatgagctctgcgataatgctgtccccaggctgtaatcattccctctttcatccctgcctcctctatccctggggtcagagggacttgtagttgaatctctcactcactcattggtgtggtctctccctaaagcagggtggagtttgtcttagcgttatcactgcatccagcctggcgaaagagtgagactccatctcatataaataaat

SEQ ID NO: 220922 - DNA, 506 bp, Homo sapiens
gatccccagactgtcgacaggttggctccgtggccgcacactcctggaagatgggacattcaaggttcgagtggcgacccgaaaccctaggaagaaggcagcaaatggctgaggtggggctggggctgagaacctgatccctgagaggccatttattgtaagaacaggcaacatggcagggaagtgaccaggaactaggacaggcagtaagtgggagagaatgacggcaagcctggagctgtcccagaggtgactgacggatgctgtacaaggtggaatattttgataatgtgagattccaagcttgaggctttagggaggaggaaggagaagcagtctacaggtgactgtgaggagtcggggagagcgcagccctcattggaaagggcagcagggagcgggttgtctggggcggggcagtgggacatggtgtcctccgaagtgcctgcctagctcagtgccaggcacacagcaggcacacagacaaccaaactgcaaggaacaca

SEQ ID NO: 220923 - DNA, 604 bp, Homo sapiens
tgtctgttttgttttccccccatcaacctcttctgaccagacttacccagaaaacatctttcccctgtgtggagccagttggtacagaaatttcattatcagtcccttatcaggttgaccgtgagccccaccccagggtggcactgtgagtcacctgggaagaaaggcctccgggcaggagggcaggtggttattcctgcttctccaggaaccaacccaaaggcagcaaggtccagtcctacgacataaagcaattcctctattaaagcggggaacgagaccatgtacaaagtctaggttaagagcgaaggacacttctcagggccttagtttgctcatctataaaatgaaggtgttggaaggttctccaaacccctggcagggctgcagccctgattctctggattttaaaggctctgtggccagactgggggaggggaggacctctctgtgcccgaggcctgagcccagtctgatgctatgagatcatctctgacagcccgttaggcacggctggccacttctccaatatgaaggctgccccactttcagcttcactatttgagtttcactatttggaatgcttacctagagccagaaaatg

SEQ ID NO: 220924 - DNA, 560 bp, Homo sapiens
cggagaagatcttttttatattcagccatgccaattgacctactaccctctccatagccaaaggaatgcccaaatttccacagaaaggcatttttatatgaagaagctcatccctgtggacctttctcttgaatgcctactatgagtcactcagcaagagaggcacccagctccctcaaggtctgcagtgcctcggaggcccacttccctccatgaaacagtctctgaacatattattcctcacggatgatcaccttcttaactccatccagatgtgtgcctctgtctcactatttagcgtcgtcctagaaaatactgagtaattgtttcatgcgtatacatcatgtttcctcaagtagaatctacctttatacaatcaaaagtgtcagattgatggatgagtagcaggtaaatttctgataaagagaattaaattaagtgttaattgtagaatctagtgatgggtttatgggtcttaactgtaaaaatctttcatcttttctgtatgtttgataactttcatataaaaataataaaaactttagtttatcttcatgtaa

SEQ ID NO: 220925 - DNA, 359 bp, Homo sapiens
  misc_feature (55)..(55): n is a, c, g, or t
  misc_feature (101)..(101): n is a, c, g, or t
gctttcatcccccaggctcctgtgcacacaaaggattagagctgcctctacttanagtcaattagagataaggagaagctgacatttcgacaaccctaccntatccactgctgaaaacagctcagattaaaataatccagtgaggatttgatctccatcagccagagggaatcacatctcgccatggatatgatgacttctgccctgccaaagccaaggttgatctcaggtctctcgtcctccaccctgcactcaggcaacaaaagcattcgatcagatgctgtgttacacagctctgatgtgccgggctggtcctgggtgccaaggatacatctatctgtcaataaacaagggaggca

SEQ ID NO: 220926 - DNA, 452 bp, Homo sapiens
cggagaagatcttttttatattcagccatgccaattgacctactaccctctccatagccaaaggaatgcccaaatttccacagaaaggcatttttatatgaagaagctcatccctgtggacctttctcttgaatgcctactatgagtcactcagcaagagaggcacccagctccctcaaggtctgcagtgcctcggaggtattcatactgagctttcatcccccagaatccagtgaggatttgatctccatcagccagagggaatcacatctcgccatggatatgatgacttctgccctgccaaagccaaggttgatctcaggtctctcgtcctccaccctgcactcaggcaacaaaagcattcgatcagatgctgtgttacacagctctgatgtgccgggctggtcctgggtgccaaggatacatctatctgtcaataaacaagggaggca

SEQ ID NO: 220927 - DNA, 1085 bp, Homo sapiens
ggacctgggtgttggcggctgcagcctctgggatgaccctgctcgcttcatcgtggtgcccgcggcctatgccttggcactgggcctggggctgccagccaacgtggcggccctggcaatgttcatccgcagcggcgggcgcctgggccaggccctgcttctctacctgttcaacctggctctggttgatgagttcttcacgctcacgctgcagctgtggctcacctactacctgggcctggcccggaggccgcctgccacgcggccggggccacctactacgtgtccacctatgcggcggtggtcttcgccgcgctcatcagcgtgtgccgctgcggcttcgtacgcggtcccgggcccagggcggctgcccgcctggcccggtgcctacggcgccccgcgcgcgctgcctgcgccttcgcctggctggcgggcctggcccctccctgcctggagcaccgctgggcaagctcggggctggcctccgccacggtggccttcgcggccgccttcctgctggtgctcgcggccaacgtgagcctggcgcgggcgctcaaggcgccctctggcccgggcccgggccctgcaaccgccggcgcgcaccggcgcgcggccaagaccatggtcctggggttcctgctggtcttcgccctcagtctggcgcccaaccacctgctgctggcgccctaggtggctgggggggaagacaacggagaccggtgtcgcgccgcctccacgctcgacatcctgcacaccctcagcctggcgctgctgagcctcaacagctgcctggacccactcatctgctgcttcttcgtgcgcctcttccaccaggactgctgctgggcactgagctgccgcctggtgaagggggcgcccagggcgcatggggcctccttggcctcctcttggagagtctcctggcctcccctcctgtctcacccccctgtcaccctcccagtggcatccagggtggagaaagctctttggaaagacctagattctaatcctgacgcaaccacatactacccctgtagctgtgaacctccgggctcatctgtaccaaggacatagaacattctttg

SEQ ID NO: 220928 - DNA, 448 bp, Homo sapiens
gcaattgaacactgcatgacgattttgtctctattttgcttttacatcagaatggtttcctccagcaattggcattacctagaaaattccttaatagcattttgctgttcagttctctgacctaaaaactgagttgtgaatcagcagtttcgagaataatggaaatccggccagacacagtagcacacgcctgtaatcccagcactctgggaggctgatgtgggtggatcacttgagcctaggagtttgaaatcagcctgggcaacgtggcgaaaccccgtctctacaaaaaatgcaaaagtttgccggacatggtggcgcatgcctctagttccagctgctcggggtgctgagatgggaggattgctcgtgcccgggaggtcacgactgcagtgagctatgattgagccactgcactccagcctggaagagcgagacactgtctcaa

SEQ ID NO: 220929 - DNA, 505 bp, Homo sapiens
  misc_feature (6)..(6): n is a, c, g, or t
caacgntggtctcagctatgggattcccacgtactacacaatagtaggtgggaatcccataggtgaggtcatcagagaaggctcctccagggaggtggggctgaaggtgtttgatgggcagggagatgtccatcttcgctagatggagtagcgttcatgaaggtcctaaggctgggaacgcttggcatgttgagggacttaaagaaggccgaccttgcaacagtgcaaagtgcccagcaaggaggagatgggcacaaggtagggttatggggattactgagactcagagcatgtgggtcactaaagaccatggaaaagagtttgcattttgttactccaggcctaagagaaagccattaaagacgacttcttaaaagacaaccctgacccaggctggagtgcagtggtgcaatcatggctcactgcagtcttaaagtcttgggctcaagtgatcctcctgcctcagcctcccaagaagctgggactacaggcacacaatcatact

SEQ ID NO: 220930 - DNA, 963 bp, Homo sapiens
tcggtacccacctcctaccccacgcaaacaaggctcttattttttttttttttttcatactgagtctcactctatcgcccaggctggagtgcaatggtgtgatcttggctcactgcaaactccgcctccctggtttaagcgattctcctgcctcagcctcccgagtagctggattacaggcatgagctatgaggcctggcaaatttttgtatttttggtagagacagggtttcaccgtgttggccaggctggactcaaactcctgatctcaagtgatccgcggcctcggcctcccgaagtgttgggattacaggcgtgagacaccgtgtttggcctagatacagacttaactgctgtttgagcagctactgtgtgctggacactggatacgaagtacccagtggtgaataaagattctccgccctctgggactttctttgttgggtggagatgagatttagtgttctgaaggaaccaggaacccacaggtactacacaatagtaggtgggaatcccataggtgaggtcatcagagaaggctcctccagggaggtggggctgaaggtgtttgatgggcagggagatgtccatcttcgctagatggagtagcgttcatgaaggtcctaaggctgggaacgcttggcatgttgagggacttaaagaaggccgaccttgcaacagtgcaaagtgcccagcaaggaggagatgggcacaaggtagggttatggggattactgagactcagagcatgtgggtcactaaagaccatggaaaagagtttgcattttgttactccaggcctaagagaaagccattaaagacgacttcttaaaagacaaccctgacccaggctggagtgcagtggtgcaatcatggctcactgcagtcttaaagtcttgggctcaagtgatcctcctgcctcagcctcccaagaagctgggactacaggcacacaatcatact

SEQ ID NO: 220931 - DNA, 346 bp, Homo sapiens
tgggaggtcaaggctgcagtaagccgagatagtgccagtgcactccagcctgggtgatagggtgagactgtgtctcacaaaaaaaaaaacaaaaacaaaaaactttgatataaagtaaattgctgccacacataaacacaatagaaagacactgtcaaatatgcaaggattcaggaaaaatattataaaaatgctccttaaaaaaatctactcacaatccacttaactaaagattttttttttcaaaactatacaaataaggaggctaaactattaaaatgcagtcaataagtactgaatccacagaaaaacagaccaaagactaaaaactgtggtaattacaatt

SEQ ID NO: 220932 - DNA, 370 bp, Homo sapiens
gcggagacaggtggatcatttcaggtcaggagttcgagaccagcctggccaacatggtgaaaccccgtctctactaaaaatacaaaaattagccagctggtagtggtgcatgcctataatcccagctactcggaaggctgaggcagaagaattgcttgagcctgggagatggaggttgcagtgagccaagatcatgccactgcactccagactgggcgacagagtcagaccctgtctcaatcaatcactcaatcaatggaatttcacacctgctagatgtgaaataggatggcgatcatgagaaagacaggcaatgcaaaactattcacaatagccaataggtggatgcaacccaagtattcatcaacag

SEQ ID NO: 220933 - DNA, 433 bp, Homo sapiens
tgaaaacagaattggggaaatggaaagtgaagaaatcctagctgtcaggaacaagagaagaatgacaggaaacctgctactgagatatggaggtattcctcttgagttttcacatatggcattctctcatgcccaggaacctgctcttcactaaaccacacaccttcctctaactcagtcacaactaagcttctatctgcacactgctaatgctgtaactgttttgttgttggttctgattagttgccctctcaaccataagcagcctgtcaacaagacctggctccatccttgtcacttccccatagcacttaattcagtattttttccccaaggtagatagttgtgaggcagcatccctcaaaatatctagtaacataatgacatccagtaaatgttcccttaattatttactgcccttaagctttatgca

SEQ ID NO: 220934 - DNA, 185 bp, Homo sapiens
aaatgtcgaggctaatctagtacaacaggcttcccagtgcactagtgtggcagaatttttttcgtgtgtatacagagtctggctttgtcacccaggctgaagtgcagtggcatgatctcagctcactgcaacctccaccacccaggttcaagcgattctcctgcctcagtctcctgagtagctgg

SEQ ID NO: 220935 - DNA, 610 bp, Homo sapiens
aggaactccaatgaggcatataaagttggtagaatgttgaatctctatttaaaagtgtgaagaacttttccaatgataacaactaatcttattggggcacaggaaaagatcgtttgtccaatcagtaatcacagttaccaactgccatcctatgatcttaccatagttgttcctccacattctaggctgttgatactgtgcagtcccagctcttccattcactcaatctgtgagttaggacatgctatttcatctctctgagtctcatttcatcatcaagaaaatagaaacaataacctgacaggtttgctttgaagattacagcattcattctgagaatgaaataatatgtgaaagtgctctgtcaatgtagagtgacactctaactttatgttaacactgatattaattgttcatgatgtgagttttaaattaggatgctgttttcagttctcaatgagacagatgttctacatgggttacagtgataaatcctggatttttgcacactaagccagtatacatgccaaatttcatattagtgcttaccttgggaggtttccttaatgatgggaaaaaaaaaattcagcagcagggatacagagggttg

SEQ ID NO: 220936 - DNA, 331 bp, Homo sapiens
atcacgccactgcactccagcctgggagaaaaagcaagaccccgtctcaataaataaatcaaataaagaaattaagaacaaaaacaacaaaatataattctaagccaaaaccataaatgtatattgttacacattccacagaaatatgaactcttctcatttttacatttaaaaaaaagtgacaggtaacattgtatgtatttaccatgtgcaacataatgttttgaagtatacgtacattgtgggataaattaaatgtagctaattagcaaatgcgtgacctcaaatagttatcatttttgtggagaatgcatttgtccactcagcattt

SEQ ID NO: 220937 - DNA, 251 bp, Homo sapiens
tgtgggcagagttgggctattttggtaatccttgagtaggcagatggaatttgaggccatcttcttgggtacatagatcactaggaagctataggtctagcaactgtggattagggctgggctgagaattgtttcatgttttttgtgactgtatagctagagactctcttgtttgcagagagacactctgaactccccctggccgtcaagggaaagactgccttcaccctcctgagctgaccttacactga

SEQ ID NO: 220938 - DNA, 322 bp, Homo sapiens
attctgttactgatttgctgtaattctttaagagatttcttattgctagaatttagattgttgataatttttgcctatttgtaaacagcactgtgttgcattctatactctatacaaactctatacaaacttcttttgtatagaggatttttgtgagtttagtgtcattggcctatactttctgaagcattcttttgagattaatttagtaaattaactaatttcataaattgcagaccaaaaataatttggaatactagggcaaaaatcttttcagttgttaactcttttaaaaatctgaattaaaagtcatattaattta

SEQ ID NO: 220939 - DNA, 419 bp, Homo sapiens
attacacttgcctatttcatatccctttttcatgccttgtctgaactatttctagcagctctgttacaattttcctttttcagtgttttcttctgccaatatcagagttatccttagaaaattacctcttcatggccaggcatggtggctcacgcttgtaatcccagcactttgggaggccgaggcaggtggatctcctgaggtcaggagttcgagaccagcctggccaacatggcgaaaccccatctctactaaaaatatacaaataaaattagctgggtgtggtggcagtcgactgtagtcccagcagctcaggaggctgaggcaggagaacccaggaggcagaggttgcagtgagctgagattgtgccattgcattccagcctgggcaacaagagtgaaactccttctcaaaagaa

SEQ ID NO: 220940 - DNA, 388 bp, Homo sapiens
tccctgagcatggtagacaccaaatataggatggctgaaaggattgggctggtttgctgttgaacccttagaggatcaatataggttgagtatcctttatctgaaatggttgggaatttggattttgaattttttcagattttgaattgtgtttttttttaatttttattttttgattttggaatataagtatcccaaatctgaaatgctccaataaacattcatcatgttggcactcaaaaagtttcagattttggagcatttcggactttggatttggggatttgggatgctcaacctgccctgtattaaactgaagatgctgaatcaatttattattcaagtgcttgtttgtctaagaagctgctaagaggaagccaaagacaaa

SEQ ID NO: 220941 - DNA, 535 bp, Homo sapiens
aaacatgtcgagctcacctgaggaagtgatgtgcaatacaagactcctgcggggtcactgcccgtcacctctgagacagcattcccggctgtcataatgcattgccggtgaccatctcattaaagctgcatggttggctggcatggtggctcatgccttgtaatctcggcctcccagggtgctgggattacaggtgtgagccaccaggcctgggcaggaaagccacttaaaaaactcaagagaggcaggttcacatttagaggcaacacatagtacaatttaatgcaatgacttaacgcaggtggattagatcatatagtaagagtaaatgcttcttccaaggcaaccttaggagaaaaaaatttaacatagtccccctgccaaggtagcgaaggaagaagggtgagatctctgcaagaaatgctgatgaatccacgtcagggcatttttagtcagaaatggtatcctctggtatgacatcagaagagtttaagactccataatctgtatgtcagcaaaccagtcattagtcaga

SEQ ID NO: 220942 - DNA, 532 bp, Homo sapiens
ttccttgctctttgaagtgtttgttttgagagctgttacttacctaaggcataacttgtagctcttggtctcttgcctgattactattatatcaagttaacatttttgagagagctctagccctctcagatacctttatcttgttgccatttagtgagacattccagtgtgttgtgtgtcttacattttatctaggttactctaagcactgcattagtgcttgtttatgaggaagcagctaacaccttccagatggctgttagctcagacttgattcaattcttcaggaaattgtcattatggctttaattcagtagactgcgctgtagctttgaacttatgaattcctatacacacacacacacacacccaagtagctgggactatgggtgcacatcaccatgcctggctgatttttgtattttttgtggagacggggtctcactttgttgtctgggctgaggtaggaggatcacttaagtgcaggagttccagaccaacctgggcaacatagtgagactgtctgtttttt

SEQ ID NO: 220943 - DNA, 594 bp, Homo sapiens
tatgggtcatgcctttgaaggttgtgaaatcaaattagcaggttgtgaccaggaactgctttaaataattaaaatgcatggaatggaatggaatggaagacattaacgtgtatcatacatggtaagagtgagtatttgagaaattggtttcaataatgtgtgtgtgtgtgtgtgtgtgtgtactgcgacacaaagaaacatattttggactgtgagttgtggtcaaaatagccttaaaataattgaactaagccagaggcattcctatctcctttatcagacactcactttcccagcctttcttgcagttagagtaaccacagttgtgcaaatagtaaaaactgaagtgtacagacaggttctgctcagtgagactttcagggaaagttttccttccagaatacaaagacagagtttctccagaaagacagtcttttgctcctgcttccagttttgaatacagttgagatgactagagctgtggcagccattttgcaaccacgggacaacaaacctgaggctgaaaagcccaccagcagaggatggttgatgggagctgacaaaaagaccgtgttcttttttttcttttgagac

SEQ ID NO: 220944 - DNA, 444 bp, Homo sapiens
tggaaacaattctgctgagatacaatcttgtctcagcttcactttctctgctatttattatgaagtgctatgtgctcaaaaataggggctgagttttaaagtcacaggccaagctctgggctctgaaccgaggagacagcttgggcccggttatctgccctagagaggaagggtcttaagcaaagcggctcatctgtgactcgggatacctcattcttccaactcctgggacgtaggccccagtcatccctgaaagcctttgtacagtgaatgacctctgtaccagaggggtccccaaggctggagcagagaaaagccccaaaggagagactctccaggtctctccaggttgctgagtgagcctcctcccttgacttgctttctctgtttctctgtgactttctcttccttttactcctgccccatgccctgtgtggtgctatc

SEQ ID NO: 220945 - DNA, 371 bp, Homo sapiens
gcaaaaagcccggggtcggggacgccagccaaacgcaacctccacgcagagcccaagacttgcggagctctgctcccctcctcccgcctccctccctccctccgcttttctgttgttgctgctgtggcagacaaatgtgatgtggggcgcagggaattgccactgtcacaggcggcgtctgcgtctccctcgcccgccctcgctcactctcgaggaaggcgacgcatttatctgcagggcggccgggcgtccgccggggagcaggagcgccgcgcgctgtgcgccgagagcgcccgcatcaggccggctccggcgcacgctcgcgccaggggcgccgcggccggtcgggagggaggcggctgcgcggccgc

SEQ ID NO: 220946 - DNA, 430 bp, Homo sapiens
gctcaggctggtcttgaacttctgggctcaagggatccttccactgcagcctcccaaagtgctggcattataggtgtgagccaccatgcctgcccacaaatgattatttatggcttttaactcagaagacattcatagaacaaggtgacattgctgttacaaaactcttgttcccatcttcctatttatgtgaactttttttgtgcttaaatctctacaaatgaaaaatagaaatataattgatgtggatccctgtcttgtttagcaataattaatattattttacatcggggggaaagcctcatctcattaaagaggtacttccaataacattttactgtttatttttaataattgtaggaagttgcaatgtatttatgttgttttcatccattataatgattgctcaatccagatgattaaaaaaaaa

SEQ ID NO: 220947 - DNA, 450 bp, Homo sapiens
cagctctgtaggccttgggaaaacattttatggtcatatggggctctttggcatgaagatgggcccctggtcatgttggcaaggatactgacaaataccctcccacttctctgtaggtagcaggcatgtctaaaggccctacaaacaagttttaaaaccaagtttaagtagtgacttgccaattcttgtctatttagggacaatgatctattttgctgattaagaagagtgcttttccttctattctgtttgtcagcctttggaccaattgctgctctgtggcaacagtcccaagggcaggcaggaaggaagattttaaggcgacgctgggcattctagaagcacctaactctgctttgtctgagcatctgaccgcagggttctccaaaatgcagaaggccttcttgccttagagccccttaggtccacccagatggcaaaaaaaaaaaa

SEQ ID NO: 220948 - DNA, 431 bp, Homo sapiens
agtaggtgagtggtggccaggggctgcgggaggcaggaaggagggcatgactgctactgggtacaaggtttttttttagagtaataagaatgttctcccagcctgggcaacatggtcaaaccctgtctctactgaaaatacaaaaattagccaggcgtggtggtgggtgcctgtaatcccagctacccaagaggttgaggcaggagaatcacttgaacctgggaggcagaggttgcaatgagccaagattgtgccactgcactccagcctggacaacagagcgagaccttgtctcaaaaacaaacaaaaaaaaaaagaatgttctggagttaggtaatggttgtacaactctgaatatactaaaaatcactaaattatatactttaaaagaacaagttttatggtatgtgaattatatcccaattatattt

SEQ ID NO: 220949 - DNA, 448 bp, Homo sapiens
accccaaaaaaacccccattttcttaggggcttttgattataaaagagcccgtgagagatcccccccaaaagagaatataaaggtaactgaacctgaaatctgtctttgatgagtttataataccagaatacattgcaattatacaacatagaaagcaagtcatgcagaaacatgattgcattatgtgctagatcagaaaagagaagaatctcttctagccatagtgatcaggaatgtctttatggggaattatattgaggaaagacaaatatgggacatgtagggctagagggactaccactgatgttctctcaagaagacaaggctgcaaagctgagtttcaggagatgaggtttgtgagtctacaaatatgatcagaaacatgatttaaaactagatgaatgccaggcacggtggatcactcttgtaattccagcactttgggag

SEQ ID NO: 220950 - DNA, 613 bp, Homo sapiens
gataccacatatttggtcatgattgtcatagtctgcctaatctactagagaagatgtatttataattttactgtaaaaggaaggcttaaatattttagtcaaattgtgtgctacaaagtagattcctttgttggtataatatcacaggataatctggacattaattttatgactcagaattataagtattatggattcactagtgattgctgctgaattgtgagcttcttaaggggctgcgtatgtattttatgaatactttcttttgtagagaataagctctaagttactagataagtgaatgcagttggcaagaatcatctaagtgtatgtaatttattttattgtgtgttagtgtctatattaatttttaaaggttggggtgcagcttgcttacttgtctcactggagttcatgtgccagagaatgtacataaagaactgatgatccaatgagaagggaacaggtttattaaagggggggctggacttcaacatgcagcgtttccatttcttccaccccaaatgtaaacttggagattggccaggaggaaagctggtctgagctcatctccttgggctgccatggggatgaaatgcaggcctgcctcccc

SEQ ID NO: 220951 - DNA, 475 bp, Homo sapiens
taaaagactcttttccagaaaccagaatgtttttatattttcagtaagcaagatctgttttgcttaaaagagtggttgttagtgctctgccgtaaaaaggtccagttctccttatggaaatctgagatggatgtattttcctgccttacttgaagtcagaggcagccatgtgtctcatattggcaataggatgtcagcggaagtgatgtttgtcatttcttttcttttttttttttttttgagacggagtcttgctcttttgcccaggccagagtgcagtggtggtgctatcttggctcactgcaagctccacctcccgggttcatgccattctcctgcctcagcctcccaagtagctgggactacaggcgcccgccaccacgcccagctaattttttgtatttttagtagagatggggtttcaccgtgttcgccaggatggtctcgatctcctgacctcgtgatctgcccgcct

SEQ ID NO: 220952 - DNA, 396 bp, Homo sapiens
attgagtgcatattgtatgccatacaattttctaggcacttgagatatttatcagtgggaaaaaaagacaaagatccctgcttggataggttatattatattcagggatacagatggtatgtgatgaacactataaataggtaaattataatatacattagaaattgatagcattatggaataaatatttaaaaaaaacagaaagggaatgtggtgccaagatcgtaaatagcaatgttatggataatgtgtaaagtcacatgagacaggccctctttcaatagaatagatttatttagcaacttttagcaatggttgtatttgtagactgtatggtggctctgtctacatccagtactccccaaacctgatggattttaatatctgggaaactac

SEQ ID NO: 220953 - DNA, 446 bp, Homo sapiens
aaaaatctagaatgagaagagttctttgcaatttttttttttaccaaatagaatataggaaagatagctgcaaatatacctgacacacttatctgtgagtatggtggtagcctttttattttattttattttgagagagggtctcactttgtcacccaagatggagtgcagtcatgtgatcagagctcactgaagtcttcacatactgtgctcaagcgattctcccacctcagtctcctgagtagcagggactgcaagtgcatgacaccatactagctaatttttgtaaagatagggtttcaccatgttgccctggctgatctccatctcctggactcaagagatccagcactttgggaggccgaggcggcagatcacgaggtcaggagatcgagaccatcctggctaacacagtgaaaccccgtctctactaaaaatacaaaaaa

SEQ ID NO: 220954 - DNA, 439 bp, Homo sapiens
atagtgtcccttgaagcatcatcacatgcaaataaaatgacggtgcagttaacctctactataacaaggtatgttaggctttttctgtatatgttctcatgtgaaatgttagagttgaacattttctgtaaaattgtttaatatacagtcatgtgccacataatgacattttggtcaatgatagactgtataaacaatgttggtttcataacattataatgaagctgaaaaatatctattccctagtgatatagctgtcataattttaaagtgtattacatgactcatggggttgtgttgatgtttgtgtaaacaaactttctgcactgccagttgtataaaagtataagtacagttatgtacagtacacagtacttgacaatgacagtaaacaactgttactggtttatgtatttagtatatgataacttttattatc

SEQ ID NO: 220955 - DNA, 377 bp, Homo sapiens
tcctccaggtcagcttggggtttccacagagccagggctggggtccccacgtgcgtgtccttatggataggggagggcttgggtgacctcaggacccctgtcagcatcctgatttccctcattgttgcccacccattccagcatcggggtcatgagagaggccatgccagactcacccaaccctaccatggaggctgaagcaagcccctttgggcaaagaaggtttgaggaagagaaacccttcaggccaggctccctgagctgccttcaagaggagaggcccccaggctgctgctgagaccaaggagctgccattcctgggtggggtaagtgggggttccccgggctcctaggcctctagggcaccctctcttaca

SEQ ID NO: 220956 - DNA, 627 bp, Homo sapiens
ctctcctccctgggcctctctctagcacagctcataagacactactacattcaggtgtctgttacccagtggtcactcctaccaaactgtgctcctagaaggtcaagaccttggctcaggcaccttcaaatttccagaggcgagaaccagtttggtacataacagacaatcaaaagtttgccggagtaaataggtaacatgcactcttggtggaagttagtcactctgagtcagatcaacttcagggcatctcatgctacaggtcacaccttgaaccctaataaatgatccagtaacaccttgcagatagctgctcatccttcttccagatgtaacaggacttcatcatcaaccccttttaaaaactaacaaagcagccagacgcatgcaaatcacattgtttcatgtaatcattttatcagaaaataaaataggctcattgtgactggaaaatataatttgtgctatattagtagcagaaagtataaaattgctgcttgggcttaagtgattctgaatgatcatgttacctcgtgtttagtctgggcaaggggttgaagggaggggtcaaatggccttactctgaaagagtacaaaacctggtacagagaaggctgggtaaatgca

SEQ ID NO: 220957 - DNA, 479 bp, Homo sapiens
aagagaacaaaggctgggttgcacaaagccttcaatcggaagagagttaatgcagtttgggaatctaccatgtaccaggctctgtctcaggagacttcacacactatattatcgatttaatcctctcaggcactgagaagtggctgtcatctacaccctcctactgagcaagctgggactcaaggtggttgagtgaatcaaccggtcatacaagtaggaggtggagcttggactcaaacactctctgagtgtacaatgtatttttttaccctgaggccactaagaatcaaaatgcacaaggctacaatgttacatttgaggggtgagccaggacctacacagttagtatgatgtcaccactggaaagaagttttgagatcctccaccaagaaccataatctaggcacgatgatattataatcactctgggcctggcatggtggcttatgccggtaatctcagcactttgggaggctgag

SEQ ID NO: 220958 - DNA, 340 bp, Homo sapiens
gtagtttttcggggggtggaaccttgctttgtgattccttgaggttcgaggaactgataactgggcgcgatctgcaaccttagtgttaaaccccaagtgctgttataacaactactcgagatcaacaaataattggcaaaggctgtggaggttttttgaaaagcaaaagcttatgcgtagttgtagggccaaagaggtggctagaagatgtttggaaaaacgtgaaaagtcctgtaatactagttaacacagctttcgttctgtaatctaaacgtgctaaaagaacttagcttaagttaatggaaatgaataaaattaatcataaatgattacgttattc

SEQ ID NO: 220959 - DNA, 564 bp, Homo sapiens
agaacttccactactgaccaaggtggctgaatttacccggaaataacccaaatagcagccacaacaaaaacgacaacatacacgaaacaatttttaaaacactgggcaccaagcaacaaaggacagtaaactcggagaagtgacagacaaaggaagtgagccctacagtaccctagctgatctccttgagagagcttccacgccatggcacagggaggggagccacgtggactcccagggttgtgggtgtggagctgagaatctggagagaccaatgtggctagagtttataggacagagtaccagagaggagagagcaacacagagagagaccctggggtctgcagagggtccccttgatcagcacacgtgtgtgaggaaactctctgtggctggggaaagaactgtctgaaaagatcagaagatacagtccctgctacttagagcaagattataatttactggtagaacattcaggaacagcatgcttcagtagtgggaaattccaggtgtatgggtttgtgagggctaccataacaaagtaacacagaccaggtgacttaa

SEQ ID NO: 220960 - DNA, 176 bp, Homo sapiens
tcatcagtaaaatggtgcagaaaacagggcttcatgtcctggagggtgtgaattcaccagggccctaaatcacccagaccctactgtgtccttgcagggacatggcactcctgcgtttgcttcattccattaaagagaaaaaacacagacacagccactggttgtagagctcgtgg

SEQ ID NO: 220961 - DNA, 376 bp, Homo sapiens
gagtgggaagctgctggagacatctatttttgtatgggctgtgtgctaagaatagtttttacatttttaaaagtaaaacataaaaaggactattagcctttcagaaagaccacacgctcaaagagttgaggaaatttcctcttggcccacaaagcctacattattagtactggccctttacagaaacaaattgggctacctttgacagaggtgagttagtgagtgaatgggctaaaactctatgtagagcaggacatgccaggcatcgaagagcactgggcagcagcttgacagaatatcaatctacttcatcctcacacaagtactacaagttaaatattaataacccaattttagatgagctaattgtttctca

SEQ ID NO: 220962 - DNA, 463 bp, Homo sapiens
aggctggtttttttcttttatgctttatggttttccaaattttctgcacttagcacatatgaaagtaatttttaaagtatatatttttcttttgacataactttagaagttaactttttatgtagtagactcataaagattatcaattaaattatttaaagagagataggccgggcatggtggctcacgcctgtaatcccagaactttgggaggccgaggcaggcggatcatgaggtcaggagatcaaggctatcctggctaacacggtgagaccccgtctctactaaaaatattaaaaaaaaaaaaaattagccaggcgcggtggtgggcgcccttagtcccagcttctcaggaggctgaggcaggagaatcacttgaacctgggaggtggaggttgcagtgagccgagatcgtaccactgcactccagcctgggcgacagagcaagactccgtctaaaaaa

SEQ ID NO: 220963 - DNA, 475 bp, Homo sapiens
gatgagttcatgtcctttgcagggacatggatgaagctggaaaccatcattctcagcaaactatcacaagatcagaaaaccaaacatcgcatgttctcactcataagtaggagttgagcaatgagaacacatggacacgggaaggggaacattacacaccgttgcagggtggggggctgagggagggatagcattaggagaaatacctaatgtaaatgatgagttgatgggagcagcaaaccaacatggcacatgtatacctatgtaacaaacctgcacattgtgcgcaggtaccctagaacttaaagtataataataaataaataattttttttaaaaaagagagcctttaagaccttccactttaaatggttgataaatgtccagtttacaaaacccgaatcacatcctttcttgtatagtttggaatcatcttctacctagaaacttgtttgaggagttaaagctttgaata

SEQ ID NO: 220964 - DNA, 369 bp, Homo sapiens
tatttagagaactttttcaaatcgcatttctagggcaggtttaaggtgactaaatcccttcgtcttccttatcctgagatggtctttatttctccttcattcctgaaggataattccactgggtttagaattatgagttgataatttttctttcagcacttgaaaaatattgtgccactttattctgggtttcattgtttctcaggagaaacacgctgtccttctaattgatttttcctgtgtcattttttttctcactttcaagaatttttcttgaatatagttttcagaagtttaattataatgcatcttagtgtaaacttttttgtgtttattctgtttggggtttcctcagcttcttgaatctgt

SEQ ID NO: 220965 - DNA, 254 bp, Homo sapiens
aagccagatttttagtttgcatagggctttggttgatgccatttggcttgataaatattcattgaatgtatgaattatagaaaataggaggacctgtaaattctcatccaactgtgttatatatataaattgacattttagaaagattaatcagatttactgccattttagtggggaaaacagaactgcaattctgttaaaatccagaatttgtaattccttggccagtagggagaggaaaaaggtactttaaa

SEQ ID NO: 220966 - DNA, 336 bp, Homo sapiens
aattgcaggtgtcatggtgatgtttctttcaaagcatttgctcatcattataaacacttggggaaagaaaggaagagcccattccctgatgtttgctgtagaacagtgtctttgctgtggtgttcacaaaataaaatagaataatattttcttcagttactttgtgctcaacaactttcatttaaatgtctttacttgacacctattactgttacattgtgttcaagtaacttaatgttgaaattactactataaaagatgttcagaattcttgtatatttttgtcatttatcctcatctactaataaacaatttaattcttgttagaaaatacta

SEQ ID NO: 220967 - DNA, 452 bp, Homo sapiens
agttattttcaaagcagggcatctggagtccgatcagcattgccacagatggacccagagcctgagtgctgcctgccacaaacaaacacacgccaattcagatggtttaagtgggaaagtaccttctggctaagctgtggacacattgaaaaaaaagaaaaacacgcagattctgctccatcaatgtgttgtgaggctcctgaaaatgttttcctcccaggaatgtattcatttatcctttcaacaagctggtatcgatagtgctcctgctctgcactaaacaacagttggaagatacactggcctgcgggccctctctgtccaaggaacttagagtctagtgctggcattcttcatctggaacatttattcaaaacgctagtatttaaagcatggccccaaacacaagtcaaatccttgacagcttagaaataaaggctttgagacactct

SEQ ID NO: 220968 - DNA, 318 bp, Homo sapiens
tggctctggcatttattgtgaaatggctgaactgaggctgaaccagcaaagtccctggcagggattggagaaagagtgccaaccaaggcactgcccaggtgtctgtgtttgaacccacttctcagtgctcagcatgcaactacctgcctagtttctctccttagcagggcaacaaagtagagaaagagatccacagggccgcttcttctttcccttccagaaggccatgcctctgacagtgtcacttccctgtccccaaaattgtaaaccaaaaactgtgaagggcccaaaattttaccccacttgcaatcttgcaag

SEQ ID NO: 220969 - DNA, 475 bp, Homo sapiens
tgaatggagtactcaagaaaggcctttcacagagtgacatttgagttgggaccagagaagaaaccagccttccatcctgggcaacatagtgagaccccatctcaattaaaaaaaaattagccatgtatagtggtgtatacatgtggtcccagctacttgggaggcagaaccaggaggatcccttgcctgaaaggtcaaggctgcagtgagccatgatagcaccgctgtgctccagcctgggtgacagagcaagactgtctcaaaagaaagaaaccccatcctggctaacacagtgaaaccctgtctctactaaaaatacaaaaagttagccggggatgttggtgggcacctgtagtcccagttactcgggaggctgaggcagaagaatggcgtgaacctgggaggtggagcttgcagtgagctgagattgcactactgcagtccagcctgggcaacagagccagactccatctca

SEQ ID NO: 220970 - DNA, 630 bp, Homo sapiens
caagtagcactaggatccaaaaattaaaagttattatgttccacaggccaccttgaaaagttaggggaaaaaaaaaacttgaccttcatgtgttgttgctgtttttaagtggctcagcactttgaaataacatttggaggaaagcattgcaatggaagcagcgctgtgtgggattgatcctggagacctgggctcaggcgctggagcacaatgtccaggaagccaaggcctgtttggattccttacgccatgacatggaggcaaagctcctcttggctgccaacccaagagcccacagtcctgtgagcttcacccttcctagggctgtttgtggtctgggccctcgaggttgtgggagaccagtttgattgctaagggaaaatcccagaatggctcttcttgtccttaccgaatcactacccttcaccttcctgcgtcctgccccagcctggagggcctacctaggcctgctattacttccaacccagaagtgtagcgaattggggccatgaccacaaggtttacacttggttacttggtggaatatgaactcttgggcaagttacctaatattgccaagccacatctgtaaagtggatatgagaatagaatctacttcatgggtctgat

SEQ ID NO: 220971 - DNA, 418 bp, Homo sapiens
gattaaatcattagccgttggtgattaaacttaatctccatcccttctcccctccttggaagtcaaagaggtgaggctgaaaattccagccctctaaccatatggctggtttcccttataatcagtccccagtcttagggctttccaaaagtcacctccttaacataagctcaggtgtgattgaaggagcttgctacgaataacaaaaaatgctcctttcacctttgtctcccctatcacttaggaaatcttgagggttttaggagctgtgtgccagtacctgggacaaagaccaaatatagtcgccttctctctgtataactgtgttcctcatccatggattcaaccaacctcagaaaaaataaataaataaataaataaataaataaataaataaataaataatacacctgaactg

SEQ ID NO: 220972 - DNA, 601 bp, Homo sapiens
gcacgaggcaaccaagacagggtcaaaattttcattaagtcttatcgttttctttaaaatttatgcaaccctttgcattcaacctgatggtatatttatgtttgttgtaatacaagataatattttgattacttaaagcattttctctaagtatttttagtaaaactgacagatcaatatgcactgtttttactctgtggcttcatgtaagtccaatatgcctcgtctgatagggaagcaggaatagacaaaaatttgctttttctttcactctgcccagctagtacactgaattttcatggctaacctacttgattttcttcccagtcgtatacacacctacttttcccctcacaccagaatgagctgactttttacctgacatataaaagcttcctttattgttttccaatatttgattattttcccctaatggctatgtattttaaacatttttgcatagctcctctagatgtttttgattaacaacttaaagagaacaaaggctttagtctgttccataatttacagtgtgtcttgaacagctgatgtataaaaagatgcttaataaatgcattttgatgatgactttttaattcat

SEQ ID NO: 220973 - DNA, 326 bp, Homo sapiens
tgattattgaaggctaaaatgttatcagtgcctccaccctttatcctccatttaacttcacatttaaagaaagaaatcataatccctttccattagtgaggccctttctactttatggagcactttcacccttcttactttatgtgatccttacaaaatgatcctatgagctattttgtccccattttgcagatgaagacactgagatcacacaggttaagtgtaagtccaaggtggtgaggccaggactggttctcagttctagttaatttttttttaagttgaaaaatcaaactggatttattaaaatatatataaataaccct

SEQ ID NO: 220974 - DNA, 443 bp, Homo sapiens
aagggagcctgaagagctggtccttatacagctttctgaaatccctgagatctgtcaatgaatcgcgcatctttcactccacaagtatttgttgaacgtcattgtgatcatgctggctgctgtgtggagaaaagaccgaggggaagtaaaagaacaaagaacaaaagagaacatgatggcttggatcaagcctggttcttgactatcccctaaaattgtcagtcagtagaagctcactgagtatcatctgaatttaaatcaccattagctcccttctgatgaagcaggagttgactcagctgggctttcagctggacacggaaagcggaggtagatgaattgtcatgatcaagtgggtgtcatcaagtacttagaaaggtttcattttgttcctactgtctttccaacttactaataaaaatattgaaatctatttcaaaaat

SEQ ID NO: 220975 - DNA, 575 bp, Homo sapiens
agtgaggttttctagtttagtattgtggcatagttgggtatttctcttcactatatagcagttaagctttgcatccctactttcctagaaagtctataaattgcctgatactgtataattaatcactttctgctttaaattagttacaggagattctgttttctgcaataagaagcctagtaataggtacggcaggatggtgaataaagaggtatatatatatagatttttttaaaaaggttccagcatgaaacctgtagtatatttattacagatgggctctctaatctttttagatagattctctaatctttttagatagattcatacatacttctgaaatagttctggaaggacttgttagctgaggtacttttgttcattgtttttagcttaaaaattagggctctgccaaatttcttgttttaaaataaactttttttgttagaggggagacaccgattcttggaaagcttttctttatctactaattgtgggtgtattatgtcacctttcctcaaatacatatgcttccctaatgtatctttatcatcacttaagcagtggccgtttac

SEQ ID NO: 220976 - DNA, 647 bp, Homo sapiens
caaagtcctaaattctgagggataatgttttcaagagaaaataaattattgtacatttggatagatactccagacaacgtgtgtgggctagagaaatacttgtggtccttagggtggtaagcaggagctcaaggttctaagaaggaacacctgagacagggccctgctggaggaaatcccagcgtcctagcaggggaggtgaagataaccgccaactgctctcaatgggtttggagatgaagtggaaggtactagcagacagggaaatgacagagcttggccaagttagggaggcaatggatacagtgcaaacaccaaccccctccgccggtcattaagtaggctgcatggcctcaagcaagttactaacctctctgagcctccatgtccttccccattctgtaaaagagttgtttggagaataataggagataatacataaaacacaagaaaaagtaaatagctagctggatagagaattcctgaagacacttgatgaaggatatctattatgactgaaaagtaggtgggggggtatcattatcaccttcagagtttctctttgaataggtcattcccaaatctgcattaaaaaatcatgttctaatttccccatcaaaagggtcaaagtatattagaaagaaaat

SEQ ID NO: 220977 - DNA, 450 bp, Homo sapiens
ataatgatggggaatgcaaagtgtggttggttttgctggggaaaagagcagggaagtagagacctaggcaggtgatgtcacctctctgatgaactccaaggtctctgtcaacaccggtgcctttgtcctgacattgcggggtttgtggcatgattggagagaccttgcgtgctctctgggcagcccttgttagtgccccccaactagctgggagatccagagtttcatgagaaccctccctccgtgacaaaatccgccttcctcgctgtcaggctcaggttgtcctgtgcccccactgagcctgctcattattgattaatgaacttgtaaaatgagaagtattgttttaccggaagctacatgtttatgtggttggtaaaaatgagaagagttgcttgagaactggttctcctttccatgagtatatacaaggttcaaatctgggctttg

SEQ ID NO: 220978 - DNA, 430 bp, Homo sapiens
tttcatcatgttggccagactggtctcgaactcctgacctcaggtaatcctcctcctcggcctcccaaagtgttgggattacaggtgtgagccaccactcctggcctgggctttaatttctaatattggtactagcctctcctattagcactgtgcctttgggcaaatcattgtgccttactaagctccatttcctagttcttaggctaattgatttagctttgggcagttcacttagacacaagcaaacaaactttacgcctcagtttatatgtaaaatgaacagaatgaccaggtggcctggttttccctgtactaccctggtttgttatgtcctcctttctatcttctaggtagctttctttggcccataaatgacacagtaattttgaggatatttttagtatctggttaaaatcagattttgttg

SEQ ID NO: 220979 - DNA, 523 bp, Homo sapiens
cctgagtggaaaacatgactgttcaaaagtcctatatgtccagggctgttgtatgattggcttgtcttcccccagggacagcagagcaaccttggaaaagcagagggaagcttctcccttggcacacactggggtggctgtaccatgcctgcagatgctcccaaatagaggcactccaagcactttgtttcttagcgtgattgaggctggatatgtgatttgatctttctctggaacattctttctaatcatctttgtgttcattccctgaaaatgaagagtgtggacacagctttaaaatccccaaggtagcaactaggtcatagttccttacacacggatagatgaaaaacagatcagactgggaagtggcccttgaccttttttcttctgtagataagagcattgatgttattacgggaagaagcctttgaggcttttatgtattccacctcggtctggaatttgtttctgtaaggctaacagttgcaatatactagggtaatctgagtgagctggaatt

SEQ ID NO: 220980 - DNA, 434 bp, Homo sapiens
caaagcaactaatggggggtggaaagaggcgagactagacagcactttggagataattaaattaaactcagattaggcaattaccccaaagattcccaaacctggctgaacaccagaatcacctgaggagcattcttggagtggggggagattccgggcctcaccccagacctgcttaagtgggatttccaggggaaggccaggaatctgagtttttaaaaaagctgccagattagtgattgccagggttttggagggatggagggagggcttgactaccaaggggcagtacaagggaattttttgggttgatgggactgttctgtatactgattatagcagtggatacatacatatatatgcatataacttgtggacccatacaccaaaaactgtcaattgtactgtgtaaataaaaataaatatgctgccca

SEQ ID NO: 220981 - DNA, 294 bp, Homo sapiens
gaccctatgtctatttaaaaaaaaagaagttgacacaatgagattcatagccagctgcagtgatatgcatctgtgttcccagctactcaagaggctgaggcaaaaggatcgattgagcccaggagttcgagtccattctgggcaacatagtgagactcccatctgtaaaaataaataaataggctgggcatggtggcttatgcctgtaatccttacactttgggaggcttgcttgaacccaggagtgtgagaccagcctgggcaacatagggagaacctgcccctcccaaaaaa

SEQ ID NO: 220982 - DNA, 560 bp, Homo sapiens
ataattttacaattaaacattaaacaataattttccattccttcctccacctaactaacccctggtaaccactagtctacatgtctatgaatttgaccgtgcataatacctcatgtaagtggaattgtgtattatccttttgtgtctggcttgtttgacttaacgtagtgtattattcaaggttcatccatgttgtagcatgtgtcagaatttcctttttatgactgaataatattccattatatggatataccacattctaatccatttgcctcttggtggacactgggttgcttccctctttggactgtagtaaataatgctgctgtgaacatgggtatacgaatgtctgttccagtcactgctttcagctctttggggtatatacccagaagtggaattactggattactggtaattctatgtttaattttttaaggaggccaagcgtggtggctcatgcctgtaatcccagcactttgggaggctgaggcagcagattgcttgagcccaggagtttgagaccagcctgggcaacatagtgaaactgcatctctaca

SEQ ID NO: 220983 - DNA, 490 bp, Homo sapiens
gaaatgggggcgcaggaccccatgcattgccagcaggcggaagctgaaggagggaaagatccatcccaacaagctcagagcagcactcgttttgaggggccaggcaccctacccaggaagtggggcctggggtgcatgtgagtggctcccacatgccctctagtggcccaggaggcagttgcagccctgcccacctccaggctcagggccggcccagcccctggagcattgttaggatgcgctgcagcccagctagggggcagggacaggcacctgtgtccatgctacctccaaacaactctgagcaggcctgacgcactggtggctcatttcgtccctttgccaaagtgacatcaccagcagagactcaaagcagttgcaccaccttgtaaaggcacttaatgccactgaattgttcccgtaaaaatcgttaagttggccaatattgtggtatagctattttaccacaataaaaaatacagacctccga

SEQ ID NO: 220984 - DNA, 471 bp, Homo sapiens
tgtcagagtagggctgtggattttgtgccttgcttgggaagctctcagggatggcaggatggcaggctcctaagtgacagcaggggggaagcttgaggcacagtgggtggtccttactctccatcccctgcctgagaaccaggaagcctcattcagagattagcccctttactgcaggtggtagcccaggtgcagccaacctgcttcagggtctcagggcctgctgtggacccccatggtcctgggagagactccttagaaacagcagaatcacgaacatggtgaaacccatctctactaaaaaacagaaaaattagccaggtgtggtggtgggctcctataatcccacctacttgggaggctgaggtgggaggttcatctgaaccctaggaagtcaaggctgcagtgagccgtgattgtgccactgtactccagcctaggcaacaggagtgagaccctgtttcaaaaaaa

SEQ ID NO: 220985 - DNA, 597 bp, Homo sapiens
atataattatttcacacaatttgtcagcaattaaacatattctctattggtaaatttgactttataaaggacatagttgctatggagagtgtaaactggaaaacaatttctggaagataattaggtgatatgtatcaaatattttaaaagatttatacccttggacattttaatcccatttcagaaatttatgccatgaaaataattattattaatcgcacaaaaatttgtgtaaaagaataattactatctaataactctgaaattccaacaataaagcctaagttgaaaaaaaaatagaagacaaaggtaatattccaattccataacccttataagcacattcatccatcaaatgtatacacaaagaaaaaagactagaaggaaatattccaggacgtgcaatacttacatgaactacgactgacttttattttcttctttacacatctatgtgttccaatttttctataacgtaccacttttataagcagaaataataaacattataaaaatagaaatgcacatatttttaaagggtctgacaatcatgggacaagacctaaccggtgaggaatgcatatggatttttatctg

SEQ ID NO: 220986 - DNA, 170 bp, Homo sapiens
agttaaatttcaatagtttggttgtggtataaatatctgccttaaatatttttgcctaaagtttttaatctttttaaaaatcaagtaacaaaattataatagctaagttcatttttagcactatatgttgacttcctgtcataacaagtgaaaacttagcttcctcactc

SEQ ID NO: 220987 - DNA, 839 bp, Homo sapiens
cagaaatgaaagatccatgatgaaaatctagcagagaggcttttttgtagttgacaatattgagtgatgcatgaggtaggtgttcagagtaatattcttctgcattatagtgagagaaaatctgttttagtagtaaattgttttaccaattatacatttatgtaataagatacagtaaattttaaaattattttaagattatgtgggaacataattttttaactaaacaaaatttttaacgtgttgaaataattgttgcttgaatgaagtgtcattatgccaccaacttaaacctatcccaccttactcaatggtgtaggtaaaagatggtaacaatggtaacatagttgaatgacatttttagtattctctttttccagtggctttaaatagcaaatacattgaagaatatcattcccatatgttgtattttcactcttgttattttccgaaatttttgtgggtacatagtatgcatatttatctatggcatatatgggttattttcttatacaggcatacaacatgtaatataccagagtaaatgagttattcatcacctcaagcattcatcctttgtattacacacaatccaattatacactttaattatttctaaatgtacaattatgattgtagtattatatcagtataattataattcatacatttatgcatcctgaatacttctaaaaaatgttttacatttctctttgaacatgtggcatcttttcctgcaaacttatacaaactttagttccatttacatgaagttaagtatgtaaatgtgttgctgtaaagataaaccttaggtgtaagaaaattatagagcaagcaat

SEQ ID NO: 220988 - DNA, 557 bp, Homo sapiens
ctatgaatgggggtaccaatactgaacttgcaaggttgttctgagaattaaaatgagataatgcactaaaaatgcttaccacaacatctggcatatggcaatggctcaataaatggtagctattagtatccaaaaggcccacccagaagacccataagtggagtgtcctaagaagccacttggacaccttctccaggagacctcttgttcctccaagtaacttttgttctgtctttgctatctctccatttatgtctcctgcactcctccactagctacatccactggacttcagctcttttcccctccaatataggcagagttttcagtatcagttaagctgggagcattggtgtttcagggagagaaagtcatgtatgtgtttagattataaatgggttgcacaacacagattttctttaatcctagaatcaaattggatgagaagacagctctgattagtcaattatctactgaacttcctcctacttaggactttgcctcttggtgatttgatttgagttccataaataaaataatgtctggtgctgtttaaa

SEQ ID NO: 220989 - DNA, 906 bp, Homo sapiens
ctttaatgagacatatataacaagtcaaaaggcagtttcatgattattggtgaaacagcagaagcactcccgtgaaagtttcaggaaaaagacaatgttgtcctctgataccagtaacatttgagagactgttctgcaagtactggccaaggcaattagaaaagaaaacaaattacaaggtgtaatgaaaaaaaaaaaacaaaaaacaaaaaacaaaaagaagatgtaatggtgaggtaaaaattattatttggaaagagaggtgactaattctggggatcttaaaataaaataaaaatcattaggaacaaaataattcagtcgatatctagtttaaaaatggacatataaaaatcaacaggtttgctatagacaaggggtctgaaaactatggcctgtggttcaaatccaaccccttgtctgtttctgcaaagatttactggaacacaacaacgctcattcatttatgtattgtctatggctgctttcatgctataacggtgaagttgagtagctgcgacagaagccataaagtccacaaaacctaaaatatttactatttgaccccttacagaaaaagtttgccaacccctgctatagattaaaaagaaaatcagttaggaaaataaattgaaaaaaataaaagccccaattttggtttttagagaaagggtctccctccgtaacccaggctggtgtgcagtggtgcaatcgtgactcgaacggcagcctcaaactccttggcttaagtgatcttcccgccttggcttcttgagtagctgggactacaggcacatgccactgtgccccactcatgtttaaaaaaatttttttctttgtaggaacggagtcttgctatgtttcccaggccggtctcaaactcctggcttcaagcaatcctccccc

SEQ ID NO: 220990 - DNA, 416 bp, Homo sapiens
gtctttggaagggcaaagccacttgggcaggactagaggctttggggtgctcccttatccagctccaccacacagtaaacaccgggaacaagaaaaccaaaactccgctgtaatcagcagaagaaattgccacgacttgctctccttaagcgtcccaactaaactactgtaatagctcatggcggaatttctagatgacaacagggcatattactaactttagttttactacagccaagttgaaaagccccagagatcacagccctagagaaccagaactcccttttgtaggtatgactggttggtcaggcgcatcctgggggccatctctcctctccagacaacttctgctcttgggacttctaccgagccactgtctgaaggcagtgctcaaaccttcagaaattcttatcttc

SEQ ID NO: 220991 - DNA, 519 bp, Homo sapiens
ggttctaatattattttgatttaaagtatcacattctgactgggcacggttgcttacacctgtaatcccaacattttgggaggccaaggcgggcagatcgcatgagctcaggggtttgagaccggcctgggcagcatggtgaaaccctctctctaccaaaaatacaaaaactatccgggcctggtggtacattgtctgtggtcctagctacttgggaggctgaggcaggaggatcacttggaccctagagatggaggttgcagtaagccgagatcatgccactgcactccagcctaggtgacagagggagactccatctcaaaaaataaaataaaatgtcacattcttcggattgttttatgtattattacgcactaaaaaggaacattttcttgagaacatttactgatctccaggcctcttaagtaattatttatgaagaaattttaatatattgaagaaaagctgaatgttgaaacaaaacaaaactctagattaacatctaccgtaatgatgatg

SEQ ID NO: 220992 - DNA, 428 bp, Homo sapiens
ctctggaggcagggaaatgcaggagacaggctcccccaccccacagacgctgcctcttccttcaggcacttagcagtggtgtttggggtaaagattcttttcccctttgacattaagtttctcaggtgcattagttttgaggcactgtgaggtttgagggtttgttgattctcattgctaggttccttgcagaggctgtttagtaatctttgtctactgacagattgaagataaatgggctggcctgctaagggcaaggacagcctgggaatgatgtgccatttggttattagtcatattcccatttcttgttcctgtttgttgaaatttgcacggatctctgcctcatccacagagtaagctgtagctgctttcggagtcaggaccttgtcttgtgcttcttcatgttcctgggattttatggacat

SEQ ID NO: 220993 - DNA, 306 bp, Homo sapiens
ctaaatatttatttaatataatttcaatcatagtacactattttagaccctgaaatttttattattttgtgcattttactacataactctgaaaaaattattctttgatatccatgtaaaattccatctatgaattactaccatttaaacattttcccactttagtttataatttttaaatgaataaagtttaagatacagttaaacaggatgtttgtcaaggcttttaagcacaattaaagggattttggctggtacaatatagtggattatcagaactttatcaacattagtgtcacgaaagtt

SEQ ID NO: 220994 - DNA, 680 bp, Homo sapiens
agtaataattatgctttcaggggctgatgaatgaagaaagacagtggtggtgtaggaaggtgcttgcttggcacgaggcgatctcaaagatgagaccagcaggacaggaaggaagcagccatcccagatctaggtgggggacacccggtacaggcagaggggacccacaagcacaggcgtgaggtggaacttcagtctgcaacaggatgaatcaccaacactgaagaagtcttccaatgctatgctctttctttcgtttgcagtttttataggcaagcatacttttaaacttcagaaatgttaatgtttagcctttaaaactgttgaattgatttcaatgcatattttagaatatacatatctatgtcattgcaatttaaactgtttagaagaagttcttattgtttgccatcttttttttaagagagcaaaatgataaatcagtaaaagaaatatttcctagagaggaaagggaacttgctgttgtatagagctgaagttatttcacatagcattgattaaggttggactctggaaacaccagtttcctttgcatcttagcgtagcaattcaataaacaaacagcattattttattttaaatagaccagatagcatccattcctattatagattcttaaaaaatgctgggaaactggagaagggaaggaaaggattcct

SEQ ID NO: 220995 - DNA, 412 bp, Homo sapiens
tgtacacagatgaaagcaccattatcaagtcagaagagcacaagtcaaaccactgtatgttgaggactctctgtactttcttaaatgtttgatagaattcacctaagaaagcatgtagcctgtaattatagaaatctttttaaattaaaaaaattcttcaatacatagagaagctattactttttctatttcattttgcatcagttttaagaattagttttacaaataatttcccatgttattttaattgtcaaatgtattggcctaaagttttcataattatattgatgtctgtaggttctgtagttacatcctctatttaattcccattatctacattatgtagcttctgtaatttttttcgagataaatcttgctagccattgtttattaaaaaatttttttcaaagaa

SEQ ID NO: 220996 - DNA, 970 bp, Homo sapiens
taaagattatttttccctcagagtttggcatagtaaatatctcaaagagaataaaggacatctggttttcctgtgtagtgggatgaaaggtttccataagccaggccacttggccagtccacgtggtccagctggactagcggttaaaacagtgaaacacttctatacggccttcagggtgcacctgccagcctggctgcccgtccttgttacccccgccttttccaacagtgatgtaacggaaggactaattcatggcacaagagggatcttcaggacgccgggccagtgtcacactcagtgactgttctgagttcagttcttgagtggagctggttgtcaaatactttaaatatcaccctagcataactctctcagctgccacacattatatgcccaataaaatgaacctttgagttgttgcttcagtaacttctactgtgttttgtgttctcttgggcatcttcttgtgatatgtttctatggtaacattgaagaccaagctagtccacagttcctctatcccaacaagtttccgtgtcccctgaggcagaggacaagagatcaacacacactcctggccagtttctcaatatattttagcctcagggaagacttagcacccatattgttttctcatcaccacaactgagttggtgtcaagtaggttaaagaaagaatagctgcaagtttctagttacttcaccatctcatctttgtatttttagtctaagttcatgtcttagggcatactaaaatcattactctttccctttattgaagagtttgataactgagtagattagagaacagagagaagaaaagctaaaatctaagatactgatttaagggatctagtgacccttaactcattgtagattaactaaccatctgaagagctgaattaagatgcaaaaacaccactggccatttttctttggtgtttgtcctgttattgaaaaacaaaaac

SEQ ID NO: 220997 - DNA, 292 bp, Homo sapiens
accaatggtatctcatccattggtttttaagtagtattgctcagtgattttccttcctctttggaatttttttttttctcttaactttctttatctagccaccaactttggagttctttgaggcttgggcctagtcctacttcttattctgtactctcccattagacatttatatttcacttacctgttaatgcacacacaacttacaaacttatatttccagaccagatgcctcctctgagcagcgcatccaaatgctatcaaatctacatacaaaggccagagtgatctt

SEQ ID NO: 220998 - DNA, 440 bp, Homo sapiens
tctttcactataggtgagatttcctaatccttctaaggacaatgaagctagactaaaaagaaaaacatatttgaaatacttaggaaaggaatttctagtcacatttaaacagcttaagtaatcgataagagaccaatttctgtttaggctgggcatggtggctcatgcctagcatgatcccagcaatttgggacgctaaggcaggaggatcacttgagcccaggagtttgagatctgcctgggcaagatggcaagaccccatctctacaaaaaaatacaaaaattagccaggcttggcggtgtgtacttgtagtctcagcctcttgggaggctgaggtgggaggatcacctgagccctggaggtcgaggctccagtgagccatgatcacaccactacactgggcaacagagcaggattccatctctaagaaaaaaaaaat

SEQ ID NO: 220999 - DNA, 430 bp, Homo sapiens
cgaaagtgggatcggcttttccgttctctccagtacttctctcgaccactgttttgtgattattatccaagagctttgctggtgttggactccatatagcactgtttctaacactttcttgctttcctgagtgaccccagcatctggctcacagccttccctttccttgctaaagtccgagcgactccgacatcaaaattgatcatcttcccaactgtgtactcaggcagtgttcaagttccacttcccgagggagttctgtcttgcttccatggagctgtccacctggttgtctcatttttaaacagctttattaagaaatcatcgacatacaaaaatgtatacatttaagatgtgcaacttgatgttttagtatacgttattaaattatcaccacaatcaagctaattaaacatatccattacctctg

SEQ ID NO: 221000 - DNA, 233 bp, Homo sapiens
agctgatgtaaaatgcaatcagaaagcagccagaaacagtgacagaccaacagcaaagttcaaatacttattccctggagctcatgctgcatacacatattccgtgcacagtcgcattaggtactgtctccataggctcacctgtttcaggttacacatgctcctctcggtctggttgccctggtttgcccactccacacattcacaaatgactcaagtctcacctgcccccg

SEQ ID NO: 221001 - DNA, 439 bp, Homo sapiens
tgtcgtggctaatctgacagaggtggaggtcaggtggtaatgcaagcagtggggagcatctgtaaatacagatgaagctgctttcactcgcccgccactcacctcctgcagtgcatcctggtttctaacaggccacggaccagtaccagtctgtggcccaggggtttgggacccctgctgtactttttggaatagtttgagtaagatggatatcagttcttctttaaatatttggtaagatttagcagtgaagttgtcaggtgctgggcttttctttactgaaagcctttttattactgcttcaatcttgttacttgttattggtctgttcaggttttggattactttatggttcagtgttggtaggttgtatgtgtctgggaatttatccatttcttctaggttttccaatttattggcatatagtagccatgttgct

SEQ ID NO: 221002 - DNA, 416 bp, Homo sapiens
tccttggtccagtgagatgctccttactggtctttctacctctctggtcccatcctttccacccggccttcatactgctgccagcgttacctacctgatcatctgattctcccacttgaaattcttcagaggctcatctatagacaagcagtattttttcaaactatggcttaagatgtaaaatcaatttaggtctcaactaatatttctttaacaaaacagaatggaaactatataaaatacatagtaaaaaatattatttcatgaaacttttttttagttgttttttgttgttgttgttgttgttgttgttttgagacagagtcttgctgtcgcccagactggaatgcagtgatctctgctcactgcagcctctgcctcctgggttcaagcaattctcacgtctcagcctctgg

SEQ ID NO: 221003 - DNA, 556 bp, Homo sapiens
aaaaattgacttttgatgtatttgtttttaagaacctactctgtatattcaccaaaatgagggaataaatcaagaaagaggaaactgtggggtatagaaaacaaaagatacaacccaaaggagaagcaaaggaaatctttaggattaccactgtgcaatgagtttaaaaaggtaactagtacagactaaagcaacatgactcaagaagcaggcgttttgaggtctgtcttcacaatgttgtctgctgtgtcttccttttaacctaaaggaactactggaaaatatgcttcaccaacacaagaaaatataccaagaaagaggaaggcctgagtctcaggatataaggaatacatgccaggagaatggtaaaggcaattccaaatttgagagcaagaggagtccaaggataacactacagcaagtccagaaagcaccagccccatagagaagtccccaggagagagggctcaaaggaaaacatttagaatggctagattacccagtatgggtggtctatgggaaaatgtactgagacactattatgggaagacatggg

SEQ ID NO: 221004 - DNA, 347 bp, Homo sapiens
tccggtgatctcttcacagctactcgggaggctgcggcagaagactgcttgaacctgggaagatggatgttgcagtgagccaagattgcaccactgcactccagcctaggagacaggtggagactccatctcaaaaacaaacaaacaaaaaaacaacacacacacacacacactttatcaactgccttcaggcccttcttgaccatccggccgttgtcaccactgattttctagttttgctgattctatccttacctcctcttatttatcaccacactgtttccagaatattattttgtaaatcactacaggatcctgtcaactccatggtttaatcctttagtagc

SEQ ID NO: 221005 - DNA, 244 bp, Homo sapiens
tctctctcacacacacatgcgtgcacacgagcacacacacacacacacacacacacacacacacacacactttatcaactgccttcaggcccttcttgaccatccggccgttgtcaccactgattttctagttttgctgattctatccttacctcctcttatttatcaccacactgtttccagaatattattttgtaaatcactacaggatcctgtcaactccatggtttaatcctttagtagc

SEQ ID NO: 221006 - DNA, 503 bp, Homo sapiens
ttcatctgttcacagacatttcagctatttccagttttgggctattacaaataaaattgctgtgaatattctggatataaatcctttatcagatatatgctttgcaaacattttctcctcatctgtgatttttcattctcttaaaaatgtcttttaaagagcagactgttaattttggtgaagcccaattatcaatttgttctttgaagaatgatcctggccgggcacggtggctcatgcctgtaatcccagcactttgggaggccaagacaggcggattgcctgaggtcaggagttcgtgaccagcctggccaacaaatttaaaccccatctctaccaaaaaataagaaaattagctgggcgtggtggcgggcgcctataatcccagctacttgggaggctgaggcaggagaattgcttgaacccaggaggtggaggttgcagtgagctgagattgcgccattgtactccaacctgggtgacaagaaactctgtctcaaaaa

SEQ ID NO: 221007 - DNA, 375 bp, Homo sapiens
aatgtacatgcctatatttttaaatctatttcatttaaaaatgctgattttgttccctaaagtaaaagtaagaatattatttacaaaataacatggccctttggaactcagatttaagaaagttccttgaggacattttataatgactagaatatacctattgtatgtgctctatgtttcagtccatcctttcacttatcacacatccactatatgctaggaactagtaacacagaagagatttttaagggagatctaactgagatatggaggcatgggtgaagaaagaatctctgagaaaatatttgagacttaataaattagtgagagtaagatgggtgagtaacactgaacatgatgtaaaaataggtcaag

SEQ ID NO: 221008 - DNA, 577 bp, Homo sapiens
ttttaaactcattaatatatatctagaatccctccttttttccttgttggtaaaacaaatcaatatttaccttactctagtcttccagcctaactctccttctccatcatttcttaatgagtagtaatgttgacttcatcaacatgcatgcattttattaatacattctgtgccctgagatgtaattattctggtcccgggaatttgaattcatttaaagcatattaaacgttctcttattattatcttctatctttagggaagtgtcctcttcaagatagcttttctaccatttatagttaggaattgttccctttggcagtaaagcaaagtaggaattgagtcgtttatttttcttccttttaagttttaacattctaacatttgcccaaagacgtgtgccttcctttgtttgttggtggtgttatttacaactttgtcagcctctgctcttccaagcaacattcttttgggttcatgtaattctttgttggtttttctttttggctatgaatcccatcgtattctttacaaatgcttaaagaacagaatttaggagacactctttggggtcact

SEQ ID NO: 221009 - DNA, 424 bp, Homo sapiens
aataagtaactagtgagggaaatattccctcatactcaagagaaccctttatacatttttaaatattttagggccaggcttatgcctgtaatcccaagtactcgggaggctgagatgggaggatcacaggagcccaggagttcaaggctgcagtgagctatgatgatgacagtgcacttcagtctgggtgacagagtaagactgtctctaaaagtaaaatatcttaatactgtacctgacatctgactagatgtacccagcaaccactatgtgccataatctctggataaattctatgaacattcacttagaaatagctgcaagtccctgaagacagtatgacaaatactgaggcccacagtttttgggtgatcagttgcataaaatgctaaaatagatggttcctgttttgaatgtcactttc

SEQ ID NO: 221010 - DNA, 95 bp, Homo sapiens
cctccccagtcccccaccagacccaccctctccctgaatctacccacatcccccttccctgtctgtgtctcaataaatggtgcaactgcagctag

SEQ ID NO: 221011 - DNA, 404 bp, Homo sapiens
agtagaatctgctaaagagcctataaatttctaataggctagaaaatttagagagataaatttctaatcattgcctcattacattaactccaaaccataggccaggcgcagtggctcacacctgtaatctgcaatcactttgggaggctgaggtgggcagattgcttgagctcaggagttcaagaccagcctaggcaacatggcaaaaccctgtctctactgaaaattcaaaaataatccgagcacagtggtgcacgcctgtggtcccagctactcaggaggctgaagtgggaggattgcttgagcccaggaggcagaggttgcagtgagccgagatcacgccactgcatcccagcctgggcagcagagccagaccctgtctccaaaaaggaaaaaacacacca

SEQ ID NO: 221012 - DNA, 567 bp, Homo sapiens
tgagcaggtgtggcttggaggaagaggagaggccaggactaacacgtatcaagtctgttcatcttctgagttcccagagaaaagagccccacactcacggagctgacaagcaagccagaaagtagggaaatttcaggttgggataagccctagaagaaaataaacagaaagtaagatgaagcaaaaccaggcgggggatttagagaaggtggttgcagagggcctctctgaggaggtgacattggaaatgaggtggagaatggaatgagaaggaaacattccaggtagagaagggcaggtgcaaaggcagggacgcaagaaaggactgagaatgttcaaggaggggcagggacgttgatgtgggtgagatgtggagagcaacaggagacaggaggcaggcaaggctttgcaggcctggtgaggaatccgggttaaatatgagcattatccccatttagtagatgagaaaaccaaagctcagaggttaagtaacttgcccagggtcgcatagctggtgagtagccaagctgagattccatcatatagtctggtaacaaagtccatgtt

SEQ ID NO: 221013 - DNA, 489 bp, Homo sapiens
ctgcgtacccaacaggctgacctgaccactggacactgacagggtggagacacaggtggcataaagctgtgagagtgaaatgcacactgcacaatccaagacagcgggagaaaatgcaaactagccagtagcaacttctacgttgagtacgtgtcgaaatggtatttcagatataccgggcgaaatgagctatatattaaattgtcattccctttaaatgtggccactcgaaaatttaaaatgacacatgtggcaggcatgtttctcttgggctatgctggtctccgttgagaactcaaaagaatctagggacaaaccaaggaaacagagtgggagcgctctcatgacaggcatcagaaattagggatggctgctgcttggggagccaactgcgatctgtgtctcctgggtcttttctgtctctgcactaaacctgcacctcaggactggtgtttcccctcacccaaagcctcccgcccctctacacgg

SEQ ID NO: 221014 - DNA, 533 bp, Homo sapiens
tatcagatgggaccaggatcaatgaaaatccaccactcacagcccttctacattttccaaaaccgcagtccctggtcctggtcgtcttctgtgggtctcagaactcagggaacacaacctcccatctcggccctcccaggccccctgtcattgaggccttggtgcctttctggccccactgcctgtgcggggcacttctagaaatggagaaataggaagttccacaggcaaggacctcccctctctccctggaaagcagcgtctggtccagccgaggaagggcagggtcagcacccgtatgggcctgggagctgtgtggtgaggggccgacgtgctggagaagcaagaggtgcgggggacaaggatttgagagcccctggcacatgaagctgtattctcctctgctgttgaaacttgggatttcagctctacccagagcacaaaggacatttgttttcaaacaaaaatatccttgtttgtgccagggaaagatggaaaattttagtttatattaaacacgcctttgaagactc

SEQ ID NO: 221015 - DNA, 494 bp, Homo sapiens
tgcacctagcaaaagggcttctgtgccctttacacactagcccctcaaagctccaggagtggactgaacctgggccttggtaagtgtttgtgactgatctcaaatctcccctgtttccatgagagagcactcgtctcccctgtttcagtcaatggtaagtctgaaacatctccttccttgcaggggaggacatcgcattgccgctccctgacctcgggtcacaggtctccctcactcacctcacctgggccttgcctagcacttgggatcagcagtgactgtgcatggcgccttgggtttaggcgtcagtttgcatggttttccactagggagaggacggtaaatcacagggctgccaaccatcagtagtgcactgcaggcttatcaacagccgccaggaaagtctcgggaatgcatttattccctaaatacactgagaatttagaaaatgaaaagatcccagagagcctctctactctcaaaaaggtattccc

SEQ ID NO: 221016 - DNA, 496 bp, Homo sapiens
aggtagcccagagaacctgaactcaaatcctgagtctgccactctctgcaagattttttttgagtctgcactccagcctgggcaactgagtgagaccctgtctcaaaaacaaaatgcttttaagccaagtatggcacacagccggcggtcccggctacttcatttttgttgttgttgttgttttgagacagagtttcactcttgttgcccaggctggagtgcaatggtgtgatctctcctcaccacaacctctgcctcctgggttcaagtgattctcctgcctcagcctcccaagtagctgggattgaaggcacctgccgccacgcccagctaattagtagagatggggttttgccatgtatggccgcgcctggccatcccggctactttggaggctgaagccggaggatgccttgagtgcaggaagtccaggctgcagtgagctatgatggcaccctgcactccagcctgggcaacaaagtaagactgcacctct

SEQ ID NO: 221017 - DNA, 507 bp, Homo sapiens
acagctctacgggcatcctctctaagcctcatagcaccctgccaagtagctctcatttccttgccttgtagactagaagaagtgacttgcccaaggtcttataagcagtaagcaaagttgccgggagtggaacctgatgggaccaggtctgcctggctccagagctggtatccttcccgctcgcttaggtggctcccatggcaggaatgctgagtctgatggggcctctttgagatggcttaactgcggctcttctgggttcggggtcaagggaatgaggggtttggatagtggcatctgatcactgcttaatgaatacagtggaggcctctgaaacattagagtaaccagcagtggagctatgcaccaagggaaataatggggggtttggaatttgctggtttcctacctgctgggccacataaaagctgagtgactgtataaattcctgaactgttttgagccgctgtttctctataaaatggaatccctcagtttctctataaa

SEQ ID NO: 221018 - DNA, 474 bp, Homo sapiens
ttttgagacagagtctcactctgtcaccaggctggagtgcagtggcacgatcttggctcactgcaacctccacctccctagttcaagcaattctgcctcagccccctgagtagctgggactacagatgcatgccatcatgctcagctaatttttgtatttttagtacagacagggtttcactatgttagccagaatggtctccatctcttgacctcgtgatctgctcacctcggcctcccaaagtgctgggattacaggtgtaagccactgcgcccagcctaattggttcttattaaacggttattctctaccttacctccaatctgattgacctccttttgcctactggtaagcatttcaggcctgaatctgtaaaaagtaatgaattgtttctagaaatcatctagcttgccttgggttgggacttttggttttgccagagaaagcacctaagcaccttgcacaagggctac

SEQ ID NO: 221019 - DNA, 797 bp, Homo sapiens
atgaaaattttttttaagactttaaaagggtcaaagggataagatattgactctaatggaatattggagaattctggaccaaggttagggagggaacaaatgcacagaacaagcttttgaagccagttttacagtggaaatatagaccaggaagaaagtggctaagaggtacagctgtgcttttcatggaaagtggacaagatcggcaccatgtccgagtctggcactacctcccactctggactgaaaccctaaagtgctgtaccttggattgggggtatagtttgcagcagcaatgggtgatttagaaaacctcaagcctctgttcgggactgccagtgcccacaagtgcccagcggaagcaaacaaaaatttctctgaaataagataatggcatcctagtcctcaaattatttttataaattttcaagtacaacctaagtagaaaaataaaaaaaaagataatgaggcacataaagagacataacaacagaagccaaaaccagcaaaaacaagaaaaacagacacactgaaaccctggatataccgtaaatgctatgaaacaaatatgcttattatgtttatagagataaaagccaatcttgaaaacttaagacaagtaccactaaattctagaattgaaaaatgtagtagtctataagaactgagtgagctgggtgtagtggctcatgcctgtaatcccagcactttgcgagaccaaggtggaagaattgcttgagcccaggagtttgagaccagccctggcaacgtagtgagacccccatctctataaaatt

SEQ ID NO: 221020 - DNA, 444 bp, Homo sapiens
cctaattgctgtctcccagcagatcagtggcatgcccagtggctttgggggcaaggatagaaatgccatcaggaaatagctgaattcattgtgaaacatgaattcagtcatggtgataattggaaactcctttcaggtttttgcaagtagattttgtaatgtttgtgtatgcagccttgctgttgagtcagtccaaggggttttacttaggacaagttgtaccttgccctctctccagctctgctcccacattttcacatacctagctgtttctacctcattgggtaagtcatttaccactctgtgcctcagtttactctgtagtttaccattagactgtgagctccttgagggactttgtcataatcactgttacatcccagtgcctcacaccatgcctggcccttaagaagtgctcaataaatgtctgaacaaaaaaaaaaa

SEQ ID NO: 221021 - DNA, 482 bp, Homo sapiens
gatgacaaacatttctgtaggtagatttaccttagaacgaatgtttagtgagaacatctctgcaacctcttgaaaattctgggtttgtattagaaattataatgcgggtatgatttagtttatttaaaggaaataaatattgataaagcatacatttttaaaatgagtgccgaagattggctcaggaatgtaatgggtgctataagctagatattctccatttttttcacgtctttgttctttagattttcttaattaagtggtagtttgatttcatacttgcaaactctgacccctttattgaggagccctcagatgtacacagtttactatctcttttcatgaccataaattgaggtattaagaattattctgaaatcatacctattcagattaatggatcaaaaaatgtgctgtctttggatctgaactaatggttgtctagtgttgacatttctcataatacattacacattgctagc

SEQ ID NO: 221022 - DNA, 651 bp, Homo sapiens
ccagttagctgggcatagtggtgcacatctgtattcccagctgctcaggaggctgaggtgggaggatcacagagcccaggggttcgaggctgcagtgagctatgatcacccctgcacctcagcctggacaacaaagcaagactctctctcaaaaaaaaagtcgcctgcctgcctgcctgaaacaggtatagaaattcctaaggtcactgagaacctgaaccaaagtggctgtgggtcagtgaccggccgtgactcaggcgttaggggaacgacataaagatcccagtccctggcaaagcccaattccagcaggagctgcgcagggcagctcgaggcccagcctggggacctgtggccgcacagacccatggtgccctctgggggccactaggagggggcgcactcccccacaccatcttcctgtgcagtggcccaagacggtggtggagcgggctgtccgtccccagcacttgccattcaaagtggctgcccttcatgggtctgtgtccagcgtccccacaagttcccccatccctgcaggacatgccttggtccgtacccagcctagaaagcaagatctagttgcattctggctccagatgagggatccaccatttcctctcttgagagggtgagtggggggttgagaga

SEQ ID NO: 221023 - DNA, 450 bp, Homo sapiens
tgccaaggctagtctggaactcctaggctcaaaggatccacccaccttggcctcccaaaatgctgggattataggtgtgagccactgtgcctggccgacactttacagcaggagctgcgcagggcagctcgaggcccagcctggggacctgtggccgcacagacccatggtgccctctgggggccactaggagggggcgcactcccccacaccatcttcctgtgcagtggcccaagacggtggtggagcgggctgtccgtccccagcacttgccattcaaagtggctgcccttcatgggtctgtgtccagcgtccccacaagttcccccatccctgcaggacatgccttggtccgtacccagcctagaaagcaagatctagttgcattctggctccagatgagggatccaccatttcctctcttgagagggtgagtggggggttgagaga

SEQ ID NO: 221024 - DNA, 420 bp, Homo sapiens
cactgtaagttctataggggctcagaagaaattagttgggtgggcccacatgacaggggcacttggctgggagaaacatttccctgttgcacagtggcagagaaggactttctccagacctgtgacctttaatgtgctggctgggggtgaggagagggaggaaggaggaatgggcccagagggcagagtgaccttgaagatggcagatgcactgagtgctttctgccaggcactgcgcccccattttacttgtgttatctcccctaatcctcccaatcaccctaggcgggagaagaaggaacatagtgagaaaagacagctacacagcttcccttctatccttcccctgggagctcaggacctgtcgtaggagtgtggctttctgtctttaccctgagtaaatcctccacgattaaaaaa

SEQ ID NO: 221025 - DNA, 438 bp, Homo sapiens
cacacatattacaatcccttttgttagcaaataactgcatttgcacaatctgactttttaaaattctgcttttattttctgtattccttagctagattagagatgattagactttggcatttacttttgtacagttaaggctgttagctagaagggtgaaaagatttacctcaagatgatggagaagcttagactaagttctctaactaacttgagtcaagatattatagtcttgtacttttgtacaagacttctttcttcctttcaatagaatttgtatgattttgagagatatgatgtataaggagcagcacactcaaatcttgtgcttttgaacattttttagggagattagttctttagaatggtggtctgtcaacttttttgatgattcatccccattatatatatttacttataaataattcccatgttcag

SEQ ID NO: 221026 - DNA, 487 bp, Homo sapiens
gtgcctgtgggtcctagacagcttcacagcttgtgaggtgcagtgggtgggggaagtgaggcagaggatgtatccgttaaccctttggaagccctgatctttctgtcctgatcttgctgtgcctcagaaccacaatgacagccgtgtgacactgtttgagggggacaacttccaaggctgcaagtttgacctcgttgatgactacccatccctgccctccatgggctgggccagcaaggatgtgggttccctcaaagtcagctccggagcgtgggtggcctaccagtacccaggctaccgaggctaccagtatgtgttggagcgggaccggcacagcggagagttctgtacttacggtgagctcggcacacaggcccacactgggcagctgcagtccatccggagagtccagcactaggctccacggccccagacaccttccctgaggacactcaataaaggttcctgaatcttcctgccaaacttg

SEQ ID NO: 221027 - DNA, 444 bp, Homo sapiens
ggagccaagatgcaatcagtattgatgccctgacatgtctattctgattctgccacccagtacctcttagctgggcactaatctaaccacaatgacagccgtgtgacactgtttgagggggacaacttccaaggctgcaagtttgacctcgttgatgactacccatccctgccctccatgggctgggccagcaaggatgtgggttccctcaaagtcagctccggagcgtgggtggcctaccagtacccaggctaccgaggctaccagtatgtgttggagcgggaccggcacagcggagagttctgtacttacggtgagctcggcacacaggcccacactgggcagctgcagtccatccggagagtccagcactaggctccacggccccagacaccttccctgaggacactcaataaaggttcctgaatcttcctgccaaacttg

SEQ ID NO: 221028 - DNA, 402 bp, Homo sapiens
gacatcaagaaggcatttagcctgtgaacctaaaggatcagaggacagtcctggcaatgttctggatctacggctcattctctacagattctctccaggccccacgagttatgctgagtttttcctgaatctttgctggattccttttttcccctgctaacatcctcttttgtaatggcctttccatatctagattgttccttcttccaacattcaatagcgtttggcctccttgcctgtgaggtgaacaaattgtggtgtctttctcccctgcagaggagtgtacgtggatggaaacttgctggagagtaggggcagaagagagctgaagttcaaagtcagggtagggcctgtggtgcatgccgggtgggtggagtgagcagtggtgtggaaagttgctct

SEQ ID NO: 221029 - DNA, 311 bp, Homo sapiens
tcatcactgagggacagaccacctctcatttatcgttttattcacagtggcaaatgttaatatgcaggagaaactcaacaagtggttgatgaatggacaaaaaaggaacacgctgaattgccaacaaaaaagaacatactaaattaaaaattccaacttcattacttaacttcttttttgtttctgagatggagtctcactctgtctgcccaggctggagtgccatggtgcgatctcgattcactgcaacctctgcctcttgggttcaagcaattctcctgtctcagcctcccgagtagctgggactacgt

SEQ ID NO: 221030 - DNA, 396 bp, Homo sapiens
ggagtggattgtgacacctctggaaatgctaactctatgtaacataaccaagtcatgatatactgtaaagatctggttgctcatcatatactataaagtgctaggccagaagcaattgtaactctcctctcattgctttatattaaaactctgaaaaccccaagcttggtgaggccaaggctgggttatggcaaggtgctctgcctgagtatgcaagtgtagtcgagggagaaatttgttgcagggatccatttacttgggacaggctggaagtgcgcattctcctgatccttaagcttttattaattgctgcagccttggctccttctatgctcccagtgtggatttgctggctgagctccatccatcctttatgtgaatgaagataaggatgtg

SEQ ID NO: 221031 - DNA, 1622 bp, Homo sapiens
  misc_feature (249)..(249): n is a, c, g, or t
cccctgggtggctgcggctggaccttcaccacctcttacaagctcaagaggcacctgcagtcgcacgacaaactgcggccctttggctgcccggcagagggctgtggcaagagcttcaccacagtgtacaacctcaaggcgcacatgaagggccatgagcaggagaactcattcaaatgcgaggtgtgcgaggagagcttccccacgcaggccaaactcagcgcccaccagcgcagccacttcgaaccngagaggccttaccagtgcgcgttttctggctgcaagaagacatttatcacagtgagtgctctgttttcccataaccgcgcccatttcagggaacaggaactgttttcctgctcttttcctggctgcagcaaacaatatgacaaggcttgtaggctgaaaattcacctgcggagtcacaccggcgagagacctttcctttgtgactttgatggctgtggctggaacttcactagcatgtccaaactcttaaggcacaaaagaaagcacgacgatgaccggaggttcatgtgccctgtggaaggctgtgggaaatctttcacgagggcggaacatctgaaaggccacagcataacccacctgggcacaaagcctttcgtgtgtcctgtggcaggctgctgtgccaggttctctgctcgcagtagcctctacattcactccaagaaacacctgcaggatgtggacacttggaaaagccgttgcccgatctcctcttgtaataaactcttcacatccaagcacagcatgaagacgcacatggttaaaaggcataaggtgggccaggatctcttagctcagctagaagcagcaaattctctcacacccagcagtgaacttaccagccagagacagaatgatctcagtgatgcagagatagtgtctctcttctctgatgtacctgacagtacttctgctgcattgctggacacagcattggtgaactctggaatcttgactattgatgtggcttctgtgagctcgactctggcagggcacctccctgctaataataataattccgtagggcaggctgtggaccctccgtccttgatggccaccagcgaccctcctcaaagtctggatacctctctcttttttggaacggcggccactggttttcagcagagctccttaaatatggatgaggtctcaagtgtaagtgtggggccattgggatctctggactctttggccatgaaaaactccagtccagagcctcaggctttgacacccagcagtaagctaacagtggacacagatgctctgactccttcgagcaccctttgtgaaaacagtgtctcagaactactgacaccaaccaaagcggagtggaacgtacatcctgactctgacttctttggacaggagggagaaacccagtttggattccccaatgcagcaggaaaccatggttctcagaaagaaacagatcttatcactgtgactggcagctcatttttggtatgaaccaactctattcattcctcatcatgtggcttacttttattacagtcaattttgaggatattctggactaaatatttaagtgcagtcatttctttttggtttgcattggaactgacaagttgtgtgaa

SEQ ID NO: 221032 - DNA, 1830 bp, Homo sapiens
  misc_feature (249)..(249): n is a, c, g, or t
cccctgggtggctgcggctggaccttcaccacctcttacaagctcaagaggcacctgcagtcgcacgacaaactgcggccctttggctgcccggcagagggctgtggcaagagcttcaccacagtgtacaacctcaaggcgcacatgaagggccatgagcaggagaactcattcaaatgcgaggtgtgcgaggagagcttccccacgcaggccaaactcagcgcccaccagcgcagccacttcgaaccngagaggccttaccagtgcgcgttttctggctgcaagaagacatttatcacagtgagtgctctgttttcccataaccgcgcccatttcagggaacaggaactgttttcctgctcttttcctggctgcagcaaacaatatgacaaggcttgtaggctgaaaattcacctgcggagtcacaccggcgagagacctttcctttgtgactttgatggctgtggctggaacttcactagcatgtccaaactcttaaggcacaaaagaaagcacgacgatgaccggaggttcatgtgccctgtggaaggctgtgggaaatctttcacgagggcggaacatctgaaaggccacagcataacccacctgggcacaaagcctttcgtgtgtcctgtggcaggctgctgtgccaggttctctgctcgcagtagcctctacattcactccaagaaacacctgcaggatgtggacacttggaaaagccgttgcccgatctcctcttgtaataaactcttcacatccaagcacagcatgaagacgcacatggttaaaaggcataaggtgggccaggatctcttagctcagctagaagcagcaaattctctcacacccagcagtgaacttaccagccagagacagaatgatctcagtgatgcagagatagtgtctctcttctctgatgtacctgacagtacttctgctgcattgctggacacagcattggtgaactctggaatcttgactattgatgtggcttctgtgagctcgactctggcagggcacctccctgctaataataataattccgtagggcaggctgtggaccctccgtccttgatggccaccagcgaccctcctcaaagtctggatacctctctcttttttggaacggcggccactggttttcagcagagctccttaaatatggatgaggtctcaagtgtaagtgtggggccattgggatctctggactctttggccatgaaaaactccagtccagagcctcaggctttgacacccagcagtaagctaacagtggacacagatgctctgactccttcgagcaccctttgtgaaaacagtgtctcagaactactgacaccaaccaaagcggagtggaacgtacatcctgactctgacttctttggacaggagggagaaacccagtttggattccccaatgcagcaggaaaccatggttctcagaaagaaacagatcttatcactgtgactggcagctcatttttggtatgaaccaactctattcattcctcatcatgtggcttacttttattacagtcaattttgaggatattctggactaaatatttaagtgcagtcatttctttttggtttgcaaaaagagcacagccctggactacaagtttggagatttaaattctgatcttgagtttggaactgacaagttgtgtgaccctgagcaagtcagttaacctatctgagccttaatttccttatttataaattgaggtggtttgaatagattgcttttaaggtctttctgctctgtgattccttgataatacatttctttccttgacccagccctgacatgttctttttttggca

SEQ ID NO: 221033 - DNA, 648 bp, Homo sapiens
ggaaaccatggttctcagaaagaaacagatcttatcactgtgactggcagctcatttttggtatgaaccaactctattcattcctcatcatgtggcttacttttattacagtcaattttgaggatattctggactaaatatttaagtgcagtcatttctttttggtttgcaaaaagagcacagccctggactacaagtttggagatttaaattctgatcttgagtttggaactgacaagttgtgtgaccctgagcaagtcagttaacctatctgagccttaatttccttatttataaattgaggtggtttgaatagattgcttttaaggtctttctgctctgtgattccttgataatacatttctttccttgaaaaatatgaggacgtttttcagtgatgtggcatgcgtttttttttaactgcccccccagccctgacatgttctttttttggcaaacatacataatgttacatcatactatgatgaacatccatgtacttttcactcaatttcagcaattatgaatccatgaacaatcttttttaacttagcctcactcactccccatgttctagtattattttgtaacaaatagcagacatctgatcattttatccataaatattctttatatatctctgaaagc

SEQ ID NO: 221034 - DNA, 455 bp, Homo sapiens
ctatatagtcatgttaaaatcagtttgtcagtatatgtttttgaaagcctgctaggatttatattataaatacattaaaaagtattgccatttgccactttaacaatattgttttccactccataaacatgctactttccacttatttaattgtctttaattttcctagtcaaagttttattgtttacaatgttcggatcttgcatataatatctaaaatttattcctaagtgtttttgttttttgatgaaactgtacatggaattttttaaaatttcattttccaacgatttatggctattaatcagaaatacaattgatgtttgtatattgactttgaatatcatgactttattaaattcactggttaattagttctagaccttttgttgtagatttcttgtaagtacagtcatgtcacctaaaaataaaagcaagcttgcatctttcttccc

SEQ ID NO: 221035 - DNA, 379 bp, Homo sapiens
tagtattcagtcccgatagttcaatgtgttgcttatttcactgatagaatgtggatgcattttataaacttagagaatttagaaaactcataaataaggaaaattggaagttcttatccatgatcatgaggtacattggagaagagttggctgggcgcaggggctcatgcctataatcccagcactttgggaggccgaggcgggtggatcatttgaggtcagcagtttgagaccagcctgacgaacatggtgaaaccccgtctctactaaaaatacaaaaaattagcccggcttggtggtgggtacttgtaatcccagctactcaggaggctgaggcaggagaagtcaacacgcccgcgaatttagtagtagtaggcgg

SEQ ID NO: 221036 - DNA, 305 bp, Homo sapiens
ccatgctgtctcaggatgggcaagaaatggttcttgagttagacatgtattccgtgaagacgctgtgaatattgttgaaatgacaacaaaggatttagaatattccataaacctagctgataaagcagcagcagggtttgagaggattgactaattttgaaagaagtcccactgttgacaaaatgatatcaaacagcatcacacgctgcagagaaatctttggtgaaagcaagagtccgtccacgtgatatacttcgctgttgtcttaagaaattgccgcagccacccaagttttcagcagccac

SEQ ID NO: 221037 - DNA, 287 bp, Homo sapiens
gtccagcttcggctcggcatcagagggagaccgtggaaagagagggagagggagaccgtggggagagggagagagggagagagggagagagggagagggggagagggggagagaggtagagggagcctcatttgtaaaatgagagaattttactagattaattaaaatgctttccatctataaaatttgcttctggaaaagaccatctatccaacataatagattttttttttctttttgagacagagtctcgctctgtcacccaggcaggagtgcaatggcacaat

SEQ ID NO: 221038 - DNA, 448 bp, Homo sapiens
gcctgccataaattcgtaactctagagaaaattcataattaaaaaactgatggcactaacaatttcttttctttttttagtttaggagataaatttactttttggttaaaggtatactaggaggacttctgaaataacaattataattctataaatttacttgaggctagtgttatgtatatgtgtgtccatgtgtgtacaagatatgtacacatgaactatacataggtatgcactgatatatacatagattgtagtttgtgtgttcaacttactctttatattttggcaattttttagatactataggtgtaaaaattataattttaagttcacagatgaagcatatttacctctttgaataaagcataattttgtaaactttatgattgataggatggatacaggactgaagattcagagaccatgaaagatttatgtcaggttt

SEQ ID NO: 221039 - DNA, 188 bp, Homo sapiens
aactaagtttaaagtcaattgatttttctcctgaatcaaggactagcaaaaaataataataataaaataggccaggctctgtagcacaggcctgtaatcctagcactctgggaggctgaggcaggaggatcgcttgaggccaggagttcaacaccagcctgggcaacatagtgatactgtctctacta

SEQ ID NO: 221040 - DNA, 590 bp, Homo sapiens
  misc_feature (8)..(8): n is a, c, g, or t
  misc_feature (10)..(10): n is a, c, g, or t
  misc_feature (12)..(12): n is a, c, g, or t
ccaaattngncntttggccggggatgggtgtccactaagcctgcaggatagataatgccaggtgtccttcttccaggagaggaattgttccacttgctggaactgtttttttgggcagatatttgtacgtagaacaactgttgtagatgcagcctctttccttagatttataatgctggacccttcttagatggggcagcatcctcccaacaggccgggcaaatctcccctggggccaggctctccaatgaggctttctaaagtgtgactcctggaaactggacatagtttgcaggatacccaagagcctcattcagagcaggaacatgggcaggctcgttgagggcaggaaatttgatggaagagaattgtcccccactctctgctctttaggggcctctgtcttagtaagaaggaggccaaggctctgtcgtctagaggcattgcagttaccacagatcgcatgctcctcttgtgccaggcacctgctgggcgctctatgcacgctaggtcattcagtcctcaccacggctgagaagtgagtagaatgattcccattttactgatgaggcacctgaggctcagggaag

SEQ ID NO: 221041 - DNA, 474 bp, Homo sapiens
tcaatctcggatgttcagagacccctctatgcaaggaggcaggaaagaatttgctctatgacctgggttttgatagcagtgatgatgatggcttctgaccagtccacagttgatttattggtctcagctagaaagagaaattgcaggacatttgggctggccaacagcagaaagtccctgaagcctgccaagtacccagggtcagaggccctgctgaggtggggcaatgagcacgagggcagggaaggtccagcattctgggtaccaggtgctgcccctgacaaggattaagtgcatccttatttattggaatgaaatgtgaaaatggtgctgatgaaaactgaggcagcagcctggttgtggggcatctggagcagggtgcctgtactttggcgaaaggcaggcaggcctccttatggaatactgtgtagcagaagggctctcataaaactgttgcggtggcagcatgactcc

SEQ ID NO: 221042 - DNA, 490 bp, Homo sapiens
ccgtgcaagggaagtgagaagtggaagtgtactgaaactctcatttttgtgcagagttaatagatgctatggctctacaaatcaaaacatagtcgtaaaggaaactaccagaaaaaaactaaaaataataatgtaactaacacatttaggaaatgaagaagggaaaacagaagttggttaaatgtcttttgtaagtcacctataaatcactaggttaatgcatatggtctaaagttgataaatcaaaaatttaaaattataatgtcaattccagaaataataaagggcaatgtgactacttctggggagtaggactaattgaagagaaagtactaaggaagtggtctttacttctaattttatacatttcagtatcttttgatttatccgtgcatatgtacacatggattattttcaaaaattttttaaaagttaagcaatgtaagcgcctattaatactgtctttgatgcctctaaaagattatataac

SEQ ID NO: 221043 - DNA, 201 bp, Homo sapiens
gacacagttgggtgactttagggtttagagagaaaatgctggcaggggactggggaagggagaagggtgaggtgggagggatgagcttctctttctcgtattgctatgcgttgctgaaaggcaagctaatagttacccagccagggtcaagcagctggagagggaagttagagaaattcacagccagggccctgagagcag

SEQ ID NO: 221044 - DNA, 478 bp, Homo sapiens
atagttgatgttctgtaaatacctattgaatattgactgaaacagcctttaaaatagaaattatagataaatttggcaggtgtatcctgatcttccgtgtggctttttgaggtaataagtttatggtacgagtgcactgtctaagtatcatgctctcctaagatacacctttctgtatggctgtaattctaagttagggaacagatagaaataaagggtctgttcatttcatctgtgtagtgttcagtaaagacagggagattgctatgggcaatctattggttaccccacttgttctccagtgtaatcgatatctttctttttacttattttatgactcttctagcttaatatcttttagtccacagacatatatgtgtgagtatatatatgtatataattatatatatatataattgaggaaaagcagtatttgtggtggcatggggtaaacacaagtaagccctcaatgactttg

SEQ ID NO: 221045 - DNA, 413 bp, Homo sapiens
atggggctatctgaattttaacaaggcctccaggtttgcatgctcaagattgagaaccactggcaaaagcaaacaatttgaatctgaagtcagcccacctgcatttgaatacaggccctgccacttaataactgtgatttagagcaagttagttacttaacagctaggttgaccaattgtccgagtttgcctggcactgtcctgatttcagcactgaaagtactacattatcgctgtggctcacgcctataatcccagcttctcaagctgtccctgtggaatcctcaatatcggtacattcatccctatctagcatccccttcctccctcacccatcctgcaccctcagaattcattctcagatcaccttcccagatttttgccaatatcaattaaaaaaattttttagccaa

SEQ ID NO: 221046 - DNA, 438 bp, Homo sapiens
ggaatctgagacagccagaaagggagtgggctgagggttttggggtgggaggtaggggaagggtagatagagttcgtggtcaggtttagggagcagaaggaattggggatgttttccaggaggagtgggacctctcagaaaatttgttcttgggctggacatggtggctcacgcctgtaatcccagcactttgggatgccaaggcggacagatcacgaggtcaggagatcgatcgagaccatcctggccagcatagtgaaactctgtctctactaaaaatacaaaaattagctgggcatggtggcgcgcgcctgtaatcccagctactcaggaagctgaggcaggagaatcgcttgaaccagggagtcggaggttgcagtgagccgggatcgtgccacagtactccaacctggtgacagaacgagactccatctcaaa

SEQ ID NO: 221047 - DNA, 203 bp, Homo sapiens
tctccctagtggagcaaaccagagccaggaaaagaaatccttccagcatcctgccagttcccttacaaaacatcatgctgcttccccaatactgaggccagacttccctgaggaggctttctagtgtggcttagtaggaaggaccaggctcaattcctagctttgtgtgagctccaagtactgttttctctaaaccttttccc

SEQ ID NO: 221048 - DNA, 382 bp, Homo sapiens
acttgtctgtgtattagaatcacctgggaaatctttaaaaattctaaggaccaggtaaattaaattataatctctgggaataggactgatttttgtatttttagtagagacggggttttgccatgttcaccaggctggtctcgaactcctgacctcaggtgatccacccgcctcagcctcccaaagtgttgggattacaggtgtgagccaccacatccagcccagactaatttttctgatgacaaatgctgcttgttgatgtgaattctgatatggcacacacttgagcctcactttgttagctattaatttgtgttactgaatttacaggcctggaatacaatttgtgcttctttttaaataaatttcatacttttttttt

SEQ ID NO: 221049 - DNA, 506 bp, Homo sapiens
tggagacctgatagcagtgtgaggtatgggtttggacagaatgggatttgaaatagaatgtaagaataattagtttgacagacgatatcaactaaaatagtggcagtagggatgcagagaaagagaggtatttatgaaatcaaattgagaggacctttatgtgaaagcacattttatgtgaaagctaaatatagtaataggaaatctgagttgatcctcaacttgctaggtgggcaagtgatgatgccattaatcaagatcaggaatacagaggtgtcatgggggtgatcaggggtggtgataaatagggataaatatgttatgaccatgttgagattgagattttttttgcaggatgatttagtaaaatccagtaaaacacacaaaataagccatctagagctcaggaaagattatgaagctggatacactggtttaaaatttagcaaagtatacatatttagctgaagcaatgattatgggtaaaattgctcagtaataagaga

SEQ ID NO: 221050 - DNA, 205 bp, Homo sapiens
gatctaagaagactatggaaacctcttataagcatttgagatctgtaatgatggcaagaggttgggaaaaagaaagatgaacagtaatagaggaatacaggagaatgtgctgtgtgcttagcattgggctgtggaaacccatgctgaaagtgttggagaacccaacactggagacaccagaaacagataataaagggttactttt

SEQ ID NO: 221051 - DNA, 218 bp, Homo sapiens
caaacaaaaatttcttgctcaaagaaagaaaaaaaaaaacaccaggaaccataaagttgtccctcagaaatgaaggagagataaggactttcccagacaaataagaactgaggaagttcactagacttgccttataagaaatgcaaaagggaattctttaagctgaaagaaaaggatggtaattggtaatatgaaaacatataaatgtaaaaaattca

SEQ ID NO: 221052 - DNA, 330 bp, Homo sapiens
ctgtagatgatgttgaacaatgtggtactataatcccaacctgttgtatctttgtttactctcaaaagcaacaattgggctgggcatggtggctcatgcctgtaatcgcagcactttgggaggctaaggtgggagggttgcttgaagttagttcctttttttttttttttttaaaaaaaagacaagatctcgctctgtcaccccggctggaatgcagtggcatgatcatagctcactgcagccttgaccacgtgggctcaaggaatgaaccattgtgccaggagttcaacaccagcctggataacatagcgagaccctgtctctacagga

SEQ ID NO: 221053 - DNA, 492 bp, Homo sapiens
acactgaagacattctcacaatttaaaacaagttgtaaactacaggaaacagttggcatcccaggagagttgttgcctgaggaactagatggtggtatgttattctggcatatagggaacagaataagacatgagggtaggaagaggtttttaaaagcaaagttaggcattcaatgatgacttcataaatgtgcctgggctggcctttaatggaaggctttaatttagggaacttaaagaatttcataatattggagtataaactgctggaaataaggatgctatttaatagactctcttagatttttcataaaatgctaatagaatcccaaaggaagtgtgtattctaaaatgttattgtgtatgttataaaagctttgtaaaataaagtgatgttaagctactattgtaaagttaaaaattttttcagtcatctgtaatctcattacccaagtaaaactgttttcatttttccattatcccttttagttg

SEQ ID NO: 221054 - DNA, 531 bp, Homo sapiens
caacacaaacatgtctaaatattagtctagcaatcctttatcttagacttttatcacattattccaaagcaaatgactcagatctataacaaagtggggaaagagagagactactcttaacaaaacattttaaattactggctgacacctgacacaggaggatcacttgaggccttaagtttaagaccaggctgggcaatatcgtgagaccctgtctcttaccaaaaaaaaaattttttttaattatccaggcatggtggctcacccctgcagtcctacctctctggaggctgaggcaggaggatcgcttgagcccaggagttagaggatgcagtgagctatgatagcaccactgccctctagcctagacagggtgaaaccccatctctttaaaaaaaaaaaaaggggggggattttaaattatttatattgtgtaaaacatggaaagtgaaaacccttaggcaaatattcagtgaattgttcctagacctagattcaccctgctggaaaatgctaatggacactacctag

SEQ ID NO: 221055 - DNA, 111 bp, Homo sapiens
tagacccaagaagattctgtatctgggctcttgagccactgcggctcagtccactcccacactgtggagtgtactttcattttcaataaatccctgctttcgttcttaaaa

SEQ ID NO: 221056 - DNA, 494 bp, Homo sapiens
catgagctatagattcttatgacccaataaagggaaagaactaggattatctgttttccattccccttaagcagagaatatttaagtatgtgtagttgcccccaaatgcaatgtatttttttctttattttttaaataatttaactttttgaaataatatgtgcatatgatgcataattcaaaatctctgaaagggtaaccatgtgaaatcatatttggccctgtcacccagccatcccattaacccctttcctggaggcaaccatttttaccagtttctggggtttcctactagaggtattcagtgcacagaaacatatctattatgtgtgtgttccatacatacatatttatgtaaaattttttctactgttctgtatcttggtttttaaacgtaatatatctttgagctaatttcatttaagcaagcatagagctcccccatatcccgtgacagccccaccgaggacctcctggggctccctagtcaaaca

SEQ ID NO: 221057 - DNA, 382 bp, Homo sapiens
cgcggccaggcctgttattcagctctccgctccgctgggacccgcacagcgccagtggctcgggggtcggccctcgcctcctccccggcccgggcctagagccacccctaaccagaggccggagacagctggagcggctgccgcatcccggcccagcctcccctaccatccctcccccttccactggacatctggaccctaggcccccgcaccgacagggttccggaaaccctccccgcccagcccggcggccgggccccgcgcctctctctctctagagcccccagccctcctcaagactagacttccgcctacccctggacacctcctcccggtcccctccctccccccctcccacagcctggaccggggtaggagggag

SEQ ID NO: 221058 - DNA, 1450 bp, Homo sapiens
agaatacattaatcaacactactttttttgacaaagcactttatgtttgattcgcctgatgtttacctctcacttcagtatgccacagttcaattctagttcatgattagagtgctagatcagcgcctacaagaattcagtttagttgagaatacaatacacaaaattaatagcagctgtttacatgctgaattgataaattctgcaggtaatgataatgtttgtgaaatgcatcctgtggaacccaaactctaccaaaagaggctggctggacagtttcctctcagagattcaatctgcatgtcagcaaagaaaaagctctgagaaggcttaaattaactaaactcacctgttttacacagttgaacctggagttcttcaggcttatctgacccccaggactttgttatgatctcaagaatcgtgtagtgactggcagccatggaccatacaggatgaggagggtgtcttgcttagcttttgtgagccaggggaaggcagtgtgccacgcactgtcttttctgtggctgcttgcttcctgctgtgtgctgacatccccaccttactcgtgaggaaaatgaggctcatggctgtcagtggcttttcctgcaccgcactggggtgaggaacagaatctggggttgagcccagccttcccagcttccagccaaccttatatgcaaatacaggaattactgtcctagggaaagtgctgcatagacgatcctttttgttcttctactgcattatattattcacacagttataattcttttagctcaaaatataaaatgaaaagtgattgacattttaggctggatgagtaaattaaaaaaaaaaaagaaagaaagggggctttcgtggtaggcagagtgtgtaatgcccaaatcctacaagtaacaaaagaacagcaacttgggacttagggcattaggtgtgcagcctctgtgtgtgaaaactggctgtgggatgtgctgttagctctagcagtggttttagagttacgaagtggttccaagctcattaattagccaagccttaaggctgacctattccctgtggacaacacgacctcctttcagcagtgttttgcactgtactacagtcatccaactgaaaactcactgagttaaaataggtgttaggaatatgattctctctgggagatactgtggcattcccctgctttaataaaaataactgccccatattcagggacctaggaacggaatttacctgcgtgagcttattaatccctcatagccacccaacagttgcttcatcatggagcagagtaaacccctggggcctcaggagttggctgaggtcgtatagtgaggacccaggtttgtgcagtcttctcggggcatgctgtgtgcagtgggtacttacaagttaactggtaaatgtaattctcatgagctgggtgaactgggggcaacttcgagcc

SEQ ID NO: 221059 - DNA, 407 bp, Homo sapiens
cttcatctaggctgtagtcatctaatgaattgcttggatgttgtagtaaaggaaattgtataaaattgttttaaaaagatgtataaaatttaaaagtacgaaaagaaatacaggaacaagaatagatgtagtgaaaacttggcactatttctgacaaagtatttttttcaaagtttattcctaaatgtgagcaaagcagtcataaatgaatgtcagaagcagttgtaaagatggggcatggttagttgtggccagctgttttataaaaaatagattctgtttatacttgcagaaagattctgttaatgagcatttcattgtagctgacaaagtagttgggctaggaggccagtcactatgactttgcacatattacaactgctctaggcctcagttttatcacccat

SEQ ID NO: 221060 - DNA, 565 bp, Homo sapiens
ctgcctcacatgactaccactaggtagaatggaatctggtttgatgagtatttttaagtggacacatttacttcctaaacaaaaccaatattctattaataaaaaagaaggaagattcttgtaaggcaactaatatttctgtcacacagagaaaaacaaattgataatgcagtacaaggttgatattttaaggtagagatttttagcttgagcatttagcatccatttgttcttttaatgtaaatgtcaaacaaaatataaaaatcatatgtataattaccaaaaactatttaaaagtaaatttataattcactcaatagagtaatatagattaaataatttttgtaaaatttaacgtgtttttgctttcaaaaaatacaaaagataaaaaagaatatacagttaaacagtctatatgaaaaaaaccataaaagtgtcaaaagtaagattatggcttatgaaaattacatgtttacatttatggatgttacctgaatgtaaatgtaagtaaattgtaagtgtattataaatgaatgtaaaaactgaaataaagttgtttattggc

SEQ ID NO: 221061 - DNA, 366 bp, Homo sapiens
agtatcagaaaaaggggtgaggcaggaacaacatctgaataaataatggccgaaagtttagtaaatttgaatattatgtatacaaagatcttaaaagctcaacaaatttaagagaataccaaaacaaacaaaagtcaaaaaagtcaaatcaaataatttataaagagacaatgttaaaaatctaaaaaaatcttaaaagtaaccagagaatattttgtatatgcagagtaaaaatgacaggattttctactaattttgtatcagaattatgcaataaaaagacaatgtgatgatatatttaaatggtgaaagcacaatgaatagaaacacagattctaaattggataaccagtgaaatattttttt

SEQ ID NO: 221062 - DNA, 617 bp, Homo sapiens
ccacttcatatagcatcagccatgcggctcaactgagggctgttggatccacttctaagatgactcactgctggctggctgttaatgctgggttgaggccctggggccttggtttgtctccacattggcctctccattaggcctggacttcctcacaaaatggtggatgagttctaagggtaaacatcgcaagagagaaaaccagacaagagagcaaaacttgccttttgtgacctagcctcagaaatcacatagtgtctattaattgaagcagtcccaaagtcccacctgggttcaaggggaggagatactgactacactgtccttgatgggagggtggtaagattctggaagagagatgggaccagaaatgttgttgcagccattttggggaagtgcaatctaccacaacgcatatgtatgtactcctaggcaatatgctatttaattttgcatgttttacgctttatagaaacatccatactgaatatgtttttctacaactttgttccctcaacatttatgagtcgcttatatttttggagttcatttatttttagaattgtataatatttcattgcaattatttgctacaatttagttctctgttattttgg

SEQ ID NO: 221063 - DNA, 340 bp, Homo sapiens
tttccagcttctaagatggcagagaacgatcaccagcctgagccttatttccaggtaagtagctgaattagagttttgtcttaaaatttttccttaatgaataaaatgtaagattacccaccagctgcttttaatttctccttagcattagaacactcagtaatcatatgaattgtgcatttgtttgttttgcttaactctttctgtttgtttatgtttggggttttattgttgttgtttcgcttttctcccatctcttcctgacttggtcaaatccaaaggaatgttccaaattatggggagcaaggcatctgaaatggctaaaactcctgtggctgca

SEQ ID NO: 221064 - DNA, 631 bp, Homo sapiens
gacaacttgctggcccataccagtctattgtcctatcctggggcctaggagcccctgggccttccctggcttcataaaaacagttttcagcagtatttgcagacagccaagcccagtctggactgggagcccaagtgtgaggtagtggatggctcttgccaaggattgcttcctactcccaatgcctttgcagatagctaatgtcagatggcgtctggctccctcccttctcaccagggacagcatttgtcccccagctgctctgcctgcttcctctctgacttgctccctgtttgccaccttcttcaatgcctataggtgtccaggttgttgattatttgcctggactggaaggtccagtccctacctggtcccctgatacccacatttcagcagtgccccctatttctagtccttgtcccaaccccctcacctgggagagatgatatagttctggtttcacacagttctctactgaggctgagcactgccacttactgtctttgcggtatggacaaattactccaccttacagggcttcagttgccttatttgtaaattggagatgaccataacagagttgttgagattaaatgagctctttcttcttcttcttttttttttttttttt

SEQ ID NO: 221065 - DNA, 562 bp, Homo sapiens
tggcccagagatgggtatcactgccctacacatcgaactccgagccataggaggaagtagaaccaagacccctggacctgggcccaggtggccctcagggcccttgcccgctcaggtatgaagatcggacagattgaggacgtcactcccaacccctctgacagcacccgcaggaaggggggttgccatggtcactgtgcacaggactcctcaaatattttccgttaataaattaccttcctgttaaaaaaaaaaagagagagagagagagatgccttgcacatggagaaatgcacttaaacagagaaataaaaggtaagagtgtatcagcaagtttgatggggaaggatgggaagacccacttttggtgcgaaaggctctggaaaagcagcatctgtgcagggtggaaaaggtagatatagacaggacgggggacaggcatggtacagagaagatgcagatggatagatgctaaggtgtgggggtggaaagcacagttctgttaaagaaacaacatatataagccacttaagctggggagaaaaaaaaagcatgtgttcca

SEQ ID NO: 221066 - DNA, 383 bp, Homo sapiens
ggggtagggacccctcggtcttgccccttcccccaccactttaatccttcctctagtctcaaccttctctaggaaaacaagccctaaaatacaactggaaggaattttgtaagctctggggacgggaggcagaggtcgcccccagccctgtaggcccgaggctaggaaatggggagctggacgcgagtcatttaacgtgctgcgatatagagggcctcaaatgacaccttaactgaaaactattgcgctgaaacctccggatctcttggaaacgtggggaccaacgacttttttcaaaaccaaatttcttccgattttcttcaaacagtgaaacgaggaagtataaagaacttgagtatgaataaatttttaaaaggaaagca

SEQ ID NO: 221067 - DNA, 114 bp, Homo sapiens
tccgccacaaaaaaagaaagagagaaagagagagagagagagagagaacatcacttttggttatacagacaagccattaaaaacatagaaataaaaataattttaaattttttt

SEQ ID NO: 221068 - DNA, 1092 bp, Homo sapiens
aagcagctggtgaacaaagggtggatgcacttttctgaatctagggggagaccaggttagagccatgctaagtgaagctgctagggtaggtgggccaggcaggggaacaggcaaagatacccttggctcccttaaacttgggctagaaaaaacaaagacatggctcaaggagaaccacaaggtgtcactgttcatcctcagttaaacaaacactgatttgggcagggacttgagaaacactgcaaagaactttattttgcagatgaagaaacggaggcccggggaggtaacatgatttgactaagatcacgtaacaacttaatggcagaacaattatgagaaaccaagtctcttaactttcagactggcaggaccactttctcccattgctcctatgagatggcattttgagatgaggagtaagccttctctacaatcattcactcaagacaatggctttcaattagaaatagaacagaaaaaaaacaagagagagagaagaaaagaatgaaaaaagcgcagcattcactctcacatgtgccttattcaaagtgctgggctaagatgccagtgcccacaacgagagagtggcccacagggcctccgtctgtggcaggcttgaatacccgaatagaaaagtatcaggtaaaggatttcattctttttatggctccaacttaaaaagagtctggttcccaaggaaaacaggaagccaagttgctcagcaaagaattggctgaaacctaagtaggacccagataaaaacatttgctggatggaaggatgtgggcaaatttctgggccccgctgcttggggatgggaagctatgaggcagaagaccctttgtgaaacagtgacccgtgcaccaggcatttttgcggatgtctggaaactgcgaggcagtggaggagtcataagttagttggttttttaattccaactaactttactccaccaagtatctcaggagatttcgcctatgctctttggcctgactcccactaggcccttactccttccatggtggcttctactggagcctctttcttagttcccaggttattaaaataataataaattcaaagagcttt

SEQ ID NO: 221069 - DNA, 258 bp, Homo sapiens
agctggaagatccgaagtcttctgtgttcctttcccacagagggaagccggcgatgatggaaaaactcacctggaaaatggggtcatagagttctttcataaagctctcatgaggaccaaataagaagcctgcgggaggggtcatttttgagcttcccgaactttggcttaccctcagcttgagccagcgcacatctcctccttaacagcctctcctgagaataggctggcttcaaggtaaagcattatctgatctac

SEQ ID NO: 221070 - DNA, 405 bp, Homo sapiens
aggaagcaaacagtagaaaatgaagggtggtcctgaagaaataaagaaatcacaaaatcaaggccagtgatatcaatagaagagtgcagtcttaaagcaagatacacagacagatggcagctcaaactcctcatatctcaactgttattgccagaccaggaaacaagtaatttcaaaacgaacagaaaacaaagcgacagaagaaaaggtaatactgattacaaggtacccaaggacaaatacatctgactgaaaatctaaggagcaccaaagcaaagccatgaaaaagaaccaaaggaacaaaaataaataagaagcaaaatggttgatacattggcaaacagtatttatttaacgtatgtataaatggggtccctgaagaataaaaacaaaacaaaacaaaca

SEQ ID NO: 221071 - DNA, 601 bp, Homo sapiens
ctgatcttgaaagccttgaaaataaggaacaaaatgactagggagtgacttctattagatactgttagctgaaaatgagctttctgcagagattcttagactcattagagaaccattataagactaagaaggcagggctagatcccttgtaattcagatatgctggaaaattgcctttgcatgtatttgaattcttattaagctcagatttcttcaaaattagtttttattataataatggtaggtatccatccattaatataaaccacaaaaacagaaaaatctacttacaacttttcaacaaacagatttaccttccactgcctttgtgtcataagtaaattgtttgtggcatcttatgattctcaatataaatttggaggtgcatgttttaaaaatgagtgctagttattaattttatgggcttttgctactaaaatctgtaaccatttcagaaagcctcattttttgactggagatctggatatgtgtagtgttccttcctgcttatcaagggagtaccataattaaagagaaaatgactaaaaccttaataagagagaaaaaagtttcatctatatcttatatagaacatagtgca

SEQ ID NO: 221072 - DNA, 769 bp, Homo sapiens
ccgacatgtgatgtcatgcccagaggcccagctgtaaaattcctctctttatactgctgcctttatttctcagccggccaacacttacggaaaatagaacctacattgaaattcctgtttccactctggctggtgagtcaattgctcaattacttttactacctaatattgttttaaacaaaggagataagacacggggtcctaggatgggctctgacagtgaaaaagccacttattggattaatgtaatttctgaacaacagcccacctgcaccatacacattcaaggaaaaaagtttaagggcctactagatactgggtctgatgtttctattatttcctctaatttatggccttcctcctggcgtaaacatcccactaacatataactagcagggattggaaaagctgatgaagttcaccagagcacatttatcttgccttgcactggccctgagggtcaaaagggtaaaattcagccttatatcatgccaatctccactaatatttggggtagagatttgctgacacagtggggggctgaaattaatattccacataactcttacagtgctcccagtcaaaatataatggaaaacatggggtttgttcccggactcggtctcggtccaagacatgaaggaattactaaacctcttcaagttactgtagaagagggctggtttaggtcatccttttcaatgacagccactgctatgcctccctacaatgaaaatctgaaacacctgtttggattgagcagcggccg

SEQ ID NO: 221073 - DNA, 174 bp, Homo sapiens
tgggtgtttcacaagcccagcaaattgatgggtggtgtgggggaggtgtacccttaatatgaagtccaatttaaagcttattctagcccaacaatttagacaatccctttagtaaagtaatgcacataccctctaggaaaatgctgtctttccactagtctggccaatccttgc

SEQ ID NO: 221074 - DNA, 416 bp, Homo sapiens
actcccgatctcaggtgatctgcccaccttggcctcccagagtgctgggattacaggtgtgagccaccacgcccggccatatttttattttaatatttcctgaaacttctgtgggtacagaaaccacaaactgatcggctgacaaaagggggaagaggcaaggcaactggaaaccttcggggaccagttccctccacgcccaggtctcttctccccagcacagctcagtccatagcctggacgtgccagcagggaccctcaccctacatgcttcgggatacagccttaaccccttcccccacagcctggtggcccagttctgtgaaggaaccaaggcaaggggggaatatccctgctgccacatcccatgacgccactcacagaccctcagttgattggcaacattgaacaggtta

SEQ ID NO: 221075 - DNA, 557 bp, Homo sapiens
accttgtctctaagaataaaaaaaaaaattaaaaagaaagtctcaagatgagtagagaacagatatgtaataaagcaagcacagcaaaaggttaataggtacacaggtgttcactgcaaatttttttgacctttactgtatatttgaaattttcataacaaaatgttgggtggggtacagagacctaacctaacaatcaaatgcagttatgtcgcctaatttggatcctgactctaataactaattgtaaaacgtaattgttagatttttgtaaggtgtaataatggtacagtggctatattttcaaaaagagttcttattgctaggtgtggtggctcatgcctgaaatctcaacactttgggaggccgaggtaggagaatagcttaagcccaggagttcaagaccaacttgggcaacatagcaagaccccatctctacaaaaaaatttgaaaattagctgggtttgctgacgtgtgcctgaggtatgttgcctgggctgatctcgaactcctggcctcaagtgatcctcccgtcttggcctcccaaacagctggga

SEQ ID NO: 221076 - DNA, 602 bp, Homo sapiens
gcttctaagaaaccagtacacaactacagccctcagaaatactcatcctcatcttctttcttcctctcctttcagaatagggtgctagcaagtcttatctgcagatgaggccaggcaaggtggctcatgtttgtagtcccagcactttgggaggctgaggtgggtggatcacttgaggccgggagtttgagaccggcctggtcaacatggtgaaaccctgtctccactaaaactacaaaaattagccaggcatggtggtgcacgcctgtaatcgcagctactcaggaggctgagcaaggagaatcgcttgaacctgggaggtggagtttgtagcgagctgagattgtgccactgccctccagcctgggcaacagagtgagattccatctcaaatgaataaacaaacaaacaaacaaaataactgcagatgaagtaggaggtcaccttaagcatgttactcaaattctctgagcatgggtcctcatctgtatctatctcatgggtttgaggtgggaggtaaatgagatcattcattcagttcttagtatagtactaccttgataaatatcatcatttcagcagctgaaggccattctcaggta

SEQ ID NO: 221077 - DNA, 309 bp, Homo sapiens
gtaacttagtagctttctcagttatcagattgtcttgggattgcagtgcctgtgtccaagttatccttattcggtttaataatggtcccaaagcacgagcgtggtatattgttataattgttctattttattgttatttttgttaatctcttactgtgcctaatttatacatttataaattaaactttatcataggtatgtatgtatatgaaaaaacatagtatatatagggttcagtactatctgaggattcaggcatccactgggcctcttagaacatatccacgttggtggtgaaaccccgtctct

SEQ ID NO: 221078 - DNA, 336 bp, Homo sapiens
agaaggaagccagagagtacctgggttcaactgaagtgccagcctgctccagccagagaagcacaatttgtgagaacagggaaaacgaacccaagctgctggaacccaatcctcttgaattaatggcttcataggtattaaaaaaaaaaaaaaaggccgagcgtggtggctcacacctgtaatcccagcattttgggaggccaaagcaggaggatcgcttgagcccaggagttcaagaccagcctgggcaacatagggagactcatctctacgaaaaataaataaataaatgattttaaaatggcacaaaaaacaaaccagacccctggactgtta

SEQ ID NO: 221079 - DNA, 584 bp, Homo sapiens
ttggaatgctcctccgatttcaaatgacccgggggaacatggtggtttcgtgaaaccaaagtcagctttgaagaaagctaatgtcagcctcaggttcaggcagtactgtagaagaacactgagctctcagtagctggctagctgtgctgccttccccagtctatttcacatccgcttttatatcaaggcagatgacaaggaaacaaactgacgtcagtttattaaaggaaacacttgtgatattgggagtaatccctcaggcaagaggtgctaattgaacctaagagtatttctgaagttactattttcaacagtagagaaggaaattattgatcatctcatccaaaattgataaaaacctaagtgtagcagtctttcaaaattaaatattctcagctgtggaatattctcatgcccaacattgctacttcctcaaccatttctagatgattaaaattacactgtaatgccatgttgctcaatatgcatatttgttgtcatttttgtctgttcatttcttaggaatgtctttgccaccatcgaacagtcatcaggaacttagttgcatgccttttttttttttt

SEQ ID NO: 221080 - DNA, 373 bp, Homo sapiens
gcttccagaggttctcactgtcccagccacgtgcgtggcggacactctttacgttcagtttctgtgtggatgaccagaggctccttagacacacagctagacacagataactgggccaatcctcccacaaagggggtccgtagagcagtggtgacttacacaggtcacacgtgaggtcaaactttaagtccatgtcaggccggtcgcggtggctcatgcctgtaatcccagcactttgggaggccgaggcaggcggatcatgaggtcaggagatcgagaccaccctggctaacatggtgaaaccctgtctctactaaaaatacaaaaaattagccaggcgtgatggcacgcgcctgtaaccccagctactcgg

SEQ ID NO: 221081 - DNA, 588 bp, Homo sapiens
gtaattaggagaaaaccattgaggggggtacttatatttaattggtgagtaattataatcagtttaggattgattatctcagccacagtacttagtacagcaaaagggaatacagatttcatggtataaatatagtctcacattaacatattgacttttttttttgagataagagtctcactctgtcacccaggctggagtgcagtggcacaatctcggctcactgcaatctccagctcccaggttcaagtgattctcctgcctcagcctcccaagtagctgggattacaggcgtgtaccaccacaaccagctaatttttgtatttttagtagagatggtttaaccatgttggccagactggccattttgacttttaaatgaacaaagttcaagaaaaaaatcaaaggacagttgatgttatttcctggatttacatatgggtcttaataagaaaactaaatcagatttttttggatgaagttttataaatcttggacaaattattttattttattttattttatttcattttctgttttatggctttattgaagtataatttatatatcttgacattcatccattta

SEQ ID NO: 221082 - DNA, 230 bp, Homo sapiens
gaaatctgagctactggaaatgactgagaatcagatataaaggcagtcctggtggtccgttctggctgccgttgctgtgtaacgaatctgccaaaacttagtggcttgaaacaacaaagaacattttattatctctcattgtttctgtgggttaggaatttgtgagagccgtgctgggcagttttcgtgcggctgtctcgtggttgcacctacatagttgctagagctac

SEQ ID NO: 221083 - DNA, 510 bp, Homo sapiens
ataaacagagttattcaccaggtcagaatgaatgaaaggaaagagatgaacctgcagttctatgagtggcaacgccacaaggaaaaaatatttcacagccagaagtgaaaggaaaaggacagatttgttagggattttacataatatagtgtgtagactaatactgcgaacataagtaattgatcttttttaaataatgaagttcatgagattgagaagaaaaaaggaatgctgggagtgcaaatcttttcatattgaatgctaagataatttgctttgattcctttctccttttgagattcccttctatgaatgtatctcttgttgatttgtactgaacagctgaattttctctattctaagaatccttttggaaaataactgctctgccaataatggattttcttctctataactacagtgatgccttcctttaagaaaacaatggttagttagctacttactacaactgagtcctgttagcaaaagtctttccttagaataattctt

SEQ ID NO: 221084 - DNA, 462 bp, Homo sapiens
agtatacattttatggatgctaaaaatactctttagcaatgtttctattcagaatgcatcatcattagagaaaagctattaaggttgcagtgtgaatcaccagttggaaaaagagaaaacatatttcatttccagtccggaagcaatccatgcatgcaggcagtattcattttaacagtctggatcagttttttaccatgaacttctgctattagaaaaaatgcctttgtctaatctagctttccttagatgtggtgcaaactcagaactatatgccccggtcaatgttagagaccctaaaaccccagctcatttggcatctgttcattcatattccagctgaatctcagaaatgtgcttaagggaaagcatctgatattagcagtttctcagccaagtcacaggacgggacatcccagagtcatggcctgctgcacttttaaaagggaaattcaggaatca

SEQ ID NO: 221085 - DNA, 473 bp, Homo sapiens
gaggagtctcactctgtcacccaggctggagtgcaatggcacgatctcggctcactgcaacctccacttcccgtgttcaagcaattctcctgcctcagccttccaagtaactgggattacaggtgcatgccaccacacccagctaatttttttgtattttagtgcagatggggtttcactgtgttgcccaggctggtctcaaagtcctgagctcaggcaatccacccaccttggcctcccaaatgcatgagccacagcgcccggctgtatggtggtaatcttaatttggaatcaagtttgtctaattccttagaatactctttctcttttgtgagacaaagggacatattccttctacagtattgttattaaagatagtatgtgccttacttgccttcagaagccacaatcttaagtactctggcacccattgatattactcatgcaagactttctggaggaagatgttgtcg

SEQ ID NO: 221086 - DNA, 456 bp, Homo sapiens
gctcatgttaagttaatgatgtgtatagtatgcaatgtaaatgctcccttgtaattcaggatatccagtagaataggaatcaggagaccctattttaacaaaagttaagaaactgaactccagtttcttaacttttgtccttttatgcatttctcactctttgactaccacatgccaagcactatgccaggccacagaaatgcaaacacagtaggcattgcactacccaaaaagaaatccccacccagccaaggtgacagataatgtgaatgtagtaagcactgtgagagtgcagggaggatggaatgagctgagtcacaggaagttcaggaaccgcttcccaggaggggtcatgcttgcattaaatctggaggtaaccacaaaatcagtataaaagcatatggttagtttaaaatatcaggtgttcattacaccattctttctacatgcttgaaa

SEQ ID NO: 221087 - DNA, 501 bp, Homo sapiens
ccacgcgtccgacttaatgttgtctaggaagatagatgtgtctattcctttttagaaacgttttcatccaagagaattcacttgtttttatttggcattaatggataacccatacttgactagaaaatttatagagcacttcattcttcaatatttctacataaaataggcatcattctagaactacaatcattataatggggagatgtgaaaaaaaatgccagcatctgactgaagtggtaaatgtgatttgaacatttttccaagtgttctttgtggaaaagtcattgctggggaaatggacaacctgccctctacagtaaaatcataccagagttgctttctgggacaacgtttagcatatttagcacgtttaacattgcccagtcatgtgattcacaaaaccattgtatgtacatacatgtgtgcacgtctacatagttccttattgctatgataggcaagtggatgtggataaaacttctctccagtttcactctc

SEQ ID NO: 221088 - DNA, 871 bp, Homo sapiens
tttttctttgtagctgtaaacagtcaataaaagggagtcaaaagtaacattcagcattctgaatcctgttaatataacttgggtagccttccttctctccatttaatttggcggaagagagctgcatgtaaacctttcctatgaattcggtgattccccagatcacttaattctacttttagcagcaaggcttacagatgatgccttcaaatgaggcagatggggatgggtgaatgaaattttttcctaagtgccagttaaaaagcacggtgttttgagaatacaccattaataatgtttatggaatgattgcaaccaaaaaggtagctgaatatttcttaagggaaggaagcattgtgcatgatgtctttctttagaaagcttgattatgtttaaagttctgttgcttttccccactgcagtttgtcagttaaatattattaacactggcagatgttggaaagccaagcaaacaagaattgctattaaaattggcatacctttctctgattaattttagtttacagtgtataattccaaagctctttttgtatgctgtgcaggagattaccctagagctcagttactgagcagattacaaagagactggatttggtcatttcattaaattgcaagcttgcttcatgctgccgtctaagcccaagaattggttcaagtctcaaaatggaaaaattaaaatcatttcaggtttatttcactttaagcaaatctacatacatgctatgatgatggtatgtgtgagcttggttttataactaaatttgaaagttgttcactttctgaggtaaatcaatgtggatttctttaaataatgctctttcccaggtgtctaatgttcgtgtctattacc

SEQ ID NO: 221089 - DNA, 777 bp, Homo sapiens
tttttctttgtagctgtaaacagtcaataaaagggagtcaaaagtaacattcagcattctgaatcctgttaatataacttgggtagccttccttctctccatttaatttggcggaagagagctgcatgtaaacctttcctatgaattcggtgattccccagatcacttaattctacttttagcagcaaggcttacagatgatgccttcaaatgaggcagatggggatgggtgaatgaaattttttcctaagtgccagttaaaaagcacggtgttttgagaatacaccattaataatgtttatggaatgattgcaaccaaaaaggtagctgaatatttcttaagggaaggaagcattgtgcatgatgtctttctttagaaagcttgattatgtttaaagttctgttgcttttccccactgcagtttgtcagttaaatattattaacactggcagatgttggaaagccaagcaaacaagaattgctattaaaattggcatacctttctctgattaattttagtttacagtgtataattccaaagctctttttgtatgctgtgcaggagattaccctagagctcagttactgagcagattacaaagagactggatttggtcatttcattaaattgcaagcttgcttcatgctgccgtctaagcccaagaattggttcaagtctcaaaatggaaaaattaaaatcatttcaggtttatttcactttaagcaaatctaccgtggcagatctaccgtggcaatgtaccgtggcaaattaccgg

SEQ ID NO: 221090 - DNA, 523 bp, Homo sapiens
aaaagcactggagaggccacaaaagaattctctcagcatggaaatggggaaggcatttctaagaatgaccccaaacccaaaagccatgaactaaaactgacacatttaattatacagagatcaaaaaatcctacacagcaaagtgaccataagcagagccaacatagaagcaactagagggaaacatgtgcaactcatatcataggcaaaagcctaaattgcctaatatgtaaagagtgctgccgggcacggtggctcccgcctgtaatcccagcactttgggaggccgaggcgggcggatcacgaggtcaggagatcgagaccatcctggctaacatggtgaaaccccgtctctactaaaaatacaaagaatcagctgggcgtggtggcggttcgcctgtggtcccagctgctcgggaggctgaggcaggagaatggtgtgaacctcgtaggcggagcttgcagtgagcagagatggcgccactgcactccagcctgggcgacagagtgagactctgtctca

SEQ ID NO: 221091 - DNA, 591 bp, Homo sapiens
aagaatggaatgatttcaaagtttgtaggaacttactggtggagccacgtacctgggatttgtgtgtatgaagattcttcactactcattcaaattatgtaatagtttctctacttttgagttgtttttcttgaagtttgtacagtcatctaaatcttatttgcactaaattgtttacaagattatctaacttttttgatgtctatagtatttctagtttccattcttgataaagattgttgacatccctccttttatagctattagatgtttgccaattttaatttttcttttccaaaaaaaatcaacttttggcttctttcaacctattctatgctgtggtgtgctagtgagttagctccaaacataaaatcctggcttgttgatttccatagtgtaaacagtcccatcatggttgacttcaagctacttatttgaattggctccaaacataaaacaaaatcctggcttgtttgttgagttccatagtgtaaacagtcccatcgtgggtgacttcaagctacttatttgatgttattgatcatggagttgccaagaggtgtgcacaattggctctcctatgccagtaca

SEQ ID NO: 221092 - DNA, 358 bp, Homo sapiens
tcgattttttaaaaactcttatctcagtaactggtagtataagtacatgaaaaatcagtctaccatggtgaatgttacatgtgcaattgcaaagaatgtgttttctgaagatactggatgtagtattttataaatgtcaatcaggtcaagttattttacactagtgttcaatccttctatatccttagtgattctctgtctgcttatttttacaatttattttgttaaatcatgctctgtgattggttgcatatgcacttaggatttttatatcttgtaatgaattgacttgtttatcattatgaaatgtctttatttctggtaatatttcttttcctaaaatacactgtctgattta

SEQ ID NO: 221093 - DNA, 580 bp, Homo sapiens
tgaggttaggtacttgttgtggctttagagtgaaacacacctgagcttcaatcctggctccactatgtgtcttctatctgaactaattacttcacagctctgtgcctcagtttgcatatctggaaaacaggaataatagtctacctgctcaattgaaagggaggctaaatgagcctcaagtgcactgtaatgtacatgggacagagcctggcatgtggtggactctcggaaatgttaatgcatctggttatcacagtttccaggagcaaaacagagggaaggagacacagggaaaccaagctgatttgattagaggtcgtggtgagcagtgaaaaacactcagagtggccaaccagggaaaaatctggagaacttcacggcacattatggcttgtaagagctgactaggggctaatgtgcaggataaagggcacctgggttcaggaaggattcgtctgaagggaaatcaagggaaccattgctaatgaaaatgtcagggcccacctgtgataaaatccgggcagaaatcaacaattagatccagaaacaaacatatagacatgagcttgaattcctaggg

SEQ ID NO: 221094 - DNA, 226 bp, Homo sapiens
aatttggctcttaagaataaagctgctaggagcattcttgcacaaggcattttgagaacatattttcatttttcttgaggatatacataggagtaggtttgttgggccatagaaaaggcatatatttaattttataagaaacagtttccaaagtgtttttccaatttactctcccaccaataatatctgaaaattccagttgctccacatctgcagcaacttcacc

SEQ ID NO: 221095 - DNA, 555 bp, Homo sapiens
tgaaggaagaaaatgtgtccctatcaaaactgttcattctttctcaattgctaatgcttccttgaggatttatggattcagcactaataaactgtggattggaagtttaactgaaagactgacctatttcacctctgtactggaaagaaaagcccagattacagtgaaattgagttccagaagttaagcaagaggaacttccacttttgaactctgcagtaggaaggggtagaaattgagaattggttcagacatggaagtttatagaggattcgaaaacatttttatttttttcagagggaggggctttccaggaatgccccaaagcccccaattcaatttaaacacacaaagaaaatctccacagctccatgccacatggcggtatttcactccaacacaagctttttggcatagtgtccagggctaaatgtttacaaatactgcattttgtttgtagggctggatctcagagttcagatctcatactctttagttgcattaactgattccaggaaaagaaactagggaaaagacttaccaaaagcaaagaaa

SEQ ID NO: 221096 - DNA, 523 bp, Homo sapiens
ggctccagcaattactagctgtgtggttctgtgttaattacttaaactctctgtgcttccgtttctatctctgtaaagtgggaattatatccacctcataggttgttatgatgattagaagagttaataactgcaaagcactcgtgctgcctgacacatagaaagtaatatataaagatttattaagtaaataaataattgtgttaatttctgtccttatctccttccttgtatatttttgaaattaatgttactctctttatagattcttaggttttgcttctcttctaatataagaattggaagttaaatattttcctcgaattaccacttttgctatattctataaatttagctatgtggtcatcgttttggggttttgttgttgttatagttctagatggttttgaactatccattatggatttttctatgatcttggagttatttacaagtactttaaaatttttctctatgtaacaatatcttatgtttttgtttctatcttgtaacctttggttaa

SEQ ID NO: 221097 - DNA, 456 bp, Homo sapiens
agtgagactctgcctcaaaataaataaataaataaaatttaaaaataaaataaaattgagaaaattcctttagttttcttctcctctgtattgggaaaatgatgaatttcaaatgaatgtagtagctggatacttctgtttcgccaatgaaggacattctgtggagcatggcttgtgctagcacagttccttgtgcatgtcgtagtagctactaaatgagggatggttgttttaggaatatgacagcattcagagtgccagagaaaccttgttgattgggcaggatggtgtgtagtgtggggtgttcagttttgtgatttcttctcacattctatagtgatattccaattctctctatataaaattttaaggaattcatctgttttataagtcgaagggtactttccttagactgtaatgaatttttaatgaataaacttatgttaccacttaaga

SEQ ID NO: 221098 - DNA, 402 bp, Homo sapiens
ctgaggcaacttttatatcataatgttttattatgatgatttgctctgaagtgttcttttgttaatagtgataatcatatttcttttgggacctttgaattttaataattatcaatttaataattaacaaactctttaactcaaagggatgagactttagttatggagacttgtgaagactatggtgggctgtcaggggtgagccttgtttccctgggggagatttgggacaggagatgggtgtgggaggtgtgggctgtgcagtcacactgtgaagcacagtgcccttgaacccatgaattctgcttttgttctgtgtctggatatcagaagtaactttgactaggaccgagacattcttcagtgtttgcctcacaatgctgaaatgtgctttttatcatc

SEQ ID NO: 221099 - DNA, 558 bp, Homo sapiens
caattcccagaatccctcaaatgcagatgcaggaggtggccagtttttacaaaggcagggctgtgtaggaggaaacataggtgttatcttagatgggagtgattatttgctaaatgcaattttgactgcttctaatttgctgctcagagattccgtccttgaaccaaacaccaaaatttttaagttgaaaagattgaaatagcatcaggtagtaatgcagatgttatagaggacaactcttgcatctttcaattccttggtagttttgccacccccatccctcatcctttactggttttagtgaattctgaaaggggactttgattctctgaatggcaccaagatagaaaatggctttggtaacatcttagagcagtgagtagttcttaaccagggatggacatcagaatcccccagggagtatctactaaacaccaggcctgctgaatcagagtctgggtgaaaggcaggcacatgtagttaggaaaagctctggatatgattcagctgtgccttcatgactaagagccactgctctgttctactgccattctgtga

SEQ ID NO: 221100 - DNA, 389 bp, Homo sapiens
caatttgttatcatcattattaatataattactagattttccatagtatgctattatggactgaatgcttgtgttatccccagtttcacatgtagaagccaaatccccagtgtaatggtgtttggaggtgggaactttgggaggtaattaggtcatgagggcagaaccctcatgaatgggatggtgctcttgtaagaggatacgtgagagagcttgcttactcttcctctctgctatcagccagaggagggcacaaggagaagatggccatctgcaaacccagaaatgaggcctcaccagacactggatccatgagcaccttgatcttggactctccagcctccagaactgtgagaaataaatgtttgttgtttaatccacctagtcta

SEQ ID NO: 221101 - DNA, 128 bp, Homo sapiens
cccctcagcagagacctcaacgaatctttattcctgagaactcagcagcctgctctcatttcccctacggacatgaaggccactgagacaggtcaggactcagccccaggcctcctggacctccttcc

SEQ ID NO: 221102 - DNA, 433 bp, Homo sapiens
atcatcaaacttgggggtcccatctgtggttgtctacatcatatactatctgttcttataacgaggggtttcactgaggaagactccttccaaggtccagtaaaacaacaaatgataaacaaccaaccaacaaaacaaaacccaaaagagctaattatgggccattctgaagtccatgagcaatattctatttccttcatgaatttctaagtgacaatgaacttccccaccatctaggaacatctaagaggggaaggaagaaaattgcagcatccgctccccttagaggcttttaatactcaacatcaatttctttggcctggtgacagagcccatcatccaggtagaaatgtggatctggaaagaacggcctccagtctgtgatttaattccacaagtttcaacactattgtccaagagtccgagattaaaa

SEQ ID NO: 221103 - DNA, 511 bp, Homo sapiens
tgcggaggctggtttcttccaatatgtgttgcaaaatgttgaggtcattctgtttttgcttttctgggagtgcttttatctgtttgcctaagaaggagtccctcaaatgtgctgctttgtctgatgcctgtttcccaccttaataaactttctctgccttgttgctgtagtctctgtggcaagaagagaccctttctgataggagtcttggtagggaacagaacttgcccgcccccaacccagtcccattgcacaacaccgtgatgcttcctgtgtaacatggtctaccccctctctagcagcactagcacgagggcatgccctgtgaacctgaggctcttagtgcctgggccacacaagcacacaggtcaggcttttcctgccaatcataagggaaggagtgaccaaaataacatgtggggaagttacaatggtttgggaaacctcaaaaaattctaatggcagtgattttacagtctatgctaaatattaatgaattactttcttttaa

SEQ ID NO: 221104 - DNA, 637 bp, Homo sapiens
tctaagcattgaacgcatcctccttttgttgcagtctgaaactttttccaaaaaataaaataagtgagaaatacttgactcaaaggaacataaaggagcggagggtttttatctgaaagggaaattgcaattcccaaatgtagagaccattgctttgaagttacttttatccaacttccctggtagagaactttttaacctcagcttcatttttgaaacattgatacgcttaccttccatgttgccaaaggacaaattaaaagacacagttaacaggcaagcagccatcttatctcctgtctgagccactctttcttccacttttgtcaccctttcaagtcactaccgagcaggctgagcagatgcacttatccaagatgagtagataagcaggtattctgggggctgacatggaaagggaactgtggggcatggtgatgatttgtggtttcctctattagggaaattctgggggagttcagttgactgactattgaaaattgcttaggaagcctgtgggaggcttttctttctctatttgtagaaataaatattactgcctaattaagtgtcagtcagtacattcaaacacttctgtttgatattggtgggctcctgtggaaatggtcccctttag

SEQ ID NO: 221105 - DNA, 408 bp, Homo sapiens
gctgtgtacaggggggcttgtggccttcaggtggcatgaggcaggccggtgggggaggggcacagggtaaagtccccaatccctgtcttaccctgtcagtggagaggaaaagaaaaccacctgtcccagtccctgtggacccccaaggagcaggccaaggacctccagcatcacagcctcgcatgagcccggctggggtggtcagtcctgtggcccgggccaggtcagcggtcaagctggcaggtccagactcgcaagaacgacccagagagcttgttcaggctgggtttctcagccccccactgcgtctgcttctgtgggtctcgctgggccccggaacctgcattgctgctgcgggggtctgggtctgagggcgcagctctccctgctgggtggggtgtgggaggc

SEQ ID NO: 221106 - DNA, 559 bp, Homo sapiens
gttttcacacatagcaagattttgttgttttcgaaggttgagtaatattcaattgtattatacaccacattttctttatccattcatctgtcaatggacaatcttttattgaacaatttattagtttttagtggtcaaagaacaagatcatgtcctttatatgatttatatgttttggttgttattttagaagcccttctccatttcagtagtataaatatatgtatttctgacctttttcttcttatactgttagtttttcagtataacattgaacttttaaaacaccttgactttttttctgagtatggtatgaattagggatatttgttacttttttcccatattaacagttattcacctaattatactttattcagttggtctagactttttcctacatatttgccatctttattataatttaaatcagcatatacacttggatttatttttggtctctctacatagggctatgtatctattgtttaattcttagagatttatgtggatatgtggtaggtatatgtcttcactcactgcgcttattttcaacatt

SEQ ID NO: 221107 - DNA, 141 bp, Homo sapiens
aagtttccttctgttccctcttactgttatatccttggtttctctggtgtggggtcttccttacagcagcaagctcataaacttaacttgaccgcaggtgtgttccttggtggtctttatctgatagactttgtcacatgg

SEQ ID NO: 221108 - DNA, 380 bp, Homo sapiens
ccaaagtgctaggattacaggcgtgagccaccgtgcctggccccaagctgaggattatgtacttaactaaattgaagcttttcagtggctatgggtgcacctgacttaggaactatatagtctagtagcagtgaggattggcttggggaacaccaaaagcaggaaaggcagttacaggcctgttatagcaatgttggccagcgatggtgagaatctcagtgaagctgtgggaatagaaagaaaaggattttgaagaattttctgaagtagagtcaagacctgctgtcacaatgaatatttttagatgaatagatgaatgaatgaatatctcagtaattttatatctctgtttatataagtagccagcattttcttttttt

SEQ ID NO: 221109 - DNA, 618 bp, Homo sapiens
ggcaccagggagggagcatctgttttttctccagtactaatagtacaggcaagtcaacatggctatgaagctataccatttattacatacacaaacaggatcagaatcaaaggagagaactcccagacccctgatatgtactctcttttgttgcatcattctttttgcatgatgcaaactcccttcacactttcccccgaccttcccctaaggtgcatctacctagagcaggtgtagccccacctttggtattttgtagtttgtttccatgtttatttctcaggcattgagagatagggtatgtgtaaatgcagctttgtctatgacctttaactcttctgtcagattctcacagtgttcttggctatcttcaaccacagttaaaagaatgaaaagctttctacaattttgtttctttctctctttgttctatctgtctgtccttgtcccagtacccctcctacaaggtctgtctctctccatccaagtcctggctaacctttagtttctcctgaatttattagcatacctccttgatgctttctttcaaccagtgtagtagattccttttctgatcatatttcccattcaggattctttgatctttacatatagctt

SEQ ID NO: 221110 - DNA, 306 bp, Homo sapiens
acaccaggaaaacaggagatcagcaaatgaccacagtggactggatagcaaaggcccttcctttcattatcaggcagcttataagcctctctgactctgttcagggcctccaaaatacccaccagaacgtatttctttagaaaattgtctgtagaaaacccctgtagaagtacaggagttcagtatctaatttaacccagacattttgaaaaaaaaaaatgtgtttcttgcatagttaagtttgtggaccaaaaagtatgttgcctggaaaaaatgtcaaagttcaaaagagaagagttccctctg

SEQ ID NO: 221111 - DNA, 442 bp, Homo sapiens
aaggcatctgctctttcagggaatttcctgttccccaacctagcctggggcagactggttctctctgctttggtagctaatacggttggatgtttgtcccttccaaatctcatgttgaaatgtaatctccagtgttggaggtggggtctggtgggaggtgttagggtcatgggggtggatccctcatgaatgtcttagtgcccacctcgcagtaatgagtctcattctattagttcacaagagagctggttgtttaaagagactggcaccttctcccttctctctcttgccctctgtcaccatgcgatgtgcctgctcccgcttcgccttctgccatgattgtaggctccctgagtcctcaccagaagtagatgctggcgccacacttcctgtacagccttcagaaccatgagccaaaataaactcttttctttataaatta

SEQ ID NO: 221112 - DNA, 349 bp, Homo sapiens
gctgtatccttctaccccttacctttcccagcctctggtaaatactattgtactctctatttcaatgagaacagcttttttagcttccacatatgagtgagaacattctgtacttgtctttctgtgcctggcttatttcacttgaggagcttctgactaaattccttatgctttgctttttgatcttctgttacctcaatttttttcttcttgaatttcattttcttctttgtctttgaccctatgtatagttacgatgccagattagatttatagcagcctcaagttgtattaaatgatattttgcttcctgtaatactattataaaataaagtttgtttattctcta

SEQ ID NO: 221113 - DNA, 1072 bp, Homo sapiens
gtgctttcctacttgttgtctcctgtaatgacgtatcatatcctgaatggcgggagggcaaggatcattagtctcattttacacatgctcattctgggactgggagagagatttcctgatttgcctaaactgccacagtttgtcaatgatggtggagggatgggggcaacactgaacctccagcttcctaagactttcccactttctcaagcttttgtcgaatgtgtcattagtggcattcactttggtcaactttggttccttgggtattgctggctccccatttttttggatttaaactcttcaaattaaataaatcagatttacatgttaaaaagaaaagtcttctctaaaagactccttcatttttgtaaatctttgtaataatttcaacagaccttaccttagaatttcaggcaataggtacatatcgtacacctctgttagttcttccagagactggcgcaggggttggagatgggagggaatagatgggggaaggaatgtggagcagggggcctggactccagtccaagctctgctgaaggagggccttttccaaagtggatcctcctgaaggcagaggctcttctagaacacataaatgtgcagcattggctagtaggagtcctgctggaacgaggctgaggcacatacaggatagtttataggagagtcaagtctcatgcattaaaattaaacaagcacttgggctttgttggaataaagatatgctagaaatgtcaccaaggatatataccaaatgccaaatgtagtcatatacaatgaaggagagcaatggtaggagaggtgtcggcaggctggagagaacaacaagtgctgtgggctaggaactgtgatttggaagtgtgcaacccaaactaaaaggagagaaaatggttacagccactggcagcatcccagagtcttacctactgcctccggtcctttgcaagtaggtagggtataaatataatgttatctgcccagcacaaaggagaggggagaaaagaaagcaagaggcagtcaaagggacagagcctagttctgagtcctgttttaccactcaatc

SEQ ID NO: 221114 - DNA, 544 bp, Homo sapiens
atctagagacagaaagtagggtcgtggctgctgggggctgggaggatgggggaatgggcagtgaaagctatgggtgtgagcttttcttgtgggtgatgacaatgttctgaaattatagtagtgacagctgcaccactctgtgaacatagtaaaaatcactgatttggccgggtgtggtgggctcacgcctgtaatcccaccactttgggaggccaaggcgggcggattgcttgaggtcaggaggcctgcacctgtagcccagccaattttttagatatttttatagagatagggtctccccatgttaccaagggtgatctcgaactccaggcttcagatgtcctcccagctcagcctcccaaagtgctgggattacgagcgtgagccatcagacctggcctccgagattctttttgaaaagcttctaaatctgaattctctgtgaatataatttgccaaaacgtatgagtaggaatctgatattacagtctgtcaagatgtctggccggtgtcgctatcactccatataatctttcccttcccc

SEQ ID NO: 221115 - DNA, 437 bp, Homo sapiens
ggttcttgcgatctcggtctcaagtatttgattctgtagcatggaaacagccatagatggtatgtaaacaagtgagcgtcgctgtgttccaataaagctttatttatagacattgaattttggatttcatttaatttacatgtgtcacaaaatattcttctttgagttttttttcaatcacttaaaagtataaagtcatactgagctcttaggcctttgcataatcaggtagtgggccagatttggcccacaggccctagtttgctggtccctgtcatagatgaatcttaaaaacattatgccgagtgaaagaagccagatacatggcctggagcctgtaatcccagtactttgggaggccgaggtgtgaggttcgcttgagcccaggaatttgaggccagcctaggcaacatagagagacccagtctctaccaaaa

SEQ ID NO: 221116 - DNA, 399 bp, Homo sapiens
attgttacaagtagattttaaatgttcttgccacaaaaataactatgtgaggtaatgcagatgttagatgaagaatagctcaattaagctacttcataatgtttatatatttcaaaacattatgttgtacatgataaatgtgcaaaattgtatttgtcaatttaaaataaaatgtttaaaaagaaatttatgaaggagggttgttaaacaaaaaaggtagattgataaaaagtaaaattctagttacagatttggtctaaaaaacttaaaattataaataagcaattagctagattaaacaacagtagaagaaaaaaagtcccataattagacaaacgtagcaataagtaaaaacaaagtaaccatagataatgaggaaattaggtatataagattaat

SEQ ID NO: 221117 - DNA, 504 bp, Homo sapiens
tacatttaaaatttggacggaatgctaagagtggataagatgcaccaaggagtgagtgcagatgagatgtctggggacagcctgaggacaccccgtacgttcaggagagacaggaggccaggcacactggctcacctgttaatctcagcaatttaggaggccaaggcaggaggatcgcttggggccaggagttcaagaccaacctgggcaacatggcaagaccccgtctttaccaaaaaccgcaaaaaacaaaaccacttccagtggccccagtcttatgtggaacaaaggtcagtcctcaccatgagccacgaggcctctagggatttggcccctcctgcccaggctagtttcaaactcctgagcgcaagcaattgcctcagcctcacaaagtgtggggattacaggcgtgagtcagggcactggcctcatggggttcttaatttccgggtttaggctgcttagataatatgtcgatcttggcttataaaaatcttgccatcc

SEQ ID NO: 221118 - DNA, 437 bp, Homo sapiens
atggctgtgcagtattctacggagtatatgtaccatattttctttatccagtccaccattggtggatatttaggttggtttcatgtctttgctattgtgaatgactattactttaagaagcactaggaataaacctgtatttttgctcttgggtttattcctcttcttccaatatggatataaaggacaattctatttaaatatttttcaattatactgaaccctgaagaattaaaagtgatgtttataaaaaatacttagctataaaatgcctaaccatttatgattaaaatttttctcattaaacagagcatggggtctatcttacttagaaaatcgtttttgctgttaatggaaaatttcttttgtaaaaagtcattttctagccaactttgttaataaaatacaataaattactcttttatatttaattgtta

SEQ ID NO: 221119 - DNA, 1995 bp, Homo sapiens
ggtacgatctcatctcactgcagccattgcctccagggctcaagtgatcctcccacctcagcctgttgagtagctgggaccacaggcacgtgccaccatgcccagctaatttttgtatttttgttagagatggggtttcaccatgttgcccaggctgttctctaactcctgggttcaagtgatctgcctgcctcggcttcccaaagtgttgggattacaggtgtgagccatcgcacctggctagacctcatgttctaatgacaggaagggtcaatacatgtatagatgtataagttagaaagtacagtagaaggtgataagtgttctctagaaaaataaaggaagaaaggaggtcgtacagtatcagggtggagacaggggttgcagttgtacatagggtgtttttgggaagtcctccctgtgaaggtgacatttgagcaacaacctgaagggaaagaacaagagaaccatacttcactcctgcaggaagagtgtgtaagactgagggaacggcacgtgcaaaggtcctgaggcaggagtgtgctgaagggtttggggcatcccaaggaggccagggtggctggagtggagggaatgagcaaggaaggaggaggcggaaagagggtcagggaggtgacagggcagattgtgcagggcttggtgggccactttgcctataactctgggtgagaattggtgccactggaaggttcctagcagaggagtggcgtgatccttctggcagctgcattgaggagagtttgcagggtgtcagggtggaagtgggagaccagttgggatgccatggccgtaaaccaggtgagaactggcagagcttggaccgtggtggtaggaatgggcagtgtgatacatggcttgataaactgcctagaccctcacataaatggtaaatgtatttttcatctcacttacgtctcctttaattacagaagtagaaaatggttactgtagaaaattggctagctagaacaaatcccaaaagaaaataacagcactctcctaagtggaccacccaatgttagagttatcgaagcaattatattttaatcactttcttttaatattacatttgaaagtactgtgttaaaatcgcttaaactggcagaagcggacttttaggtcatatgcacagtggggtgcagactctgcattttaagattcagtggagtgtttgaccgttctgctgtacactggaggggaaagagaagggtaagaagatgaagcctttactttgcttctcatagcttgcagagaaggatgggggcaggtgagcagagacagctattcccagattacagccaaatacatattttgaaaatgatgaatggaatttcagggaatggggccctgtaagttccctgaggtcaggtaccgtgtcttattctttactgttttcctaacgtgtgatttagtgcctggcacatagtaggtgcccagcaaaaatatttgttgagtacatatgtgaattaataagtaggtaatgcatggaatgaaacatgtctttttggaaagatcaagaaggactaccctgtcatgtgagaccatcactaagaaaccatttgctgaaaaaaaaataaaaaaataaaaaagaagggctccctgcataaaaaggaagtcatttaattatttaaagcttcatctcaaatgctgttgcacacgtgcgtgcacacattcattcattcaggagtcagttattgagtgcctgctgtgtaccaggtgactaagacagaaaaaatccctgtctccatgaggtaacatgctagtgggagggagacaactaagaaatcgaacgaggacatttcagatactggtaagtttgatgaagatactaaaatgggttagcagtggtgaccttggggatacacagatcagggctggaactcagtaactgcagagaaagcaccggtgtgctgctcacaggcgagtggggcacagacacagacacagacacatggagcatgggaccacgtgtga

SEQ ID NO: 221120 - DNA, 1942 bp, Homo sapiens
ggtacgatctcatctcactgcagccattgcctccagggctcaagtgatcctcccacctcagcctgttgagtagctgggaccacaggcacgtgccaccatgcccagctaatttttgtatttttgttagagatggggtttcaccatgttgcccaggctgttctctaactcctgggttcaagtgatctgcctgcctcggcttcccaaagtgttgggattacaggtgtgagccatcgcacctggctagacctcatgttctaatgacaggaagggtcaatacatgtatagatgtataagttagaaagtacagtagaaggtgataagtgttctctagaaaaataaaggaagaaaggaggtcgtacagtatcagggtggagacaggggttgcagttgtacatagggtgtttttgggaagtcctccctgtgaaggtgacatttgagcaacaacctgaagggaaagaacaagagaaccatacttcactcctgcaggaagagtgtgtaagactgagggaacggcacgtgcaaaggtcctgaggcaggagtgtgctgaagggtttggggcatcccaaggaggccagggtggctggagtggagggaatgagcaaggaaggaggaggcggaaagagggtcagggaggtgacagggcagattgtgcagggcttggtgggccactttgcctataactctgggtgagaattggtgccactggaaggttcctagcagaggagtggcgtgatccttctggcagctgcattgaggagagtttgcagggtgtcagggtggaagtgggagaccagttgggatgccatggccgtaaaccaggtgagaactggcagagcttggaccgtggtggtaggaatgggcagtgtgatacatggcttgataaactgcctagaccctcacataaatggtaaatgtatttttcatctcacttacgtctcctttaattacagaagtagaaaatggttactgtagaaaattggctagctagaacaaatcccaaaagaaaataacagcactctcctaagtggaccacccaatgttagagttatcgaagcaattatattttaatcactttcttttaatattacatttgaaagtactgtgttgcagactctgcattttaagattcagtggagtgtttgaccgttctgctgtacactggaggggaaagagaagggtaagaagatgaagcctttactttgcttctcatagcttgcagagaaggatgggggcaggtgagcagagacagctattcccagattacagccaaatacatattttgaaaatgatgaatggaatttcagggaatggggccctgtaagttccctgaggtcaggtaccgtgtcttattctttactgttttcctaacgtgtgatttagtgcctggcacatagtaggtgcccagcaaaaatatttgttgagtacatatgtgaattaataagtaggtaatgcatggaatgaaacatgtctttttggaaagatcaagaaggactaccctgtcatgtgagaccatcactaagaaaccatttgctgaaaaaaaaataaaaaaataaaaaagaagggctccctgcataaaaaggaagtcatttaattatttaaagcttcatctcaaatgctgttgcacacgtgcgtgcacacattcattcattcaggagtcagttattgagtgcctgctgtgtaccaggtgactaagacagaaaaaatccctgtctccatgaggtaacatgctagtgggagggagacaactaagaaatcgaacgaggacatttcagatactggtaagtttgatgaagatactaaaatgggttagcagtggtgaccttggggatacacagatcagggctggaactcagtaactgcagagaaagcaccggtgtgctgctcacaggcgagtggggcacagacacagacacagacacatggagcatgggaccacgtgtga

SEQ ID NO: 221121 - DNA, 605 bp, Homo sapiens
ctcataagagtggtggtttcttaaatacatgcattaaagttcatttgtcgctagacaaagcccatttttgtcattaaatccctagatttaggaagaaggtgctttttacaaaataagaaaaggaatcctggaaaggctacagtcaatataaagccatttaatagcatagaccacctggatcctaatcgcatttatgggattatatggcttcatgtaacattttattttactagccacagtgttaaagttaccatgtggatggggaggaaggaggtggcagtgaaaagaaatatcttagaaaatgattcttaaggggaataaagcaactcttaaagagaggaaatatttcatagcctaatcccaattttaaaggtaatgctggctggatgtggtggctcacacctataatcccagcacttttgggaggccagtgatggaggatatcttgagcccaggagtttaagaccccagctctggcaacatagtgagtctccgtctctacaaaaactaaaaaaataaaaataataataataataataactttaaaagttattctaagttatttagcaattatttaatggcctttcttgcttagcctggcatgg

SEQ ID NO: 221122 - DNA, 262 bp, Homo sapiens
actaggtggcatctttgtaaaaataaaagcacatcaaaagaaatgtttattacataaataaatgctgagatgaataaaggtagatgtttcatgagaaatacgaagtcgtttggtggaataaatcctgagaaaatgcatagatttatcatgaaaaggaaaatggaaaatggtattgtaaaattactctttcacttttggaattgagaagctttttcctattggttgttttcattaagtttgaatataaatttattatgtaacc

SEQ ID NO: 221123 - DNA, 1407 bp, Homo sapiens
gaactaaaaaaggttaagaagttagcatattctctcaaaggcctttctacatcttttatagtcaagtctccttttcttaggagttaatttctggtcagaaaatgataggtttgtttcattctttaatgggaggcctgtatacagaagccagaacgtgaaggtttagctgtatggttgactcttcctcatggtttctctttcctcatagagaatcctgtattaggtaatgtagggtaaaatgaaaagtgaaatttcgttctaaaggggcctcgcagcatcaggggcgacagactagagaggtgtgtctcccagcatgagctctgtggataagcaatggtcacgcctcctgagcttcttgtatttagcttttgacagctctgctcccctgtgattatttctgttttttgttttgattgtctctcacatcaagctcaccaagcaataattgttcaaacaggatgacaatccccatgcatgtgatatgcttgctttctagattgagtcactcactgtcatgactgcccatcctcattgcctgtgcttcccacttcaccactctctcacattggctgttcatggaaggctgttttctgtgctctcatgcttctcccctcgcgtttcctgtactgtagggagcttactcttcccttcacactgtatgtgcaatagcaatccccttgtggctccagcagacaccaagaaatgagctgacactcacactgcagtagttccgtgtcttgccatagcggtaagaagcatgtgaccttcctcactgcagcttcacctcagaattagctgttactgcagcacagacctgcttgtgtgtgccattccccaggtggtaggatataagcttgacttgagaccagcgatggtcagtaacaggctttgaagtggcaggattgcgttaggtgtgctgctgtgatctggtgctgctttgaccttgaaagcaggataacgcatgcacttacttacccccgcattacttgggtaccttaaggactagtggttcacaacttactttaggagcttttatttattctgtaacacgtgagatctggtaagacagtggggggtaaggaaaacagacaagaccatgactcttctttccctcttccccaaaacgtgcctcttggaataatcttcagtgtgccctccagcagagccgaaatcaggcaggcatagactccctcctctctcatcaaaccgcagaaatagagttccttcatcataaccgcaaagcttcctcctcccctttgcaccctgcctcagctgcattttcttgtcgcttctacatgggagtgcttgctgttctgggaagagtggggagaagcggtgggaatccttgagccaattgaaactgaggtcatcttcaggaaaaccatgtcttcctgaagttgaaagatt

SEQ ID NO: 221124 - DNA, 285 bp, Homo sapiens
cttcttagcagctaaagagggcagcctctgcgtactgcctgggaacatggcaaaaccattttaggcttaaaaaaaaggtggagaacaagttgtacattatgatcttttaaataaataggccagcgatatatttgtaacagaagcagctctggaagcgtacactgtcagccacagaaactctggggctggggggtggtaaaggaggagaaatgtgtcacccaggcaggagcttagtggcaccatcttggctcccaagttcaagcagttctcctgcctcagcctccg

SEQ ID NO: 221125 - DNA, 771 bp, Homo sapiens
aatagcctgaataaagatgtgcaatttaaacaagttcagattgcctacagttcaggatttttaaaacacgtagattattttgggagctttatctttataaaccttgtaataacaaaaccacgtgagtaccagaatcatttctcttacttagtttcttgcaagggaagcattattgactcttctttttgcagcaaaccaacatttaaaacacattgaatgataaataagaaataatcttgtttggttaatgtacctgaaaagccaattgtgtagaggtaaagaggaaactgttgtaattttgtttaagattggagaagaagagaaaggttaaattgttccttgaaaacataacgcagaaccaaaaacccccacatgtactctctgacatcttcttcacacaagacatattttatattaatgaaattcagataattaaaaatccaagtgtaggcatagaaaaatctttactttttcttagatactggcagagttgttttaactcagtgagaagcatcacatggaacaatagaatttattagctgtttgttaaattgttttagctgctactaaaatatatgctttcacttatcagaacttactttcaagttccattacatccttcacatgcagtatatgaactttacagcagcacacactgtctctcccttctctgcctttttgctgttgttgtcatacattcagtatctcaatattttataaacaccactacacatatttattttatctaccatttgatggccatttgggttc

SEQ ID NO: 221126 - DNA, 482 bp, Homo sapiens
acaatagaggcttgggtcaacctatgacggttttcctgacatcataatgccatgttgaagaagcatgtctgcgaatgaaggcaggcagaagcaaataggactaaaatatagaaaaaagaaaacacgttcataaacttgatagtacccttggatttaactctgctttaatcaaattgcaccacatagatgtttccaataacaaaagctaataaacaatgttttttcgtttttgcccatctagattgagtcatgtttctgtaatatgtaaccaataatttctaaatatttaagctctttttaaattttcttgcatgtgatttcttattttgatatgcaagattatgtcaccattgtggatattaatttattaactcttctaattgtaagaattactttctcggtatcatattttcagttttaagatttctactatttgaaaactgtaaagatttatgttcaataaataatattttctttcattg

SEQ ID NO: 221127 - DNA, 533 bp, Homo sapiens
cagaagagaactatagcttcccctaaaaaacatggtaaccacctaaatccaaatgcctccacataacctccataaaactttaaaaataatgaagagatgaggctacatgggtattgctaaaagaaaaaaaattaactgaaaaaaccctcataatccatgtctatggcataactaagaggcacagaatagtacaaacttcaaatggattgtcaactaaaggaaaaaaatcaggcttttaaaaaagaaaatttagttttattcagtcttactgaagactgtaacccaggagaatctttcagagagattcccaagcagtatttcagcccctgtatcagggggtggcagttctgcatctgctcataagttacattaaacatgctcacaagttacgttagagcaaagtgccatcaaagtttgggtgtgagagtacatcttgttactgattacagaggcatagtcactaatccctcagaatttatcttatatacaggaagagccaagggctaggctaggatcactgacctcatcttaaa

SEQ ID NO: 221128 - DNA, 561 bp, Homo sapiens
ggttagacaaaaatttattaggtgcgacaccatagaatgatcaataaagaaaaataataaattggacttcatcaaaattaatttttctgctatttgaaagacattttaaaaatattgtaaagacaagctatagacgtggagaaaatatttacattgtacaagtgtaataaatattttaatctcaataagaagtaataaaaaaaccaaataaataatggacacaagctttgaacaggtattttatcaatgaagatatggagatggcaaataaacacaagaaacaatgataaatattatttctcattaaagaaatgcaattaaagtcacaatgatatatcaccacacatctattacactgtcttagctttaaaaagttgattatactttaagttctggaatacataataaccctagggattaagtactatttagttaaactttaaatctcagagaaatggggaactacaatttaatcaccaaacttcatacaaatattaaacagagcagggcttgaactccaggtctgtctcactccacaatcctttcccaatctgcaacatt

SEQ ID NO: 221129 - DNA, 555 bp, Homo sapiens
tttttcactttctgactgtgacgaatgatgctgctatgaacattcagagtttttgtgtggacatgttttcaattctcctgggcatacgcctaggactggaactgctgggttacatacatggtaactttatgtttaatactttaaggagatgtcagactgttttccaaagtggctgtaccattcaacaatttttctacattcttgtcaacacctatttttgttatctttcttattgtagctaccacagtaggtgtgacatgggtgctcatcctgagtttcttttttttaatggaaaaatctattttaaaatctattgttactttctagaaaaggaagattgtgtgaagatgtaaggctcgccatgctgggatgtttctatccttctattttttaaaaactgtgttaagtatcttctatataataaacactgtaccaaccaagccttaaaagcagaagtagtaaaatagcttgtcctcaaagaactcacagcttacatgtgagatgtgaaaatgttaggtcgacgcggccgcgaatttagtagtagtaggcggccgc

SEQ ID NO: 221130 - DNA, 478 bp, Homo sapiens
agttaaataggaaatttgaaaaactaccaggtacagtggctgatgcctgtaatcctggtgctttggcaagtcaaagtagaagactcacttgaggccaggagttcaagatcagcgtgggcaagagatgagacccttatctctacaagaaatgtaaaaattagccagccgtagcgtcatgtacttgtagtcctggctactcaggagcataggacaggaagattgcttaaggccaggagttcaaggatgcagtgagcaatgattgcagcactgtactccagcctgggtgacaaggtaagtccatgtcacaaagaaaagaaaatttgaaaaacaatatatatttatatatatactttaggtatttaatattatcaatgttttatatgtttatattatatacactatatactttatatgtatgtagatctctctctctgtgtgtgtataaatataaatttcttcccttctccaatattagcaa

SEQ ID NO: 221131 - DNA, 437 bp, Homo sapiens
ctggaagaagacatccaagaagctaatacaagtggttacttattaggggacagacagtgaggacaacgggagcaggaggatgagctattcactgtctttttggattgctttgatttttggaccgcgtgaaggttcacgtattgaaaataaaaaggccggacgtggtggctcacgcctgcaatcccagcacattgggaggcgaaggtgggcagatcacctaaggtcaggagttcgagaccagcctgaccaatatggagaaaccccgtctctactaaaaatacaaaaattagctgggcatggtggcacatacctgtaatcccagctactcaggaggctgaggcaggagaattgcttgaacccaggaggtggaagttgtggtgagccgagatcacgccactgcactccagcctaggcaacaagagcgaaactccgcctca

SEQ ID NO: 221132 - DNA, 338 bp, Homo sapiens
acagcttctcaaaatcaaatatttgatggtgaatttgattgtaaacacttaaaagtaattagatgaaatatggttgcatacttaaacaagagtaagttcttagaatatgcaatctaattaaacattaacagtcaagcaaaatctttgtatacgattttgagaaattgttcaatatatttttataaatcttttatattgattaaagctagtagttataatttgaacatattatttatttttagtttccaattgctttgtaatagtggaaagcaaaataaatgagtaaataaaaataaaaataaaaatatcgctcatatcagtcctgacaacttaaacta

SEQ ID NO: 221133 - DNA, 101 bp, Homo sapiens
agggtcccatcctcaaagcagtcacttccagagccccatggagcctcatatcccatgatatccacccttattctgtctcaggcccaccagctgcctccctg

SEQ ID NO: 221134 - DNA, 460 bp, Homo sapiens
cacaagagatttagacacctacatacagcagactcaacgatctccaagcaaataatcagactatctaaagtcaaagataaagactgaattctaaaagcatcaaaagaaaagcagctagtcacctataaaggaaaccccatcagattaaaaatcaagaagacaaacaatagaaacaaaccccacggaagatccaattactggagtttaaacattgtcttaaaaaatctataattatgttcaagaaattaaaagagaactaaagactatataaaagaatgaaagaaaattctagaactgaaataacaaaaactgaaattacgaagtcaatggatgtatttaacaattaggcagcagggtggctcacgcctgtaatcccagcactttgggaagctgagaatacaggcgtgagccatcgcgcccagacctcaaaatattgattttaaagctcagtgagatacaa

SEQ ID NO: 221135 - DNA, 435 bp, Homo sapiens
cccaaagcccctgtttctcttcctgtttatagcccctctccaactcctagacataatcaatatcctaattcttatggtatttacttccttacatttttcctaaagttgtttttttaaacaacctatgtattcatttacttccaaacattggtcttgctaggttttgcattctttcatatccagcttcttctgctaaatgaacttgttactcattgtggtttgtattttcattgcttcacagtatccagctatttataccacagtctatcctctcgacggatgacaggcatttgggtcatttcttttcatttatttattttgagacagagtctcactctgtcgccaggctgtagtatagtggcgtgatcttggctcactacaacctccgactccctggttcaactgattctcctgcctcagcctcccgagtagctg

SEQ ID NO: 221136 - DNA, 427 bp, Homo sapiens
tctattctgtgaaatgtctgtgtattatctcttcaaggcccttgcatctctccaagtgtgactttttttaaaaaacggtgtgtatcatataggctatataattttgatactgagaactatacagagaacaatactattaaatgatagacaatctccaagaagagactctgcatttaagcagttgaaaaattgtgcaacccttagaagaggatcttagatggccgggcgcggtggctcacgcctgtaatcccagcactttgggaggccgaagcgggtggatcatgaggtcaggagatcgagaccatcctggctaacaaggtgaaaccccgtctctactaaaaatacaaaaaaaattagccgggcgcagtggcgggcgcctgtagtcccagctactcgggaggctgaggcaggagaatggcgtgaaccc

SEQ ID NO: 221137 - DNA, 435 bp, Homo sapiens
tcttacactattatgttagtcacattgaatgcaagataaagcattttattctaaagatgaggtccagattctaatcaggagatgagtcaagctcagaaaaggaaatctgatttagagttctctcagtcttcctggcttatgtcttagttcattttcagtctgcttttgtgcttgtttgatgtagtctctgtacaaggtatagtcaccatgtagttgcatgttcactacatgaaggggattgtgctagattcttaatagattattacttgatatcctgtagtaatttgtaactgttacaaagatcagaaaatgtagtgccatcaggaggctgaggcaggagaatcgcttgaacccgggaggcggaggttgcagtgagctgagattgcaccactgcacaccagcctggttgacagagggagaccccgtctcaaaaaa

SEQ ID NO: 221138 - DNA, 1046 bp, Homo sapiens
tttcaaactgacaaaagcttcttctggattgaacacaaactgcatgtaaatgtcgttaagtggttcatattttaaaagcgtgagtgtaggccaagaaagaaatctccagctactgtttgcctgcttccatcagaatgatatgtttggcgcacagtgtgttttgtatatcagtcctgttgtttatgggaaataccattcctcacccatccacgttcccctgttactaggtcccagctactgccttacagagaaggtgatgtttcatatttgcttgcttgtttgtttgtattataaggaattattcttagcgatgttaaaaatgattctttcccatgcaaggaacttttagacacccaagtttacactctgcatttgcgataaaaggaagtaggaaagtggagcaggagcaaaatgcagaagacaccaaaagaacctttgcagagagagtgtcctgccagggcatcgacggccgctcccggggcaggagctgagttaagtagagccccagcactactttcctttcctgatgtggctcaagggatcattgcaaaaatggactgtcccctattggaacataaaaaggccaaatcagagtccatttgacctatatcctttaaaactgcacaactgatggcgggtggtggggtgggggttgttagaaagcagttctaagagccaaaccgaatggcatggcatgaatctcaaatttatttcactatgattacaaaagcaatagctacttggatgtaaaagaaaaactgggctgggcgcagtggctcacgcctataatcccaacactttgggaggccaaggtgggtgaatccacctgaggtcaggagttcgagaccagcctggccaacatggtgaaaccccgtctctactaaaaatacaaaaaattagccgggcctggtggcaggtgcctgtagtcccagccactcgggaggctgaggcaggagaattgcttgaacccgggaggcagaggttgcaatgagccaagatcatgccattgcactcctgcctaggcgacagagcaagaatccgtctca

SEQ ID NO: 221139 - DNA, 506 bp, Homo sapiens
aggcgtgagccactgcacccggcctacttactgctctttagatacattgcttgtcatttctgaggtcagtttcttcagccaaaaacatagggtttaataccttaaagatattgtttggattgagaaatgtgacaagttgccagaatgagacaggtacttaataaaggatagtatcctttcttaaggtctttattagtgggaaaaactgggaaacaacctatgtctgatttttgcctgttgctaagcagtgaatcgcaaatgtttagctctcccctgttttagtgaaaggttgggtgatggcagcggtgactcttttttgtctttttttgccagaagtaacctggagtggcctaagatagaaggtgtggagaaacaaaatctagccaaacatatacatgcatacatacataggtaaatatctcagcaggatgatgaattcgcgcagcaggatgatgaattcgcgcagcagcatgatgaattcgcgcagcaggatgatgaaaacgcgc

SEQ ID NO: 221140 - DNA, 796 bp, Homo sapiens
aggcgtgagccactgcacccggcctacttactgctctttagatacattgcttgtcatttctgaggtcagtttcttcagccaaaaacatagggtttaataccttaaagatattgtttggattgagaaatgtgacaagttgccagaatgagacaggtacttaataaaggatagtatcctttcttaaggtctttattagtgggaaaaactgggaaacaacctatgtctgatttttgcctgttgctaagcagtgaatcgcaaatgtttagctctcccctgttttagtgaaaggttgggtgatggcagcggtgactcttttttgtctttttttgccagaagtaacctggagtggcctaagatagaaggtgtggagaaacaaaatctagccaaacatatacatgcatacatacataggtaaatatctcagttggtgaaggtgaatatagaaaatcgggatcacaggaaaaattaccatcaaccctaatgaggttactggcagtcaaaattaaaaaaaaaggaacttatactaccttcatctgatattaattctgaggaaataaaatgtttcttaggaatgaattcctttgtgtatgaaggggaccactgagtggtagtactggcatttttcagccaatgtgacaaatttcacagtgctgtcttagagatgcctaaaaaatgtattaaggaacgtggctgggtatggtgcacttttggagactgaggtgggaggatctgaggccaggagtttgagaccaacctgggcaacatagtgagaccttgtctccacagaaaattaaaa

SEQ ID NO: 221141 - DNA, 530 bp, Homo sapiens
actgacagaacatgaatatgcctgctctagccactgcaccttctataaagtctcacacaactttccctgttcatccccaactccatccagaggacacatattctcacccatcactcatcattcaaacgagtccctgaccagctgagtggcagccttttgcacacagccaccccatcacgcgcacctccaacctttcacccactgtgtgtcaaccttctctgtgtgaccagccactgagtcacgaaccacactatcctctggcagcagaaatgctcatacattagttttcaaagtcccgcgaaagccaccggtattctgtacctataatctcccaagaggcctttccacagctcacacagatcccaagaatggtggggtaagtccttcctgttaccgatgatggctctgaatttccaacacgccataggtctccatgcccctttatgcttcctgggtctcaatcacttcaaaacccctcaaacagtacctatccaaagcaaatcgcttggcaggcccccaaacagaacctg

SEQ ID NO: 221142 - DNA, 379 bp, Homo sapiens
gaagtgtttcttttttttgcttgtgataaaaatcatttaaaagtatattaagtgttgcataatattacatcatatagatatgtcatcagtcattcatgcctgactataattatttattcatgcttcaaagccaagactacactcaaagacagcttattaatgctttcattacaaatcaagaaagaaagtaaccaagcctggaaatgagttagaaagacaccaataaaatgaacttgagaagagtaggaagaaggattcaataaagataaaaccaaatagcaatgaattgagaaatggaaaaatgataaataaatgtatttgatgaataaatggagttgataacactgttatttgaaactgcaataaattttgatcttca

SEQ ID NO: 221143 - DNA, 557 bp, Homo sapiens
ccatgttttatgacaggtaatctctactactgatagttctctagtcttggtttggttcatcaagataaagaagaaattaaacaccgacaacaggtttagcaagtgtggtaaaagttgctgtggatgtaaaaatatccaaatgatcattaaagaacaatgaaaagaatcatgctggcttccaagaaattgcacagaagataattctcttgcaaggtgaaggttagtctcttaaaaaaaaaacccattcatcttggaaaaaatttgaggaaaacggtgtaaagagacaacttcctgaaaattgcaaccatgttgtcagcagtgtcaggatcacgtggctccctgaccttgccctgctttctccagtcaggtgagcctactgtcctgacctgcagttaattcagtaactgttagctcactggccctgccttttaagtaccaaaggaatgagttggcttcctgagaagggcaaatgacctatcaaaggtcttgcctgagtgagaaaaggtatagcccattctcttgtgcaaagattccaataaaactctaatttgcagtca

SEQ ID NO: 221144 - DNA, 470 bp, Homo sapiens
ttatgtagttattcatttgagacaggttctccctctctcacccaggccagagtgcagtgtggtgatctcgactcgcactgcaacctccgcctcccaggctcaagctattctcccacctcagcccctggagtggctgggacttcacaggtgcatgccaccacacccagctaatttatttttatttatttatttttgtagagatggaatttctccatgatgcctaggctgatcttgaatttatgggctgaagccatccgcccacctcggcctcccacagtgctgggattacaggtgtgggccaccacacctggctcaaattttagtatatgtgctgccaaagcgagcatgcctgtctcaaatttttaagtataattttgggccagtcgtagtgattcctgcctgtaatctcagcatggtgggaggattgcatgagcccaggagttggagaccagcctgggcaacctgtctac

SEQ ID NO: 221145 - DNA, 564 bp, Homo sapiens
gcggacccctcaggatactcaagtgaataagatgtgatagactttacacaggtaaagaactgctgctacattttaacttctttaaaacaaaatcagcaaaatataatataaagcttcctattaacgattaaagtgaaaaaatgtctaaatgtaatgaggaaagaaagtgtccggccgaataaaccaacctgataaaactacaaagatattctctatgaaaggaatagttttggaaaaaagttttaactgcctaaaaagttttgtttccgtttttgttttctttttcatagacatacgatcttcccatatttgcctaggctggtctcaaactcctgacctcatgatccgcccacctgagctcccaaagtgctgggattacaggcatgagccaccaccccagcctactgttacttttttacaataattttaccttatatgtatatccgtaagcaacatatggtttaatagtgcccattttcagtcttattctcaatgtaagaattgtatgattcttctgatgcttgattctttcactcttacatgcttgagatttatccatgttga

SEQ ID NO: 221146 - DNA, 428 bp, Homo sapiens
tgagacagagtcttgctccattgcccaggctggagtgcaatggtgcaatctcagctcactgcaacctccacctcccaggagaatccaggaggcagaggttgcagtgagccaagatcatgccactgcactctagcctgggtgacaaaagtgaaactcagtctcaaaaaaaaaaaaaagaaaagattttatattttgtagtctccctagttttgcttccaagaaggcaattaaaattcagttctttctgtattttcattacttctgaatctgagtcaactgtcagatggatgcttttgccttaatttgactttttattacttccaaatcatagccttagagacaagcactttctggatttcagtctggtccaatagacagtttaatggaataaaaaaaatgagagactaaattacttattaaattaagtg

SEQ ID NO: 221147 - DNA, 595 bp, Homo sapiens
tcactggagtggcacttttaaaatttctttcaaaagttattcctatgcgttcataatttggctgtttggcacaataggcctagcttttggcccatttcagcttttgacatgccctcctcactaagcttaatcatttctagcctttgatttaaagtgagagacatgtaactcttcctttcatatgaactttttgcagacattgtagggttactaattggcctaatttcaatgctatgtgtctcagaaaatagggccatctgaggagaggggaaaaacgaagggagtgtttggttagtggagcagccagaatacacacaatgtggatccattaagtttgccatcttacgtgggtgaggttcattgcacctcaaaacaattacagtggtaatgcccaaggtgactgatcacagatcactataattataattaagaactttgaaatattgtgagagttattaaaatgtgacaggacatgaaacaagcatatgctatcagaaaaaaatggtgctaatagatttgctcaactcagagttgccacaacccctgatttgtaaaaaatggagtatttgagaagcaaaataaagcaatgtgcaat

SEQ ID NO: 221148 - DNA, 521 bp, Homo sapiens
ttatacaagtaatacacaatctttgtagaaaaatcagaaagtacagataagaaacacaaaataaaaatctactatggaccaaccaatcataaataaccactgttaacattgaaaggagatgtatattaaaagaatagtatactatgactacatcagattcttgtagaaatgcagagatgtcttaacattagcaaatctattaaaacgattcatctaaagtcataatagagaaaagccagttgatcatcttgacagatgtggaaaaaagccatttaataaaaccccaacatccattactaataatattttcatcaaactagaaatagagggcataacctgaatgtataattcaaatattaagattattttacactaagagtcaaatttatagttttggagaaacactcttctaagtaaaaaaaatttgatatatatatatcaaataatgtacaatatcagcacaattatgtaaatgttttttaacattgttctaaaagtaccagtcaatgtgatgagttgag

SEQ ID NO: 221149 - DNA, 416 bp, Homo sapiens
ccaaaggaagcttgtgaaattctatgttggcctcttccattggcctctatgcatggtgccccggagcccagacacccgcagagagggcctggtaatgccctagaccccaaacctggagtctgagaactggttggcatactcccactcttacccatattttataagacttggatattaacaacttgtattagctacagacctggttcatccagtgacaggacaaatcaaagcccatcttaggggtactggggttggcctcagtgttcccacctacttctgtcgagaaccaaactcctccttcccacctctagcagtgtggggtcaccactactccatgaaggagcttacagtctccttccctttttccaagagcaggacagtttgcttaaagtcatgaaagcaagaacaaaaaaata

SEQ ID NO: 221150 - DNA, 449 bp, Homo sapiens
aggatcacttgagccaagttcaaggctgcagtgagctgtgactgtaccactgcactctagcctgggtaacagagagacaccccatctctaaaaataaaaatacaagaacctcatcttgagggccttgacctgttcccatctctcttcatttcctctctggcctgtctcctaactttccctctcatttcctctgctccagctaaacaagcctcctcatttgtctcccaacatgcacatgcctaacatacttgcaccccagggcctttgcgctggctactccctatgcttggaacgttctcttagatacctgcactccagcctgggtgacagagagagactccatttccaaaaaaaaaaccaataataagatatacgataatgccagtattcctagcagcaggttgattgagtgtctcagccccgaaagcaggactctgggtcaccacaac

SEQ ID NO: 221151 - DNA, 1810 bp, Homo sapiens
cagttatattaacagtggcccctcatttttctgtgagccccactttgctgctgctgagttcgccagcgggtcacctggaagcacgtggcgacacgggccacatgacgtcatcccagcaggcttgcgtcatcgccccgggtgcctggtgacgtcaccagcccgctcgcgtcacgcgcacgttctgctcctcgtggtcctgcccggcccgcgccaccaccggccctgctctgcggggccacccgtgcgccccttcgccgtccgctgactccgccctcccgcctgccgacccggccgccgaccttcccccggctctgtcgctcccaaggctttctgcagccctccgtgctccaggccgcacacctgagggtgggacccccggaggccgagccggtgtcggatcaaactcggagaccgagcagggcccaaaccgggaccggagtggggacgggcggaggaagccaagaggctcgagaccgaggctcgcccacccctcggcgccgccggaccctgcgccactgggggaatttccttcccgacttcccgcgcggccacagccccagctccgtccagcccccgctcccggccccctgggcgggagagtgagccccgagactccgcccagccccgggggtcccgggccccgttcgcccccagcggcccctcccggcgcgttgctcggccccggctgcatcggggagcgcgggatcacccggccctgtccccagcggtgtcggaggggggcgcgggcgggggccccgcatgccattgtcgcccgcggaggccgcgcccggagccgaggcgtgactgacagcgagcgggggaggagcgcggccgtcgattggctggggcgagtgtgggaaagaatgcggagccggggttcacacaccccgcggcggcgaggccttaaatagggaaaaggcctgaggcgcgcgcgggcctggagccgggacccgccctaggggctcggatcgccgcgcgctcgccgctcgcccgccagcccgcccgtggtccgtggcggcgcgctccacccggcacggggaggcgcggggcgcaccatggccgcagacacgccggggaaaccgagcgcctcgccgatggcaggagcgccggccagcgccagccggaccccagacaagccccggagcgcggccgagcaccgcaagtcctccaagccggtcatggagaagcggcgccgagcgcgtattaacgagagcctcgctcagctcaaaaccctcatcctggacgccctcagaaaagagagctcccgccactcgaagctggagaaggcggacatcctggagatgaccgtgagacacctgcggagcctgcgtcgcgtgcaggtgacggccgcgctcagcgccgaccccgccgttctgggcaagtaccgcgccggcttccacgagtgtctggcggaggtgaaccgcttcctggccggctgcgagggcgtcccggccgacgtgcgctcccgcctgctgggccacctggcagcctgcctgcgccagctgggaccctcccgccgcccggcctcgctgtccccggctgcccccgcagaggccccagcgcccgaggtctacgcgggccgcccgctgctgccatcgctcggcggccccttccctctgctcgcgccgccgctgctgccgggtctgacccgggcgctgcccgccgcccccagggcggggccgcagggcccgggtgggccctggaggccgtggctgcgctgaggctgtggccctgagactgcatcggaggcggcgccccgttctagggccgtggcctttgccgagactgtagcagagaaaacgtatttatt

SEQ ID NO: 221152 - DNA, 1888 bp, Homo sapiens
cagttatattaacagtggcccctcatttttctgtgagccccactttgctgctgctgagttcgccagcgggtcacctggaagcacgtggcgacacgggccacatgacgtcatcccagcaggcttgcgtcatcgccccgggtgcctggtgacgtcaccagcccgctcgcgtcacgcgcacgttctgctcctcgtggtcctgcccggcccgcgccaccaccggccctgctctgcggggccacccgtgcgccccttcgccgtccgctgactccgccctcccgcctgccgacccggccgccgaccttcccccggctctgtcgctcccaaggctttctgcagccctccgtgctccaggccgcacacctgagggtgggacccccggaggccgagccggtgtcggatcaaactcggagaccgagcagggcccaaaccgggaccggagtggggacgggcggaggaagccaagaggctcgagaccgaggctcgcccacccctcggcgccgccggaccctgcgccactgggggaatttccttcccgacttcccgcgcggccacagccccagctccgtccagcccccgctcccggccccctgggcgggagagtgagccccgagactccgcccagccccgggggtcccgggccccgttcgcccccagcggcccctcccggcgcgttgctcggccccggctgcatcggggagcgcgggatcacccggccctgtccccagcggtgtcggaggggggcgcgggcgggggccccgcatgccattgtcgcccgcggaggccgcgcccggagccgaggcgtgactgacagcgagcgggggaggagcgcggccgtcgattggctggggcgagtgtgggaaagaatgcggagccggggttcacacaccccgcggcggcgaggccttaaatagggaaaaggcctgaggcgcgcgcgggcctggagccgggacccgccctaggggctcggatcgccgcgcgctcgccgctcgcccgccagcccgcccgtggtccgtggcggcgcgctccacccggcacggggaggcgcggggcgcaccatggccgcagacacgccggggaaaccgagcgcctcgccgatggcaggagcgccggccagcgccagccggaccccagacaagccccggagcgcggccgagcaccgcaaggtggggtcccggccgggcgtgagtggggcgaccggggggcgggagggacgcgggactcagccggtgcccgacccgcagtcctccaagccggtcatggagaagcggcgccgagcgcgtattaacgagagcctcgctcagctcaaaaccctcatcctggacgccctcagaaaagagagctcccgccactcgaagctggagaaggcggacatcctggagatgaccgtgagacacctgcggagcctgcgtcgcgtgcaggtgacggccgcgctcagcgccgaccccgccgttctgggcaagtaccgcgccggcttccacgagtgtctggcggaggtgaaccgcttcctggccggctgcgagggcgtcccggccgacgtgcgctcccgcctgctgggccacctggcagcctgcctgcgccagctgggaccctcccgccgcccggcctcgctgtccccggctgcccccgcagaggccccagcgcccgaggtctacgcgggccgcccgctgctgccatcgctcggcggccccttccctctgctcgcgccgccgctgctgccgggtctgacccgggcgctgcccgccgcccccagggcggggccgcagggcccgggtgggccctggaggccgtggctgcgctgaggctgtggccctgagactgcatcggaggcggcgccccgttctagggccgtggcctttgccgagactgtagcagagaaaacgtatttatt

SEQ ID NO: 221153 - DNA, 1966 bp, Homo sapiens
cagttatattaacagtggcccctcatttttctgtgagccccactttgctgctgctgagttcgccagcgggtcacctggaagcacgtggcgacacgggccacatgacgtcatcccagcaggcttgcgtcatcgccccgggtgcctggtgacgtcaccagcccgctcgcgtcacgcgcacgttctgctcctcgtggtcctgcccggcccgcgccaccaccggccctgctctgcggggccacccgtgcgccccttcgccgtccgctgactccgccctcccgcctgccgacccggccgccgaccttcccccggctctgtcgctcccaaggctttctgcagccctccgtgctccaggccgcacacctgagggtgggacccccggaggccgagccggtgtcggatcaaactcggagaccgagcagggcccaaaccgggaccggagtggggacgggcggaggaagccaagaggctcgagaccgaggctcgcccacccctcggcgccgccggaccctgcgccactgggggaatttccttcccgacttcccgcgcggccacagccccagctccgtccagcccccgctcccggccccctgggcgggagagtgagccccgagactccgcccagccccgggggtcccgggccccgttcgcccccagcggcccctcccggcgcgttgctcggccccggctgcatcggggagcgcgggatcacccggccctgtccccagcggtgtcggaggggggcgcgggcgggggccccgcatgccattgtcgcccgcggaggccgcgcccggagccgaggcgtgactgacagcgagcgggggaggagcgcggccgtcgattggctggggcgagtgtgggaaagaatgcggagccggggttcacacaccccgcggcggcgaggccttaaatagggaaaaggcctgaggcgcgcgcgggcctggagccgggacccgccctaggggctcggatcgccgcgcgctcgccgctcgcccgccagcccgcccgtggtccgtggcggcgcgctccacccggcacggggaggcgcggggcgcaccatggccgcagacacgccggggaaaccgagcgcctcgccgatggcaggagcgccggccagcgccagccggaccccagacaagccccggagcgcggccgagcaccgcaaggtggggtcccggccgggcgtgagtggggcgaccggggggcgggagggacgcgggactcagccggtgcccgacccgcagtcctccaagccggtcatggagaagcggcgccgagcgcgtattaacgagagcctcgctcagctcaaaaccctcatcctggacgccctcagaaaagaggtaagtcgggggcgaaggcccgagacccggagtctgggtcgcagctgacctggacctcccgcctatccccgcccccagagctcccgccactcgaagctggagaaggcggacatcctggagatgaccgtgagacacctgcggagcctgcgtcgcgtgcaggtgacggccgcgctcagcgccgaccccgccgttctgggcaagtaccgcgccggcttccacgagtgtctggcggaggtgaaccgcttcctggccggctgcgagggcgtcccggccgacgtgcgctcccgcctgctgggccacctggcagcctgcctgcgccagctgggaccctcccgccgcccggcctcgctgtccccggctgcccccgcagaggccccagcgcccgaggtctacgcgggccgcccgctgctgccatcgctcggcggccccttccctctgctcgcgccgccgctgctgccgggtctgacccgggcgctgcccgccgcccccagggcggggccgcagggcccgggtgggccctggaggccgtggctgcgctgaggctgtggccctgagactgcatcggaggcggcgccccgttctagggccgtggcctttgccgagactgtagcagagaaaacgtatttatt

SEQ ID NO: 221154 - DNA, 581 bp, Homo sapiens
ctattagcctctgaatattccacatatatttgttttttccttccaggaagaatatacagttctactggaatattaaacaaaaagtagggcaagatctctattctcagaaaaatagagatcttgccctactttttatttaattttccagtatgatgggtgctaactcagtacctccaaggttagttatttatcacattgacctctgtagcctacaaacacctctctgctatacccacactttctccatctccaaaacttgctcattcattgaataaatatagcatcctagggcttgagtgagcatctggcaattcaatggcccctgacttcgaagtatttactgtctaagacaatggttctcaaacattagtgagcaactaccccacccgaagagctgaagtgcagctgagaatttgtatttctaacatgggtccaggtaatgtaggttctggtcgctgggaccatattttgagaaccactagtctagtggattcctgagaattcttgaaagaaactggcaaagtagaggaggaagccaagagccttgttgcaaagcacccataatccttacactaatatct

SEQ ID NO: 221155 - DNA, 261 bp, Homo sapiens
ataagcttattagtctcaggaaaacattcatccaagcaatggaaaagctatataaatttaatatttctacctgtctgtaaaagagtattgtagtaatctcgctgtatgtgcttcttgctgttgatgggcgtgctgccagaaaagaaacatttagggaatatgctagagaaggggttctccaagattggcgagatctgactgtgatggctgcagacgacacacataggagaatctgaaggtaaataaaaactccaaaacatg

SEQ ID NO: 221156 - DNA, 284 bp, Homo sapiens
ggctcggagaagggaggaagaaatagggagtaatgtttaacaggaacagagtttcagtttgggatggaggaaaaggtcatggggatggacagtggtgatagctgtactacaatgtgaatgtatgcaatgccactgaataatacacttaacaatggctaaaacaggccaggtgtgatggctcatgcctgtaatccccactgctttgggaggctgaggcaggaggatagcctgagaccaggagtttaagaccagtctgggcaacacagcaagaccccagtctctac

SEQ ID NO: 221157 - DNA, 591 bp, Homo sapiens
gcatttctttagaaatttccccaatcatattttaatacatctttcaagtacttacttaaataaatttcttaacatagtacatatcacttttgaaatccaaaaaattttaagagctcttcaatacattcaggggctgtttacaattcaaaaataaatattgtttgaactctaaatacttctccaaacatattttccaaaactttctaaagtttcctgctgcctgggaaaattttcctcattgctttaatatgccatatgtatatgtaatcttttccataaggttgcctttttccctagaattctgtgcttgaatgctctttgcttctttagttttgaagactgaaagtcttgcttgtatcatagaactgatcttatatcttcagataattataatcctttcctgttcttgattgtgagaagaggtaatgcttttgctgtgaaacccatcttaggagtgtccatctcctcagtcaatcaaatttaagactcagaatttatctctgaaacctaacacttttctatgaaatcaagtttgaagatacttgtaaactattttgatttgaggatactaatttcttctcagtcttacca

SEQ ID NO: 221158 - DNA, 423 bp, Homo sapiens
ctcctgtttttaaaggcatcaaattttttcaatagtcgattgtagttctcaagtattgttagtcccataatattttagaaaaataagatattcatcaattgctttatttttaattcacatgcatttactcagtaattttgtttttagaaatttggtcttagtagacaattttttagagagaaatagccccatttataagatagagttcaccaaatccagtggcattttttgcaggttcttccacattccctttgtagcatttgtatatgcgagtccccgctcccttaaactctcatggttctttttttttttttgggacggagtcttgctctttcacccagaccagactgcatgagctgagagatcatgccactgcactccagcctgggtgacagatagacactctatcttaaaaaaaaaaaa

SEQ ID NO: 221159 - DNA, 245 bp, Homo sapiens
atctgaagcaaaaataaatacaataaagtaaaaacaaaagattacacgggagagagagcaagaagaaaacgcaaaggaggcacaagaaggagacagagagagagggtatgatgatctttattatggatgcgcagtagtgaaaaacaggaaataaacggttctctaaaaacatatcaatggcaaaatataatactctcataaaaggacaagaacaataattaaaaatgaatatcttaataccatct

SEQ ID NO: 221160 - DNA, 570 bp, Homo sapiens
taggtaatagtttttataacttaatactaattcagatttgtttatcttagcaaataagctgtcatagttcttcagtcataaatcatctcttccaatgcaaatatccttcagggatagaacaaacaggatcaaaacacagtgagaggtttgaacccttagattctagattgggttcatttgaatgtgagagattaaaggaaagcctctgagatagtcttaactgtataaaaaactctgcttcttttcattcaaatattgtaaatgcttaattatcaaaattgtagggccttgacttatgatgttagaaaagaacaataaaataacatctttgtataccacatgtccccttaatttatgtctaggtatgaagaagtaaaactataaaacctgcctaatatatatatttagtataaactctgtagcaacacagctgcatgtagtttttgagcttaattctctgtcaggctcataagatcctaaaacccttggagagttcagcaaaaaataaatgagaataggatgaaaaaaaaagattgcattttttaaccttttaaataccctcatgttcac

SEQ ID NO: 221161 - DNA, 131 bp, Homo sapiens
tagccctgcccctatctgatggtccttccctatccactctggtggaagacaaagggcatataatcttgggagttctagggctccacccaacactggtccctctccatactactacagctgctgctttttgg

SEQ ID NO: 221162 - DNA, 375 bp, Homo sapiens
gcaccatcactgtgaattactaggcaaaatcttctccaagtggacaatgctgtatgttcattcctccttgcaatccccatgactgcattagcaaaggagccccgctgaggctgagtagggctgacacttgcctgcaggtgggcaggtccccatcagcactggccctacttccaggactggcctaggagaggccagggataggaatggggactgtttagatcggggccgacttggaggattttttcctcctgcttattaaatgttaaaggtttgacttggcaggcaatcaggagcccaaaatatcataaaagggaaaaaagttgccgagtggctaagaggtgcaccacgggagtgtcactgggcccgccggcgagg

SEQ ID NO: 221163 - DNA, 399 bp, Homo sapiens
aagacatgaagggtggaaattggtcactcgagtaaaaattataaattatgttaaacaaataataaaaggtaaatcacacttcataaaaattttatgtacatttcctcctgattctcattacaactatggtcctcattacaactgcattagatagcaagaatagttactatttcccttgtctttcagataagaaagtaagagattagagaaattacatgagttacctatttttcaacatttaatgcctagctgggcagaatgtgaatgccagccaagtcttaatttagagctcttcaaaccatgacagcctccttccaaattacatacttttgaattactttaaaaattgcaatatgggccaggcgcagtggctcatgcctgtaatctcggcactttggg

SEQ ID NO: 221164 - DNA, 449 bp, Homo sapiens
cattatgtaacaatagcctttttaatatcaaatggtttttatgatctgtcttcaatttttcttaaaatgagactgcactaaagattttcttgacatttctgagaatttcattttcagtttcaaaaaattatttattcctttaatctttcaatgtggaaaagtaatgaatattgattcatttttagaagcgctaacatccaactaggtaaacttcatgagtgatggctattaatgttctctttcatcttatagacagaaaatcaaagctatttaaagtaaaggatttgtttcaaatcaatgtatgtccacaaattaacattaatgtttacaatactttctgtgataattgtgtcttacttgggtgtatatatgtctttatatctatctgtaaagatatagttgcaagtagatgagagacgaatgttcatgtttctatatggtctgaataa

SEQ ID NO: 221165 - DNA, 367 bp, Homo sapiens
tcagtgctaaaattgggatagtcccaggcacactgggatgtttggacactctgccttgtcctagtttaacaacagctaccttgaagccatctgaaatcagcctggagtagtatgaaaacagctatgttctgatcttgcctttggaggttgtttttgtttgttttgtttgggggtggggtgagggaggagttgctatatcaaatacattttatagtttttgaagatgcgttttttccccctcccaaattcactgcattacagtttttgaaacagaacgggagaaaaaaaataacaaacagtgctggcatccaatagatggtaaattcacttttcatttttaataaagagtggacgaaacagaacggga

SEQ ID NO: 221166 - DNA, 514 bp, Homo sapiens
ccacagctgtggagtcccattctgggactctgacgggcaccctcagatctggtgttgctccactgttcccactgagtctgagttccaacttcttttaaaggagccaagtaaaggtccacacactctgctgtgtcttctccactctgggatataaatgctgttggatcatgtgttatacaaatgtattcctggttcatctcttgacagtttagtgaaactcaaaccaatcattgctgatgtggaagttgtgaaaaagcaggaacatagaagtgagagcccagcagctgttattttctggtacctgttgaacaagagctgagcgctgtttccctctgttttgcggagggatgtgctttcttaaagcagaaggttgacactttcctgagccgcctattccatttcagtactaacagctgtcattagagcccatctccagcttgctcttcatctcctacgtccatcgcaaaaaaatcacattttgcaagggatggtcctatggggtctttctgcttca

SEQ ID NO: 221167 - DNA, 487 bp, Homo sapiens
gaacatgctggagttgaggtcaagtatcttgaagctagattcttctgtgtttatcaatacagatattgaagttgttcacaataatgacaggagaaggtgtgaatgggaagactttgatcaggatgacctgaaactcaaaaaagaaagggttttttgcacaagagtgaaaaacagtggtttggaaaaggcaaagaatatcaataaaaatgcagacattgcctcggaaccacaatgtagaaaaatgtgcaacttctacttgaaaaggtaacagagaggtggtgtcttcctgcaagatggattttaattaaggcaagaaaatggggaagtggactcataaaaatatgagaaagaaggccaggcacagtggctcatgcatttcgggaggctgaggcaggagaatcgcttgaacccaggagatggaggttgcagtccgctgagatcgtgccgctgcactccagactgggagacaaagcgagaatccgtctca

SEQ ID NO: 221168 - DNA, 387 bp, Homo sapiens
ccgatattcaatctacttaatacacaccaaggtcctttcagatagagagaaaaaaatagtgaatattgctcaccagcagatttacttttaaaatatctaaggccggacgccgtggcttatgcctgtaatcccagcataatccttgggaggccaaggcaggctgatcacttgaggtcaggagttcgagaccagcctggccaacatggtgaaaccccatctctactaaaaatacacaaattagctgggcgtggtggcgcatacctgtaatcccagctacttgggaggctgaggcaggagaatcgcttgaacccaggagatggaggttgcagtccgctgagatcgtgccgctgcactccagactgggagacaaagcgagaatccgtctca

SEQ ID NO: 221169 - DNA, 483 bp, Homo sapiens
cacggtacagtccctaatggcttcccttggctaggagagggatttccccatccccttgcatttcccaggtgaggtgacgccccaccctgctttggctcatcctccttgggctgcacccactgtccaactagtcccaatgagatgaacctggtacctcagttggaaatgcggaaatcacccaccttctgcgtcaatcttgctgggagctgcagaccagagctgttcctattcgtccatcttgccagccaaggccaactttttttttttttttttttttagatggagtctcgctctgttgccctggctagagtgcagtggcataatctcagctcactgcacgctccacgaggtcaacttttttagatctcacatatgagtgagaacatgtgatatttgtcagaaacatctattttagaaatcacttatgtatctgtgtttctaaagatttgtagttttcttcttgctggctctaaaggtttattt

SEQ ID NO: 221170 - DNA, 381 bp, Homo sapiens
ggtcctggatggttatctttgaaacttcctaacctgttgggtccccgtcgttaaacttatgccaacagaactaaactcactggatgtgaattgcatcagagatgtaaacatttaaaagcgtattaaggctgggcgcagtggctcactcccgtcatcccagcactttgggaggccgaagcgggcggatcatgaggtcaggagatcgagaccatcctggctaacacagtgaaaccccgtctctattaaaaatacagaaaaattagccggtcgtggtggcaggtgcctgtagtcccagctactcaggaggctgaggcaggagaatgcatgaacccgggaggcagagcttgcagtgagccgagatcacgccactgcactccagcc

SEQ ID NO: 221171 - DNA, 310 bp, Homo sapiens
gccgtccagaaagactccagcgaaaacagaacttttggataatcagtaatttaatctcacctaagcattttgaggccttcaaaagtgattgttataaatcagaaactcaggaaaaatcccataggcatggggcccataacaacggggtgaagtaattttgtttgctggttattgccacagctggttggaaatgtatgtatttgcaatgttctgtccccgttttagaggtaatgctttctgacttccctgctactgacattaaaagaaaatgatgaagcaatcccattcataaatacatggtggggcctga

SEQ ID NO: 221172 - DNA, 544 bp, Homo sapiens
agaaagatggtggtaactgacaaacatacggagtgagctagctgaatcctgtgctaaaaagagggggcacaactgaatactcccaatatctattcctatgtagcaagcccaaaacttagctacttaaaacagttaccattttatttccacataattgtttgagtcagaaatctgagcagtgctcagtggagtggctcttttcttttccacatggtgtcagctatgacagttgagctgaaactaaagtatccaacatgatgtcatcacatgattgaaggcttggtactggctttggctaagaaacccaagttcttcttacagcctctttctcttcacatggtctctcattattcagtgatatttcctgggcttctttaaatgtcatctggcttccaacaaggagagaatgaaagctgcaaggcttctaagtccttagttgggaagttatagaacatcacttaccatattcaattgatcatatgaagtcacagggccaaccagagattcaagggagggtgaacagtctccaccactcaacaatggg

SEQ ID NO: 221173 - DNA, 652 bp, Homo sapiens
aggctgaacttggattggaaagatgggagagacagcaggcctgggtgtattcaggattatttcctaataactcactctctcctccctcctccctttcttgaaagtgagtggttagggatgagcggttgcaggcagagatgacagcatgagatatttcaccaaagagtgggtgtttaaccaccacttgtctaggagatgggcaacatgtcccagagatgattctaacagggaactcttcctggcagagtccagtgaagggaaccaggaaattcgggggcagggcaatcccactctctctgtcaggtgagatcacctgcgcagtggtttgagttcaggcatcttactttcttttagttagattcataggattaaaaattatctgcttatctagtccaatatttttaaggcatgtcaaaaaatctgcagaatccccccccccttttttttcataagaaataaacatacataaatctgagaaaaagcagagctggaaaaaaagtgggggcatctcggaggatgaactacctggagccccattctggcagctcttgagaattctggaattcctctggaaactactgatttagtttctcatttccatttgagaaaacaaaatataataatagcgatcaaggttaaaaaaaaaaaaagt

SEQ ID NO: 221174 - DNA, 175 bp, Homo sapiens
acggttgcatattccatcccattaggataccaggagatgcaacatttttcttcgtcctaaacagggtcacttaattcaaggttgtattagcaccttcagccaaactaagaaccatcggggatgcctctgggtttttgcccaggacactgaaaaataattaggtgtctgaactggg

SEQ ID NO: 221175 - DNA, 319 bp, Homo sapiens
tcacagtgccataccggatccagactcttgtttttagaaaagatggttctcttcttggtttattctccctgatttgatgtgagaacatgtcacgcagtgtaactcttctctgcctttgtttaatttgttccctctgtctgggactcccttgtcaactccactcctaaaattgcatgcacccttcacagcccaaggaagtctgtctcattctgtggacgttcccacctccctttcctgagatcccaggcactttattcacactggtaggagacatttatggatccagtcattcattatttattgaaatgttaatccagta

SEQ ID NO: 221176 - DNA, 2912 bp, Homo sapiens
  misc_feature (64)..(64): n is a, c, g, or t
aaatccttgatacatgctttccaaaggctgaggaaacagaaagtgagagaggggtgaaagctgnatataatggggattatctggagattagttaaagtttcactaatgccattaatttaaatatttgactccggccctttcgtgtatgagatttgttccgccattacttcaggtagatttcattacctcgactggactgcctaaatacaactttgtgtcagtcaatatggttatacttatacttaatttacacatgctaatggcaatattagatctattgaacagatatcatcagtaaacagttaatgattgatattcaggtccaactttgattattgatcatatattttgtgtaatttctgtggttattataaatatatgattgataaccagttattcaggcaatttgcatttataattttttatgtagattttactaatcagctagaaatatctcttcatgaaggtaattattagtaaaaaaatttgtgcagagaattgcgcagagtatcttaactttattctaacttatcctactactaggaatgttcttaataatctttattaaaaacttagtttcttagattgtctgtacctgtgttaaaatgtggtctacagccatttaaataaaaggtctctattttatgacttatgtgaatttcggatttgtaacgtatatatgtatgtatatttatgtttgtgcatttgtgcataagttaaatctttgactaaaagatggacctcaacaagtgtgggaaagtgttatagttacaatatcctgctttttgcttttctgtataagagacttggtagctgcatcatatatcatggtcatccaaacctcttgttttaaatgagagacatagttaatcataattaaaaatgctaaataaatttgaaataggaactatttgacccattaaataaaaagatcccaggaattcttagatgtaaagttatctaattcttgagatttaacttaaaaatataagtatttatttatgggtagttttaaatttgtctttcaagcattatggagattagaaattttgtgtgctttttttaaatttgaaggtccttaataaaacagtatgtaattgtgagaagcaagagtgctgcagcatgttgtgtcttttaaatatctttgagagtaacagaaaagcccaaattctctcctagtgtcgtttttaaaatcaagtattgaaactgaatatagttcagctaagctttctttgctgtcactcttaacattgccataactctactttcctagtcatttgattgtacagaaaaaagtaaattcttttactatgtaagtatacccttatcatcaatcatgtactgcataatgcatagaaaagaatacatgtaacattttttgaagcataacagtaacacaatactgatgatttctcacccagcttaaaaactagatggtatcattgaatctctatatgttgtctgtccctattcagtcactctatttcccttcacccagatgtgatcattattctaagatgttttcattcatttccttacttcttataaaaataatggtttctgaatgtattactaaacggcatatattgtttaattttgagcactatacattacataatgtaattacctattaatgtaattattataatgtaattatactttttctcttaaatcttgttttaagatttatttgagtcttggcatgtagctatagttaaatttcatgctgtatacgattttattacgtggatatacttgtattcattgtagtagggtatattgggtgttccatgtttattttgttttttgtcactatgaacaatcgtactgtgaagattactgaacatgtgttctagtaatatgtgagtaaattctttcattgtatatctaagagtggaataggtgagtctcacagagaacgtgcatattcaaccatgcaagataatgccaaattggtgatacactgatacacatttccaccagcaaagtgcaatagttctctttgcgctgcaggtttatcaactctgacaatcttcagacttcttgatttttcctaatctatgggtataaaaatagtatttcatcatggttttaatttgcatttcctaataatgaggttgaacaatttttttatgtttatcttccattctcatttctgtgaaatgccttttttttgttatttgtccccctgcccccaattttgttttattaggggttcttatgtattgtggatacagatgccttttgtacatatatgttgcaaaaatcttctctctgttaatgacttggttcttttatggtatattagtgaaaagaactgaatttaaatggtagttaaatttatcagtctcttatatgattagcactttttgtgtcatggttaagaaattactttctgtcccaaggtctcgaggatatctttatttttttttcaaaggcttgcccttagtgttccaaatttatttggaattgattctttgaaaagggtaaggtagtagtccaatttcatttttctccatatggataactatttgttttagtaactttattgaatagtccagtggctagagtgccatctgtcatttcatgattctttttttgcctagttctgtgttgggctcttccattctattcatcaagttgtctatctctgcacaaatagtacatgatatagttttaattactataattctaatgagtcttgatatctagtaggacaagtatctgtattttcattaggagctgcctgacgcattcatataaaatgagaatcagcttatcaaattccttggaaaagtattcttgtggttttaattagaattttattgaatttgagaaattagaagtagaattcttaaaaatgttgaattttctttttcataaacatactgtatcaccctcatttatttagg

SEQ ID NO: 221177 - DNA, 496 bp, Homo sapiens
agtggtttctggatattcagagagagctatacggaccttgagctgatcttgtactctagtgatgctggtgcacaaacacaagggtagggacgctatcaggggtgtcctgcataaaggtcagaacagacaacctaaaatgcttccttcacctctgagatctaggattcaaggatctgacacagtttccccctctgggaaattcacagttccacagggattatgaattaagagggtgtgtttgtacttgtgcatttatgcttgagatgtcaaagtgggcaacagataaatctgctaagatattgtaccaaaagacagtaattttcccgttgggaaaaacaatagtagtcacattatttaccagaaacaccaaggagtccatgcactgaacattttataaacattttatgaaaagtaaaatgtgttcaatcctaaatgtcttcttgtgtgttctatggttcagggtgggatgtgggaaggggaaggccatgcaccaccc

SEQ ID NO: 221178 - DNA, 332 bp, Homo sapiens
agaagaaccggggcctgtacaggcacatcctgctgtacgggccaccaggcaccgggaagacgctgtttgccaagaaactcgccctgcactcaggcatggactacgccatcatgacaggcggggacgtggcccccatggggcgggaaggcgtgaccgccatgcacaagctctttgactagacagaagtggggcggcctgaaccctgcttccagccatggccaggggccacggaacccggcaggggtgtctgaggccgccctgtcagctggccggtccaagcctgtggctggagctggtgtgtgtttatctaataaagtcccacaggtgcctca

SEQ ID NO: 221179 - DNA, 1144 bp, Homo sapiens
agaagaaccggggcctgtacaggcacatcctgctgtacgggccaccaggcaccgggaagacgctgtttgccaagaaactcgccctgcactcaggcatggactacgccatcatgacaggcggggacgtggcccccatggggcgggaaggcgtgaccgccatgcacaagctctttgactgggccaataccagccggcgcggcctcctgctctttgtggatgaagcggacgccttccttcggaagcgagccaccgagaagataagcgaggacctcagggccacactgaacgccttcctgtaccgcacgggccagcacagcaacaagttcatgctggtcctggccagcaaccaaccagagcagttcgactgggccatcaatgaccgcatcaatgagatggtccacttcgacctgccagggcaggaggaacgggagcgcctggtgagaatgtattttgacaagtatgttcttaagccggccacagaaggaaagcagcgcctgaagctggcccagtttgactacgggaggaagtgctcggaggtcgctcggctgacggagggcatgtcgggccgggagatcgctcagctggccgtgtcctggcaggccacggcgtatgcctccgaggacggggtcctgaccgaggccatgatggacacccgcgtgcaagatgctgtccagcagcaccagcagaagatgtgctggctgaaggcggaagggcctgggcgtggggacgagccctccccatcctgagtccacagggagatccacagctcacggagcctggccgcggacccctcccagccctgccttgccggcccctgcacatttaggatatgctcctgggtggggactgggctgtgcccagggcctctgtcccccaggatgtcttgtggtggcggtcggtcgttctgccccccagggcaccccctgttgtaggcactggctagggaggggcaggcctccttcctgcccctcgagacactcttgggagatgcattttccgtctggctcacagggggagggtgaggcttgcaccccaggccctgcccaggccactgtgagggtgggtgctggctgagcccccggggcagcaggagccaggcaggtgatgtctttgtctcggtcccacagcagagccaaggtgaggg

SEQ ID NO: 221180 - DNA, 359 bp, Homo sapiens
agaagaaccggggcctgtacaggcacatcctgctgtacgggccaccaggcaccgggaagacgctgtttgccaagaaactcgccctgcactcaggcatggactacgccatcatgacaggcggggacgtggcccccatggggcgggaaggcgtgaccgccatgcacaagctctttgactgggccaataccagccggcgcggcctcctgctctttgtggatgaagcggacgccttccttcggaagcgagccaccgagaagataagcgaggacctcagggccacactgaacgccttcctgtaccgcacgggccagcacagcaacaaccccagtcacgtgtcacacggaggatcaagtcctgct

SEQ ID NO: 221181 - DNA, 277 bp, Homo sapiens
cccccgtgtgtggttggtttcccacggccttctgaggctgggccgtggtcagctgcccagaggccaggctgatcggcttctgtcgagtccaggacttagggctgctgatggggcagagcctgaccccgtggggatctgcctgcttggcctgctcctgccgcggccggacgctgctgtgggctgctcctggtgtcactctcgccctgcttggcctccctctcgttcacagcctcctgctctttgtggatgaagcggacgccttccttcggaagcgagc

SEQ ID NO: 221182 - DNA, 374 bp, Homo sapiens
acatattgaacaaaccatttctatttcaatttacaaactgggcccaaatagtcattatttagaagcattgatagcccccaaagcagtttctgtgatttattcactgaaccaagaatattagatcaccactgagccaagccgtttatatatacgtggctatctcagactcccagtgagataacatctgggctcagtcttgcatctggaaccaaaaacaatgatctactctgtgctttaaatttgacaacttaatttgatatcctctagactagggtgttcagagcaaacctagagagattgttaacagccatctgagagatgcagctccattcatggaaactattggccaactttaccttaagaaagaaaaaggg

SEQ ID NO: 221183 - DNA, 539 bp, Homo sapiens
atgaaatgatatcctaagtgtgctgtttaggaagggagtagaatgcaacctagagttctatacccagagaaaatttcgacagggaaagcataacacctgtatatcagtgttacaatcaaaccatctactgctttggaagaaagggccaagaccaagtcaggctgccatggtaagcagtcttcatcgaatgaccagatgatctctacagtcttcatgtggacgatgatctatgtctaatttatcagtaaatatcagcatctagtagggtgctttcgataaattttgttgaatgaaagaaaaaaggcaaattaaggtatttattcagtaaacaaaaagggatagtgaagaaccaagctccaggacttttgaagatagactttcttgtctgtggtgcactgagaatcagctctatcttagtattcatttacgtgtggagatctagaacagagttacattctttctggtgacaagctgagactacctggctgctcaatatccagctcctgggagacaagggcctcaaaactgttgggattggg

SEQ ID NO: 221184 - DNA, 424 bp, Homo sapiens
aacctaccatattaacagacattaacattttgctttacttgccttagaatcaattttctctgttttaaaaagcagaaagcattaagcacagataaagcacccccatctcatcctctacctttctctccagaggtaaccatcaccctgaagttagtatgcttcttttcatgtatgtacatttaaacttatgttaatattatatagacatgtccataaattatatatactgttattttgtgtgctttaaatatttatacaaatactagaaaccatatggtacatttccttttgtaacttgcttttcttgccaacatgttttgacatttatctgtgttaatatatttagatcaagtttgttcattttaactttctgtagtattttattacatgaataaatgagtttatttactcatttgcttaccga

SEQ ID NO: 221185 - DNA, 299 bp, Homo sapiens
ttccttgcattggaatacttagaggccattgtagggttatgaattggcctaattttagtattgttttgtctcggagtagagaggcctgagcagagggagagatgagagaaaggctggttggtggagcagtcataactcccacaacatttattgagtaagtttgtggtcttatgtgggtgtggtttgtgcctctccccaaaatgacaatggtagcatcagagatcacaggtcactattaacagacataataataatgcaaaaatccaaggtcaaggtgctggcaaaaagaaattaaaaaa

SEQ ID NO: 221186 - DNA, 422 bp, Homo sapiens
cttgggctctctctggtgcactgggcaagtcggcttgggggtcgggttgaggggggcggtgtctccctcagcgtggactcctgctctcaagaccgctatcccagacctgtccacaaggtggcagtgttcgcagggagtaagccccttaaggtttagcctagaaaggtcgcaatttgttccgcctcattcttttggccaaagcaagtcacaaagccagccagcttcgaaggtggaaggagctgacagaatttatggtcttatggctgagcacggtggctcatgcctgtaatctcagcattacagaatagtggttccgtgtatggatatagcacaatttgtttaaccatccacttgttgaaggacatctgggttgtttacgatttggggctattatgaataaagctgctatgaacatttgttta

SEQ ID NO: 221187 - DNA, 145 bp, Homo sapiens
aggcacaggaaagaggcagaaaagcccaggaaaagaaaggggctggacaaaggaattggggggaatgagagaactgttctgtatcttgagtgttgttacagttatatatctctgtgtgtttattaaaactcagaattgtacacca

SEQ ID NO: 221188 - DNA, 660 bp, Homo sapiens
cacttcagcaaaaccatcttattggcaagtgattagagcatttttagatttgaaagctggttcctggtaacctggtattattagctggttttatatatggatggctggaatgccaagatgtagggggatgagaatatattcagattggccgtttcaggattatgcacctgggtcatggtacttggtaaaaggccaaaacccatcattggcagtaatcaggtgtaagaaaatatccaggagttctagtagtacagccttgctcccatataaagaagggtaattataaaaacactttttaaaaaatttttggtaattgtgttcatataatttatactaaaagttacgtgaggaactattctagctactcggacagctttaaccaaatattgaatgttctaccctgttttgggttgtcttgtcaacccaagtgcacactttcaggggaattaaacatggtggagaaatggaagaaaggaaagaatacttgccgtcacatcagctgaatcagcttttgtgattcagtcttatcacttttgtaaccatgaagcactatcaatgttgcctcatagggtttagttctctatattagcactattttatagaactttctataagggctggacgtggtggctcacgcttgtaatcccagcactttgggag

SEQ ID NO: 221189 - DNA, 547 bp, Homo sapiens
tgccttgatgtactgcatatacaaaaccagtttagtatataatgtggctctgataccatcttgaattataaattatagcatgctaccaccagtaagtttggtatcataattttaattttaactgtggctgacaattttggggggaataaacacgcataactagggcaatcagatttgaaaaaatcaatgaatatacataaagcttgattgagcatccacaaatacatagaaaataaattatgcaaacaatcctaagaatgcatttccagtaactgattatacaatccttatctatgtagagttgggaaaaaaaattctttttgtgatagtagttttttccatatggaaatccagtggtcctgcccagaagcagtggctcatgcctgtaatcccgacacttggggaggccgaggctggcagatcacttgagggcaggagttcaagaccagcctggccaacatggtgaaaccctgtctctaccaaaaacacaagaattagctgggcatggtggtgggtgcctgtaatcccaactactagagagggtgag

SEQ ID NO: 221190 - DNA, 191 bp, Homo sapiens
aacatataaaactttcatgctgtacatgctaaaacatattccagacaaaagatgccttaaaatgttttagcatgtacagcatgaaagttttatatgtttattaatttttgtttataattgttaatgaatattaattttgttaatgaatatatattaaaccaattaataaacagtcacaaagctgcaaaccg

SEQ ID NO: 221191 - DNA, 1201 bp, Homo sapiens
aattgtacatcgtaacaaatggagattattcccataaagtcctcatgacttctgaactgatcttttgcagaaccatattggccccccaactttgccttatccttagacatttcagtaaatttccctaatcacctccacaatcattcaaaatgtatttgtggcctcatgtaatggccaaaaaagaccactcctcataggaagatgttagattacccactacatttcttacctttattacaaaggagagagtttctaccctggcctggaagcctctatgcccctgctgccaatattttgtcctcaatgcaccagatgacatacttcagagctctgctgtggtacacttgataaagcacattgcagaaccacacacttctttgataatgcttatatttgttgcatgtaatacaaagtgggaacttctacaacaaaataattaattagaagaacataagtactttacagaatccaagaaaccaaagcagcaagcatgcttcgcaaggacagaaacaagggtagctcaagagaactcaatagtaggtattctaaataatgttctctatacagaaatggcagtaatgaaacttagaggaaaaacactgagttttggggtctagttccaaactccaaattatcaggaaaaatacctgattggctcatctagggtgaggtgacaagtatcaaaccaagtagcaatggccatgggactcagtcacacagaaaatagaagaatgtgtgtacagttggaaggtctcagagaaaaggagtctgttggacagaatgaccagtctgtgactactgccatttttcatgaccatatatcaacccacattacagatgtaacttagtgagagaaaacatctccctgttttccttcatatattatgaaatatttactttttctagtattttgtctatcttacgtcaaagatttaaatatctttgacctcctgtactaaataccacgccacatcagttttagttgcctttcttttttccttaggctagttttttggtataccatttctaaaccaatggtaggaacattttaaggcatcttttgtctggaatatgttttagcatgtacagcatgaaagttttatatgtttattaatttttgtttataattgttaatgaatattaattttgttaatgaatatatattaaaccaattaataaacagtcacaaagctgcaaaccg

SEQ ID NO: 221192 - DNA, 335 bp, Homo sapiens
taaaaaagttttaaaacattttaagcatgttatgcttttacttattacattaacgttaactttggaatattttgcaggatgtcagagggtgactggtcagagtaggcatgcatgtgtcatttgaccaagcaagaaataaagccagttttcctatgtggacagtattgaatcattttagtgtgcatgtttctaaggtagtaagttatcgtttagaaaagaattagatcaaattagcctagactgaactatcttatttaaatatctcttgtggatactcagggctcttgagcaaggactttaccaaaattacacctggcctcttgcagtcagttctg

SEQ ID NO: 221193 - DNA, 492 bp, Homo sapiens
gggggagggagatccagtttataacggggctgggaaagtaaggtcagaggaactctttgttaaaggtccttttgctgctgccgccgctactgctgactttgtgaagtgtttagtgaagtcaggcaggttgctgaaggcttcttatttgctttccagtttgagtttcctgaatgagtgtgtgtgtgtgcatatgtgcacgcacgtgcttgtgtgtggtaccagtgagcatgtgtagtcaggcaggcataagcccctagcattaaaaattgtttttccttctcctcacccttctctccaagtattccttgcctcattcctgtcctgcttcttcttggaagtgcaaagctgacatctgttctttatcattcttcctctctttttctctttttgtccccacccccacctccaggttaaatttttattacaactattccaaacagagatgagccttgttcccaggctttgagttagttggtagttctgggcccagga

SEQ ID NO: 221194 - DNA, 630 bp, Homo sapiens
gtgtattttccaagtccattaatttccccctaacaatcgtttactatcctcaaattgccacatattcccatctctttcctctatggagaagggtatataaacatctgtatcccattgagctactgggctgtcagattctcctccgattttcctgtgccacgcattttacaataaatgtcgtatgccttttctccttttaacctgccttttgtcagtgaaccttcagaggaggaagtgggaagcttggcccctacagcagcatgactggtaatggtaaaagactggaaacaaccaacatgtgcatcacagttagataaatgatggttgttcctagtgtgcgataccatgcaaatgtaaaatgaatgagcatgttctctagatattgaaacagaaagctctctaacatatgctaaggaagacaagcaagggaagagcagtgtctgtaaaacgctcctgtatgtgtcaaaaagagggggaagataatatgaattggcttgtagatgtagaaaaatatctgcattaaaaaagaaattatcaaccactggttatttcctgttggggccctggggaactgagtagttttgatgtttgagtcatataaatgtagtatctattaaaaatatgaaacaa

SEQ ID NO: 221195 - DNA, 279 bp, Homo sapiens
gtgtattttccaagtccattaatttccccctaacaatcgtttactatcctcaaattgccacatattcccatctctttcctctatggagaagggtatataaacatctgtatcccattgagctactgggctgtcagattctcctccgattttcctgtgccacgcattttacaataaatgtcgtatgccttttctccttttaacctgccttttgtcagtgaaccttcagaggaggaagtgggaagcttggcaataaagaaggaaaataacggggatcctcat

SEQ ID NO: 221196 - DNA, 413 bp, Homo sapiens
gctgacagtagaattggatgaggatgtcagacctggttaagcagtagtgtggaggggctgcttcaactttgcccctggcagatggcaaggatgggacccagaggaaagggaggtgtgtgcagttaaggcgagggtcccccccagtacaaacgaatgaaaactccagctgcgggataatgaatgagaaggcctccaaattactttttcactgatgaaacacaaatggaagtggcatataattaaaggggaaagaaatatggaagcccactgtatattgataggatattttgagtaactctattcatactcaaaatgtgtcctaaactgtagagaactttcttaagcatcttttaaattttttatggaaaatgtcatattttaccaataaatgttgttgtgttagaaaatatcca

SEQ ID NO: 221197 - DNA, 1267 bp, Homo sapiens
  misc_feature (1)..(1): n is a, c, g, or t
  misc_feature (4)..(5): n is a, c, g, or t
natnngcacgagggggaaccaaaaatatcgggctttgaaattctgtggattttcaaaggcggttcccaaccttgtcaaaaactacagtgggtgcgcgatctaatctggctcctataggtggcgctgtgacaaggtgcggtggccgggagaggcggctgggggactcgaagactgcgggaaattttctgcgactccgacgctaacccgctgctcccagcctccgcttcctgttttcgagggattagctaggactgtgcaacaccagtctccgctctcggagtcggcacgggggctggtgggtggcgggatgaactcggggaaggcgacaggctggaaacgcagctcctcgactttgcagcgcaccaaccccctatcgccccgtccgctgctcaggtgcgaggattcgccagacgccacaggactgggggcgactcgcaagggcatcatgccacctagaggaaacgcgcagtgagtgagccctgggtcactgaaaatgggagaacgttcgagtcggtcaagatgactccggcctgcgagttgattcagactcctcggaagccagaaattgggtctagagtgggttggtccctccgtcagcagttcgggcccagccgaagcttggggcctagagggcagacgtccggctctgatcagagtacagcgggctgggcctggcagcctgcaggcaacctggaccttgcaataaagctgcattcaacataactcagaccacagtgggagcccccgaagggcttcatgtgagtcccgaaaccagagtttagaggcgcggcctggttctcgtttatcttttccagacagcatttaggccaataaggtctttgaaaggaggcagccccaaagccctcaggccgacacctgagggcagggtctcaaacagctgtgcttgaagaaccggcaatcttgcttttcccacacgcagctgcacctctcctgagcgctgcagctgatggctgtatagtgaccacggactgcgtcctcctcacgaagctgcgcaacttctgctaatgctgcaaccctggcaagacgaaatccccctccctctggctagatcagcccagcctcccctcagggaccttcctgcccctccctacccctccctacccctaggccgctccccccttcctctgttgggatccgatccttgttcgctcttgcaatcccgcagcccggagttttgccccgtgcattaaaacatgttctctttcatttgcagatttaataaacaaacgtaaccatatcacatgga

SEQ ID NO: 221198 - DNA, 107 bp, Homo sapiens
gcacgagaagaaaagaccaaaaattaaaacccattctctttatattcagaaaaggaaagggctattttttggccaaagcgttacaatttagtttgccaaccagttta

SEQ ID NO: 221199 - DNA, 361 bp, Homo sapiens
catttaatctgtatgattcattggcatttaacatatttgaaatgttgtgccactatcaccactatccagatccaaattattattttttcactacaaaaggaagctttatacccattagagagtcatctcgcattctcccctccttcatgccttgcaacctggaattatgagttggcatgattgtataacctattgggtaatattacttaaaaaattgcaaatatgtatataacttcgacaaagtgttttattttttcttctaacatctcctatttctaaatagcaattctatgatgtataaaattaaacttttatgttttaattgctctattaaatatattcagaggtgctgtgatttaca

SEQ ID NO: 221200 - DNA, 395 bp, Homo sapiens
gatttgtctatcactttcatttactttacaaatgctcctcagaatatgaaacatccagtgaaaatactgataaaacatttattttggtgttctcatctgtgtgagggattaggggaatactttctattctcattgctccaggaatatagaccaatgctattgcttcttgtttcattatcattgtaagttttagatgaaggtgcagcaggatttaggggaagggctgcagaaggggataaagctaatacacaagtaaagaaaggtaactaagtagagaaaggtaaattcttcccttttaaaagcatgtaaatgttcacttttcagttcaaaacaagagaaaaatggcatgttttccatagttgttaatatttagtaccgaaataacagaacactta

SEQ ID NO: 221201 - DNA, 421 bp, Homo sapiens
agggaagaatcaggggagaagggacacaagcccctgaatgcatgccaacacgtaaaacctcaaatcaaaactcaaaccatgcagtttaacctctcaagttgcccacttggccctcttccaagtgtactttacttcctttcattcctgctctaatactgtttagtacattttcactcctgctctaaaacttgcctcagtctctcactgtgccttatgcccctcagctgaattctttcttctgagcaggcaggaattgaggttgctgcagacgtgtatgcatttgccaccagtaacatactttggtgccacatgactaggatatgttctctagtgctaacatgttcgtttacagttcttaggactccctgatagaaaaaaacacaaaaaaaaacacaaaaaaacccaaccaaccaaacaaaca

SEQ ID NO: 221202 - DNA, 790 bp, Homo sapiens
ttgcataatgaagccaaaacccaataggaaaatcaggacaccacaaggagctcaaagttttgttttgcttttgttcctttaatcaagggagtggcagctagtttgatggaagcatttttgtgttagaacattgtggcaagggagagaaaccttaatttctgtaattctttaccaagaactccttgctttgtctttaaaagtgggttaagctaattgtcttgccagggattattggagagagtcaatggtgggtgtgttaagagcctggaagcaaaatgtgagtactgtccccggaaggagagaggtgggataaccactgggctgcttcagggtcttgctgcaatctctttaacatccacaggtcattccgaaaatcagagtcagcatgcagcatggaaaccacttcacaacacttgttttatttcccctttttttggtccattgctgaaaaatgcatgaaaatcttgtaaactataatgtaagagggccccaaatcatggtgattttgtacctcttaattcaagaggtaagagtgagcccaacaagggcagctcgagagtggaaggcgggaggccccatttattttcttgtaatggctccagcctaagttgccttttatccacttaggcccacacgataagttcactctggaaatctcttcagcgtggctgcgtgcagatgtaatcggacctgctctgggtcgtcctaattgcaaacacatttctctccctctgcggccattcctaagcaggcagtggtcagagccttgccagggttttctggcatcttc

SEQ ID NO: 221203 - DNA, 792 bp, Homo sapiens
tctgggtgacatagggagacccgcctctacaaaaaatacaaaaactagttggatgtggtggcatgcacttgtagtcccagctactcgggatcctgaggcaggagaatcacttgaacccagcaggcaaggttgcagtgagctgagatcgctccactacactccagcctgggcaacaagagcgaaactccgtctccaaaaaaagcttatttccagccctctgatccagtctcagatttttatcaaagcagatccctaagggccaatgcagggagactcaacgcttgctcttagagctttgttctttgcatacctctcgggcagtggagacacggcggcccttgcctggatcattctgatcaagatggctacagatacataagcattgatcagaagtccagcctaaggccttcatgatacagcgtgcacagctgtcagtgacagagcccactgtggtggccaaaacttggcatttttaggcacggtgtcttcatatagtgagaagcagaacattttctatattcatgaaaatagcggatttttttctgacaggcctcacaagcttggacacagaaggggatatatgttgtctccccgtaaaccctgcttcaggagccaggcagctcacactgaccctgtaaaccacacagctctgtctgacgcagcaccctttttggaaaggtgttctctatgttcagcagtcccttcccatgaccgtcagagtctgtgcatctgtttccattggtaatcaaaggttgctggatttaacactgactgtatttgtcattgccccca

SEQ ID NO: 221204 - DNA, 102 bp, Homo sapiens
gaaggtaaacttctttatttcagcatccaaaatatttttaataagagggtaggctccacggtttgtttttgtatcctcggctggcccttctgtcgtcttctc

SEQ ID NO: 221205 - DNA, 319 bp, Homo sapiens
tacttgggaggctgagacaggagaatcacttgaacccaggaggtagaagttgcagtgagctgagatcatgccacttcagcctgggcaacagagtgaaattctgtctcaaaaaaaaaaaaaagaaaacaaaaaaaaaaagaaagaaaaagtttgggaatcaaaatatcaaaatatatacaagttgtagagaaagggaaaataaatctgagttattcattgatctttgctagtgtaaagcttaatctcctgcccacagcttactcatatgtaccctatgcactgacttggccttactcaactgagacttcttttaggattc

SEQ ID NO: 221206 - DNA, 437 bp, Homo sapiens
taatctgcatgagcacaggtaccaaagcatccaaataacatgatactatgtgttgttggaactgatcatttatcgtaagtagaagttttaactgaaacaaattatcagtggctaattgtctatttggcagagctcatggccaacattattttggctgctcttgattaggaagtggaccacaggacaccaagggattcttaattgattgttattaacagtcagtggaatgtgtttaataatgaataaaactggactagacggacattctgatttaaaaaatgctgaaaagaattagagttcaaaacatctcaaatatggttcagctatagatctatataactttctttcaatcctacatttcaaatgccttgggagaaaggaaactgatttttgaagtgaaagctgaaaatatttgtttgggaaagcagtagttacat

SEQ ID NO: 221207 - DNA, 423 bp, Homo sapiens
ttagacttctttgtctgggatcactagggggccatatgtgagaaatatgaaagaagcaggttggaaatgcctaatgaaggaaagagaaaatgggaaagaaaatagaagaaaaagccattatgtcatgcccactaaacaggatgccagaacacaaatccagggatcaatggacaagagagggaaggaaagaaactaaaactgaagacctttattcttgccttacaaggggccacaagaggtatctgttaaatatgaattctgttgggctgggcaaggtggctcacacctgtaatcccagcattttgggaggctgaggtgggcgaatcacaaggtcaagagtttgagaccagcctggccaacgtggtgaaaccccgtctctactgcacaatgtgcacatgtaccctaaaacttagagtataatta

SEQ ID NO: 221208 - DNA, 242 bp, Homo sapiens
acatgatacaatcgagccggtacccgcactgtgcaacctgggttctttggacaggaatcagaatatttgctgttattgtatgaagcccttggcatgacacctggcacatggtaggtagctaataattggggcttctattgctgttgcctggcacatagtgtgtgacatatagatttttttttttttttttttttttttttttttttttttttttggggtggggggagaaaaaaccccggggg

SEQ ID NO: 221209 - DNA, 462 bp, Homo sapiens
atgcacagaaggctgcagttctcatgctctttgaggacccgtggctgtgggaggcatttgtgtaatgatgctcttgggggatgagggcaccattggaagcatctcccggttgacacagcacacagggacaggtgttcttcctgcaggggcgggggcgggggtgcctgcttaagctccccaacttcccagaatccaaacagctgataagagtcctgccctggggttgacacggatgctgaaagatgttggctcttgggtgggagacagccgacagccacactccctgcctcctaggtagcctgtctgcaggagagaaggaggccaaagagaaacagacccaaaaatgggggtgggagagtgacctgatgacactgtttgagcacctggatgtagccatgcctgacctccaccccattcttcctggtgtcctgagctagtaaatccccttttttagctgaagaa

SEQ ID NO: 221210 - DNA, 706 bp, Homo sapiens
gaaaaaaactttttacttctttcttttcaatttttatgcctgtgatttctcttttttttttctttttgccttatggtattgtctaggccttcaaacaccattttgaatagaagtggtaagagtgcaatgagataaacataaatgcataacaatggttttttcttcctctgctttctgagtttgtataaattgatgaattgtttcttttaccaatatgaaatgtcttttatctccagtaataatactgtctcaaagtctgcttcatctaacatttatagcttctccagctttcttatagtgtttacatgctatattttttcttttaacataaatttcctttataacatacttttaccttttacttttaatgtaaatctctgtctcttaaatagcatgtagtttggtgctgccttttctttttttaacttagtttctgctttttaagtagggtgtttagtccattaatatttacagttatttatatggttaggtttatatttttatcttgctggtattttttttctccccttttttggcattcttttggattgtgtttttagcccataaatctttggttctttcactatatacctttgcattagttttttagtggttcctctagggattacaatatacattgttaacttttcacagtgttccaagaattaatattacagaaataaatgtttatatttgacaactatga

SEQ ID NO: 221211 - DNA, 713 bp, Homo sapiens
aattggtagtggctttgaggaagataatgtccaatctctggcagaggctagggaaaggggtaacttgaaaaggtgaaaaggtgtgactttcattattctgtcagtaaaactgagtttccagcacagtctgtaggtccaaaataaaccccctcttcatccaatcttctgttgtgtctgccctaagaagggtcttgtggaagagagaagatgagcacacgaccgaagggcagcacacagctgctgctcataatgtggagagttgcagtgcacgtttgctgggcacattacatccattatctggtttaatacaatgatgaaatttggggtgagtactgttattgtctccatttcacagacaagggaatagagattagagtggtgaaataatttgctcaagatcacgtagctagtaagtggtgaagtcaggatttgaacacaggtttcaaaacaggctggaggcctgtttgtgacctgagggccaaacttctattgtggggtgaggataatctatcctgcaaaggaaaatttggggccttgagggcctcactgggactcaggagagagctcttagatgggctctgttagctgattttaaagagcctaaagtacttgctgtgaccgatttctctttctgcgatcagcagcttcagagcatagcacgcttcagctgctcttaaaaggttactgaaaagtgggtgtgaggtattgacatt

SEQ ID NO: 221212 - DNA, 563 bp, Homo sapiens
agtgagccatgattgcaccactgcactccagcctgggcaacaaagaaccaccctgtctcaaagaatgaataagtaaaaattcactttaatttaatttaaaaactactgtttattatttttagatcctagaataagtaatataaggccggtaattttgttcgttgaacacttaaaagcaaaagctcattagttaaaataaaataccattttggcttagagccatgtttggagataatttttttttgtaacatatccaattaattcaatgtttacttgtatatatggattgtctaattaaacttggtacaattgataaatgtatattttatcagaaaattgcccaattcatccaacttatcaaactaattagaattaggcattttaatcttccatgaccatctttatcaaatgattatgttaaaaagtgtagttgttaggagcacaggttttggagtaagggtgagaggactcttctttgaaattccagcactgatacataagaagctttgctgtaatggcaagtgaaacccccaatttcagtgacctcatttattaaaaaaaaa

SEQ ID NO: 221213 - DNA, 584 bp, Homo sapiens
agtgttcctcagggctgaagtacagcatggagctagacgaaatggatgaggtcaaattcttctcacaggaaaaagacttggacgggaaaatccagaatgcaccaaattctcatagtgcacagcatgtgaagatggggtatggagcatggtacctcaagcctaagttggggaaaaagctaagaagtgatgaacctttgattgaccccaagctcgtacttgaaaagcctgatgaacccgacattcttgacggtctttatggaccaatcgcctttaaggatttcattctaagcaagggctatgaaatgcctggcatcattcaaaggctgtttgccaggaggggatggacttatgactctgttaagactcctattcaacgtgcaatgcaagtttacaagtacaaagaagacgtcacagatgcatcggaagaagattagatggttttgaatttactagttaattgggtatttcttgctctcattttaaacatcagtcagaatttatgatgactggccccaggaatgtacaacgttggcaacatctgtaaattcaatacctaatgtttataaatatttcttaatgaaatg

SEQ ID NO: 221214 - DNA, 506 bp, Homo sapiens
cctttgttacaaactaagagttctgttctgatagtacttggtatcactgcttctctgtgaaaatattcaacctaatttcagatgagatcgggtgtgttcagggtggtatggctgtagactattcaacctaatttcaaaaaatttcacctgatccagttttaaagcaaccaatggaataattgatttagtatcaattttatttaaagatgaacccttaaggccgggcgcggtggctcacgcctgtggtcccagcactttgagaggccgaggcggcagatcatgaggtcaggagatcgagaccatcctggctaacacggtgaaaccccgtctctactaaaaatacaaaaaaaaaaaattagccgggcgtggtggcaggctcctgtggtctcagctactccggaggctgaggcaggagaatggcgtgaacccggtaggcggagctcgcggtgagccgagatcgcgccactgcactcgagcctggaggacagagtgagatgagactccgt

SEQ ID NO: 221215 - DNA, 454 bp, Homo sapiens
gtgtgtgggggctgggcacagtggttcctgcctgtcaatccagcactttgggaggccaaggagtgaggctcactttagctcaggagttggagactggcctaggcagcatagtgaggacctatttctacaaaatagtaataataataataataatggtaataataataataaagctgcatggcccccaaagggtcgtgtccagctctggataaacttgtctggttagttcaggtttcatggcgcggcatagaggaccccgaccgttcatcactcattgctgtgtccccagttggctgtggcctgaaactgcctggtttcagtcaacactgttgccgtcttgcatcagccattcagggggtgggtacccatgggagggcctcagccaggacaaaggtccacttctgtctaatcgtgtaactttaaaataaagcttttgtgcagggacagagtaaac

SEQ ID NO: 221216 - DNA, 228 bp, Homo sapiens
tgagaaagcagagacagcaaaggtagctctgtcaaactggtgccattgttggtgattaactggatgactctgtctccaatatgaactcactcatatacacacttattgcttagaagacaaggcaagcaaacctgcccaattttacagaggagaacaatttcacttataagctaaagttaacactcctgatactcctggttcatggtgctccaatatttgttccacttt

SEQ ID NO: 221217 - DNA, 497 bp, Homo sapiens
cgggggggggacggagaggattctacaaaggcggatttcactttctaagtagcattatattggtctacattaataattttcccagcaggccttccaagattttactttgaacaatcacagtctttgtttctcagatcctcttacatgtgacatttggtcaaagttttaaaatcagcagctaacggaggaggagaaaagtactgttcactaaggcactgcacaaagccataccacagcacgtttcagggttccaacaagctggatcacattttccagctaaacactatttcaatgttgtgttacattttctgtacactgtacactatgttttattaacactatacttcatcacactgatcaggaaaacatcttctaaacatcattaaaataagccttaagaaaattcttcggttctttcccacaggtgtgcattttttaaagtatcaggtacagaacaattaattttattcctattcaaggtctttgtatacagcctt

SEQ ID NO: 221218 - DNA, 578 bp, Homo sapiens
tatcttactgaatcctattgtgttctcagttgaatccctgaatacaatgcaatcatttgccagtgataattttatttccttctaatctttataattttctcttccataactgcatttgctggtacttctactatgaaattaagtagcaatggtaatagtaggcatccttgtcatcttcttctctttattagaagtgcttatattattaatctagggatctcaaaaaaatcaaaattcagtataaaaaataaaaaatggagagctagtgagcaactaccagctctattctccacaggtgccacatgttggaccatctgtctacccatgcttacatcaagaaccaaggaagttttgaaaaaaattacagaacataaacaagctttccaaacaatttaagaaaaagacaaaacataattaatactgacatcttaaaattctttaagtatttatgagaaatgctatctacgtttcccttttctaaaagcataatatacagtatcacgttatacaagatacacctgatgcatgatacctaccatctaactaacttatttttctttaaaaacttcactgaatag

SEQ ID NO: 221219 - DNA, 665 bp, Homo sapiens
gtctgcaccacaacagagggtgagacatgtcatgggggtactcaggttactggaaagatttgctgcctagagtagaaaaaggtagatttctattgctcaccccaaatcatgtataaagagcttctgattcacttcctcatgcatcttaacttttacttggcttctcatatatacatatagattctagaatgagtttccttgacatggggacataagtattctaggtattgaaaaggagcatcttcaattgtagctataaatcatctttctggtctctatcttgatttcttattagttttcttggcttgaattatgacttcacaggatatgaatacccagggataaagggccactaaatcaaggtgccagacttgcaaaactgacacctagatccctcaatagaggaaagagaagctgtttgtaatgaccgaggacaaattgaatggtttccctcaggccaaaatttctcctaaggttgatcacctcttctcttcttgtcctaattctccttgcactctcatccaaataggagatgcatcattcctaaaatgtatataaggccaacataatgtatttttgtttttattccatttttgtttttgctctataaatctccatcagtcaagtctgtctgagaccctagggcaatgtagaaaacattcata

SEQ ID NO: 221220 - DNA, 606 bp, Homo sapiens
aagctaagcaagacttgttctcttaagtgtcttacatttgtttttgtgtgtccaccaagggttataatagttactatcttgctatttatatttgaactattggtctattcagttctctcctagccattttcccctaaatgcttttgtcctaacatcttctattaggtgtggtttaagtcagagtcagtctctgtctttctctctcagtcatcacactggactttgagtggtacaagggaatattttcaatttattttctctatgtccaagtgttttcctctaattaaggtgataattaacagtggaatggttaaaaatagtgatggaccaggcacagtggctcatgcctgtaatcccagcactttgggaggctgagaggaaggacgatcacttaaggccaggagttcaggactagcctgggcaacagagtgagactccatttcaacaacaaaattaagtgagtttgggggctcatgcctgtagtcctagctccttgggaggctgaggtgggaggattgcctgagctcaagagcttgaggttacactgggttgattgtgctactgcactccagcctgggttacagagcaagaccttgtctcaaaaaa

SEQ ID NO: 221221 - DNA, 456 bp, Homo sapiens
ctatggactggacagttgggtaggaaccagaaggccaataggaaggagggcaaaggtgcccaactgaagggtaagcatggcagtgagtatggtatgcctagaataaagatggttgggattagaattgggtgacagtgattagtagtttaattcagaagtatctcttcccaactcaaaagtctcactttgggctgaaagtacagaggaagaaggtagacttttaagaagtctgaataagcccccaacttctggagtccctttctcaattcctgttgggagtgggaaatattataaattactctgggcattaaaaatagcttagtttaacctcgattgtggagttaaaaaataacaaagattgcattggtcaaatctggacaatttgagcattcaaaagaataacaacaataagttacaacatatttaatataaagaagaatccacgaagagtgatat

SEQ ID NO: 221222 - DNA, 531 bp, Homo sapiens
agggatccatttcttccagattctgttatctgaccttaaccttggaaaatcctctagtgccatcctggcagttaaggcccttgagcagccgtcactgccacaggctacggaggtaaaggaagcagcaaaacaaatcttgaaaaaggcagcttgctcctgatggagctgcatgagttacaaggtttttaactgcaagaattgttggagccacttctggtaatatatgaatttcataaaaatgttttccaaggtgcacagaaacatctgaggactttaattaagccctccaccatcgggaatggaacttttatgtacatggactttggattttctttttctctttttgagcactgctggcaaggaagcaagtaccaagcgaggattccaattgagttctttgacacggaacctttcttttccttttttggaaaatggaagtaatgtactagtacaggcagtctgtttgggaatatgagcgtttatattaatggcattaaactcagtatttataccacaaggcacctccttccc

SEQ ID NO: 221223 - DNA, 514 bp, Homo sapiens
ttcacattttatttatgcaagtggtgtcacaaaaattctctttgaatcattaccactacctggagcttcaaagggtagtaatatggctctcaaaatttcagtgcaaatttcagttgtttcttcacatcatatagtttctgatttcataatttaaatatcacaaaattagaaagttctaccctttttttcctctgtcacttttcatgtgatctgattttaagtaattggaacaaactgtatctaatttcatgcagcataattgctaggcagcctcaagctatggaggctcagcactctgtctccattaagaaattttcagttgttcgggatatatatatatttttttaatacaaatgaatgagcctggacaaattaaatgtcacaataatctggccattgttaagaggagaaaaaggtatcaacaacattcctaaacccttgtctatggtaggtcaactgaatgtatttctttttctcatagttcttggccttagtgtcccacaaactttcaatt

SEQ ID NO: 221224 - DNA, 450 bp, Homo sapiens
tcaggcccattccttccccaacccggtacctccatgttgggtgggtgagggaatgagtggctgtaaagtatattcattgtatgaataaagtgggtcagggttcattgtgaacatttaaaggaaaccttttctggtatgaagtagtcctaggatgtacttaggtccattgtgttttgtcgttgttgttgttgttgttgtttttgagacggattttcgcttttgtcgccgagactggaatgcaatggcgcagtcttggctcactgcaacctccgcctcctggattcaagcaattctcctgcctcagcctcctgagtaactgaactacagtcacgcgccaccatgccagactaacttttatatttttagtagaggcggggtttcaccatgttggccagtctagtctcaaactcctgacctcaggtgatcaccagcctcggcctcccaaagtgc

SEQ ID NO: 221225 - DNA, 479 bp, Homo sapiens
agcttttaataaactcataagtatactgggattgtagaaatctttgtaactcttgtccaccttggacatttctgcagcacagtgcacattttgcagcacaattatattgaatttcataataaaagttacataatatcctgagctgctttagcttaaactacatgcagtggtttatgataattattgtacttcattatatcccagttcttttaaagttttaagttcatgtgtatgtatatatatgacaggctgggtcctctaggaggcagattctgagatttgcattcaggaggttcattgggagtgctgggctgtgttatggtcaaaaggcttcagccagccctgcagagaactctgaggctagagtggtccttcagagttacctcaacttggggtgagggggatagacctctatacctttattagttatctctattagtttggggtaatttgcaaacagtgtgcaacagattaccccc

SEQ ID NO: 221226 - DNA, 348 bp, Homo sapiens
ttgtgattatccctcctccattcgatttattcacaaagtgagtgagactgaatggctggtttctagccagaggggacttcaatatttgagtgagggagacaggaaaagacccaaaaatcgttagtgtccccaccctaggacactggcatatccgtgacctctctgagtgctctgagaaaaatgagggaggttggtgggcacagtggcagacaggtggctgctggagtctccctcttcccacgggaccctcctgtccctggcaccacaatctcacctcctttctcacttttcagttgcaaggagggatgcatggtttttttagcaaataaaatataagacatctggtta

SEQ ID NO: 221227 - DNA, 366 bp, Homo sapiens
ggaggagaggcctggtgggagtgactggatcacaggggcaggtttcccccttgctgttctcatgatagcgagtgagttctcactagacctggttgtttaaaagagtgtagcccttctcttttcgatctcttcctcctgctccagccatgtaggacgtgcctacttccccttcaccttctgccatgattgaaattttcctgaggcctcccagccatgctacctgtccagcctgcagaactgtgagccaattaaacttcttttctttataaattacccagtctcaggtaattctttatagcagcatgagaatggaataatacgacaggcctgcacgaaggagctccagattcagctctacctttcatc

SEQ ID NO: 221228 - DNA, 460 bp, Homo sapiens
gacaccctagatcccaagatctccaaggatttggtggcatacccactccagcacacagaagcatgaggttcatgactctcctcttcctgacagctctggcaggagccctggtctgtgcctatgatccagaggccgcctctgccccaggatcggggaacccttgccatgaagcatcagcagctcaaaaggaaaatgcaggtgaagacccagggttagccagacaggcaccaaagccaaggaagcagagatccagccttctggaaaaaggcctagacggagcaaaaaaagctgtggggggactcggaaaactaggaaaagatgcagtcgaagatctagaaagcgtgggtaaaggagccgtccatgacgttaaagacgtccttgactcagtactatagctgtaaggagaagctgagaaatgatacccaggagcagcaggctttacgtcttcagcctaaaacct

SEQ ID NO: 221229 - DNA, 541 bp, Homo sapiens
cagatagatgagggctattggaccatgagaaagtaaaggattcaatgaactcagaaggtcttaatgaaataacaattgtttctgaggggcctttgaacaagtaagctgctgaaaggaaaaatgctgtcatcagaaaacaggatgtttaaatgtatgcatttggaggctgtgtactgtctgaagataaggctcgagatgttcatggcagtgtgtggctggggctgggggataagaaaagttcataggtgatgaggaagcacataaactgaggagccactgtgtggatgctcgagttgctgaggatgctgaatggagttgggtagatagcggaccagctgctgaaatactcaacactgagggagaggttgacagatgacagcaacaaggaggagaagaagaggagggtgacaaagttagatggtataaactcaaagaaacagaggttttttgtttttgtttttttttgagacagaatcttgctctgtcacccaggcttgtctcaaactcctggcctcaagtgatctgccactttggcctccca

SEQ ID NO: 221230 - DNA, 275 bp, Homo sapiens
ctgtcacttcccatgagaatttttcattccactgccctagttttaatctaagcaggtcactgagtcttttatacacaaagctcaccaagtgtctaacttactcaaaacacctagaactagctgggtgtggtggagtgtgcctgtggtcctagctaccaggaaggctgagataggaagacagcttgagcccaccttgagtttggggctgcggtgtgccatgatcacagctgtgaacagccactgcactgtagccagggcaacacagagcctgtcta

SEQ ID NO: 221231 - DNA, 173 bp, Homo sapiens
tctgagcatgtaactgtctcacaagactatgattataaaaacagtatttataaagcagtgaatactttatcatgtatttataaagcagtgaatactttatcaagtattccatatactttatagaagtacacttactgccattttacagatttgaaaataaactcagggccagg

SEQ ID NO: 221232 - DNA, 405 bp, Homo sapiens
caaacacagtttatgaatgtcatatctacattttgatgtactcactgtaaagttgtaataccaataataacggtctttccattacagatatttaaataaattctttccatgtgaagcagaagtaattattatcaatatttgggtgaaccagaatgctggtgacagctccaacagctgcattcagccttggctcagtaacaaaacacagaaagttccccagtgagaaacaaggcagggtttgataaattccattcagctcttcagttacagattattaaaagatgaattataaaattggcacaataatagccatgcacattctttctggccagcatcatccccaaggctctgataatcacagtggaatctttaaatcagaggacaattcaggtctaactcaaacag

SEQ ID NO: 221233 - DNA, 134 bp, Homo sapiens
acaaagtttattaatttattgaatctgtgatttttacatccaatctacagaaataaaaactggtaaaatcaatgggttccttcaggtatagaaactagaaatggtcaactcaatgcctctaaatttgtgctatg

SEQ ID NO: 221234 - DNA, 341 bp, Homo sapiens
cctactcaaatcaatcaacacacacattaaaaaaaaaaaaaaaaaattcctctctggggtcctagcttccaagaagacaaagaaaggaaagaacatggcatgccaaaaagggctgtggctatgtgcagctcactcactgcatgaactgtgcctgaggcatgcccaaggacaaggctattaagaagtttctcattcaaggccgggcgtggtggctcacatctgtaatcccagcactttcatccagatggtacattatatctccaccacttccctttggtgagtcttacaagattttctgttgtgcgtttaggcattcctccagttgattgggttgacgtcag

SEQ ID NO: 221235 - DNA, 462 bp, Homo sapiens
caaatacctactgtctcttctgtcatctggaagtccccaccaaattgggaagatggtgctacagctgccaggttcagaaccacagccgcactgtccccatccgaaggcctccatggctgccactgtcctgctgtgatctccagcaaaataggttctccatgactagtcagtagagacagaggatattgctgcagaataacctaacacctccctggccatgttgccaggggaaatagttaaagtacagaatatactactttccctttcatacctagctgcaagggaacctggaatattactccttaattttccagatcctgcataacagaaaggcttatggcgaggaggttggactggatgatggggaccgatttaccatgtctacttagtaaacagatcaaatgataagaaatagacttcagttctgtgttatggccatgcaaggtagactggcagagaagc

SEQ ID NO: 221236 - DNA, 589 bp, Homo sapiens
tgcacgagagtatatttaaatcaaagcaagaaatcccatttccaaatggcaataaagcatgtgttacatagaatcagtgcatgaaagtgttttagtagcccagattagattgtaccctggcgaataagcaagagttctttttcattttcatcttgcaattcaactgggtatttgggttctttttctattcactcatgtcagatagagacatgcatgttgtaaattattttgtcagaatgaaagcctggcagattaaatgctttcttctcttcttgctttacttgatatcaatctcttgttcatttcttgataatatgtttggttatttttgttttcattgcttttagtgtcagagatggctttggattccccgttctgtgtgctgctgtctggctcctgaacccagctgtagaggtgtgtgtcaatcccaactggtgaagtactgagaagaagctacacaaaaggcagcaaagtattagtaagtgtacctctgacattttaaccacctctgacttttccatggaatggacaagtagtagtctctgtcagagctacattttaaaggagaaaaagaaacgtgaagtcatga

SEQ ID NO: 221237 - DNA, 1197 bp, Homo sapiens
ctgccatctcggctcactgcaccctccctgcctgattctcctgcctcagcctgctgagtgcctgcgattgcaggtgcacgccgtctacgcctggacaacatagctactaaaaatacaaaaaatgagctaagcatggtggtacatgctactcccgaggctgaggtgggaagatcacttgagcttggggaggtcaaggctgcagtgagccgtgatcatgccactgcactccagcctaggtgaccctgtctcaaaaaaagaaaaatgtggtatatacatagaatattattctgcctttaaaaagaaaattctggctctccctctcactctccctctccccacggtctccctctccctctccccacggtctccctctccctctctttccatggtctccagctcctaaccgcgagtgatctgccagcctcggcctcccgaggtgccgggattgcagatggagtctcgttcactcagtgctcaatgttgcccaggctggagtgcagtggcgtgatctcggctagctacaacctccacctcccagccgcctgccttggcctcccaaagtgccgagattgcagcctctgcccggctgccaccccgtctgggaagtgaggagcgtctctgcctggccgcccatcgtctgggatgtgaggagcccctctgcccgggctgcccagtctgggaagtgaggagcgccttttcccggctgccatcccgtctaggaagtgaggagcgtctcggcccggccacccatcgtctgagatgaggggagcgcctctgccccgccgccccgtctgggatgtgaggagcgcctctgcctggccgcgaccccgtctgggaggtgaggagcgtctctgcccagccgccctgtctgagaagtgaggagcccctccgcctggcagctgccctgtctgagaagtgaggagccccgccgcccagcagctgccccttctgagaatgtcagagatggctttggattccccgttctgtgtgctgctgtctggctcctgaacccagctgtagaggtgtgtgtcaatcccaactggtgaagtactgagaagaagctacacaaaaggcagcaaagtattagtaagtgtacctctgacattttaaccacctctgacttttccatggaatggacaagtagtagtctctgtcagagctacattttaaaggagaaaaagaaacgtgaagtcatga

SEQ ID NO: 221238 - DNA, 521 bp, Homo sapiens
gcacgaggccatcaaaaggcgggtaatactttacaaaaaacaagtattaattaaagtaatatcacaacgaatgcctattgaataacttatatccacattacaaagatattatatggttgcgattaatgtgattgcaatacattttgtaaaaattaataatgactaaccctttaaaatatttaggaagcagatatttgtttatatttgctaaatagctatgccaactctttagcttttgtgagtgacttctagcataggaacagtgatggataatatgaagcactatatataataactcatcggccgggcgcggtggctcacgcctgtaatcccagcactttgggaggccgaggcgggcggatcacgaggtcaggagatcgacaccatcctggctaacacggtgaaaccctgtctctactaaaaacacaaaaaattagccgggcgtggtggtgggcgcctgtagtcccactactcaggaggcagagcttgcagtgagccaagattgcaccactgcactccag

SEQ ID NO: 221239 - DNA, 720 bp, Homo sapiens
aggctaaggcaggagaatcgcttgaacctgggaagcggaggttgcagtgagccgagatcgcaccactgcactccgatctggcaacagagtgagactccatctcaaaaaaaaaatgtttatagcactatttgatgtatgttttcagtgcttaacactatgccagaggatggaaagaatgggtaacctgtgaattttcagagaagaaacaaggaaattgaatttttggaatacaagttggctctttccttgtgtacatgcagcctaggatagtggaatgagcaaaatattaaaaatctagtcctggcaccactggttatggtaaggggatttttgtataagtcaattagttgttgaatcattttctcatctgtaaattgaaaatggcactctcccctgagataatgcatgttacttgccatggaaatataagggtcaggattctatgaattaatttttaagtagcttagtatcattcaatagtattctaaaataccaggttacttatactacctattcatgtatgacatttgtgttagtataccttctattcatcaaaggggctatgagctagacctgcagattaacacgcagatgtggccttaaaaaaaatatcagctaatctgggatccagagaagtaggtgaaatttgaacaatgaaaatacattaacagcttctaaagatttatagcagtattatgaccagcatggtagtgatgaaat

SEQ ID NO: 221240 - DNA, 789 bp, Homo sapiens
cagttccttgtcactctcactgcagcacgctttttctctaccttagctcagcccccaccatgagggcaccagagctgccttgtcttgcaaacacccgctctctgacctccaccttcgactctttccactcccttagtcttcaacccttggaccaagccagtccgttgaacccatcacttgcgtaccatcctgcctctcccatcttgccttctctccttacctaggttagagctatcattttaatcttgttcctacaaacactttcagttccctggcccctgtctcccatcatctggcacaaaacccatctccactggcttgggaaccattgagtgtggcaggagagaaatcacataaccgatgccatattttccctgtaaattcttagccacaaatctcaaatgagcattcattttccataatccccagcaattccactactggttagtaacatttccactctcacctcgatatctccccactgttactctcaccttcgggcctggccttgcacttcactgaaaagatagacttcatcctgcaggacaccttgtgttcccacctccaaatcccccagccttctgcacctgtgcctgtgtcctcatcgcctccccacctgcgacagtggcagaacagtccctgttcatggggacccccacgtctgctccagatcccattctccctcacctctgaaagcatttgctccttcatctgtcacctctctctccagtgtcattacggagagtcctctgtcttaacacaaagcaaccctctcgaccccacttccct

SEQ ID NO: 221241 - DNA, 537 bp, Homo sapiens
  misc_feature (529)..(529): n is a, c, g, or t
cagttccttgtcactctcactgcagcacgctttttctctaccttagctcagcccccaccatgagggcaccagagctgccttgtcttgcaaacacccgctctctgacctccaccttcgactctttccactcccttagtcttcaacccttggaccaagccagtccgttgaacccatcacttgcgtaccatcctgcctctcccatcttgccttctctccttacctaggttagagctatcattttaatcttgttcctacaaacactttcagttccctggcccctgtctcccatcatctggcacaaaacccatctccactggcttgggaaccattgagtgtggcaggagagaaatcacataaccgatgccatattttccctgtaaattcttagccacaaatctcaaatgagcattcattttccataatccccagcaattccactactggttagtaacatttccactctcacctcgatatctcccatcttgccttctctccttacctaggttagagctatcattttaatcttgtngggagctt

SEQ ID NO: 221242 - DNA, 614 bp, Homo sapiens
gaataaactcaaatacacggtggtgccatttactggaagaaaaaagcgggtgcgctcttgactttcccaggattcagttacctaaaaatcagactgtattttcatttttacagctaataaaaaaagttcatcatttcttactaactataaattattataggacctaaaatttattcacggtatcttcttatgaattttcatacctgctaaatctcaccaatccagaattgtcttcccctggatatatgttttgttacctcatcatctttgagatccttttatatgtcatcttctcagtgaagacactgaccactattttaagtcatattccactctctattcccttaccctgcttaatttttctccatagagtggatcacctaactcataatgtattttacttatcaccctctactagaagaataacaagatctatcagcagggctttttgttttgttgtttttttccactgttagatctctagtatctacaacagtgcctagagctggacaaaattcaatactttttaaatggatagacagatggatgaaaataattttcagaagagttttttgaaagacgtagtaccctttcaccagacttttcatagaacc

SEQ ID NO: 221243 - DNA, 780 bp, Homo sapiens
ggttttggggttgcttagttttattatgttattgattttaggagtttttagtggaaagaaccagggactatatattttggagggaaaaaaaaatcatcattgatttttttttttaacctagctgaagttaagatagtatttttatttaaattctgattttacatttgtaactgttgtctttcctactgaaaatcattcttaagaacaatattataattatttgctatatcctataatacataaaaatagtttcaaaataataaaactagaattactaacaataagcctactgaatgagatttaaatttctgggcagctttctttgatattaatatattccactatgtatgcagtcaagatgtatatttctaaaatatcttgaaatacttgtttctctgtgtgtttgcgtcaccaaattataatgcagttaggtttgtttcaatttcttttcaattttcagggattgctttttaaatttttacttttgaatgtgtaaacatttatgtaattgcaaaatcaaaactattcattatttatattcagagaagttgtgttttcattcctgtcccctttattctatcctatccttacctcccctataggtaattgattttaaatgtttagagttatttttagcaatataagtagtatggatattatatacatattctctcttatgtactagcaccttctttttttctcttaacagtttaaactgattgcattttaagcggtattatatgtttacctagtaggactggaaatcttgaataattagat

SEQ ID NO: 221244 - DNA, 515 bp, Homo sapiens
ggcatggtggctcacacctgtaatcccagcactatgggatgctgaggtgggaggatcgcttgagcctaaggagttcaaaatcagcctggacgacatagtgagacaccccatctaaagagagagagagaatgggtcctccctcccctccctttcgagaaaagcctgacaaatttatttgatcatagttttacatgatgcatcatgtaaaaccagaatgaacacccaaagataccaaaatcaaaaaaaaaacctgtctatttttatgcttaggttctgtgaagcagggacagccatgtagaaatgtgattggaaaaaagtgtatgagctgatgggaatagactgagtggggaaatccagtcaggcctgactgctcagagtcttcttttttaaaaaatttatttataaagaaaataagtgtgtttcttacagttttggaggctgagaagtccaaggtcaaagggctgcagctggtgagggtcttgttgctatgctgtaatgtggccgaagccaggaca

SEQ ID NO: 221245 - DNA, 314 bp, Homo sapiens
ttccatgtataaacaaacagggcatgcagataagtaatggggggctcaaatgcaacaacagttttgcagtccctggcccccacaaagcatctgcaaggcaagggtagaaattagaaggtgaaggattaaattatctcaaagacattattgctgcacatacgcaaacctgaccgttgcatggatttgtcttgtgcttggcaggatctagatgtcctgttccatgactaagttatcatgtcatgggagacttcaagcggtggatgccctagtggcttttaactgccccacccatgcctgcaaatggcagccttgat

SEQ ID NO: 221246 - DNA, 459 bp, Homo sapiens
gataactcggagcaattaatacttttctgaacttgtttcctcgtctttgataaggacagtagtacctatgggccaaattttggaggctacagttagatgcctcccacaaacttcattaaaagacaagagaacacatgtattatgtggggacactcagacccccagaattggcatgaatgttacttggaactgaagacatttgagagccaacagatgcagaaagatgccgtttcaaagcttcccttatgcgactaacagcagaaatttctgggagtgaagctgccgtaaatctcctctctaggggagttttagtggccagaaaaaaagacaaagaccacttgcacctgcaaaaacaaacattcttatctcccttttgttcccccagaaacctatttgttcttcccatggaaggctttttctccctcctcttcccctattaaatggtatatataaagtaga

SEQ ID NO: 221247 - DNA, 386 bp, Homo sapiens
ctagattgtgccattgcactccagcctgggcaacaagagcgaaactctgtctcaaaaaaaaaaagtaatgaaaaaggtaagatcatcaattggctagaaataataacattaatgaatattcatggaatgtttaccatattcctaggcatacagagctttctggtagacattttaaaattgtctttgcagagcctggccaacgtggcgaaaccctgtctctactaaaatacaaaaaactagctggatgtggtggtgcacacttgtcatcccagctagtggggtggctgaggcatgagaatcacttgaattcgggaggtggaggctgcagtgagcccaaatcgtgccactgtactccagcctgggtgacagagcgagaccctgtctca

SEQ ID NO: 221248 - DNA, 318 bp, Homo sapiens
tcttttacttcgcaggaaggatgacagaggcaagcctcctgagagttccaggggtcaaggggcctgtgtttcccctaagtacttatttagcattttgttttgcaaaataacaatgaattgatttgaaggcatacaggtggggacatttttacaatgaaaagaagcagcattgcaatttaatgcctaatataaaataagaggtgttggagagaagaagacaaatagcaataagtgttcccattaagtagagtagagcagcattttcttttcttttcttttctataatcccatttgtgggaatgagagggagtgccaaaa

SEQ ID NO: 221249 - DNA, 500 bp, Homo sapiens
ggctggactgcaaagtcctggaatgcttccccccaacccccaacctccacgtcaaacctgtcgttgcaacgaaataaataaaactgacagctggaaaaatgaggggcaagcagaccaaatatgataaacggtctcttgccgtgtattgtattctctacaataaaaccccaagcagatgctaaaaatgtgtgcggctttgtgaggagataggcgtgctctgtgtggccgagattttctgagaaaggtaatttaactgcaatgcacataaaggagagaaaggcagagaagtaatttggaaagtgtacatcaagtgctttttaaaaagttgatattgttggttatttttcttttattaaaatccacagccctgtgggctgctgtcccatccttatcgggctcattcaagaccagcattgacatttctaatttgcaaatttaaagattgtcaggaaatggtttaaacacccagtatgattggggagctttttgactgtgggtga

SEQ ID NO: 221250 - DNA, 1141 bp, Homo sapiens
gggctcacaggataatccacgactgtctcccatcttaagatccttaatcacatctgcaaagtcccttttgccatataaggtaacatattcacaggttccagggattaggatgtagccatcttaggggagccatgtttctgcctgccgcagacagtctggcctcaggttataatgaaatttgcttgtggagggttgtagggagcgaagtgatttagggagtcggggactggaggattattgggacataacagtagctagtacttttgagagtcaagtctatcccagacaccatgtgcctaatctcattgtatcctcagaacaacccctgcaggggtactgttagctgacccctgtttacagaggagggaactatccaaggaaggctttctggaggccaggtgcagtagctcatgcatgtaatcaactttgggaggtcgaggcaagaggatcgcttgaggccaggagttcagaggcaagaggatcacttgagcttgggagactgaggctgccgtgagccatgattgcaccattgcactccagcctgggtgacagagtgtgaccctgtctccaaaaaaaagaaaagagaccagcctgggcaatgtagggagacgcccatctctataaaaataaaataacataattagccagatgtgggtggtatgcacctgtagtcccaggtacaatggaggctgaggtgggaggatcacttgagcccaggagttggaggctgcagtgagctatgattgcaccactgcactccagcctggccaacagagccagactctctcagcaacaacaacaacaacaaacccaaaagaaacaaacaaggaaggctttctggaggaggtcaacatttgagctgcgtcttgaagagattaaagggttttgctagtgagtgggaaagggattccaggcagaggtgttactggtggagggtgtccaggttcttggcattttgagcaaagaattggacaaaacacacgaacaaaacaaggaaagaaagcaacgaaagcaaatatttacagaaaacaaaagtacactccacagggtgggagtgggcttgagcagattgcttacagaattgcctggggtttaaaaaccctctagaggtttcccattggttacttgatgtacaccctat

SEQ ID NO: 221251 - DNA, 515 bp, Homo sapiens
tgcatagaaatacaacttattcctcaagtctcagactccctagcctagaagagaccttcaagaggtcttttaggaatctctgtgactcaagaactgatgtgcctaagggaaattctaacagagaagacactttgccatttgggaaattctcaccttcctatatagttgtgacatggacatattctgctctctttctctgggtttaattgaggggcaaggcaatgtcgatgaagagagctatggttcagatgtatcccctccaaaatttagatgttgaaacttaatggccaatgtgatggtattaagaggtggggtcttcaagaagtgactaaattatgagggcttctcccctcatcatgactgagattaggccctcacaaaagaggacacagtattcaaggtgccatcttggaagcagagactgaatccttacaacaaacctgccacctccttgatcttggacttctcagcctccagaactatgagcaatatatttctgttctttataaattaaa

SEQ ID NO: 221252 - DNA, 317 bp, Homo sapiens
aaaaagtgttctttagtggtggcagcctttttgtcaaataaaattttatcagaatacactcaaaattggtaacaggagagccgttctgggtacagagattgaggggaacctgtgtgtgacctcttgcttcctgacccctcccatcctactccagactcttctgcagaaccccatgttgacccctgctttgaggtggcagagttaacactactcttcgttataagctctcgtctggggcaactcagaagaacgtaagttccatggggaaggtttttgtttgtttctaattgtggtaaaatatatataacataaaatcg

SEQ ID NO: 221253 - DNA, 378 bp, Homo sapiens
ccttgcctagattttttagttgaaacacctacatgtggactctcaatgtggctgcttaggcttcctcacaggatggtgactgggttctaagagcatgagtcccaaaagaatgcagcagaagctgtatcatcttgttcattgagttagcatttgaagtcacacagtggtcactttcactataatcataagcctgctcggattcaagaggaaagaactcaggccctctcatagggaagactatcaaagtcacattttaaaaaagattatgtggggtgggaggtagataatgttgtggacatcattggaaaatactagctgccttatcatgtaattcctcaagcatcttttctaagacagggtctcactctcatccaggct

SEQ ID NO: 221254 - DNA, 714 bp, Homo sapiens
tcagctaggcgcagtggctcatgcctgtaatctcagctaactgagaggcacaggtgggaggatcacttgagcccaggattttgaggttgcagtgagctatgatcacactactgcacttcagtccagatggcaagtgacactccatctctaaaaaacaaaataaataaaaaataaagtatataatcggtgtcatttagtacactcacaatattttgtgaccatttccttaagtcagtttttgacagtatatattttatgttattacaaagctgcctacagtaagcagacattaatgagaacatttgtagaaatttcaagaatttccatcttttttgaaagtccgtaagtttagtaaaatgtcttcattattttttaaggtactttttttcttgggagaaagtgaatgttatagttcttagaacttgtataaagtttctgtcttgaaggtacatatcgacttctttctcttttggtggtgcattttatcgtttacacttaatgattgctatgactcttataaggatgtactgtgtttttattaaacaataatttagtacagtatttctgagaaattcatggatctttctatgaaattgtctgacaaaactgggaattctgagatgatgaaatgaattgtcaaaaatagatgataggtcatggtggcaggcacctgtagtcccggctacttgagagactgatatgggaggatcacgt

SEQ ID NO: 221255 - DNA, 444 bp, Homo sapiens
ttcaagatggattaaagacttaaatgttagacataaaaccataaaaaccctggaagaaaacctaggcaataccattcgggacataggcatgggcaaggacttcatgtctaaaacaccaaaagcaatggcaacaaaagccagaatggacaaatgggatctaattaaactaaagagcttctgcacagcaaaagaaactaccatcagagtgaacaggcaacctacagaatgggagaaaaaatttttgcaagctacttatctgacaaagggctaatatccagaatctacaaagaactcaaatatctacatttttctccctaaaaatacaaaaaataaaaccgaaaacctcacaacaaacaaataaccttgtacatggctttgtaatgcaaaatattttttaattcctttaaaaatatataaataaaatatatgaaataacattgactt

SEQ ID NO: 221256 - DNA, 411 bp, Homo sapiens
cagaaagagagagagagtatttgcaaactgtctgtatagtttggatgtttgtcccctgcacctcatgttgaaatctgatcctcaatgttggacggaagtggagtctaatgggaggtatttgggtcatggagatggattgcttaatgaatggcttaatgccatcctctgtaaatgagtgcattctcactctattagttacggaagagctggttgttaaaaagaacctggcacctccctccccctttttctttgctttcctctcttgccattggatctctgcacatgatagctccccttccatcatgactggaagcagcctgaagtcctcattagaaacagatgctagtgccatacttcttgtacagctggcaaaactgcaagtccaataaacctctttttttaaataaatta

SEQ ID NO: 221257 - DNA, 591 bp, Homo sapiens
atatagatgaatctcaaaaacattatgctgagtgaaagaagccagatcccccatccctaaactacataatgtgtgattctactcatataagattcgaaatggggcaaaacaatgttccacggtgatgaaaatcagatcagtggctatttctggaggaacagactgggaaggggtggagacactctccagctcaatggaagtgctcaccatttgatgtgtacgtgttaagactgattggacagtacatttaagatctgagcactcagtgtgtacaaattaaacctcaatttaaagaaaagaaaggtaaaataaaaatcacagccaaaagaatgccaaatgatcattggtagtgaaattggtagctttgattgtcttgtaagtggtcccagcagaagatagagcagtgcataatgagggggctcaggtggcctgggttactaggataaagcagctctcacaggcttaaccagaagggacagcagcaaaatgagactaggagtgagggtagggtcaagagtagaaaagaaaggagactaaggaaagatctcacttgaaatggattccaaaacactaaatgacaatggtaagaat

SEQ ID NO: 221258 - DNA, 513 bp, Homo sapiens
aaggggaggaagagactgagattattctattattgttttcttgtttctaaaccatgcatatgtatcttggtctcatttttatacttgtaactttacatttttattgtttttagagcctcctttggtgaataaacagaaatgaaaaggtgaaaatcaaatcaactttgttactccttagttcttaaaagttcaatatttcattatttaaagagtcccctataggccagttgtggtggctcatgcctgtaatcccagcactttgggaggccgaggcaggcggatcacctgaggtcgggagttcaagaccagcctgaccaacatggtgaaaccccatctctactaaaaatacaaaatgagccatgcgtggtggtgcatgcctataatcccagctactcaggaggctgaggcaggagaatcacttgaatcctggaggcagaggttgcagtgagccgagatcatgccattgcactccagcctgggcaacaagagtgaaacacagtctcaaaaaaaaaa

SEQ ID NO: 221259 - DNA, 416 bp, Homo sapiens
ggagacggatgatggctgcacaacattatcaacgtatttaataccactgaattctacacttaaaaatggttaagattgtaaattttatgttagtgcatattttactataataaatcttttcaaaaagtaagcaatgaaggaagatataccatgctagcactaaccaaaagaaagctagaggagctatattaatttcaggcagagcagactttagagcaagggaagttaccagtggtagtaaggagcattacataatgaaaaagggtcaattctccaagacgacgtaacaattctcaatgtgtgtgccgctaataacagagtatcaaactttgtagggcaaaagctgatagaactgtgcaaggagaaaccgatgaatcaatggaagtcttcaagggcacgcaatcagaaatgaacag

SEQ ID NO: 221260 - DNA, 240 bp, Homo sapiens
tggaactttgctgtgtatatatgtataccatcactgccattagtcaaacttttttttctgataataaccaaaagaagattttataattctttaaaacagtgttctaaggaaacactcatataaataacttattttattggtaattaaagatacaagttgttttacattttagtggtacatttttgcatagatacaaatggctttgacctgaaaacttttttattctcctgaatattaatg

SEQ ID NO: 221261 - DNA, 408 bp, Homo sapiens
aaaataccctgggctctgcacgaggatgagcaaaagggaaggaagaaaggaaaacagacctgaaatggaggtttgcaccgagtcacactgggtttaagggcaaacctacaaagaggacggaggcacccttcagagcctaaagtctttctaccatcatcttgtctgcccttactagagagctgttcatccgagactccaacaccttccaggccctctcttctagacccagcagcccttggcagttcacactctctgcagagatctaccatccaagaccttcccagcaggtcccgggtgcctgcaacaacgtgggcaggttgtcttaaccactgactgcctcggttcttcaattggctaagttgggataacaccatagtactactcactcagtaaactcacagtcgacgc

SEQ ID NO: 221262 - DNA, 785 bp, Homo sapiens
aactctgctcccagtctgcaaaactcttcttctctccttctactagcccctgatcacaccaaccttagaattagttatcagttccatatggagtaactcctcatggctcctctgtaactaaatggcaacacctcccttcttttacataacattaacaatttacattccttgtcaagttatttggcagtaaggtggtctgcactgtccactaacaattactatcaatcttgtaggctcagagaaatgtactcaattctaccttccccgtactcaccaaggactaatgtctgccattagtgtgggggttaaaaaaaataaaaaataaaaaataaggccaagtcaggtggatcacctgaggtcagttcaagaccagcctgaccaacatggtgaaaccccaactacactaaaaatacaaaaattagctgggtgtggtggcacacacctgtaatcccagctactcaggacttagaggcaggaggattgcttgaacccaggaggcggagatagcagtgagccgagatcacgccactgcactccagcctgggtgacagtgaaactgtctcaaaaaaaaaaaaaaacctgaaataaatgggagacacttggaaagcaaagactacgcatgtttttctttttacacaaagaaaagctttatttatatatactttaaataatccataggatcattactacacaccatcttactgtgagatataaagctaacttacatacaaaaaagctttccagaaaaaggaaaaagaacctatgttctttcatttcccgctgca

SEQ ID NO: 221263 - DNA, 519 bp, Homo sapiens
tttgggaaggggagatagttaagggtagggccctgagggtttgggacaggagggaagggaagggatggaggatctatctgtaatctgtttcaaagaaggaaaaactgcatagtgctttgaagaaattgggcatcagtccaagaagaaatgtgatgccagcagccatcttcacatcacccccaagcctgttcccctatcttgctggcaagtcatagccctacttttacccccttttgctggtttcatgtattttgagggtcagcaattgtccatgcgctgggtgagttcaaacactgtgtgagggaccacttgggtttaggacacgggaactatgtggaagggatggtttcttgtgatatggggctgtggtgtctgtgtgatggggagcatcagagaaggtgtttggggcagcatggagggaagggtgcatatcctgtaagaatcaggggacagggtttcataacctatcatgtgcccagaaagtcaggaatggctgcagttctattaccaagccctgac

SEQ ID NO: 221264 - DNA, 492 bp, Homo sapiens
ccaagatgtcatagcgagagtcaaactgggggcttagaaatgactctgactcataacttttaatcaactgttttgacattttaacctatctaattgtgtaggaggtaattatattgtcagactttggaatgatgttgtttccagtaaagttttgttttaattataaataggaattttccagcaataaaaaatttccaccttaaaagattctcagactttagtacatctttctccaaacacaaggtggcgatggtctacaacaaatgatgtgcgacttggtgttttttttttttttttctttcctttccttttttattcttaatagttcaagttaagaatttgcaaaagtttcacatcttctcaatcatgtttaataaattctaattaaatattctcctacctcctagtattatggaaaatattttaaaaatattacaatgttaaatgaatttattcttgagggcataataaaatgcgtttttaaatcaacta

SEQ ID NO: 221265 - DNA, 536 bp, Homo sapiens
acctgacaatggactagtacctcatatccacttctaccatgacttctgagaaagtggtattttttaccacagtgaacttggtatatgcagtgtgtgtcaggggcactggccttactaaagtagaggcccattctggagaatagtaagaaataaggagcaatacattgatgaaatagaagggacattaagtgatggtcacagaccactcttaggactgccattaacttcagatgttaaagaagtgcttcagctctctgtgctttgtcttcttcttgacaagtgaggatgttaggattatctgccatatcatccagcttcaatctctataattgtataaatctggttggcagtggactcgttagtgcaaagtcctaaagccttaaagatccgaagttttctcactgggcaagcaatttgcgggattacgacagtgaacttggtgtatgcagtgtgtgtcagggacactggccttactgaagtagaggcccattttggagaatagtaagtagtaaagagaaatacactgatgagacaga

SEQ ID NO: 221266 - DNA, 543 bp, Homo sapiens
ctatgagtttgactacctcaagatatgttatataggtataaccatataatatatttctttttgtgactggcttattttcacttagcataatattctcagggttcatccatgttgtagaacgtgtcagaatttcttccatttttagggctaatattccgtcgcatgtacatatcacatttgcttatccactcatccgttggacacttgggttgcttctgagttttggctattgtgaatagtgttgctatgaacacgggtgttcaaatatcctttccatacattatattaaaaatattttttttcttaaagttgcaactttttggccagtctaggtggctcaagcctgtaatctcagcaccttgagaggctgaggtgggaggattgcttgagcccaggaatctgagataggctctgcaaaataaaaaataaacctagtcaggcatgatggagtgtgcctgcggttccagccactcaggaggctgaggtgggaggatcacttgggcctggcaggttgaggtaatccgtgaggggatgatgccactg

SEQ ID NO: 221267 - DNA, 786 bp, Homo sapiens
tccattactcattaaccattcattttactgcacgtctgttttggagagcaagaaaggacttgggctggaagtactggacactcagtataagtgtgaggtgaagcccatcagtaaatgagtaaatatattcctgccttagatatacttaccttatatgtaaaattagatgctgtagtggaaagtacagcctggggggcagagaggacctggagtatcccttgccagcgttgagcatctcccatcatggggtcccctacacctgctcaggtaccactgcagggccaggcagcggggcctcccccaagttcatactccgtctctgctgttctgtgtccagctcctttaggagaaccttcttctcatgtactgcttttttctcatgcgtgggcttactcaccagaatccctcttgctatcagagcactgacccagctggtgaggtttcccacccagcaaaccatttccttccactcctccccatctcaccagcctcattttgtaatatccttcactgtggacacccttcttaggaaatcgaagtgttattccttaaccacaccaggtctgcaaggaccatgccctcctttctgcctgcccttctttgtctttctttcaaagaattgaaaactcactcttttcacactaccttccctgacatcctaacttttaagcacatttttactggttcctctacttgatgggaatgtcatggtctgcttgcagaatgtgtccttgatgaaagtgttttggctctttaatctgtatgtaaatttccatgtgaatctta

SEQ ID NO: 221268 - DNA, 655 bp, Homo sapiens
tccattactcattaaccattcattttactgcacgtctgttttggagagcaagaaaggacttgggctggaagtactggacactcagtataagtgtgaggtgaagcccatcagtaaatgagtaaatatattcctgccttagatatacttaccttatatgtaaaattagatgctgtagtggaaagtacagcctggggggcagagaggacctggagtatcccttgccagcgttgagcatctcccatcatggggtcccctacacctgctcaggtaccactgcagggccaggcagcggggcctcccccaagttcatactccgtctctgctgttctgtgtccagctcctttaggagaaccttcttctcatgtactgcttttttctcatgcgtgggcttactcaccagaatccctcttgctatcagagcactgacccagctggtgaggtttcccacccagcaaaccatttccttccactcctccccatctcaccagccagatgtaatccttccctttggtattttactgttgccagatgtgtccctttaaagcagttcttaatgggctagataggtctgcctgactcagtctcttggtcttgtcccacagtgcctagtatctcacaggcactctaaaggatatggaattgacctcatcctgcc

SEQ ID NO: 221269 - DNA, 526 bp, Homo sapiens
caacaaagaaatatccagttcaaacgtcggtagtgctgaattgagaaaccttgatgtaaatgaaggaatctcaagcatgattctcagatttcaaaacctggtggggtagctaatatatttggaggcagaaataatattcaaaagataagcattgtaccaaaataaatgaaataatgtaaattcttatattacaaggagatagaagttgagagattggaggaatggagggtaggaagtgggacagaaatacactgaaaacttgaaggagactaaatgacagcagatataaagggactagattttatttcatcagaagcttaaggagacatcagtatgctgtaactgttaaaagtgtagtcttaagctgctttaatacaagaatagtttccaaatccactgttgataatagttcaattgttcaagctcagtactggcaatagtaagttctcaataagtatttgtaggatgaataaattggccagactatacttaaagtattatattcagttctgtatacctcattaaa

SEQ ID NO: 221270 - DNA, 549 bp, Homo sapiens
aagtcaaaaagtccctttttgtaccaatttggattttttgtcacttgcaatcaaaaaattattgacaggtgtcttagttcatgttgtgctgctataacagaatgcctgagactgggtaatttataatgaacagaaattaatttggctcacagttctgaaggttgggaagtccaagattgaggggccagcatctggtgaagcccctgtgctgtatcatcccatggtgaaggcaaaagggcaagagaatttgggtgggggacagggaagggggccaaactcatcattttatgaggaacccactcccaagataactagcccgctcccatgataatgacattaatccattcatgagggctctgcctaatcacctcttaaaaggtcccacctctcaacgctgttgcactggggattgagtttccaacacatgaaccctaggaggcacattcaatacacagcaacaaggcatctccattttatattttattttaactatttttctgaaatgtaatccacatggcatatctaccttaaataaaagatgttaaatat

SEQ ID NO: 221271 - DNA, 297 bp, Homo sapiens
tgttccttaaatataaaaagaaaaaaatggaaaaaagcaagttaaacaaaaagtctagtcatcttcaacctcaaaatacagaggcatacagtcatacacacacctcaatagaagcttaatgacatcataatcaatatgtgtaatgattatcctggggcattaaaagaaatgttaaaaaaaaattgaattgtctccttctaaaaggtaaattttaggaatattttcatcttaattgtttttttaaaactttaaaagacaagcctcccctaggtgacaaagtgcaactctctcaaaaaa

SEQ ID NO: 221272 - DNA, 421 bp, Homo sapiens
tcgcacctgaggctctcggagcggcctcggggcgcgcccacctggaggttggaattacacagggtcgaaaaagctgagtcctggaggcgaggcgctgtagatgaaaagaagcaaagaattgataactaaaaatcatagtcaagaggaaacaagtattcttcgttgttggaaatgtagaaaatgtatagcaagctctggttgttttatggagtatcttgagaatcaagtgattaaggataaagatgattcagttgatgctcaaaatatttgtcatgtgtggcacatgaatgtagaagcccttccagaatggataagctgcctaatccaaaaagcccagtggacagttggaaaactgaattgtcctttctgtggggcccgtttagggggctttaattttgtcagcactccaaaatgttcctgt

SEQ ID NO: 221273 - DNA, 507 bp, Homo sapiens
ggtttcaatactagtgtcacaaaatgggaagaaaaaggactgggattatgcctccatttaaaaaattattcgatatttgattcggtagagacaaaggcaatgtgccatggaggaatgcagccacaccgaatgatgcaaccacaagccgaggaacaccagtagccactagaagcctgaagaggcaaggaacggattctccctggagcctaccaagggattatggccctgctgacaccttgcttttggccaagtgatactattatactttcaaactgcagacttccagaactgtgagataataaatttctgttgttttagaccatcaagtttgcagtaacttgttatagcagctacaagaagcgaatagaagacccttccagctttaaaattgtatgggtggcaaaacaaactgaagatgtaaaaatcaataggcatttagaataacttgctttttactaactaaaattctaaagtacaactgagcattaaaagttctgggcttcttga

SEQ ID NO: 221274 - DNA, 505 bp, Homo sapiens
cagagaggcagaacagaggattttcagaatagtgaaaatactctgtatgatattatgatggtggatacattgcattatatatttatcccaacccaaagtatgttcaacaccaagagtgaaccttgatgtaaactaaggactttgggtgaccataatgcatcaatgtaggtttatcaattgtaacaaacgtaccatactgttgggtaatgttgataataaggaagattatgtatgtgtgtatgtatgtatgtgtgacagcagggggtatatgggaaatctctgtaccttcctcgcaattttgctacaaaactaaaagtgctctaaaaaaataacacctaagaaaagtaacttgcacattttaaaataagcaatgagtcaaagaagaaatcatgagaaaaattagacaacactttcagaagagtctaaataagacccaattcaccaaaacttatgaaatgtagctatacagtgataaagagaaattatagctgccaatgcctgtagt

SEQ ID NO: 221275 - DNA, 356 bp, Homo sapiens
cctcattaaggggcagctgttttccttttgcctactagctagcgctgaggaggcggggctgggctggaggcccaaagtgcgcctgacctgaggttttggctcctaagtgccagggcctggaatggcggggacgggagtttggtgctctgcggaggcagccctgaaggcggggtgccggaagcaggccctcctctgggacgctgaggaaaccctaaaggttctttatttaaaaaaaaacgaaaaacaaaaactaagtatgtaaaatagtgcagctactttgggaagaaatttggcagttcttcagaatattggccactcccatacccaagagaaattaaaacgagtgactacacaaa

SEQ ID NO: 221276 - DNA, 543 bp, Homo sapiens
ttcacaatcaggtttagtagctgatctgaaataatgaaatgtaactaaaattcccttcagcaagtaagaggatttctgaggcagtaaagaagtcgattgaagaggtgcatctgctagcaattttttaggaatggggttcattttattctctagaccgagtgttgccatactttattttataaaggaacagattgtaaatattttaggatttgcatgccatgtggtctctgtcaaaactagctatagacagtattaaacaaatgagtctggctgtgttccagtaaaacttgataacctgaaatttgaattttacataatttttatgttatgaaatattcttttgatttgtttcagtcattaagaatgtaaaagccatttcttatttcttagcgcatattaagctggcgacaagctggatgaaggcttttttttttagacagggtcttgctctgttgcccaggctggagtgcagtggtgtgatcatggctcattgcagctttgacctcctgggctcaagtgattctcccatctcagcctcccaag

SEQ ID NO: 221277 - DNA, 574 bp, Homo sapiens
ttggtaggtttgttcagaatggtattggataatgtttactattaaaatattcaaagtaagatattttttaaaatttttgaaggcaaatgtcttaattggacaaagttacttcttagagtagcttatgacctatcaaagttatttaagtatttctataaattgtggaaatccctagtggaaagaattctggaattcatgagaagaaaccaggatttgaaacctggaaggtcatactgaataccaaaatagtttactaatctgtaaagatgtttaaaaaccatgaagttgtcctttttttatgacatactcttctgaaatattggcactggttcttaagattttcttgagaatgtgttactgagatttaagctaacatatacattatgtaattttaatattcgctactgaaataagttactttaattgtggtatatgaagctcagaatcttactaatatgctattattttctgagaagtgttaacaagtattactatgtcatcctaagtatctcttttcagaatgctgttgctttcacatgtattctaaggagctggttttcacataatggtatct

SEQ ID NO: 221278 - DNA, 448 bp, Homo sapiens
tcaacaatgacagctccttccgtcttctaacctctgggcagacactgactaaaggaagaaagcacagagaggatctcttgacggaatgcaaaagacttccctagatgtctgctatcaaatgtcttccttttaatcttgggagtagaaagggaacctggcttcctttctggacttaaccatgaaaccagcaccatcacatcacccctaaacagaaactaagacccttccacatgccccttgtcaccacaaccatcctctactgacccatttttacagattagacacctctttggacttcacttccctcacacatgcagtagggataatagataacagaattatccacctcataaggttactaggaggattaagtgaaacaacagatggaaaggtagctgacactggcacagtctcagtaaaatttacctagaatcgttatttccgtgtt

SEQ ID NO: 221279 - DNA, 634 bp, Homo sapiens
aacacacacagtgccagatattacacatgtccaggactttcagtataacactctgttcctcctcatcttgtccagatagaaattcttaagagcaaaagcactcatgttgctccacatctcatatggtaacaataactttctctggtatgcattttgccaaacctttgagaacatcttaagtttacattttataagaaaatattgagggtactttccccaataaatgtaaagtatattcaatgcttatagtagatggtcatttgatattattttcaagactgatattctgtatataaaatatgagttagacgcctgttaaacttaaagtgtttcatgaacaaattcattacctaatttcttcactatgccagaggactacatgttaaaagtccattttgcttttctgagagtactagagatgaatatgcaaccatggattaaggcaattcattgtcatggagccttgtgtgcacatgcagtttgtaaaatgatttacaaaattcaatagagcattgttcaaccaatgcctcttttttaattgggagataatttcattcattgcaaaaacaacctaggtcctgtggagacaaagacttcattggggggagcttgagaacagcaatcttagatctga

SEQ ID NO: 221280 - DNA, 346 bp, Homo sapiens
caggtgccatttgtgttctttggaatcgtcttatgttcttggaagatgcttaaattgcctttttattgatgggaaagcagtatgcagctgtaggtcttgccctttttaaaagcgtaggaagagtttgaggtagcagctgtaacttagaatgtggtccctgtgagtgttcaggccacgtggcagccttgcgctttctgcttcatgaagtttcctgcttgccgcctgtgctttgggtgtcactcaagatccatttccaagaaaccatctcatttcaaaaccccatccctgcatttgctttattttgttttgttaaagcaacaacaaacaaaacaaaacaaaaaacaac

SEQ ID NO: 221281 - DNA, 510 bp, Homo sapiens
agttttcctgtacttggctaactcactccaaggccagcaataggcagagccctagtggggccttgataatactatctgaaaagccagagcccaaaggaatgagctccagagattctcccaacaccttccccacccagagcaagaataagaaaaacaagttcttcttatcagtttccccctttgaaattcttttcctataccattatcctttgatctcttctcacaactacttttgtaactatttctgcaagtttgcaaggattttgtaagttcctgttttccagctgtgcagtatggcaatggtcacaagacatgcctgagttgtaaaacctgtcactgttcgataaactgcctttgttctgcttctgtaagcttgcttacccaccttacaggttttgcacccttttcagatgtatatataaaagtcaagccctgtctttgtttggtgctcagcctttggatatgaatccgctgagttggtggccacctaataaaatcctcctgttccaa

SEQ ID NO: 221282 - DNA, 154 bp, Homo sapiens
gtccatgcattgtccttcctcctggtgactgggatgtgggctggatttcagcatccccaggccggagccttgcttcacctatatgtggctttgccagacagtgacagatccagagtaagctggcaaacatggcagctgtcaccaacagcagcag

SEQ ID NO: 221283 - DNA, 534 bp, Homo sapiens
ccgtgctgagactgctgaaactgataagaaggcttcctcggaacctggtgagaaaaatccatcaattctcccttttgtaataaaagtgtgttacatttgatagcatgtattttggggggtggatataaatgatggaaattgtcttttaaacatcatataaccattcagtgtgctgagacgtggcacagacatctccatgtgcaaatgtactttgcagctcatatgaccccctttataacacgaatcactgtcaagggaatgcctgactgtacaaaaactgcccacaattgagcatctatcactgaagatctctcagtagggctcctctctaggttatgccagatcactggtggtaatgtagaggaccacagaggtgtgggcagagcttatgtcccaaaatacaggaaacgatggggctggggagctggtgatgaaggacatatcgtctgtctgttgtgaatggatgaacttcagccctatcccttaatagcaaaatttcctaacaaaagcaaaattatctgtgttgcacaaaaa

SEQ ID NO: 221284 - DNA, 427 bp, Homo sapiens
tggaagggagtggagagggtgggggaagggtgttatgggcaaaagaaacagtgtttgcgaaggcagaggcaaagtgaacttgttctatttgagggaactgtaagtgctttataaataaacagaacatcgtgtcagaggtcaggacggggagtagatggaagtactacttcaggccagaaaactaggcaggggagcagatcatgcagacttttaaaaccacacttacacgttccagtctttcccaaaaggaatgagcttccattttcatatatatatatatatatatatatatatattttttttttttttaattatactttaagttctagggtacatgtgcacaacgtgcaggtttgttacatatgtatacatgtgccatgttggtgtgctgcacccattaactcatcatttacattaggtgtatctc

SEQ ID NO: 221285 - DNA, 653 bp, Homo sapiens
aaaacaacgtggaaactgactgactgtggggttgttgtgaggattaaatgagttaatgcatgtgtgtacctggcatataagtaggcacaaaatgagcatttgttgaatgaatgaatgatatcacattttttatctaggagtatattaatgatcatttaattttaatgtatcaacaagaccatactaggtggtttgtgcctgttagcatcatgtggtgatactttgttctccaaatttttcagcaaaagggcatcacatggtgacattccagaaagtaagacaaggggcaccaatcatctctcacaatgcagaataaataaggctttgagtagaagcaagcatgctgtttccagcaagtcttccagttttggctttgacatgtttctggcaacatatgataaaatggacattgtcaaaggggaggatgaagtatttgaaaaatgctataaaaaatcaaacaggagtggagaatgatctcggtgtagaggagatagaagtgctataagcaaagacactttggaactgaaaatctgaaatacattgaatgcatatgccttgtgaaggggacatcttatgtgtgaagccttaaactaaagcaatgaaaattattctataatcttcataaaaatttagataaatcagcagggaaagtt

SEQ ID NO: 221286 - DNA, 451 bp, Homo sapiens
ggccttgtggacagacatggagaattatgccagatgcctgttaactaccgggtagggctgctccaaagactctaatctctggtgttcagggtatgtggagaggacaattagaggcccgctgccctgagacttgcccaagaggggacggccaggcaggccacatgaagcccatgtgggctaccagctcagacacacccagccggggccggggcagactcccctaaggcttgagcctcagctttgctcaccgcccctccccacagcccccttccacgtcacccacacctggaggggcaggagcggagctggaagcagaaggccatcctgggagggggctccttcccagacagaaagcagcagagagcggggctgcgggaagtcggggaagccaacctttctttttgcacagattgagatcagaggtcttttaggcaatacggctattttccag

SEQ ID NO: 221287 - DNA, 257 bp, Homo sapiens
gaacacccctttcacagaaaattaggcaaacaggttggaatatttagaatagaaaacatttattataaagtcacaagaaatacctgtgtagacttgctgactggaagtatttggcttccgtaagacaaagaagagtcttagtcatctggttaaagttaaaaacgattgtgtcaccaggctgaaagcagacatgctgtggaagcagtaggctgaaattagaactgaatacaagagtttagagaaaattgaatttggag

SEQ ID NO: 221288 - DNA, 186 bp, Homo sapiens
ctgataccatcactagccacacacggggatttaaatttaaatttaagtcaactaaagttaaatccaaagctaggtgctgtggctcacgtcagtaatctcaacaatttgggaagccaaggcaggaaaatcacttgagcccaggagtttgagaccagcctgggcaacatattgaaaccctgactctga

SEQ ID NO: 221289 - DNA, 451 bp, Homo sapiens
gaagaaggcatttttacagaggagctgtggaaatggccctgctgaggcctggaggatgcagccacaggtgagagccttctggcggagaagatgaggcagtcaggctcagccaccagcccaaccaccgccaagcctccttcagatcccatgcctgggagagctcctgctcttcctcctagaaaccctgagctctggcagccggttgaggccccttcccggaggatctcctgagggccaatctaagtgtgtgggggtgggggcatgattgagagagacaaacctcattctcccatagcccaaggaaacctcccctagctctctccccagcacctgcagccaccaggagtgggtgattgcaaacagcgcagggcaagccagctttatatctcctgtaactttcactccccaccaccctcactttctgtgcctgacaacctaggcaaatcagagg

SEQ ID NO: 221290 - DNA, 640 bp, Homo sapiens
agaaacgaagtaaaactctccctatttgcagatgtcatgattgtttacttagaaaaacccagggaatcaacaataataacagcaaaaatctaaaactagcaaatgaattcagcaagacctcaagatacaaaatctataaagatatataagcataaaaatgtatatttctgtatactagcaggaaataattagaaaataacataatagccccaaataattttatttataacagcaacaaattataaactacttaggactaaatttaatgaaagatctctacatgaatgtaaaacctctacactgaaaactataaaataggccaggcacagtggctcaagcctgtaatcccagcactttgggaggccgacgcaggcagatcacgaggtcaggagatcaagaccatcctggctaacacagtgaaaccccatctctactaaaaatacaaaaaaattagccgggcatggtggcaggcacctgtagtctcagctactcgggaggctgaggcaggaggatgtcgtcaacccaggaggcagagcttgcagtgagctgagatcacgccactgcactccagcctgggcgacagagcaagactccgtctcaggaaaaaaaaaaaaaagaaaagaaaaaagaaaactataaa

SEQ ID NO: 221291 - DNA, 434 bp, Homo sapiens
cagcaatggaatacaaatgcactagtgatcccagccaagataccagaacctgaccaagacaatgttttgctgctgttatccagaattaacctttgattttgaggagtgactttaaagtttggcagaaaagaagcagagtcaaggaccaggaattgcttcagtaaagttgcaagataccaaatcaacctacaaaaatgaatagcatttctatatcatagaaatgaaacagctgaaacaagagagcaatcccatttacaatagctacaaaaaaaagggatcaatttcaccaaggagataaaaaatctctataaggtaaaaaccataaaacactgatgaaagaagttgaaaaggacacaaatggaatgtcatcccatgctcatgaagtggaagaattaatatgattaaaataaacatacttcccaaagcaatctaca

SEQ ID NO: 221292 - DNA, 379 bp, Homo sapiens
gccaaggtgggaggatcgcttgaggccaggagttcaataccagcctgggcagcatagtgagacctcataataaaaaataaacctagattaattatttctctttgaatacttctttagatatttgaggtttattgaatagaacaatgctttctaaattgttcctagctactacccagtgagctgtgctttgaacctcctcacctctttctcacccagagcagctttgtgtatataaaacaatatatgtatttggtatgtgcatgtgtatgcaagattttgttgacaggcttttccttagctttaaaaaaagtttgaaaataataaaaaaaatttaataaaacattcgtcttttgaataattgattaaagtattgaatatg

SEQ ID NO: 221293 - DNA, 437 bp, Homo sapiens
ttgcccctaagctacaaacctgtacagcatgttactcaactgaatactgtagacagttgtgacacaatggtaaggatttaggaatctaaacatagcaaagatacagtaaaaataaggtcttataatcttatgggaccactgtcatatatgtggtctgctgttaatggaaacatcattgtgtgatgtatgactgtaaatatacggacacatatgcattgcatgcacatacacagaaacatgcacatcatagttaatccctaaaaatcaactgattctatgatctcaaatctctatagtactataccaattatgctcttttgaaaaacaaacatagcttgcagacccgttcctacccctgttctttgctctcggttttctaatcattgtaggaaatgattaagctgagcaggggccatgggaattttattttgagggtc

SEQ ID NO: 221294 - DNA, 510 bp, Homo sapiens
gggagggaaggaaaatgagtcatcgtgaggcaaaaggtgtgcagtgacttctttgaacagaaagttttcttccatttaagaagaataacaatcaaaaatggacaaaagttattaaacccatttcctgggtttaaaaaaaaattgtggttgtagaaaatgaaagcataaaaaatcaagtccatgtaagcttgaaaagaaacctgcagtggtggatttgcacatcggccttaattggcccaattgaccttctctgctgtatttacaattgccttaaaattgtaagcagatgtttgaaaccccgtctttaataggtctccaacatctgtttcaccactgctgctgcccaccaaagcagttgtaattagggagcaccgaatgcatacatctttccttatggacccaatcgatcggatttctccccacggtattaaagtcgacccttattcttgcttttatttgaatacattttccaatatattttcttacacaggacagtatccagccaagtac

SEQ ID NO: 221295 - DNA, 406 bp, Homo sapiens
caaggtagtcaggctcctgtactccggatgtgtgtgaagcgcctgagggtcagctcaggcagtagtgattttgttctatggcctctttattttttttgagacggagtctcgctttgtcccccaggttggagcgcagtagtgcgatcttggctcactgcaacctccacctcccaggagaactcttaatcttaggggttgtagagagacaaagatccgtcttctgtaacttcttcatgctgaacaagggtgatagtattcctacctaactattgggtctgttgtattcaggatagaaaggagctcagtcagaaagccgtggttggcaagggtcacttataattttcgagttctgacaaaaggtgatatctggaagattaataagtgctcagtgtaagaaaacggtgag

SEQ ID NO: 221296 - DNA, 124 bp, Homo sapiens
catgtggcaagccccgtactcccttcacactccctctgtatcaccctctcaattagaatttccttgtggacaattctcttttctttgctagtatgatgtgtcattctttttttttttttttttt

SEQ ID NO: 221297 - DNA, 370 bp, Homo sapiens
ggaaaacagattttcaaataagggagtaaaacaaaagcaaacaaaaccttgtttgtttgttttttcataaaaggatatagtgtacaattgggtatgaattcagggcgtcacccatagaagaatcttatgcctatgaagtcatctctaattacagagtttgactaacaatactgcaattatgaaaccactccaccggctcatttaactatacataaaccctaaacacagatctttgctgagaaaggtatacctacaactacctgaaactattattcaaattctgaaaggtatttgaagggggacgggggtgcctattttatctcctaaagcactcactcactttaggaatgcagctgactgaataatctac

SEQ ID NO: 221298 - DNA, 647 bp, Homo sapiens
tccttttgtccatgtctgacattttgttttactttctgggatatttactcatttatgaaacaaccctgatgtggaatttgtttacatcttctatatttttaatttccaagaattcgttcttgatcttgggatgctcttttctatattcttgttttgtttgatggatccaggcagcaccttcctctctgagatatgagagggaattattactattattttgtaccctgcattttttccccttaatttcctttgcatctgtttttgttcctcttccgtatgtcagaaactttcctcatgtctgacaatcagtggctaccaattcaaatttgaattatatgcccatgtgcatgcacacgcgcacacacacacacgcacacacatgcacacacatgcacacgcatgcacacacgcacatgcacacacatacactcgcacccacgcatgcaccacacacgcacatgcatgcacagatgcacacacacctcacacacaagcacgcacacatgctcatgcacacacaagcacacacacacacgcacacacacacacagctgactggaaggtgtgttgagcaggcaagcctggttagctagtgaagcgccgtggtagggagaataatggcccccaaagatgtctatgttctaatg

SEQ ID NO: 221299 - DNA, 484 bp, Homo sapiens
cagtgcataaactgaagtttggatattttctcaaaagatgtgtcaaaatatacatttcaagtgcattaaccactttccttatgcttctgaagataaatgaattgcctgaacatctcaagatcttgaaagtttatagtgatggaagcataggttgcaagtgaatgtgttggccttgtaaattctactcctagaactgtagcataagcaccttcttaattaaagaatgacgcagtcataaatttatgtataccatgacgcgtggaagtatcaaaaatttcaactttccatatgtcaaaagaggagaaactattattttaatatagttgaacactagttggaaatagtagtcttttcactgtgttttgcccagacccagactggcagagttaacccagactggcagagttaactcaaagcacttgatcctttggaatactctttttctcccttttcttttctctgtctttccaccctatccccttcc

SEQ ID NO: 221300 - DNA, 416 bp, Homo sapiens
tcagatcctcactgtctgttgaatggagacatcaattcattccaatgtagacttctgcatagaacagctcacaaaatggcaactggcttccctcagagtgagtgagtgaaagagggtgcccaagatggaaaccacagtctttttgtaaccgtaccttagaagtgacattctatcacttttgccatgttatatttattacacttgtgtcactagttcaacccacactcaaggggagggaattataaaagagcatgaagatgaggaggtgggaatcactgaatgtcattttagaggctgcccaccacatccactactctatagttacatccaatcacttcaattaattagaatgaggaaagggagaagaaggaggttttgaaaaacaaaccactgatggattaaatgttttgtttgca

SEQ ID NO: 221301 - DNA, 280 bp, Homo sapiens
tgaaggtgagggtttcatcagctgaaatgctttgattagcatcttctgattttctttttaaacagttttctgtgtctctgtttggcttttttgggtatatctcttcattttctacttaaaacattccatagccccctcctgtgcagtagcttttatagatgatgttgggggaggagatgggtttggtatatcttgtttctccttcatttctgttggatcctttctgtttttcctcttgtttctttctttccctttactgcagtgtttccaaatgtaccta

SEQ ID NO: 221302 - DNA, 553 bp, Homo sapiens
aaaattgtctaaacgttataaaatgaacacacacctgtttttgtagtcacaaaactgaatcacaattattctaaaaacaaaacaactataatcaagtcttagttccaggaaggaggtaagggtcatctaatccacttctccatgcaagaatgctctttcttctagcgagactagcttgtttgcatgtctccagggacatctgttgtcattacaaggcagccccttccacagcaggccaatgatgaggattagaaacttctatctctcatgaagctaaaatagagccctgttccattggttctacttctgccctcttgatactaaagctgtccacgcagttttcttgtttttttttttttttttttttttttttttgagacggagtttcgctcttattgcctaggccagagtaagactccctctcaaaaaataaaattaaattaaattaaaagccaccaagttctccttccatggtaacccataaactcgttaatctttgaatgctttcattcatgagggcagatccttcaacgatccattcactcttaaaggc

SEQ ID NO: 221303 - DNA, 594 bp, Homo sapiens
ctatccagagttaaaagcatattctctatattgtcttctgataaattgaaaattttaaaaattttgtttaggtatttaagcagtctagtatttgttatatgaagatgtcttgggggatgttattttcccaacaccatttgtacatatgtgcacagtctttttctcacttatttgtaaagcaacctctcatttctaccagattcccatggaccgatttctgggctacttcttaacctgtttgtctataacctgtttgtccacattactactttatatctttggttttggtaatgccagtctcttctctttgtttatttgcggcaaacatatgctcattcactcttccacgtgaccattagaagaattagattgtcaatgtcctctaagtctaggtatttggttaaaaaaaaaaaaaaagaattaggttgtcaaattctgtaaaaagtactattgggattttcattgtgattgcattaagtttatatgttaatgtagggacatatatattagagatttattatgatactgagttttccaattcatgaacatggtttttatcttcatttgtttataggtctcttccccccccacccc

SEQ ID NO: 221304 - DNA, 603 bp, Homo sapiens
ctgacagggcattataaacttcacagaaacttctcaaaccaaatttaattgactttggaaagaaagtgattcctcacttttggagtgagaaagttaaaggttcatgtaatcaaaaagaggcctagaatccctgttctaagccaggctggtaggctatgggaccacttctttctcccctactataggactgcattcaaacctcaacatgaccttcttcctaggttgtctgagtaaaaggctgctctactctgagtccaaaagaacagtgtgaactgtttgggaaaaggacgtggaccctctcaaaagccctcaaccttaacctctcccacttaggatatgaactcctggtctcgaactcctggcctcaagtgatcctcctgcctcagcccccccaagttctgggattataggcatgagcaaccgcacccagccttgttaatatttctttttcagagtcctcagatccattatttccacgggcttttagttgcagcccgtgggagagaccgactgcttactctatcttacttagaactagaccccgagagattcagttttttttaactaaaaaaaaaatttattttgaaatgtcgccactccggg

SEQ ID NO: 221305 - DNA, 436 bp, Homo sapiens
ctgacagggcattataaacttcacagaaacttctcaaaccaaatttaattgactttggaaagaaagtgattcctcacttttggagtgagaaagttaaaggttcatgtaatcaaaaagaggcctagaatccctgttctaagccaggctggtaggctatgggaccacttctttctcccctactataggactgcattcaaacctcaacatgaccttcttcctaggttgtctgagtaaaaggctgctctactctgagtccaaaagaacagtgtgaactgtttgggaaaaggacgtggaccctctcaaaagccctcaaccttaacctctcccacttaggatatgaactcctggtctcatcatgtccaattctgaatatttaaaaagagagttaaaaaggaggaatggcttggcccagtggctcatgcctgtaatcacagca

SEQ ID NO: 221306 - DNA, 410 bp, Homo sapiens
gccataacagaaaagaagtcctgaagtgataaaaatgtaagcccttgttttggcattttaaaaaattggtctcaattccacaaacatgcttaagtttctttgcaaaaaactgccgagatcaatacaaattccttccaatgctggccaaagtagaagacctgtcacccaaattaattaacctttcctcaagatcaattggttttctgttgatttagcagtaatattgtagaacatttagctataatgtattttaatgtgatccctcaatgtcaacaggaaaaaattcgttgaaaaataaaatagcttaaataagttagtagacattttatacctttgtaggaaatattttgccttcaaaaattaaataccaattgtttatttgaattgtaataaagtgtgttttgcaacta

SEQ ID NO: 221307 - DNA, 522 bp, Homo sapiens
ttagtgaacactattttattctttcaaaattctgcatagtattttattgtattgttgtacaaacctttatttaccagccctccattgatagatattttggttgtgtctactttttattattaatcaaaatatttctgtggacatccttgtacatgaatattggtgacttttaaaaagtatatccaaatcttaaatttctggtaaggatgttgccaaaacagagggtgtgtatattttgaagaatctaataggtattttcagcttagtctccaggaaaattacaccaactcagttgacagtggagccttacattctacatggaactcatggagtccccccaaacagagaagggttagaataaaacacttgagtaaaaacaacttatctgctatcagttccttgggtcatgattgttattgatctctcatctatggggacagcttcgcttccttgggaacttgtctgccttgaggatctgtaatgatagaagggacattatactgaccctacacaaacaacaac

SEQ ID NO: 221308 - DNA, 587 bp, Homo sapiens
gaacgagttgtcagagggccaaattcagtggccaagccagaattcctaatctagtgctctttctactatacatcaagacatgggtagccaggagaattttgaacctgggaggcagaggttgcagtgagctgtggtcctactattacactccaacctgggtgacagatgagactctcaaaaacaaaaaaattttttttaagttttttaacgattgcatagaaaagaaaaaattatttctagagaattgcaaaatattgcttttgctcaaatttgattagacttaaagtctaattgattagacttaaataagcatttaagacttattttgtactcttaattttctgtacttaagtggagaaagggtgtttatctttcttcattcaaactgtttattctctctggaaggcttaatttttctgactttattggaacccgatgcagctttcaggcttatggttcagacattgcttcctttaggaagtgctttctttttttctgaactcattgcagtttttatcattgataatgcagtgtgccttatgtaattgtatgtgtaacatccttgagggcagtataaacatctggag

SEQ ID NO: 221309 - DNA, 515 bp, Homo sapiens
ggaggatagtagttgttgttaaggggtgctggtgtctagaggcctccgggatggggttttaggggtggcctgcctggatcaaggatcagcttggacgtgctcagcgaggatggggatgcccatttccctccatgcagctctgggctgggggcggcccatctgggttctcagttcctgccctctccctctactttttctgggaacatcagacaactttctgatcctgtgaaccagtttacttctctgtgaaatgaagacacctcagtcaccacttgactgtgtatccaattgcgcccatggcatatggacaagccctcactcagctaatgggtgggcactaggtgtgcagtggttaatttgttttattataaggagtgtccttgatacctttatctcatttctctattttttttcccttccccaaagtgttagaccatgcactttaatccaacattatttttatatgttttttattcttgtagagacaggatctctctctgttgcccaggctggcc

SEQ ID NO: 221310 - DNA, 364 bp, Homo sapiens
aggaaataataccatggtggttggtctgtttataaaggacataggcaaaaatttaaacagttttgaggaaggaaataataccatggtggttggggccaacctttcgtttcctcttctgttgaggagtcgcttgtcttacccagaagcctttcaaaactaagtggtggcaacgggcctccacagaacttccttttcttggtctctccagctgcccactcgtggttaagaactgtcatccttgtcacttggagtagaaaaagagtctcctgcttggaagagttcattccactccccgcacgtgcatcatagtgtttagcctagcaaatattactgaattgtaaactgaattaatcatcatagcctc

SEQ ID NO: 221311 - DNA, 375 bp, Homo sapiens
  misc_feature (369)..(369): n is a, c, g, or t
cttgaaatgcacattgctatgtgtaaaaagccagtgaaaagatcaatggttgcccggggctggaggagaaggaagtgatacataggtggatcacagggggatttttagggcaatgattctttctgtttaatactgtaattgtagataacatgactatgcttttagcaaaacccgtagaataacacaaagaatgaaccccaatagaaactgtagactttagttaatgctgatgcatcaatattggttcatcgcttgtaacaaatgtaccataccaacgcaagacattattttagggcagttttacacttacagaaaagttgagtaaaaagtacagaaagttcccatattctccctcttctctctcactcngtttcc

SEQ ID NO: 221312 - DNA, 448 bp, Homo sapiens
gggttgctggggttgtgtactgtgcctagagggcggggttcctgtacattcctacttcaccagataacctgcccccaacaccacttcagcttctgccagacagatggaactctccagcatgaaaatctgcgcagccattccaacaagcagggctctgcctgaggttgtccgaaggatgccgaggaaaaggatatcaggactggaatggctcttacagcaagatccaggtttttcattagtcaatacagtgaaggctggcatgatcatcagcttcccatccaataatatctactcatcagtgtgctgttgtcaatcagagattttcaagtatgagttctccaactcaaagaaaagtagctggatccaggaagaaaggcatttggggaagaacaacgttctttacagtgctcatgatgtgtctccagagaaagttacttcagcactaaaa

SEQ ID NO: 221313 - DNA, 823 bp, Homo sapiens
ccatagactgaatttccttcatagtacatgatttttcctaaatataggaaagatcgaaggggtctctggtttatttgcaccatgtttatttaggcatctattaaagcaatgcttgtggtgctacttgcttagtagaaaagctaattataaaacttaatgcaaaaattcagagtactacctttctctttcctctttcctattgtgaacttgcctcccatttactgtctgtcactttctttgagataaataaaaaagacaataattttttctagaaagaagcagtttatcgatctcttctaatatttgcctttcagttttctgttttcaaactgccatttcagttggtgtcatttttctttttgtacttatgcccttctggttgcatttttttttttaaagccaagtaattgccattaataagcttttttaaataaaatgaactaatcttcctttgaaaactttaaaatagtgataatattcttttcaccaccgttgatgctcatcagaataaccaggggaatcttaaaaactgtatgtgtacacatgatattggatttttgtttttttgagaggcctcataggcaattttaatgcagaggcaagttgagaatcagttggttatacttttcacatagaagatgatatgtttcaaagagctctgttctgttattgaaaataggccactggctttaaatataagccctggattatttattagtaacactttaagagaaatccacctgtgagctttaacatttgctatattttctgtaggtctggatctgaaaatttattaataaaagaattaaaaaaataaaaatcc

SEQ ID NO: 221314 - DNA, 648 bp, Homo sapiens
taaaggtaccagtcaatatggatgggatggatttagggcgtgttttatggattcatagctgctgtttccctggcactgcacgaggagcacgcattgctgtctggctcggacccaggattcgaaaggaaagcttgttgctggaaggcccaggagctcaaaaggggggcgtcgccagaacctgcgggaacgaagctgtcagtgccatcactggcgaggagtggagagcagggagcttcattgtctggtgttaaaacaacatgtcctgttgtcactcgtacattctacagacagaagaatgaggtgtcaacagaatcactttctcatgtatttacagaaatctcttttcatcagaggtgcctccctggccctgggttccgagttgtgtgggaaattgtcccacaccttgcccctttctcaaatcataaactttcagctattcaaaaaaaaaaaaagtggtctgttttcttgcacttaaaggaatgagacaaataaaaggagggaggagtcacgtctgtactctgagggaattggctgcaaggtgtaattttggatttcacaaatggaaaaatagcagcatagatttttcttatattattttactgttcatagtggtaaaaaatcaattaaagagaaattatctttcaaaaa

SEQ ID NO: 221315 - DNA, 708 bp, Homo sapiens
gtggcatttataagaaagatggtctataaacattactattgctctggctttacctttaggttggtgtgatcctgaaggaaggaagtgcgtgtgtaggaaaaggagttccaggggggttatgttaatttacaatcatatcaaaataacatgactcttcctcctctccctgtagctgtatctaggaagtaggagtttaacatttccccattcaacctcttaccagaaaactactcctaaataaacatcactaattttgctgccacatcactaagtcttgacagaattacccaaatcatatgtgctaggaaaatcaattgtcaacagattttgagcgtccatgccgttctaggcatcatatttgtatatgaagagaaaagaaatatattagctcccaaagggatttctatctttatacccacagagaaaatagggatgggtagacttggacttggtgtaaaaaatgtacaggtaagtaatacccaaagtcaaaaggaattcaacaattttgctaatatcaaacagtacacagttggcaaatttgggtacgtgtgtacacagatcgtacaaagtattttaagcaacatactaaaattttacttccaagttgtcgtctgcagggtttttccatttcttcttatttatctacttttttgttattgttgtttgtttttttgagacagagtcttgctctgtcgcccaggctggagt

SEQ ID NO: 221316 - DNA, 609 bp, Homo sapiens
cacacacacacacacacacacacacatatccttactcctccccagagacctcattgttgccatcacctgttcagagcatccaggttccagccatggtcttggttggacctcttcttcagtgagctgtctgggagaggctggtgtctggcaaggttagggatgtttgatgtgaggatgagggtctattactcaataactctcccacaatatcagttccactttgctgaggtgaaagccctttcatcttctgaacctttgctctaggtgagttgaagattcctctggtcaattggaggcccctaaaagggagatcttattaaacaaggcagaccactttgggttttgtccttatctgcagataaccatgccatatacagggccttaagcactctttctgtgtgtaacccctcacactttcttcccaactcctaattgtctcagcagctcaggtcagtagcccagtgctcttgttatgctagcctatacaagcagcacacatcagtatgttttggtcttacacactattacatttttatccattgtgcttttaaaagagcccttgttaatttatatcacatttgcatcatttttacatctgggaagcaatat

SEQ ID NO: 221317 - DNA, 495 bp, Homo sapiens
gatttgcctgcctcagcctcccgaaatgctgggataacaggcgtgagctactgcgactggcctctgatggatatttctaagactggaatctaggttgtaaagtatacacgttaagctttagtagatagtgcaaggagtttttctaagttgctgtaccagcagcatatgggaattctgatggttccacatccttatcaccacaaagtattttacgttttcttcttaaccatttaggcacatgtttactttatcacaatatggttttaatgaacttttctctgatttcttagggtttttagttatgtgtattttttagtctaattttctatgtagtctactagtctatttagtcttattgtctagtctaacagtctctgttaactcagttatctgaaattcttatggagtatgctctaatattgcttgttgaatctcccaattctcagccaaggtagattgtgtcctaccttgtgttctttgtgttgtaaacttgga

SEQ ID NO: 221318 - DNA, 546 bp, Homo sapiens
tgaaaagtgaatatttgaagatcaaaacttaaaacacattattcttcttaagtgactcagattatggcagagttcttttaaatagcactgtctcctcatacacaaatactatgttgtgaaaattagataagcctgagtgaaaagcaaatttttaaaaattttttcccagagtcttttctttctggcttgactatggctaattttgctaatacagggcaaacaactaaaaatttaaggtttattcatgtggcatctttgaaataaggaaattctggattagatcccaaagcagtcatagcattgatagaagggagaaggcatctgtgcagataatagctaaatgtcttttcagctccaaatttcttttattttattgtttatgctacatagaccatttgatattctcatgaaattatatgcttcattatggaggaaatctcagagcaccttactataaatttgtctcagaatcttagtgcactcacttgaacttatttggtctactaacataccaaaagacttaaaagaaaatggtttcctgaaaaa

SEQ ID NO: 221319 - DNA, 465 bp, Homo sapiens
aaaactaaaaaaataaatgaaacccacagcaggttctttggggaaaaattaataaaattaataaacctctaattagatttatgcagaaaaaaagagcgaagacacaaattcccgcatcaggaatgaaagtgacacatcactacagatcctacagactttaagaggataataagaaaatattatgaacaactttattttgactactttgataacttaaataattctttgttacagtgttacttcgtattagagagaatgtttttattctcaggcgatagatgcaaaaatatttaaagtgcagctcactttcaaacggttcagccaaatgtcgatgatttttgaatctaagtggtgagtatacaaatgttcctcgtattcatcttttatcttttttgtatatttgaaaatttttggaatacaaagttggaaaaaataaatcatgcccaaaagattgccagtagagca

SEQ ID NO: 221320 - DNA, 353 bp, Homo sapiens
ccaatgcatcaaaaggatttatttatagatcataaaattctcggcttaaagtgggacattttgcttctctattcttcccactaattatgaattgtcactgacttttgcagttacctacttaaatagcattgattcttatacagtacatttcctatagcgtgtttatatgtattcagtataaaaaactgcacatgaaaacacagagattaaagtaaattttgattgtatagaaggatgtaaaattatgtggatgtgttctttttataagaaaataatcatcagaagtagatatcaagtatactctatggtggaatttctattctttttgtttcttttattcgtaatattgggtg

SEQ ID NO: 221321 - DNA, 488 bp, Homo sapiens
tgagatggggtcttgctctattgccaggctggagtgtagtggcacgatctcagctcactgcaacctccacctcccgggttcaagcgatttccctgccttagcgtcctgagtagctgggacttcaggggtgcgtcaccacgcccggctaattgtttgtatttagtagagacgaggtttcaccattttggccaggatggtctcgatctcctgaactcatgatccacctgccttggcctgccaaagtgctgacattacaggcatgagccactgggcccggcctcaggtcttgaatgttgactttgtgcttcactttctgcagttcctactttcctacttagctggaacttttccccctagtgtcttaaagttatctacatatttcattcaatttacattcccaccagccaatacgatgttgtattttggacagccactttgcctttggaactgatggccagtctccagtgggttttcatttttatttttct

SEQ ID NO: 221322 - DNA, 421 bp, Homo sapiens
catttgaactggtctttggaggacattttgtgcagaaagaacttcgccaaggctcaggggcaagtcaagtttggggaaatgccagcagtgcatgtaggaaaaagctgagcataagatgcaagaagcagggtgaattttttaagagtcacatcatgaaggtccttgaatgtcagactaagaattattacccttagaacaattattcttaagtgaaaggtgttggaggaaggaaaggaggagagtatgtaaaatttaaggaaaaatgaaagtatcaacattatgtaaccacttaaaagaacaatatggaggttgctacaatcaaaatgtactccatctttaaaaagttacccatacagatttcagataatcatgtttgtcagtttttattgacatgagtaaaatctgttatagcaccaaaaaa

SEQ ID NO: 221323 - DNA, 640 bp, Homo sapiens
atgctggtagtttctacctggaagagcagacggcttcttattgggtttttaaatgtttcttgtaaatttaggtgttaggagtttttcttcatcattctaggagcagaatttgctctgagggaggtcaggattaattggtatggaaagaggccactaacattgaaagttaaatatttttatttagctttgacttaatggatagggatagggtttcagactagaatttaactcaaatggaaggaaaaacactgtgtaagttagggtaagggaaagaaagatcctgtagatatgattcatcaattttaggttatcttttgggtggaatgaaaaactttccaggtgaccctgtcagaaggtgatcgtgaattgaaaataaaatttatcctgtcccacccccagatttccaggtttactttggctggtttgtcacaaagctccctgccctttagataaatcacctttcgattggaatattccctggccaattagaaccaaatgcaaaccaggcttgagcaaacaactagtgtagttaaattttttttaagtgtgctttgcttgtatacagaagtctccttagtgatgtcttgtggtcttgggtttcttgtttgaagttcattattaaagtcatggtagaaacact

SEQ ID NO: 221324 - DNA, 546 bp, Homo sapiens
tatttttaaggctggatcgtattctattgtgtatatgtatcacattttctttatgtactcatctgttgatttcatatcttggctattgtaaataatgctgtaatgaacatgggagtgtggatatctcttcaacatactgatttcatttcctttggatagatacacagtagtgggactgctggatcatatagtagttctatttttaatagtttgggaagcctccatactgttttgcataatggctgtactaatttacattccaaatggtaaaaagaataaaatgggaggaagaatcatgttttcaacaagtggtgctggaacaattggatatccacatgcaaaagaataaattcagaccactacctcataccatatacaaaaattaactcaaaatggatcaaagatctatatgtaatagctaaaactataaaactcttagaaggaaacataggtataaattttatggcttttggttaggcaacagtttcttaaatttgccatcaaagaaattaaccaaagaaaaaataggcaaattgtatgtcatca

SEQ ID NO: 221325 - DNA, 395 bp, Homo sapiens
acttttttttttgtcctaacaaagctcacagtgtagtcgggaaaataatttataaaaagtaattagaacatagcgtgatggatgctgtaatggacccttgttgtatttcctatttcaaggcaccaggcttctcaagcatgtgcagatggcaccatgattcattaacttcctttgtctggagtgcccctttgattaacttggtgctaacacatcagataatagtggcaattatagtggaagattttatttctagttcattaagctggaagtgttttgtttctctttcatacgtaaaccatgttttgtttcctatctaattatccatgttgatgttttaaagtgggcatgataatagattttattttgtttgcagttgtgtcataagggtaattcct

SEQ ID NO: 221326 - DNA, 554 bp, Homo sapiens
tgtgataatgaagtaggctctcatttgtcaaaaatagctacacgtgcacatcgtaaaagaagcaaactagggttgcttgaaaattctgttccctcaggatgtgtgtattgacaagctcagacaggtctcacacgccccacatgccaccccagcccgcgtaccccacatcacttagcacccattgctgcccactgagctgcctcagtcctgcagtccccgtgtttggatggcaggatcccagggcagtgagtttcagggcataagcagacgttgccacgttgccttcaatcctactggacaagcatcggtgctggcctcccccatgtcctaacagctacagccagtttaatctttgccattctggcagatttaaaaaaatgataactggtagttttaatatgcatggatctaattcatcgggtatatctaagttgtatttccgtgaaacatctgttcatatcccttgccgattttctataagattgtcatcatttttttgttaattgtagatctttatttattaaggaaattatcccattatgatagaacgtgtc

SEQ ID NO: 221327 - DNA, 567 bp, Homo sapiens
gttgttatcttttaggagaagatgcgttgccatgctgagaacatactattcctattcttgttcattcagttattttattaaacacaggtgtagcaaagtattatttcaggtgccaaaggttaaactgcaagttattgttcctgccttctagagcttacaatctgattgggaactgaacagtactggggcaaaacagctcagtaaagggggagagcggtttcgccgggataatgagtggcacagtcggccctacaggagggagaaacggaaaaccgctggtctgataagggcaatgacagcttcaaggcacgtcacctgctgggctgagcctggagtactgtcagtgtttacattaagggagagggaagggagaaccttctagaaaagaaaattaggctttgactagggatcatggattagaataaccccatttaagaagagacagtggtttgacgagaaaaccacgatttatttgagatcatttgaagggatagtgacagacacagacgcagggctcttccacgagtccctgatgtttgacggcagcagctttgtgctggggacaag

SEQ ID NO: 221328 - DNA, 630 bp, Homo sapiens
cccatgagctcaggcaccctaggatcccctgttagactattaggctgtccagcatggtctcctttcccttcttggtggtggtcttttccctttccagaatagaacagtgattcttaaaataagttagagcaggccgggcgcggtggctcatgcctgtaatcccagcactttgggaggccgaggtgggtggatcacgaggtcaggagttcaagaccagcctggccaagatgatgaaaccccgtctctattaaaaatacaaaaattagctgggcgtggtggcaggcacctgtaatcccagcttcctgggaggctgaggcaggagaatcacttgaacccggggggcagaggttgcagtgagccgagatcacgccactgaactccagcctgggcaacagagtgagactctgtctcaaaaaaaaaaaaaaaacaaaaacaaaaaagcaagatcatccactacacatgaacatgaatcacagtattatttgcacaggaagggtgtaacaaaatatgaatgtatcaaaaaatagaaataaagtctttgcagaaaaagtctgtttttctctgaagtgtgttgagattatctgacaactctaagattgtacttaaattgtcaataaagcatcaaaagag

SEQ ID NO: 221329 - DNA, 482 bp, Homo sapiens
tacagtccccaatgtgaaagggtgcctgaaattcccattaataaagtcatctcttgggttaagtctgcattcgtcactcaatcacagcacaccacttttagctttgtcatatttcctacttttacttatttccttaattcatcttccctctttaatttaaacaaatgtatttaaaatgcaaattgtatgtcatgactataaacagaaaccaattgcactttccataagtagaaagtaaccatgaaaataaatacaacaatcacaaactgtagtggcaaaaggatggtggatggaactgtatttcaacatattctttactttgtaatactaggtattttattgtaagaatttacaagcattattttgatatagggttcatagactttaccagatgtccaaaggagcccatagcattttccttaagaacaccagagtagagataccaagacattgactgagaagcttgagatctttctctgtta

SEQ ID NO: 221330 - DNA, 283 bp, Homo sapiens
tgtccaaaacagaaaaacatccctgcctcatcaagtttttaatccaggaaaagacaggcattaaagccaaaaagtgagcaaccagtgtgaaggtgaaatgtgctgtggaagaaaaaagttaaagcaggaacaggcgtctgattgtaactttttgataaggtgctgtgggtatatcatggaaaagcgttcctctacccatcagtatttcagtctggaatctgcagttgtctatttttatacttttcttctcttttcttctttctttctttctttcttttttttt

SEQ ID NO: 221331 - DNA, 627 bp, Homo sapiens
tcaaaaatgttatgttggcttattggttatttcacccttaaagttatacagaaaatccgaaagtacctaataatagcttacaaacaattatgaatttattatttgcctatcaaatccacgattgataattcaaatattcaaaattatgattaaaaaaagatttttagtgaataaaactactaaatgtataaaacaaatagcatgtaaaatgcaaaacataagtgatgtcaaatgtataaatgctactggtatgcaaaaagtttcctatgttttcaaatgcacacacgagaaaattaaaatattctttaacaggttacttggcatttttaaaaagctccatcaactatatatccattttatgacagaatgaagagagaaatacatttttttcagtacttactggtagaactcttatatatattttaccatggtaagaccttttgtttgtttgtttgtttttgagacagggtctcactctgttgcccagactggagtgcagtggtatgatcacagctcactgcaaactctgcctcccaggttcaagcgattctcctgcctcagcctcccaagtagctgggattacaggcatgcatcaccacgaacggctaatttttgtattttgggtag

SEQ ID NO: 221332 - DNA, 391 bp, Homo sapiens
cctgaggtcacacagcatactaaactgatgctgtagactaacatggaataacaatcttttattaagtggaaaaaaacaggttatggaacaataggcaaagtggtttgatttacgtagaatagactcacgtagaaaaaaggctggtctaggtgcagtggttcatgcctgtaatcccaacactttaagaagctgagtggagaggttgcttgagaccaggagttcaagatgagcctaggcaacatagcgagaccctgtctctgcaaaatttctttttaaattagcacgcccaataatagtcctagctagttgggaggctgaggcactgtgatcgtgccactgcattccagtctgggtgacagagcgagatcctgtctcaacaacaacaacaaca

SEQ ID NO: 221333 - DNA, 506 bp, Homo sapiens
ggtggacactcgggctgggccaggaagggaggtgcgcctggtgctagcaggagcgcactgagagcgggctcaggagtccctggctggaaggacccttcccacagttgtctgctgagagccctgcatctaacatgaaggcaccgaggcctggcaattgcaggcagagctattctcagcccgagagcctcctgattctacatctcgagccactgccatcactccccatgtgggtgctgaagaagaacagccacagcactacgggagtgctccaggcctttgagacgcaggactcaaactgccaccgactggctgtcacttatgccatcagtaaaatggggtatcagtccctgcctcatggagccctgggagatgacgtacaggcagaggctggagtctgagagcactgagcagtgctggccaccgcccgactccttgactcatgccactcctttactaattctttgtgagccccactttaagtaaatgtctggagaggaccaattact

SEQ ID NO: 221334 - DNA, 468 bp, Homo sapiens
cagccttttttcattttttaaaaagcttgaatcgaataattttaggccagtggttctcaatgcacagatatactcacaaagttttatagaaatagagaagtctaagccctactccagacttactgaatctcttttcttgatattcttggtatgctatttacatgctaaatctaaggattattgtgtgttgtagctcaataatttttcctctataaaacatattcatctagttttataaagtggatatgacattcactaatttcttaaaaagtagacttaatcattaccctaggagatatttgtttacatttttttcaagtgaatggctttattatctttgttttgcatgccaccaatcaaacaaccaactttccttgttgcattgttcttgcattatttttattatacattctcatcagtccttttacacttgaaaattaataaaataattatagctctgtcaatcat

SEQ ID NO: 221335 - DNA, 679 bp, Homo sapiens
cgcgcagcggagagaaaagagagagcgaagagagggaaaagaggagaggaggggagtgaagagtagaggggaggtgagagagagaaagggagaggcggagagagaaggagggagggtagtggggagggaagaggggaagagagagagaggggaggggagacggggcaatagtagggcagagagaaagggaaggaaggagaggagcagaggagaagagggagagaggagggagagaaaagagatgaaaagagaaggggagagagaggagggagggagggaatgaaggatgacggaggaagagaaagggagggaagaggaggaaggaggaatggggaaggagaaaggaagagggaggaagagaaaggggaggcaggagaaggggagaggatggagaaaggagaggggagaggggagggagggagaatgaggggggaccgctaccactctccctcttcctatcctctacacaatagctagaatgattccttaaaattcaaagagcatgtcaatccattgcttacaattctcattggcaaattattaatacaagccaaagtcccggccaggcgcagtggttcatgcctgtaatcctagcattttgggaggctgcggtaggaggattgcttgaggctgggagtttgagaccagcctgggtaacatagtgagacctcatttctac

SEQ ID NO: 221336 - DNA, 481 bp, Homo sapiens
gggtatacaagtgaaggggtgaggtttactatgaagacctcacatttcagcagatatctctgaaggagggacgcagtggttcaagtatatatttggtagaagagcatcccagcgagcgaggtcagcaagtgcaaaggcctgaggtaggaacatgcttggtacggcctgccatcatgtcttgccagacttattaagagatccctaacaggcctctctactttcacacttccccctcctttctcccactctccctcttcctatcctctacacaatagctagaatgattccttaaaattcaaagagcatgtcaatccattgcttacaattctcattggcaaattattaatacaagccaaagtcccggccaggcgcagtggttcatgcctgtaatcctagcattttgggaggctgcggtaggaggattgcttgaggctgggagtttgagaccagcctgggtaacatagtgagacctcatttctac

SEQ ID NO: 221337 - DNA, 497 bp, Homo sapiens
aaaggctgcaggataaaagtatttgaaggatgtaatttgggaggttaaaagccctggggggatggagctgggagtcctgattcactctgaggccttgagagccacagggagctgtgcaggtgtctctcctgggctgagaggtgttcccatcatctcctgggctgagaggtgttcccatcagaggcatcgaccaggcctctgccacaagtggaggtgggagcaggtttctggtgtgatctggaaaacactgaaagactcagaagaccccaggttgcttcctcagaccaccacctgactcttcctccttagagttcagaagggatttgatcagtgtttcctaaccgttccagggaggaaaggcccttctaatgtcaaattttgagtgtctctgtgtaacaatagttatattttaaaaatcttttgctgaacaaaatgtagtgggctatataatgcatttttattatacataataaaatatatacacacttgaaaatata

SEQ ID NO: 221338 - DNA, 553 bp, Homo sapiens
gagagtatttcagtaactttataaattaagtaagtttttgctggccaatttggaaaactaaacaactattttaaaagaggaaaacgcacaccggaatcaacaagtaaaaattgaatgtcatttttattactatttttacttataagaattatagaaatatttggttatttcaattccctatgtgtataactcatcacaatttgataaggagataggtttaagtgtatgtgtatataaaaagagactgaaaggaaaaagataagtagttatctctgattggttgttgggattagctatattttccaaatactctagaatgaatatgtattacttttctattattaattgggttagggattaaaaaaacattagacctgtatgttaaagttgaaccagcatcgtcaggaaggatacaaaaatcacctgccaaacgatgtccatttcaatttactttatgtcctttctaggaccactgtgagcagttgtaggtacctgtgagagtgctcaatgtaaaaaaaaatttctgttaccctaaattgggttaatgataagt

SEQ ID NO: 221339 - DNA, 109 bp, Homo sapiens
atttaaatgcatgaattctatggtatgtgaattatatatcaataaaattattgtagaaaattcaacggcattctacaaaatgtctgaccagtattctttaaaactcaaa

SEQ ID NO: 221340 - DNA, 396 bp, Homo sapiens
gtttttaataatcttagcctcaatattgttctcatactggtaagtgacaccatcagttgggacacacagtgaactcagagctgtcaaacataaattcttataaaggtgcagacaggtttgtacatgtagaaatgcatcttggtagccttgatcatctaggatatgctgttacaaggagtgattcatggaaagatcttaatcacagcttgaaagacagttttggccctatagaaaaccacataggatcatataggttaaaatgatggattgaggctgggcgtggtagctcctgtaatcacagcactttgggaggccaaagcaggtggatcacttgaagtcaggagttcaagactagcctggccaacatggtgaaaccccatctgtactataaataca

SEQ ID NO: 221341 - DNA, 204 bp, Homo sapiens
agtccacacgctgtgtgattccattcataccaacgtccagactaggccagtccgtacagacaggatgcggacgtggaagacagcgacactgatggtcctgaccctgtgcgggtttaggctaatgtgtgtttgtgtcttagtttttaaccaaaaagtttaaaaagttaaaaaaaattaaaatagaaaaaaacgtatagaataaat

SEQ ID NO: 221342 - DNA, 362 bp, Homo sapiens
ccgtcgtcgtcgtaggagacgacagctctgtgccggttattctagaacaagccgtcgtcgtcgtaggagacgacagctctgtgccggttattctagaagaagccgtcgtcgtcgtaggagacgacagctatgtgccggttattctagaacaagccgtcgtcgtcgtaggagacgacagctctgtgccggttattccacctgaagaccttgcagtgggacaggatgcggacgtggaagacagcgacactgatggtcctgaccctgtgcgggtttaggctaatgtgtgtttgtgtcttagtttttaaccaaaaagtttaaaaagttaaaaaaaattaaaatagaaaaaaacgtatagaataaat

SEQ ID NO: 221343 - DNA, 296 bp, Homo sapiens
gctggggtgccaattccaaatggattcggctatgggccaatgtccattctaaactctgccctcaaaaggatcaactggtttggatgcttgcagatggtcaggagaatcctttctgtgcaaatctgggggtcctggtaatgttcactcggtgcaccatctgggaggctggaatttgtcttaattccagaattaacacaaaaatggcaaaaccccaccatgttaaacgttcctcccttcagatgcggtcttagtcacttttctgatgcttctagcagaatacctgaaactgagtaatt

SEQ ID NO: 221344 - DNA, 412 bp, Homo sapiens
agaggtgaccgatttgacgcgtctcctgctcctttcatcgataagatttacaagccacacaaattagaaaggaagaaataaaaccagatgtatttgcatatgacatgatcttgtatgtaggaaattctaaggaatccacaaaaccgtcagaacaagtaaacaaattcagcaaagttgcaggtgtaagagtgatataaaaaaaattggcctggtgcagtggctcatgcctataatcccagcactttgggaggcctaggtgagcagatcatgaggtcaggagttcgagactaacctgaccaacatggtgaaaacccatctctactaaaaatacaaaaattagctgggggttgcggcacgcacctgtaatcacagctgttcgggagactgaggcaagagaattgcttgaacccag

SEQ ID NO: 221345 - DNA, 614 bp, Homo sapiens
aagcggtcgatctagaggacccccgtacatgtcgaggctagtgtgtgttgagagatggggtttcgccatgttggccaggctggtctcgaactcctgacctcaagtgatctattaggcattttagaatgtgagaaatacttgggttaccttaaataatagtagttcattgggaggatatgtagaaataagagaagactgtttacagagctacatcttgtagaagaaaacaggaatcaccaaacactaggctttgctgaagaacaattcaccagctcttacagaaacctgaatatatttcaggactcagaaggtggctgagaatagtacagctctagcagtaggcttgccttgttttaattcctcaagcagcaggtatcctgtaattcctaatttagttctttgctgttatagtagtaggtctcaacccagggtgattttgcctctgaggagacattttgtagtgtctagagatattttgattgtgaggactaggggaagggttgctactggcatctagtggatggaggtcggggctgctgctgctcttgctaaacaggctgctgctcctccatgcacgggacagcccacccataacaaagactctatgtggttca

SEQ ID NO: 221346 - DNA, 496 bp, Homo sapiens
tcagcctcccaagtagctgggactacaggcgcccacccccacgtccggcttattttttgtatttttagtagagacaaggtttcaccgtgttagccaggatggtcttgatctcctgacctcatgatccacctgactcagcctcctgaagtgctgggattacaggcgtgagctactgcgccagcccctggctttttttttaagtagagatggggtttcagtgttgcccgagctgctcttgaactcctgagctcagacaatctgcctgcctcagcctcccaaagtgctagggttacaggcgtgacccaccactccaggcccacagcttgacttttaaccaccacctgaacttccagccccttactctactgagacatcctccacgctaaaatgaagttggctccttactttatgcccttcctttgctcatagctcatgggaagctggtttctccctgcctgccaccacctgccccaagtagttccatcgccagttcttt

SEQ ID NO: 221347 - DNA, 337 bp, Homo sapiens
cttgcagttgacttcaatgctagctaggctactttctccaagcagtgagaaagtcctaaagagtcttgcttcattttattccaacttctggagtttttaaaccagcattgtttgtgttcttccatatgtagaaactatctctaaacctatcctctcattttccagtttagaaggtgctttcagatatttaggatcttattagttactttcaaattagtattccaatcaaaacgagttgaaataaaaacctgtctgtcctttaacactttgattatagtttatgtacttctatttacatgggtaaaatgtatagtcactaggaataacatgtcaacac

SEQ ID NO: 221348 - DNA, 475 bp, Homo sapiens
gaagaactggcagaggtgttcaaagacaccagcgtttttttcttctccccccatataggaagcaatatagagatttatttctgaactgatacgaattatgccactaatcttaacacattgaaatggatacagtcagttttgatcttagataaaattctttctattaagcgatttcaagaaaacagcaccaacctttgaaaaattcatgatctaaagaaaagtaaattataagaataacttatgaaatataaaatacaaataatgtttaatcccttaaccagctaatctttaacaagaaaacgggtgaaactgttcagaattattaagagctaatacacaaatccagaaagtcttaaaactcctaagcaggagaaattttttaaaactccacatctacttacatcattgtgaaaattcagaacaccaaagaaaaattggtcttaaacatcaaaaagactgacagcagatttctcag

SEQ ID NO: 221349 - DNA, 210 bp, Homo sapiens
tgacttccgggatgccatacttgtctggctttcctgccatctcactagccacatacattgtactccactgtcttcctcaatctctttttctagttccttctcatccccccaacttctaaacattgtagtcctgagagttcttccttgggctacttctgttttgcatctacactatttgcatgactatctcatccctgtattctctacatt

SEQ ID NO: 221350 - DNA, 293 bp, Homo sapiens
gtggaaagggggacggtccctgttccagctgtcctgaagggagagggaccctaggcaccaagacggagctcttcatgcatcttcttgtggaagcgctttccagataacttccggataattgtgttcacatgttcattgcttcacttggtagggctttatggcgctcccaatgtcagccagctgcggtgccaggagctagggtgatgtcaggcccctgctgtcacggagcacacagcccaggtgtggagacagaccccaaggtgaaaaaaaagtaagcaagagtatttcagata

SEQ ID NO: 221351 - DNA, 432 bp, Homo sapiens
tcacacaacattttcaacttcattcccttggccagaatgtactctcatgaacctatctagctgcaaggaaggctggaaaagaaagtcttcattcagctggccatatgcccagctaaacttctgttactatggaagacaagttgaaccatctagaaacaaacaagaataaccgaatgagaaaaacaaaagctatttatttgagcttgctgtagcaagggagtcagccagtcatcacttgcatcttggcagagaattaaaagcaagcaaaggaatgaaaggttcatagagggaagaaaagggaagcctttgggtatgccctgatgggaggctgctgacatagagaagctatagaccggctgactagaaacaggacgtccttgtgattggttagaaggtcaacccgccccgaatttagtagtagtaggcggccgc

SEQ ID NO: 221352 - DNA, 788 bp, Homo sapiens
cttttttctgttcccatagtgatcaagcactaatgtcattcactagtgaaaacttcactggaaaacaaactaaaccaatttaggggaaatgaaattatagatgccacatggagatagttaagaaatgcatagcaccctctgccacacacacacacacaccatgcccatcccactctactgagtaatctgaggaaactccccaggatattcagatatagaaagccacacaaaccctcctgctcccacagctccctgctacaagcaccactgagaattcttggatagtataagctttgttttatatagttgtaagtcttgaagacacaaaatatatatgggttgaatgcctcttgattctcattatgtctaaaatattcccataggccaaggccaatctgaatacagtatgtaggaagtcctacataaaaatgcataccagcaaagatggagaaaatgcaaattaaaacagtgattttttttttttttttttttttttttgagatggagttttgcttttgttgcccgggctagagtgcaatggtgtggtcttggctcaccgcaacctccatctcctgggttcaagcgattctcctaccttggcctcccaagtatctgggattacaggtgcccgccaggcgcctgccaccatgtatggctaatttttgtatttttagtggagacggggtttcaccatgttgggcaggctggtttcaaactcctgatctcaagtgatccgcccacctcggcctcccaaagtgttgggattacaggcgtgagccactacgccc

SEQ ID NO: 221353 - DNA, 405 bp, Homo sapiens
aatataatagagcaaagataatcaatacaaaaatctgaaaaaaatcagaatatgaataagaaattcaccagatacctagatgtcatgagaaagaccaaacagatatcttggtagtaaagaattcaatgaataaagtaaaaaaaaaaaaatattttcaaaagcttcaacgatagactaggtaaggcagaagaaaaaaattcaccacttgaggactagatttctgaaataaaccagatagaaaatataataaatcatctaaataaagccagtattcaatataacataccatgtagttaccaaaggtttgattctgagtattccagaatactcaagaagaagagatgggcagaggcatgacaaaaattttaaactaagcacatgtaccctaaaacttaaagtataata

SEQ ID NO: 221354 - DNA, 545 bp, Homo sapiens
agagaaacatatcctatgtaattctggacctctgagccattgtggtttcgtacttttactgcatttagctccctttccaagtcctcatttttaaaaaaccttttattttaagttcaggggtacatgtgcaggtttgttatataggtaaactcatgtcatgagggttgtacagattattttgtcacaaagatattaaacctagtagccattagttatttttcctgatcctctccctcctcccacgccgcaccctgcaccctccaataggaccctgtgtgtgttgtttccctctatatatccacatgttcccatcttttagctcccacttataagtgagaacgtgcagtattcggttttctcttcctgtgttagtttgctaagataatggtctctggctccattcgtgttcctgcgaaggacatgacctcatccttttttacagctatggctgcattgtgtccagtctaccattgatgggcatttaggttgattccatgtgtgtgctattgtgaatagtgctgcaataaacatatatgtgcatgtat

SEQ ID NO: 221355 - DNA, 318 bp, Homo sapiens
gagaaggtcaaaccatctccagtcataaagcagcccccaactcagcttttagagccacattcaaagtaattaactggtattatctgtccaagagattggatggataggaagttaaacttctgggagatgcctcattatttgtaccagtggctccacattatttcttgattaattgtgcagactgagaagctgacagctagtttttccaattcaagagtcatcatggggatgttctcaattgttgttagtgggacttgtgttgtttccatgtcgagatattgtaatgccggtaatttaaacagataataatctccaata

SEQ ID NO: 221356 - DNA, 346 bp, Homo sapiens
caggatgtatgaaaacaaaggagaagcttggagaagaccgccacccaaaaggaaggtgatgatggcttgagctaggcagtaaaatacaaggagaaaggaaatggtgaattgagaagttatctacagtttggtgagatgaatagtttcagggaggaagaggacaaaaaaaggaaaaacaaaacaaaacaaaacaaaaacccctaccagtttctaaactaaggggcttctaaatatcacttcaaaaatttggagaattagaaatttggttttggaaccctccatcatttacttcctgggcctcctcctctgcttgtctttgccttaaccaagacctgatttcagaaaa

SEQ ID NO: 221357 - DNA, 690 bp, Homo sapiens
ccccggcccagtggaggagatgctggccgaggtcaacgccaccatcacggacattatctcagccctggtgaccagcacattcatcattgagaagcagcctcctcaggtcctgaagacccagaccaagtttgcagccaccgtacgcctgctggtgggcgggaagctgaacgtgcacatgaatcccccccaggtgaaggccaccatcatcagtgagcagcaggccaagtctctgcttaaaaatgagaacaccgcaacgagtgcagtggtgagatcctgaacaactgctgcgtgatggagtaccaccaagccacgggcaccctcagtgcccacttcaggaacatgtcactgaagaggatcaagcaagtggtccctgagtttgtgaatgcatctgcagatgctgggggcagcagcgccacgtacatggaccaggccccctccccagctgtgtgcccccaggctccctataacatgtacccacagaaccctgaccatgtactcgatcaggatggagaattcgacctggatgagaccatggatgtggccaggcacgtggaggaactcttacgccgaccaatggacagtcttgactcccgcctctcgccccctgccggtcttttcacctctgccagaggctccctctcatgaatgtttgaatcccacgcttctctttggaaacaatatgcaatgtga

SEQ ID NO: 221358 - DNA, 515 bp, Homo sapiens
gcaaactttctacagtgaatatatattgtctttataataaggaaaaatgattgaaataaattgagaggtataaaacaaaactataacaaactttcttttgtttattaccatccaacttaaagactgaaaagtccaagagatttggagggatgcaccagtaagatccatattgaccgtaagagaatacacaaggggaatggtacgctgcccgcacgtaccgcagcccctcaccgtctcagcaccactgaggaatcgggctcctgcacttggagaccagcctctgtgaaacacaggtgtagtgagtcatgagatacgctgacaaacgggatgtgaatatcatggaagctccaaaactcccagtaaaggcaaaaagaaaccagttccccttgacctgtctccacatatcatggctctacgtgtgagaagagttatcactctttcttcaaagatttccacgagggaaggaaggaaggaaggaaagaaggaaggaaggaaggaaggaagggagggaggga

SEQ ID NO: 221359 - DNA, 399 bp, Homo sapiens
agggctgtagaaagggaaaaaagaaaagactaacaagtatagagggtcaccagatgttttctagaaaatatgctaggtactgtgcaaatattgccacattttagttaattttcaaatgtgctgggattacaggcgtgagccacctgcctgacccctttgttctatttatttcaatgtttagaacagatgaagtatgtggaattgaacggaattggatttttattttattttaatgagcatcatgaggtagtcagtgagtattggcttttttgacaaggaaaattacccaaatcacccaagagttccattaagaaacaaagctgtgaatcaaaatcgtacaatgctttgctaacatttgaccttatttccttatagaaacaaaaagggctgtagaaaggg

SEQ ID NO: 221360 - DNA, 322 bp, Homo sapiens
aaaacaattaatgtcccttttttgaactttaaccttccttgtgtctgaaagtattaagcttaaagaagaaaaaataaaaagacttgtggaagatatccggcaccaataaagaaattaaggaaatatgatgtcttttgaggagtgtcctggagaaagtgttcataaatccatttgaagaaaaatgcatatgtattagatattataatcttctgtttcagtgaattacattttgtaatccctcattatatattgaaggacatagcatagctttcctttctagcatctaggtcactagtggtatttgagcaatataaatgaagca

SEQ ID NO: 221361 - DNA, 461 bp, Homo sapiens
ggatggtagttaaaaatacatactctgaaccccatctgcctgggtttgaatcccagctctatcccttgtgagctgtgtgattttgagtaagtgacttaaactttctgcacctcagttttaatatatatgaaaaaaggataatattagtactcccttaaggttgtgttagggattacatgaattaatataatgtgtttggatcagtgcttatgttggaagcactaggtaagtgtttattattattacttctcattgtagtctcctttatgaaacgtgtgtgcatagcctgtctggaggatgactttttgtcttttaaagagagaagctgtactacttctactgtaccagaaattcatctgagagcaggttactttctcattgtaaagtccatgcaagccagataaacctatagggtagcacttccttaattagtttacaatttctgaggataggttggtggg

SEQ ID NO: 221362 - DNA, 399 bp, Homo sapiens
acattgtttttcaggaacttggggtcaactcttgtctggttcaagccatctgagaccactgaccctccaactggacagggttgattccctgcagcaatgttcaatgagtgatcttctaacattagagggacaaaaatatcactctcagatgatgttaatgatgccattttgtgaagatgtattccataaagagccatgaagcttgactacatttgcatggaccactgattacctcatttttcctcactcccaatcacctttcctaatgcgttggaccaccttgctcctttatctcataaatatctgtaagaccccatcttcagggaggtggatttgagaggtgttctcccacttccttgtttggctgctttgtgaataaaatcttttctctactgcaaa

SEQ ID NO: 221363 - DNA, 394 bp, Homo sapiens
gtggcatgattgtcccactgcatgccagcctgagcaacagagctagaccgtccctgtctaaataaataaacaaataaaagtagtcaccatcaaaggatataaatgaagcagaccatcattttgaaaaatggtaaacaaaaagaacaaatcaagccactaactggccttttctatataaattgtacaactgggtagcacaataatttataagaagctgcatctcttttttatatttacttttttttcttcatggaaggcccttctcagggtagcaatatttctttctggaagtatggcagctcataaatgaagaaggaatgatataacaataccatcattgttcaatccataattgatcactggctgttaacattataaaaaaaaaaaggtggcc

SEQ ID NO: 221364 - DNA, 556 bp, Homo sapiens
ccattctggcgtttggaggatggtggccctcttctcacagctacactaggcagtgtctcggggggactctctgtgggggctaccacctcacatttcccttctgcactgccctagcagaggttctccatgagggctccacccctgcagcaaacttctgcctggatatccaggcgtttccatacatcctgtgaaatctaggtggaggttcccaaacctcaattctttacttctgttcacctgcaggcccaacaccatgtgtaaggcaccaaggcttggggcttgcaccctctgagtcaatggcctgagctatatcttggccccttttagccacagctgggacacagggcaccaagttctaagactgcacaaagcagcaagacctggggtttagcccatgaaaccactttttcctcccatcacaagcctggttacacggttaggtggaaaagacaagttgtatgtagagatcattatcagaaattgctaaactctgtcatcaaaaactctgttggaatggattttaaaatttcttaataaaagatgaaacatgactttg

SEQ ID NO: 221365 - DNA, 495 bp, Homo sapiens
taatggactcagagttctacatgggtggggaggactcacaatcatggtggaagatgaaagaggagcaaaggcacatcttacatggcagcaggcaagagggagcatgtgtaggggaactctcctatataactatcagatcttgtgagacttattcactattgcaagaacagcatagaaaaaactcatccccgtgattcaattaccacccactgggtccctcccaggacatgtggggattatgggagctacagttcaagatgagatttgggtggggacacaaccaaaccatataattccacccctggtccctcccaaatctcatgtccttacaattcgaaacacaatcatcctcccatcacaagcctggttacacggttaggtggaaaagacaagttgtatgtagagatcattatcagaaattgctaaactctgtcatcaaaaactctgttggaatggattttaaaatttcttaataaaagatgaaacatgactttg

SEQ ID NO: 221366 - DNA, 291 bp, Homo sapiens
gatggagctaggtgctgtgactcacacatataatcacagcactttggaaggcccaagtgggacgatgacttgagttcaggagttgaagaccagcctggacaatatggtgaaacccatctttacgaagaatacaaaaaattaggcaggcatggtgctgcacgcctatagtcccaactgctcaggagacttaggtgggaggatgggctgagatgatcctcccaccctcattcacttctgtcaggctagactctctctccttttcattggcttgtcttagctattaataagtct

SEQ ID NO: 221367 - DNA, 873 bp, Homo sapiens
tctcatttgttgtcttgccttgctcttataaatgagtcattcctaattgcactttgaaaatttatgggaaaatttaaataattgaggaatgaactaccaataaaaacattttcattccatcagttatagttcttgtatttcattggtgacaggaggcaaatatttgtatttattgatgactaaaaagttatagcaaagaaaaatcttttttctgaatattgacagaaaaagaagtcttgggttgctatattgaattgaaatgatatttttcttgttatcatccttttataaagcctgttgagctgcctcttcccatcctgtatgtttttaaatcatcaagtgcttagtgatttctaaaagagttatgtattcagtgttctatttatcctagtattggtgttctcaatctgtaacatggtaatgtcttacaatattgatacctaaataaaagttgacttaactgatcagtttttatttggattcctcctcccagtgaaatggtgagctggggctttgtaaggatcttggcttcatacggtggagaaacgggagactatgccctggagaatatgggactctgcatattccctgccaacaataaactagtagtaagactagcagggcgagggccagagcctgtaaattactaaggcagaaaactatgtggcaccctattcatggaactaccaggttcagaaggtttaccctgggtgcattttcatattcagaactctaaggtagactcattactgagctcagtgtctggcacagggtgagtactcaagtttataaggatgaatgaaccaatataactttacataattttctcagttggttttataagactggatctaaatatagaaggctctaaat

SEQ ID NO: 221368 - DNA, 426 bp, Homo sapiens
tatttgaaagggctgctctgaaactttcggcagagcaaggatgcccatctagattttaatttaaaaaggaactgttcaggatcagctcacctaatggagatgctgtgtttctgcatggcattgtctagtagaaataggatgagtatctcccgtccatgtgggcaggtcagctaactgcacctgaacttgcctaagtcatctccccacagaattgtctgttccgtgataggattagccatgaaatgttggccatgattatgtggaacacagatcatcagcattggggctatttccagcaagactgtactaaaacacagtaacttgtaatccttatgtatctgaagggaattgttataaagaacagtaactgagaatgcacacctaagacataaaggaaactgtgcttttgaatggcatcaacattca

SEQ ID NO: 221369 - DNA, 529 bp, Homo sapiens
tctcagctcctgcccttgccctcactgcatcttttgtttaaccaaaaccaaggaagggagccctgttcacactttgtgctttgctcttgctgttctgtgtctagacagccaaccctttcttacgtatgtgtccgtggagcttcagctcaggcctccctctctcaaaaaagcctccagaattcttacaggttgtagtaaatgcccttttgtgctcctaaagtagtggttcttttttttttggacagggttttgctctgtggcccaggctggagtgcagtggtgtaatcttggctcactgcaacctctgcctcccaggttcaagtgattccagtgcctcagcctctggagtagctgggactataggtgcatgccaccacaccaggctaatttcatgtatttttagtagagacagggttttgccatgttgcccaggcatgggcaatttcatgatttccttgattggctctgttgttaagcctgtgaagttatgcaaaacagttgaacatagttttacccatcaggagtttat

SEQ ID NO: 221370 - DNA, 464 bp, Homo sapiens
ttagcagtgtatattgaaaacttgttatgaccaacgctccaggctagacctttttcggggacccaagaagatgaatctgttatcacccggcctcaaagaagcatatagtttagtaggacaaacaaaagcacacatatcacacatagataagtatagagtggagaaactttcagactgtacttcttagcactatgattctatagaaaaatctggctatgtgtctttttttatgtgtatttctgaattacaagtgatctttaagggaacctagcatattgcctggaacatagtaggtgttcaaaaatgttgaaagaatgggcgaatattctctagtgcctgggataagacagcatgctagatgtaatgtgagcctatgtatgtatgttaactgtctctgctggaaaacaaagtactttagaattaaactgattttatctggctttcaccattttatagaacaaaat

SEQ ID NO: 221371 - DNA, 525 bp, Homo sapiens
gggcccaaggagaagatactagtctgtaaattgttctcttagaaaactggccacaatgggcaagtcatgggaaggtgaggggcagaactgcactgcaaacaaagattgtcttattatgcaagcaaggtctcctaggtaatctttcagagctgctcaaaagaatagataaaaagtctgggtgtggtgaaggctttgtctcttctctgtttaatcttggttatcccatgaaattcctagggtggggatcgtaagacaattgcatttcttttggaggaagttttcctcagttcgacaaggaaacttgcagagagagtgctttgggaggagagaaaatggttaaaaagtctttgatttgaggcagcttctaagaccttccagttttctttaatttaatagttctcagcatgcctaagcactttactttggggcggcattctctgtaccccaacaacaatttaaatttgttcttattcatactttaatttcactaacaattaagagttgcttcagtaaagtctgtgacca

SEQ ID NO: 221372 - DNA, 576 bp, Homo sapiens
gggcccaaggagaagatactagtctgtaaattgttctcttagaaaactggccacaatgggcaagtcatgggaaggtgaggggcagaactgcactgcaaacaaagattgtcttattatgcaagcaaggtctcctaggtaatctttcagagctgctcaaaagaatagataaaaagtctgggtgtggtgaaggctttgtctcttctctgtttaatcttggttatcccatgaaattcctagggtggggatcgtaagacaattgcatttcttttggaggaagttttcctcagttcgacaaggaaacttgcagagagagtgctttgggaggagagaaaatggttaaaaagtctttgatttgaggcagcttctaagaccttccagttttctttaatttaatagttctcagcatgcctaagcactttactttggggcggcattctctgtaccccaacaacaatttaaatttgttcttattcatactttaatttcactaacaattaagagttgcttcagtaaagtctgtgaccaaaaaaaaaaaaaaaaaaaaaaacacaccaaaaaacaaaaacaaaaaaattc

SEQ ID NO: 221373 - DNA, 521 bp, Homo sapiens
caaaaatcacatgatcatttcaatagatgcagaaaaagtattcaacaaaatccagcatccctttatgattaaaactctcagcaaaattggcatacaaggggcctatctcagtgtaataaaagccatatatgactaactcactgagtggggaaaagttgaaggcattccctctgagaactggaacaagacaaggatgcccactctcaccactcctcttcaacatagtactgaaagtcctagtcagagcaatcagacaagagaaagaaataaagggcatccaaatcggtaaagaggaagtcaaactgttgctgtttgctgatgacatgattgtatacctagaaaaccctaaagattcctccagaaagctcctataactgataaaagaattcaacaatgtttctggatacaaaattaatgtacacaaatcagtagctctcatgtacaccaacagcgactaagctgagaatcaaatcaagaactcaacccccttgccaatagctgcaataaaaacaaaacaaaac

SEQ ID NO: 221374 - DNA, 871 bp, Homo sapiens
gggctacaagtatgtgccaccacgcccagctaacttttgtatctttagtagagacaaggtttcattatgttggccaagatggtcttgatctcctgacctcatgatccgcctgccttggcctcccaaagtgctgggattacaggcatgagccaccgtgcccggccccttaaatctattttaatttactatcagggtcttttaatcaaaaagatttagaagtcagtaagagaatttatttaatgctctaaactgaaagcattctctatttagaggataggtgtttttccttctgttgaaaactgaacatgtgactctgaaatcttaccaggttgacaatggtattaaatcttcaggttgctcaggtgccatgaattcaggggatggataataagtataacgtatttgagatgtgtcagccacaaaaagaaagttccttaactgtcatcctgtggtttcctgactgttcacaaccttgccaactaccacaacagcattaattttatgtccagaattttctttttcctacaataaactgagttttactgtaggaaaaagttagggcaaagtcacccattgagcccaggataaccactggataagctaccagcaccagcttttgtaagactcagcttttttctcttaaaaaatgagttccaggaaaatgttctatttcacaaaggcagttttcctccaactcactaatgtttgttgatctgaacaaactcatgctttgttaataaattaagcaaaaatgcttttaaaattcaaccacaatgaaacatttcatcccgacctcattatgtgccatttccatgcctcgtcagagtttctgagaactcccctgtgtgcacctaagtgacagcagaaaaat

SEQ ID NO: 221375 - DNA, 142 bp, Homo sapiens
tgctaagtgctataaataaaatcaaacagaataacgaaagagaaagtagctagactggagggaaaagctgcttcagaatgagttgtcaaggaagcctctttgcaatcagaaaggtgagaaggatttagtcaggcaaatatca

SEQ ID NO: 221376 - DNA, 155 bp, Homo sapiens
tctcgatttcagctctctctgctactattccccttactgacttctcaacaggaggccttctttcaaggggaagaagacggccaactttggcaaatacatctgtttcacgtggaggggttccttgaaatccaagtgtggctatttggagcaggccc

SEQ ID NO: 221377 - DNA, 904 bp, Homo sapiens
tgtacggtcccgaatcccttggatgtccttggaggacgccgtgccgggtcagtgttagcctccagccctggttgtggaaggcgacagaagtcatggcgatgtttgagcagatgagagccaacgtgggcaagttgctcaagggtatcgacaggtacaatcctgagaacctggccaccctggagcgctatgtagagacgcaggccaaggaaaatgcctatgatctggaagccaacctggctgtcctgaagctgtaccagttcaacccagccttctttcagaccacggtcaccgcccagatcctgctgaaggccctcaccaacttgccgcacacagacttcaccctgtgcaagtgcatgatcgaccaggcacatcaagaagaacggccaatccgacagattttgtacctcggggacctgctggagacctgccatttccaggccttctgcaagccctggatgaaaacatggacctcttggaaggtataactggctttgaagactctgtccgaaagtttatctgccatgttgtgggtatcacttaccagcacattgaccgctggctgctggccgagatgctcggggatctgtcggacagccagctaaaggtgtggatgagcaaatacggctggagtgccgacgagtcggggcagatcttcatctgtagccaagaagagagcattaaacccaagaacattgtggagaagattgactttgacagtgtgtccagcatcatggcctcctcccagtaacttcaggtgtttaataaagatgtgttgactcagaaaaaaaaaaaaaaaaaaatcgggctttttttcggggcggaaaaaaaggttgaatggggctggcaatgtttctggcccattcttgtcaaggggaaaacgccggcccaaagggataataaacaa

SEQ ID NO: 221378 - DNA, 834 bp, Homo sapiens
aaggagctggagcgacaacaacgacgtcgtttccgtttccaccacctcttcctgttcccgtccttgaggacgccgtgccgggtacaatcctgagaacctggccaccctggagcgctatgtagagacgcaggccaaggaaaatgcctatgatctggaagccaacctggctgtcctgaagctgtaccagttcaacccagccttctttcagaccacggtcaccgcccagatcctgctgaaggccctcaccaacttgccgcacacagacttcaccctgtgcaagtgcatgatcgaccaggcacatcaagaagaacggccaatccgacagattttgtacctcggggacctgctggagacctgccatttccaggccttctgcaagccctggatgaaaacatggacctcttggaaggtataactggctttgaagactctgtccgaaagtttatctgccatgttgtgggtatcacttaccagcacattgaccgctggctgctggccgagatgctcggggatctgtcggacagccagctaaaggtgtggatgagcaaatacggctggagtgccgacgagtcggggcagatcttcatctgtagccaagaagagagcattaaacccaagaacattgtggagaagattgactttgacagtgtgtccagcatcatggcctcctcccagtaacttcaggtgtttaataaagatgtgttgactcagaaaaaaaaaaaaaaaaaaatcgggctttttttcggggcggaaaaaaaggttgaatggggctggcaatgtttctggcccattcttgtcaaggggaaaacgccggcccaaagggataataaacaa

SEQ ID NO: 221379 - DNA, 924 bp, Homo sapiens
tgtacggtcccgaatcccttggatgtccttggaggacgccgtgccgggtcagtgttagcctccagccctggttgtggaaggcgacagaagtcatggcgatgtttgagcagatgagagccaacggtacaatcctgagaacctggccaccctggagcgctatgtagagacgcaggccaaggaaaatgcctatgatctggaagccaacctggctgtcctgaagctgttcatgtaatcctcctgcctcggcctcctaagtagctgtgactagaggtaccagttcaacccagccttctttcagaccacggtcaccgcccagatcctgctgaaggccctcaccaacttgccgcacacagacttcaccctgtgcaagtgcatgatcgaccaggcacatcaagaagaacggccaatccgacagattttgtacctcggggacctgctggagacctgccatttccaggccttctgcaagccctggatgaaaacatggacctcttggaaggtataactggctttgaagactctgtccgaaagtttatctgccatgttgtgggtatcacttaccagcacattgaccgctggctgctggccgagatgctcggggatctgtcggacagccagctaaaggtgtggatgagcaaatacggctggagtgccgacgagtcggggcagatcttcatctgtagccaagaagagagcattaaacccaagaacattgtggagaagattgactttgacagtgtgtccagcatcatggcctcctcccagtaacttcaggtgtttaataaagatgtgttgactcagaaaaaaaaaaaaaaaaaaatcgggctttttttcggggcggaaaaaaaggttgaatggggctggcaatgtttctggcccattcttgtcaaggggaaaacgccggcccaaagggataataaacaa

SEQ ID NO: 221380 - DNA, 840 bp, Homo sapiens
tgtacggtcccgaatcccttggatgtccttggaggacgccgtgccgggtcagtgttagcctccagccctggttgtggaaggcgacagaagtcatggcgatgtttgagcagatgagagccaacatgtagagacgcaggccaaggaaaatgcctatgatctggaagccaacctggctgtcctgaagctgtaccagttcaacccagccttctttcagaccacggtcaccgcccagatcctgctgaaggccctcaccaacttgccgcacacagacttcaccctgtgcaagtgcatgatcgaccaggcacatcaagaagaacggccaatccgacagattttgtacctcggggacctgctggagacctgccatttccaggccttctgcaagccctggatgaaaacatggacctcttggaaggtataactggctttgaagactctgtccgaaagtttatctgccatgttgtgggtatcacttaccagcacattgaccgctggctgctggccgagatgctcggggatctgtcggacagccagctaaaggtgtggatgagcaaatacggctggagtgccgacgagtcggggcagatcttcatctgtagccaagaagagagcattaaacccaagaacattgtggagaagattgactttgacagtgtgtccagcatcatggcctcctcccagtaacttcaggtgtttaataaagatgtgttgactcagaaaaaaaaaaaaaaaaaaatcgggctttttttcggggcggaaaaaaaggttgaatggggctggcaatgtttctggcccattcttgtcaaggggaaaacgccggcccaaagggataataaacaa

SEQ ID NO: 221381 - DNA, 868 bp, Homo sapiens
tgtacggtcccgaatcccttggatgtccttggaggacgccgtgccgggtcagtgttagcctccagccctggttgtggaaggcgacagaagtcatggcgatgtttgagcagatgagagccaacatgtagagacgcaggccaaggaaaatgcctatgatctggaagccaacctggctgtcctgaagctgtaccagttcaacccagccttctttcagaccacggtcaccgcccagatcctgctgaaggccctcaccaacttgccgcacacagacttcaccctgtgcaagtgcatgatcgaccaggcacatcaagaagaacggccaatccgacagattttgtacctcggggacctgctggagacctgccatttccaggccttctggcaagccctggaaatggcagggcttgcccaagccctggatgaaaacatggacctcttggaaggtataactggctttgaagactctgtccgaaagtttatctgccatgttgtgggtatcacttaccagcacattgaccgctggctgctggccgagatgctcggggatctgtcggacagccagctaaaggtgtggatgagcaaatacggctggagtgccgacgagtcggggcagatcttcatctgtagccaagaagagagcattaaacccaagaacattgtggagaagattgactttgacagtgtgtccagcatcatggcctcctcccagtaacttcaggtgtttaataaagatgtgttgactcagaaaaaaaaaaaaaaaaaaatcgggctttttttcggggcggaaaaaaaggttgaatggggctggcaatgtttctggcccattcttgtcaaggggaaaacgccggcccaaagggataataaacaa

SEQ ID NO: 221382 - DNA, 491 bp, Homo sapiens
cttgttaggctccctccttatggtttgctaaatagaagtaaaagaggtagttggctgaggttgaaggtaaatagggttaaaagtttttgaaatttttccctaaggataaaatattaagattatataaatctctgacataaaaagagtatgaattaaaatggtcttctttgaaggataatttaaggaaattccaagcagttgagaacagatggttgttatggaagtgtgtctggcaagcagatttagtttatatctgtgtgtatctgtatacactgagtgtttatacacacatgatcgtacttacgcacaatctctgttcaggaaaaaaaagatcctgattttccagctcccttcctacttcgatgtgtatttcagaaaggctgctcccttttcgtttcattaggataaaataaaaacccgttttccatatttggatgatcactactgattctttaacatgagtgcttaccctcttttttaacagtgccaaa

SEQ ID NO: 221383 - DNA, 1798 bp, Homo sapiens
tgtgagtgtgtgtgatcagagaggataaacaaatggtgtcagcaaaatagaatgtaaaatatggagataatgtggatttacacaatttgataaaaattctcccttgaattttgcagatcatatatgaatatcatcatgtgaagtgcaattaggattttttcatatattaatacatatacatcatctctttaataaaatattttgctgaactcgttttatatttctcatgtctcatatttcatattttctcatatgtctcatattttatattttctcatatgtgtctcatttttattattactatagtatccattaaaggagactggcaaatacctgaacaaagttatgttgttggcaatataagatattaccaattgcataatattatttccaaaggcaaattaatatgcaaactatagatttccatgggtatctatacaaattattacttgaagtccatagaaaacagcttccttagagggaagtaaaagaagctctgataacagacaatgtatagcatttcagttaaagtttgattgacatatttttttctcagtcttttatacttgtgaattatagtctacattttgtctttacagatgttgctaacacagtgcagcatgttggcttgtcattttactgattatgtatattgtctcctagttcaagtatacagtaaatcagagctttcatttttcaaggggcagaaaaataattgttggttgataaggtaaggttatatgattttgagggagcttcattgtaaattgaatgagaatccggttttcatgcaaaggtgtatctatgcgataatactttgaatgtctgtagtttgaaatagaaggttaattttttccactggcttatccttaatgaaggaaatcccctgataattactttgattctgaaaatgttgaaaactccagaagaaataaagcttttctttgatttctcagctgaagtgttgtacaaactgaggaatatgaagtccattcccttctttcttctcttgaataattttaaaattgtttgtttagttgtacaattgaaaatattccttattatagaagtaaaaaaacaataatgcatatttcctcatatcataaaaactaaatttgttatcatctgagcttcaatattcttgctcaattagaatagtaaatataaagtgtgatatttataacagttcaaggtttgataggagatagaggtgttttgattttatgggaaaattacttcctcaagaacacatttcttgaggttttagtaatcacatttgactccctgaaattggcaattttattcaatgtaggaatattatcatggtatattatagtgaggagcacatagtcattattattttgtttttgcaaatttattttgaaaaaaaggagcattatcaaatattggtttactattttaaagtaattcatcaggaaatgattttttaaacactgtccctttaagtaaatgtcccttgcttttcaaagctcaacttattacttatggtaatagagttactttgcttcttaaaacaaagtttatactagagcatagcattgtagaattattcaggtctcaatttctcactggaaaatgagtctttaaaatagtaaggatttaaatttctataaaatttaatcacagatacttatattttaagataaatgtgttggagctaaactctggaattattaaaatataaaacattatatccctctaatgtattttttctatttaaatttaaaacaataaacataaatatctttggaatcaaaaaagcagaaccagaaaaact

SEQ ID NO: 221384 - DNA, 1273 bp, Homo sapiens
ttagcggccgcccgggcaggtacgcgggcagtcttttatacttgtgaattatagtctacattttgtctttacagatgttgctaacacagtgcagcatgttggcttgtcattttactgattatgtatattgtctcctagttcaagtatacagtaaatcagagctttcatttttcaaggggcagaaaaataattgttggttgataaggtaaggttatatgattttgagggagcttcattgtaaattgaatgagaatccggttttcatgcaaaggtgtatctatgcgataatactttgaatgtctgtagtttgaaatagaaggttaattttttccactggcttatccttaatgaaggaaatcccctgataattactttgattctgaaaatgttgaaaactccagaagaaataaagcttttctttgatttctcagctgaagtgttgtacaaactgaggaatatgaagtccattcccttctttcttctcttgaataattttaaaattgtttgtttagttgtacaattgaaaatattccttattatagaagtaaaaaaacaataatgcatatttcctcatatcataaaaactaaatttgttatcatctgagcttcaatattcttgctcaattagaatagtaaatataaagtgtgatatttataacagttcaaggtttgataggagatagaggtgttttgattttatgggaaaattacttcctcaagaacacatttcttgaggttttagtaatcacatttgactccctgaaattggcaattttattcaatgtaggaatattatcatggtatattatagtgaggagcacatagtcattattattttgtttttgcaaatttattttgaaaaaaaggagcattatcaaatattggtttactattttaaagtaattcatcaggaaatgattttttaaacactgtccctttaagtaaatgtcccttgcttttcaaagctcaacttattacttatggtaatagagttactttgcttcttaaaacaaagtttatactagagcatagcattgtagaattattcaggtctcaatttctcactggaaaatgagtctttaaaatagtaaggatttaaatttctataaaatttaatcacagatacttatattttaagataaatgtgttggagctaaactctggaattattaaaatataaaacattatatccctctaatgtattttttctatttaaatttaaaacaataaacataaatatctttggaatcaaaaaagcagaaccagaaaaact

SEQ ID NO: 221385 - DNA, 446 bp, Homo sapiens
ctgcggaggttcctcgtgtctttggctgaatactgatctgcatctgcatttgaggaaaccaccctcagagaaccaaaggggaaaagaactgccagggctccctggaggctgggaacagcttgtgtttccaccaccaagagtgaacagcaagcagggtcagaagggtccggactgaacagtgggcttcacaacaacggccgctcttttaagccgtgttaggagccacccgaacacagcttaaacgccagcctcaagaggaggaaacggtctatgattaactttactacaacctaaaacaagtctcaacagcatttaaaggaatataacaaaatcctgcacccaataaagtaaaatacaaaatggctgacaaaaacaaccagacctgcgatgaagcgggagaaaaccacctctgaccaggagaaaaaccaaccaatagaaacaggccc

SEQ ID NO: 221386 - DNA, 207 bp, Homo sapiens
ttgtcatgtttatctttatagtgggaatattgtgttcaaaagtttcagtgcatgaaggtgtttactttttagaagggcagaagtcaagtggtcctctatgacaagtaagaattaatgctggaaaacttggatggattaaaatacaagtttctccctgcttcacagcgtttgtacctcttgcgttctacctgaagtgttccttatcta

SEQ ID NO: 221387 - DNA, 333 bp, Homo sapiens
tttagaatggagtaattgctgaatgaaagggtatatacatttttctaaagtgatctttcagattcactcccttctatattttatatttcctatccatttctgcttaaacatttaatattttcaattattttagttgataccattctgataggcaaaactggtacacttgttctaatttgcacttttcagatgacagtaaattggatatctttttattctctgtttatactttttctgtaaattttcctttccatcctttgtccattttttaaataggctatttggcatttccttattaatttgcaagaattcaatgcatgctagattattaac

SEQ ID NO: 221388 - DNA, 434 bp, Homo sapiens
agaaaactatacagaatccggtttctctcgataaacctggctctcaccaacacttccctttcagtatttacagcaacctgcataggagatcatcaaagagaatcccattatgccctccattctttttacatcagtcaacaagaaatgcccaagactcccaagtcatcccccatccctatatactttcatccctatatactctgtatgtccctacactgaccccttttctcttcctcccccaattcccgaaatcctttcgcagtgtcttctggaactcatggtacacatcgtcgttaaaatatcctatttcctcagtattgttgttgcacactcttcaccttacttgctcccagctgtaacctctctcccctctgggagttctgctctaactccagccctttcaaacaatggcttctctctcatgtgagataaaa

SEQ ID NO: 221389 - DNA, 502 bp, Homo sapiens
atcttatgatgctttcttttttccccttcccagtactcccaggagatgaataggagttttcaaggacaagaggaaaaagaacaaaacacctcttcttccttcccttgatgaaagaccctactgtcaaaagtgccttttgtttttttaaacctgtctctctcttttcctctctttcccaaaatactgttttgcagtcagtctgtgaaaaccagtgtgagtcgcagaagcagcttctcgtgtgcagccttccatctgtagcttggtctgtattatgtgctgtatttttagaatgcctaaattagtgatgttccatgcgctatttaaagaggagctgggaagtcgggggaagagcagggctattgatcaggattggcttctgaatgttgctggctgttatactcgaatcccagagttagaaatatttgggggccatcaaaagaacagatggtccaggaaggcagctggcccatgtggtaattagtctatgaaggcaattggtcat

SEQ ID NO: 221390 - DNA, 397 bp, Homo sapiens
acaataagtttgtaagtagcacaaattatgaggggtctagggattgcatttcagggaaggaatgacattactatgttccttccatattagaaatcttaaggagtaagatctgacttaaggtgggaggggatatacgtgggatttagactcaggcaggtcaggagctcaaatcccagcttcgtaacaagctgcctgatgttaggcaagaaatgaacctctctagcctcagttttaccatctgtagaatggagatatcatcaatcagttaccatcagagtttgtgtctgttaactctgcttattaataaataacactaaggggccggatgtggtggttcacgcctgtaatcccagcactttggaaggccgaggcaggtggatcacaaggttaggagttc

SEQ ID NO: 221391 - DNA, 320 bp, Homo sapiens
ctgaggacttgaggactcaggcaagctggagtgagggaggagggggacaagtgcctttggaaaggcagtgtggttaagtttgtgctctgtttgtgttacagaccaaatggagttgccttggttgtatgcttcccaggtgtactgagtgcccacctggttttaaaggctgccctggcggtggcccagaagcaaatgtagcatcgtttgccagagactcaagaatgtgtctgtataaataaaagtgaaagtggcatatgcttgagcaaaattggcctaatgggatatggatttacccgacacacactgatagcaaatagatt

SEQ ID NO: 221392 - DNA, 344 bp, Homo sapiens
cctctctttacccccacggtccaccctattaagcacacatttgaaacatcagccaggccgggcgcggtggctcacgcctgtaatctcaacattttgggaggccggggcaggtggatcacctgcgatcaggagtttgagaccagcctggccaacacggtgaaaccccatctctactaaaaatacaaaaattagccagccatggtggtgtgtgcctgtaatcccagctactaggggggctgaggcaggaggatcgcttgaacctggaaggtggaggttgcagtgagccaagatggtgccactgcactccagtctgggcaacagaggaagactccgtctccaatttg

SEQ ID NO: 221393 - DNA, 285 bp, Homo sapiens
tccgcagcctttgttatctcaactactttgagagagttctcttttctccccctcgactcctctgatgctaatctctctccataaatcataccctctaatcttttcatcacctttctctgattaaagcagcctcgggggttgggagccccagtcctcagtgactaaaacactttgatgtcctaagacagtcccagaggctgcagcgctggctggcgcggtcaggcctcacccaccgcggggcaggccgggcgcaggcgtctacacggacacatcccggagttgtcc

SEQ ID NO: 221394 - DNA, 509 bp, Homo sapiens
tctcccccaagcacctcttctgtgttatgcccctcattcttgcagggttctcaacccactctcttactccttcaaggacgtttctgtttgtttttccactttcgtgatttttgcacatttgtgtgctgccagtgctatgaactacctattattgttccatttttctaagcaatggtttcacaaaattgtgggtttggtgtgataattattatgttcctaaaatacattaaaataggtattgaactgttaaaattttagacaaactaaaagcttgatgtgtgtagtagtccccccttatctcagggggatatgttccaagatgaccagtggatgcctgaaattgcagataatacgaaaccctatatatactatgttttttcctgtacatgcatacctatggtaaagtttaatttataaattaggcatagtaagagataaacagtaactaataataaaatagaacaattataacaatatactgcaataaaagttatataactatggtcagt

SEQ ID NO: 221395 - DNA, 691 bp, Homo sapiens
gtacaggaaacgcttacaggaaacgctttacaggaaaagcgtatacagcgacagtcgtaataccagggatatcagctatgaccaggaatcatcgcctatgaccacgcgaaacagcgctacccaggaaaactccatctcaaaaagaaaaagaaaaaagagacagaggttgggagagaagcattaaatactaatatttaacaaaagggaacacacatttttcagtagatattgagcttaatcaaagtacagaatgtacctatcttatcactaaatatagagcaaataagtgaatatcaagggaataaccatgagcagtataaagactgtgctaacaggaagggatgatcaggccaggtgcagtggctcacgcctgtcatcctagcactttgggaggctggggcaagcggactgcttgagcccgggagtttcagaccagccggggtaccatggcaagaccacaaaaatcagccaggcatgatggcatgtacctgtagtcccacctacttgagaggctggggctggtggactgccagagcacagcagacagagaggttacagtgagctgagactgtcactgctgcactccagcctgggcatcagagttacaccctgtctccaaaaaaaaaaagaacaggatgatcttaatactgacatccagaggccgggcacagtggttcacacctgtaatccc

SEQ ID NO: 221396 - DNA, 317 bp, Homo sapiens
gatttaaacttagctcaggatggtgctgtgcctgagcatatggaaaagcttttaaattcagtttcagatttatatctgctgacaaggggtaaaatgaattcttggtctttgttcgaatggaaaaaagtctctacattattaggcgccataatattttattcaaatcttcttagaaatttttggatattgcatctgggggtaagtgtgcctctttgatgtcattcagaagtgtgtgtatcttggttactgtgtacaaaatgcactggtccagttttttcaaagtgccttgacgctatacattaaattgcaatcaagag

SEQ ID NO: 221397 - DNA, 219 bp, Homo sapiens
ctctactctaaaacttgtagtcttggcaagtgcagcacagagtttagaagaaacagaaaccttgtaattctcaggtttcttagatgaagataaggtgagtgattcagtaatcctttgttctggctctgtgtttcatgacataatgaaccttctgcagcttccttctaagaatgttggtctgcatgcctgaaggatcataactattttttccctgaacaa

SEQ ID NO: 221398 - DNA, 400 bp, Homo sapiens
gaactcccagtggagtccagtcagcccatggaactgcaagagacaggatctcgctgcgttgctcagactggtctcgaactcctgggcttaagggattctcctgcctcaatcacagcctcccaagtagctgagattaaaagtgctcaccaccgtgccagcgagttcagtttttgagggtggagccaagactctgaggagagggctgaactgtgaacctagaagtaccatctccccctgcacacacctttggtcaagttgaccccaagaagaaggacaagtcctctgcacggcgatgaggccatacacacagtctgtggcccggctttgggagactgatgggacaaaggatgttttgcacgatccttggtctctgagcaaatatatacatgggttaacacaa

SEQ ID NO: 221399 - DNA, 569 bp, Homo sapiens
catagctagatgagatcttagaatgccactgacttgatttttcagagtccagaacctcaacaaaaaaagatggatatctaccctattttgctaaatcctccagggaatgcatttccacagcctcttgcctgcaagcagcacaatgagaatgtttatgttcaaaatgccaaaggcacatttcaaaaactatttcaaacaaagattttctttgaaaatgcatgttatggggtaggcaagggaaaagggcaggtggggagggtgagctgtagaaactgattaactctttaaatcaaaggcaaatctggggaggcatttaagcttggcaaggaagtcaaatcacagctctgctacttagtagctctgtacctatacatcaggcaaactgcacaaatacctctaagcttcagtttcatcatctaaaaaatggaaataaaaacagtgcctgctttatagcattaatttgagagattaaatgagatattgcatgtacaagtatgctccacaactcctggagtgaataaaacacacaataaatgctggctattgttactgtcatcatttactgtgca

SEQ ID NO: 221400 - DNA, 508 bp, Homo sapiens
cctgacaaagcatcctcttctgttctttccaggtcccctggtttgtgatgcagagtccttcattcagtttccagtgcaaccctttctgatgaattcaccccagagtcacttttactatcatgggatccatcatattaaaacggcacttaggagctgggtgaggcagtgaggaggacaatggaaagactgagcagcaagaagagaggagggtgaggtgggaacccacatggctgagtggaaaaagttaactgaactgccttggaaataggctccacatatttttggatcaagccttagtgttctatctcgtgtgtttgacagagcggattatgttttaacttttcttcctctacatgacaaagttattttgaggaataatcatgaaatgaaacaaataattaatggccaggaaactttaagtagtgaacattttcttttactaacccttatatggtcatgtcagtaaaaataaataaatgaaaataaacatgccatttcagattaggaa

SEQ ID NO: 221401 - DNA, 384 bp, Homo sapiens
caaataatagaaatttatttctcacatttctggaggcctggaagtctaagatcaaggccccattagattcagtgtctggtgaaggttcactttctgcttcatggacagtgcctcttgctgcattctcacatggcagaaaagtccatacagctagctcccttgcaccccttttataagggcactaatcccattcacaaggattaagtcacccttgtgactgaatcacctcctaaaggccccacctcttaacactatcacattggtgattaactttcaacatatgaattggggaggacatcagcattcagaccatagcatattccacatcctaattgtgctttatttataagatcacactatttccttcaaagtacattttaaaca

SEQ ID NO: 221402 - DNA, 352 bp, Homo sapiens
ggccaatgctaaaaggccccacacaataagtgtttatcccagacgtttcttaaaatgacatgtgatgccgtgaaggtctcagagaaagtcaggagtgtttttatcttttttgaaatagttgtgtttcagattaaaagaccacgcattttttaatattttggaaatgaaagttaatgttctttcctattcccttaagactcttaatgcttatattttgtcaaataatgatactttgttttcaggctttagaagccttattgtatgttgttctctgacttggcctttctgtctgtgtggggaggtgtggtgtggtgtgtgcagcaagcagtaaaggaggctctgacttggactg

SEQ ID NO: 221403 - DNA, 442 bp, Homo sapiens
agtgttcttttcagtatgatagccacccaataggtggtcattcaccacatgtagctattaagcacttgtaatgtgaatagtgagtgtggactgaggaactagatttttaatttaattgtaatgcttttaaattaaaatagccccatgtggtgagtgccagcacagatatagagcagttatattattgcagaaagttctgatggaaacactgatggagactggctccttgggtggtcgagtatgattttccacctcagtcctccccacataccgaatgaacatgtgggttgttagactgcaggcattgtgagagcgatggcctggtccttgccctttactcctgatttccagtgccaggcgcacaggaggctctcagaaaacatttggtacatgagtcagggactgcagccaggccatgtgccaggtgctggagctataaaga

SEQ ID NO: 221404 - DNA, 438 bp, Homo sapiens
gaactctgcgtcttctaagatttttgctctaaatccttctccctttacccctgaaacaaaaagctcttctgaggagcagctgacgctagacggaagggaacaaacagaagagcgagcagcacccttctgcagaagtaaacttagcacatttagttctgcagaagaaaggtgctgtgctgctcgctcttctggccaccagagcacacggaacaaaggaggaaaggttcctgtgtcttgtcccactggctggagttggaccgcacaatctaagctgatctcgattggctatttcaaatagaacagggatgtgggttacagtggctggatgagcggtttcgccaggaagaatagtttcggcgggaagggcagttacagagcgggtaactaagggcaaggaggcgcaaagaacaaggaagttagactttgaagatggagaac

SEQ ID NO: 221405 - DNA, 435 bp, Homo sapiens
ctgccgggagacagcagcctgagagtcaccaggggcaggggctgggctgctctctacctccccaaccctgccaaggccaggccacagaagaggcccaaggacaggcttgctgacgctggctcactgcctagaggaaagaagaaatgaaccagcacagggctgggtgcaatggctcacgcctgtaatcccagcactttaggagaagggcaaggcaagtggatctcctgaggtcaggagcttgagaccagcctgaccaacatggtgaaaccccatctctactaaaaatacaaaaattagctgggcgtggtggcaggcgcctatagtctcagttactggggaggctgaggcaggagaaccgcttgaacccaggaagaggaggttgcagggagccaagatcacgccactgctgcactccaacctgggtgatagagcaag

SEQ ID NO: 221406 - DNA, 465 bp, Homo sapiens
ctcttatagatgaacctgagataatctgtcaagctgctgataaaaattctttatgaagttaaagattgcacagaacttacaaattaaattgggagaattgaatttcctgtaatattgaagtttctcaaccaaaatattgttacccatttctatttttcactttttaaaaaatgtatgaaacaacatttatagcctttttaaatagaacttctactcttctcattaggattatttctcattttgtgtttttttgctgctattttgagttttttttttctctatttcattctaattgatggttagatggttagtagatggttagaaaattatttatttttatatgatgatattgaatctagccactttgaactcttgtgccattttataaaaatttgttttcttaagtatctagaaaaataatgaaatagtgtctgaaaataataaattttgcctctgtttttcaat

SEQ ID NO: 221407 - DNA, 544 bp, Homo sapiens
ccaacataattaattcaactttattattaaaccatgtgttcatttgaagagttttgtgatttttactttttcaaaagcaattccaaactttctccagaatctgcaatagcaaaatcacacatgtatacacagttatttttcctttcacccaccatcaatttacttgaggggtatagtgagatatagactggaagtaggacaccattggtggacagatgaaaatgagataatcagattccaccctctttggatgtgtatttttggctcctttgaattcaaatggcagatacttatattgttgcatgtttttgttaaatattaacttatagtggcccaaatcaccaagagttgaattgcaaatgaatacaaaaatgatgaaaagtgaacttaattcgagaaatttagggaagggataggagtaagtacatttatgagagagctgaaacgttgaaggccagggatttccttgactctggaaataagagaaaattctaaaggccaattcatttgagcctggtcaatatattgcgagggaactagatag

SEQ ID NO: 221408 - DNA, 408 bp, Homo sapiens
cattttgtaatgtattgttactcgttagaagaaaccagatcaattatgtaagaaataaaacattttgtagcgtaaacaatagcaccactagacaaagctctgattctgatttctaaaattcctcaagtcaattctgagagtgacagcagggaagaaagcttgtggctagacagcagccctgctcacctgggcagtggtgagggcaaggtggtctgacagcccttgctcctggcagggagcccccaacccacagaggggccggccctccagcacctgccacagaccctgagagtggccactgtcccgggggcctcgaagagactctcaaaccacgtcacgggatgagaaacaaaatgacaactcaaactatgtcacgtgatgagaaatgacataaatattttgacgatg

SEQ ID NO: 221409 - DNA, 325 bp, Homo sapiens
ctagctttatttggtgtggtcctgagcgggtgagggcacccagaaaaatctttcttctgtaaactacatttaagcagaaagctgcagataattacaaaagaaaaatgggctaagtgggaggagcccttgaggaaaggccttgaagtggagggaagtgggatcaggtcaagggactaaaaattctaggcagaggccagtgagtgagagccaccaaaagtcaagtattgccaccttcaccactctacctgcagagattctttctcttcagatattaaatttgttgttaagatttttttaggttctttttacttaacagattgagaaa

SEQ ID NO: 221410 - DNA, 869 bp, Homo sapiens
agcacgagagagtccatgaaggtccccgcgactcccggactggagaaaacggctcttgcgatggggcgaagtccgagctgcggcgggcgttggtccgtgcagggaagtgggaatcgttaggttcgttctggacccgccgccccatggcccaggcgtctcgctcaggtagcctgcctccactcgttatcgtgcccccgctgagggcgcaacccgggggcactggggaggagcagtgggagagaagtcgaacgggcggtcttcgctgggaggttcactgctggccgagcggaacttctggagggacgccgtggtggccgacgccggcggatgtgagcgaggactacgaggctgatgctgcggcctggaggcgggggcccgcaggtggcggcccgatccctcccgcgctgcagcgtctccgggcggtgttgctgcggctgcatcgcgagcgggagcagctcctccaggcccgagactgcgcctaccacctacagtcggctgtgcgactcatgaagaccctgagtcctggctcgccatccggcggccctagccccttgccccagtggtgccgcgacctgcagctgcacccttcccaaggggcggttctgcgaatcggccctggggagactctcgagccgctgctgctagcgcgccccatcggactagccgcccagtgcctggaggctgtcatcgagatgcagcttcgcgctctcggccgggagcccgccagcccgggcctgtcgtcccaactcgccgagctgctctttgcacttcccgcctaccacacactacagagaaaagccttgagccacgtcccaggggccgcacgtcctttccccacgtcccgtgtgctccgcctcttgacgggggag

SEQ ID NO: 221411 - DNA, 236 bp, Homo sapiens
gccaaactgagttcttctgcgtctagcactgcgaccttggagaaggggcttaacctgtcaggcctcagtttccccatctgtgaaacaaggtagtattgctggcaagaaccttctggcttctaaattcagagctccttaccacagccaaaagaatctcccacgccctcccccttcatcccccctagtgagggactgacagttgatgcccagtggggcttcgagatccgggtgctgtg

SEQ ID NO: 221412 - DNA, 376 bp, Homo sapiens
ttttcttttctgcccaattagcaccaatataaatcgttcattccatctaaggccctgtattacttcagggaatataaatctaagtcccggccagatgcagtggcttacgcctgtaatcccagcactgtgggaggctgaggctgaaggatcacaaggtcaggcgtttgagaccatcctgaccaacatggtgaaaccccatctctactgggaatacaaaaattagtcgggtgtggtgtcacacgcctatagtcacagctgctcgggaggctgaggcaggagaatcacttgaatccgggaggcggaggttgcagtgatccgagatcgcctcactgcactccagcctgggcaagagaccgagactccctctcaaaaaaaa

SEQ ID NO: 221413 - DNA, 448 bp, Homo sapiens
attttaaaattacaccataaagccacaaatacattttgattaaagatttggggaaatggtgagtttctgtctggggacagtctatcatttcttctgttatctcttattccagagaaaaatctgctgtcactagattaaatgcactttttgagttgtcctaatgacatcagtttggttttcattttgaaagaattagggcatctgacatttcagccttatcatagtccattttcaattctgtctttcagtttcttgttacacgggtaggaattgagttattaggtgttcatgggggagtgtcaaaagatctcctttccttctgaagagattccagcagtaggagggtttatgatttcaattgcaggaaatttgacataaaatgtataaaagtaaatgtggaaaacattttgggatttcctgtgacctcacagtaacttgcaaatcaagg

SEQ ID NO: 221414 - DNA, 458 bp, Homo sapiens
ctgacaaagctttacttcatcctcaacccagaaatctctacgtggccttctcatctggttttatacttcggtatttactatgttgatttccccacagttctcttggtttaggagagtaccttttgaaatttccaatcctacttggctgaatggaggtgtccccatcacagccaacatagctaggcagaacacagcatccttagcggctgtcctagctggacagcacagcaaaatgtggggctgttagaatgctcacagatgtacagttcctcctgtttccccagtggtgggcattccaggagaccctgcctggagcagggtccagtagattccctttggaggcaccacacataatcataattccttaaatgtacacttgtaggagtgttgttttctcacaagcatttgctaagcatagagattgttgtaagtatctcatatattcaagatgtggccat

SEQ ID NO: 221415 - DNA, 609 bp, Homo sapiens
cagagctccatttttcttttttttaaatttatttttattattattttttagattgggtcttgcattgttgcccaggcggaggttgcagtgagccgagattgcgcccctgcactccagccagggcaacggtgtgagactccatctcaaaaaaaaaaagaaaagacggtcaaagttttctccccagaaatggtaccaggtccagttggtattctggaagttctggtatgatggaaattctagcaaatcttgaaagatcagataataggaaaagatagatagcttcccagttcatcccataaggctagtataactagacaggtttaaacaaaataaaaaaaaaacaacaactatagcctaatgccacatattaatagagcaacaactattttcaataaaagattatcaaatggaatccatcagtgtattaaaagaagaatatattgtgacaaatgaaagtttgccccaagagtgcagggattgttcaacattaggaaatgttattgtaatttattgtattaagatattaaagagaaaatatcatataatcatctccataaatgctgaaaagtgatctgattaaattatacatctattctgctgtattggggt

SEQ ID NO: 221416 - DNA, 426 bp, Homo sapiens
tggcacgagcgagcagctgggatgtatatattcctgcaaggaaagaaaaggaaatggcttcacattgctggatgggagcagtatgtgtgttgtttctgggtataatcttcctagctgcacttttcccatacatttctttctactaaaaatcatgaaagtttgaattatagttcctctcacaggattgaaagcaagtatcagaggagtcatccattcaaaacacagttcttccactgcagtatccgatatgttttgtatgtgcgctaggctgtcttttcattcagtctacaatacagttcaccagtgtggagaccttttgccctgcctgatttgttttgttttgttttactcactcttttcaatgacttttggttttggccagtatgaagagtaatggatgttggaataccttctgccagttaaaaa

SEQ ID NO: 221417 - DNA, 239 bp, Homo sapiens
tagttcccctttaaaggctcaatctttaagcctttcaggtagtgcaaattttattcatcattagaaacttagtctggattttttatagttacttattacgcaggtatttctttctagatcattgtgccagacaatgggaagtatggctctctcagagcctgcattcaaggataagaaggtaccaacttaaatttgtaccaatgagtcaaaagtgttcgtttaacactgtgtgtcccact

SEQ ID NO: 221418 - DNA, 466 bp, Homo sapiens
tcagtaggttgattatagttaacattaatctaatatacatttcaaaatagctagaagacagaatttaaatgttcctagtaaaaagtaaagataaatagttaatgtggtggatactccaaataacctgctttgatctttacacattatatgaatgtatcaaattatcacaagtacccccaaagtatgtacatctattatggatcaataaaaaataagtaaatataaatagatttataaaaatatatgaggctaatatcagtaaagataagtcttataaagggatttataacaagataatgtttacatatacattatgcatacagacaaatacacattttcaaaccactcaataaatcttctcagtacaaactcctttgttttttgttttgttttgttttgttttgttttttgttttgagacggagtcttgctctatcacccaggctggagtgcagtggtgcaatctt

SEQ ID NO: 221419 - DNA, 590 bp, Homo sapiens
agtttagaggttttgcttaccacagattatacagtaacggccagatgaagaggagaaatcttgaaacgtggctgaatttggatgagtgggtatggaaaaaggtggtatgatataaaaaaaaaagctgtaaatattttgattgggaggattctgaataaaataatattttaggctatcccttggttgaaatggaggaacaataggagatatagttggagataaggaaatgcaaggccaggtactgtgggctttcactcctcgttctggaatagttagaaggactaataaacattaatgtggctccaagcatcagatgaatctactgctttccccatcgaacttacaggatataccttgtgaagactagcatggatataaatgacagtggttcagaaacacttcctaagtttgtcacataggtgatgagttgactttttgacaaactttagggatggaaataaagggctctgatactgctagtattcatgccacaaaaatgggactgtgactctctgtggaacccagagggcaactgggactcaggctagcaatgtggtcactgacatctatgtaattgtttcttctcttct

SEQ ID NO: 221420 - DNA, 464 bp, Homo sapiens
cagtgaggcttatcctgccaccttttaaaatattgtcatcatcctacagtgctttccttctctgtaacaataccttctaacatactgtatttatttacttatcatatgtacttatttactgtttattgtctccttcctatcattctatgctttgtgaaagtggatgtcttcgttttgttcactaatgtatctcaagtgtatggaaagtgcctggtgcatcctaggcactcagtaaatatttgttgagtggcagtaggtcttagctgtaaagaggtggagtacagaaattcagagtgactccatgaaagaaaaaagaatgactccaagcttttttaggctggataatgcctttaacttaatgagtaatttggcacgaggattaaggggagacgaattctggtttaagcatgttgagtttgaggtgaaggtagccaaataaaattgctcagtagtcagcaaagatt

SEQ ID NO: 221421 - DNA, 376 bp, Homo sapiens
agttgtttgggaacctttattagacaaatacaagattgtcaattgagtttagttttaatagaagattaggaaattctaaaatgaaatggttttcttttttttaagatggagtctcgctccagcctgggtgacacagtgagaccctgtctcaaaaagggaaaaaaaaaagcagctgttactctttccccttccatctgccgcagatggagttttgcttttgttgcccaggctggaatgcaatggtgtgatcttggctcatggtaacctctgcctcccaggagaatcacctgaatctgggaggcggaggttgcagtgagccgagatcccatcagtcactccagcctctgtgacaagagcgagactccgtctaaaaaaa

SEQ ID NO: 221422 - DNA, 517 bp, Homo sapiens
cttcattagacaagtgaccatcacctattctggtagatcagaaaacagagtcaaagaaaaacttaaaaactaggttgatcccagcatacctttcataacaaagctgtctaagtcacttgaaatccaagtcttaaattcctaagagaacgtaccctgaatttcatgttatatctgacatatactcttcctctatccatttattttttaaaggggttaagcccccttttagtgcatgcgtgaaatattaggagaatttaaaccaggactaatattcaatggcagagtcaaaacagggatgcctcacagcttctactcaggagaacagggtatcccttcatggaaacactaatgtcaacagacttatttacatataaacacgtccgtgaagaatatttttcaaagatttgaagcatattctcacaaaattctgaagtcctttagacattttcctgtctctgctaaaagaaaggtcacacaattatttcataatcgtgatttaagctgaagttctggcatg

SEQ ID NO: 221423 - DNA, 501 bp, Homo sapiens
atctgtattgatgagatattgatctttagttttctcatcttgtgatggctttgtctggttttggtattggagtaatactggcttcacaatgaattgggaagtgttccttcttttttttttttttttttttttaaaaccagtttttgtaaattctgtaaatgtttgaagtgatctggtccagggcttttatttgtgagaaatttttcatttctaatttagtctttttactttttataggtctgttcaaattcttaatttcttcttgatgagtcgattttgataatttgtttctttttaggaatttgtctgtgtcatctcagtcatctaatttgttgatgtacagttgttaacagtattctcttatcctttttatttctgaaaggttggtgtaattgctcccttttgaattcttgaatttagttatttgtgttttccctcttctttttttgattagctaaaagtttgttagttttgttgatcttttcaaagggccaatttttg

SEQ ID NO: 221424 - DNA, 413 bp, Homo sapiens
agtgctcagcaggcagaactgtcacactgcgcacctgggacctgactggaagcaaagagaagctattcttcagaacccagcaaaacaccttccttggactttataggcacctcagtgtttgctgactgagccaggcaactgatcaacatatttcattattttcctgaagaattaccactaccctttgaggtgaacccctaagctgggatggactgtcgcatggccgtcggtgcctgtgtctccccgtctccaagcctcctctctccctcccagtgccccgtcatcttcatcccactagaagcccaagcctcttctagtgaccctacattctcagagccccgaagcagagaacagaagctgcttctacagccgctccagacccagaggccagacctcacttgtgagctgtttac

SEQ ID NO: 221425 - DNA, 307 bp, Homo sapiens
gtgtcaggaagagatccttcagtcatgggagaacctttcttggccgagttcgtagtcagagggagatgtgactacagaagaatggttggacacgtgcaacactgtgggctttacagaggaaggaaggggacatgagccaaggaactctggcagcctctagaagctaaaaaaggtaatcaggaagtctcctaggataaggttattatattcaagtcctgccaaaaaatgtaagaaaagaagctcctatttgagtggaccaaaaagaacaattatacctcctaaaaataaaatgaacctaagctaagaa

SEQ ID NO: 221426 - DNA, 124 bp, Homo sapiens
tcgtggctgcacagtgatgttctgatgtctataacatatagttatcagttcagtgtacttggcacgtctctcatcttcaacatttatcacttctttgggttgggagattcaatatccatctgac

SEQ ID NO: 221427 - DNA, 422 bp, Homo sapiens
ttgggagttgttactagaaaaatagtcaactaaagagtccattcatagggtcaagctacagaagaagaaatattcaaagtataaaaatatgacttaatatttctaaatatcacataagggtccagaccaggcactttggagtagacaagcttagatagatcccagacttttccacagtgactagtcatgtgactttaagaaagtaactgagcttctctaggcctcagtttcctcatctgtgaaatgggactaagaggatctcctgcataggtctgatgaggaaggagataaagcattgaaactatttagcatggtgtctggctctcaataaactttgctaatattaattttctccttaaaaggacaatattgggtcattttatcaaatcctcccaccaaacgcaatacatagatcttataag

SEQ ID NO: 221428 - DNA, 425 bp, Homo sapiens
gagagttaaagattttgtgatatacttgtttgcttaattacgaggaaagccgcaaatgttttaaatataaatttaacctactatgcttttcttgggtttggtgaccacagtaacattttaggaattttaaaatccttgggccatcaaagtttcacacagtgactgaagccatagtttgggactcagtatactaaagagtaagttctcatcacttatgcatttgaaatgttaaagactttattttgaatgcactgaggcatattaaaaataaaatggaattttttatgctagagatacagccaaggagttatgttcaatgtcattttgaatttttcccaaatctgaggagggaatccctcaggtaacatttgaaacattttgagcacttgtatttctaaaagaggtacttaaaataaacaaccaaa

SEQ ID NO: 221429 - DNA, 410 bp, Homo sapiens
ataagaagtatttgtgaagaatatatgaataaacctgtgacatcttactgagagatataaaggaaggtttcaataaatgagatgtctttctttctcatttttgtaatatgaaaaaattgttctaagttctatttgaaaggataaatcagcaaaaatacctagcaatttttgacaaaacatgggaaatgaatgtctgactgaaccaattattaaaatgttttataattctacaatagcgtgaagaattatgcggcctaatgttgacattggactaagtatgagagaagaaacaaactgctcaggcacagacccaacttaaagaaaaattgtgtatgttttaaataaaaccaagcaaattaatagtgaagtaatagattattcagcttctatgctaaaataggtaaacagtt

SEQ ID NO: 221430 - DNA, 337 bp, Homo sapiens
tagacttgtgtcaagttctgtgttgtgtcaagtttgaaagtactgcctttgcagtagcctggaagaagtcaaaatctagtggatggtcttaattagattgaagttctttgactcttaacttcatgaccagaccaccaaatactacaggtagtattatcagttaatactatttgctgcagtaaactgaattaagctagcttaattaaaaagaggacttggctaggcacaatggctaatgcctaatctcagcattttgggaagctgaagcaggagaattcatttgagcctgggagtttgagaccaacccaggcaacttagtgagaccttgtctctacta

SEQ ID NO: 221431 - DNA, 523 bp, Homo sapiens
atttttgtatttttagtagagacggggtttcaccatgttggccaggctggtctcaaactcctgatctcaggtgatccacctgcctcagcctcccaaagtgctgggattacaggcgtgagccactgtgcccagccacatgtgcgtgtttgtgtatattgcgtactggtggggattgggcttctgtcatacctatcacccaaatagtgaacattgtactcaggtagcatttcaacccttgccccccctcccactcacccccttttggagtgcccagtgtttgctatttccatctttatgtccataggtacccattatttagctcccacttataagtgagaacatgtgctatttgattttctgtttccgaggttaggataattacctcaagctccatccatgtggctgcaaagcacatgatttcattgtattttatgactgctcatgtatattatttcagcctccaaaattttgtatgttatttataatgatataaattatgtggttttatcgtgtaaaaaaaaaa

SEQ ID NO: 221432 - DNA, 664 bp, Homo sapiens
tcatcttttgactatcatttttaaactcccacttgaaataaattgctctgatttttaattactcttgtatttaaaaagctttaattcttcactgttatctaaattacactcttaattttaaattccaagccttttacctctaactacaatgtagttttatattttactgttcccccacttacacattctagattctgccccatcacatatgtacgttattccctgaacatgtctgccttttcctagtcttgtgttttaatcatgctcttctacccgtagcttcatgaagatgacattttcatgttatctcccatgtctttccaacaagaagaaatgtctccttccttggaatccctcagcagtttttctctcggacatgtcactttttctctctgctttttttggtagttacttgtaaacttgacatttttcatcaccagagtaaatttatggagtgcagagttgatgtcttaaatttgtatcccatggtgagtcaggcacagtgttggcatttaggaagtactctagaaattctttttttgcactgaattatatttgaaagtagaaaccaatattggcttcaaggaaaatgcagatctctgctaactaaaactttattatccagggcaaaagagacttgattttgcctgcctgccgtgttgta

SEQ ID NO: 221433 - DNA, 508 bp, Homo sapiens
cacacatggggttaaagggcagaagaggaactggaagagcccaaagcctgtgtaaagttggatttaggaatctggagcatagagtagaatcacaatcaccttggacttataagaaataattcaaagactttatagaatcagtctctagtcccagaattttatgtttttaccatgttcgtggctcatgctttcttgatttctggcatcctgtctgatttctgagtttgggctagctagagtcttgtttgtctatcttcttgatgcccaataagatcagcccctttactgtgcctggatttctatatccagcattacctaaatccaactttacacaggctttgggctcttccagttcctcttctgccctttaaccccatgtgtgccccagaaccatccacaaggagatgccaagaatagagaagatgaacaacaacaacaacaaaacagaactgcagcccttctgtatgcttcagtctctagcaggctcagcccaagccactaccgatcc

SEQ ID NO: 221434 - DNA, 426 bp, Homo sapiens
tctttctgctctttgctctggtcccagggaagcaggtcctttcactcctttccttcccgggcttgtgcatgctgggtcaggccccatctcacggagactgcttatcttttcaggtaccagagcaatgaggaagcaggacccagacccctgactcctaactccaggtgaagcccaccctgagctcaggagcagagctgcctccatcgggtgtggagagacagagcctcctccccagccatgcctcctcatcggcccacgggagctgctgtgactctgacccctgtacctggctctgtcgaccggaatagtcagtgggcagccagcacacctttgggtgctctgtatgagtgggattttctcctgattagacattttaaaagattgtcaacaaaaagaacaaactctgtaaaatattggagagattta

SEQ ID NO: 221435 - DNA, 594 bp, Homo sapiens
agcaatattccgccagcttcatttcatgcagtgagtggaacaagagtcagaacaccagggcggctgagcctatcgatcaagcctccacctaatgacagacatacttgagtcccacagtcataaggaggatgaagtctctctctggctggacctggactgcagtcacactctaagagctcctctttctacacctctgccagtgggcgttcggtcagagacaagctatggcaccggctcccggacgcacgggaggactcctaccagggacagagtccgcacaggtaccagagcaatgaggaagcaggacccagacccctgactcctaactccaggtgaagcccaccctgagctcaggagcagagctgcctccatcgggtgtggagagacagagcctcctccccagccatgcctcctcatcggcccacgggagctgctgtgactctgacccctgtacctggctctgtcgaccggaatagtcagtgggcagccagcacacctttgggtgctctgtatgagtgggattttctcctgattagacattttaaaagattgtcaacaaaaagaacaaactctgtaaaatattggagagattta

SEQ ID NO: 221436 - DNA, 537 bp, Homo sapiens
gactccagaggatctcgattttgacgcgtctccctaaagtgctagggttataggcgtgagccacttcgcctagccacaaagcagtctttaaacttgatggtttaaaaaaaaaaagtcttactccatattacaggcagaaataagcacagtagtgggcagaggctatgaaggtccccaaaccagagctccattttaacaagaaagagcaccacccatgctaaattatcaaaggcataaagctggtttacaaaataaagacagtaatagtatttggtgactgaaactatcaaagctcctctgaaataagacctgtacaagatcccaagcatgctgacaataggatgcttaagctgagaagatcttctatatttaagaatccataactcagcggaggttgcagtgagccgagattgcaccattgcactccagcctgggcaacagagcatgggaagacagaagttaaaggcattaagtataaacaatacattgattttttttttcttttgaggaattttgctaaaggagagcaaggagctg

SEQ ID NO: 221437 - DNA, 530 bp, Homo sapiens
attctgaaacttttctgtgagattggatctttcctaaaacatacacaagagatgtagaaatagttaatataaaccttgtcatttactgagagctgctgaaaacataatcattattgacaactaagttcaagtaaaaccataattaaaatttgggggattcttcttgctatggacattaattgataaatttggactttagttatatgtgtatataaatgaggtagtccacatagcatagagattatagtaaccagcttgatagcttcttaatatagaaaggtcttcatagacaataaatttcatatggtctattttcttttttggtcctaattaagaagtgtcattttagagagagggagaaggaagaaagagggcaaattaatttatgctaagcaacaggactaggctgcttgctttttgtacactgataaaaatacattaaatccaagagagaacctaaatgtaaaaattctgactcttacttgggaaaatttgacattagagcaatctattcatggaatttgagacct

SEQ ID NO: 221438 - DNA, 557 bp, Homo sapiens
acacaactcaaaaagttaactaaaaatcattgaatgatatactaaaaatgggtaaattttgtgatacataaagtatacctcaataaagtcgtttttaaaaaattgatgaaggccgggcatggtggttcatgccctgtaatcccagcacttttgagaggctgaggtgggcagatcacctgagctcaggagttcgagaccagcctggccaacatggccatctctactaaaaatacaaaatttaactgggtgtggtgggaggctgaggtaggaaaatcacttgaacccaggaggtagaggttgcagtgagccaagatcgtgccattgcaccccagcctgggcaacagagtgagactgtatctcaaaaacaaaaacaaaacacacatagggaattaccggggagtggcatagcagagttgagagcatggaccctggagtcaggcggacaggatggagttcaggcttagccctgatcagcaagttccttagcttcttcaagcctaggtttcctcatctatagaatgagggcagtaagaccttccttccttgtattactgacc

SEQ ID NO: 221439 - DNA, 806 bp, Homo sapiens
tttttttttcctggcagctccatcatcttggggtttgtatagaactttcctttactagaagtactgacaggaaaaattttaaaatcataatattgtttatcttcattttgatttggggaacttcttgtgtatttcccaagactgttgtgccctctatgtaggaaaagcattggccaagggtgaaaaaaaaaaaaaaaagtgtgttctaactcccagtgcctgacattgggaaagacacttcctctcttgaggctgcagtttcccaaactgttaaatagagtttctaagctagatgatttcccaggcacccttctaactctgaagtcctataaacctaaatcccagataccgcttttattcaaaggaatagcttgcctgcatttttaacaccgccttactgcacccccagttgaaaagaaaacaagaaaagatgggctaggggatcttgagttgcataaccatcatgctgtaatccttatccatctgtagagatttgtcaatcaacagtgtggctggggtttgctattcatgagagcagctttccttgctgaaaacaagctataaataagaaagaatggtgaaggaaaggaaagagctgaggatgtgaggtaaacagtagaatatttggcttttgaagttgtttatgtaggtagataaatatgcagagataaacagggacaggtacaaacccatagggatgaagagtataaacatcgatttcatcaacaggcacccactggctcagctaaaaataagtgcctcattacaggagcagacacagaaagaggggtccgagccgattgtaa

SEQ ID NO: 221440 - DNA, 446 bp, Homo sapiens
ggtttgctattcatgagagcagctttccttgctgaaaacaagctataaataagaaagaatggtgaaggaaaggaaagagctgaggatgtgaggtaaacagtagaatatttggcttttgaagttgtttatgtaggtagataaatatgcagagataaacagggacaggtacaaacccatagggatgaagagtataaacatcgatttcatcaacaggcacccactggctcagctaaaaataagtgcctcattacaggagcagacacagaaagtcattcactcacacacctcttcctggatgacaatgatttacagacaagttccaggaatatatctcaatgaatgtgaaaattctgaccctcgcctattacaggctgaaacagacagatgctaagtcaggctgtatgtaacttacacagacatgccatcaggtatacaaacacacaccg

SEQ ID NO: 221441 - DNA, 433 bp, Homo sapiens
acattatattcaagcattccacaagtatttgtcaggcacttaggatctaggtgcaggaaaagtaaaaataaacaccacaggcgatcatacttgagtatgtgacaacagataaaaattttaaaaaataataaattaaacaatacaggcaaggtccctgctcttcagggtttacattctagttggagagaaggaaagagaaaacaaaattgaaatctagtactaatcaatgctatgattttttttttaaagtgatttttaaaagaaactgagagctattcagactacatggtcaggaaaggcctttctacaatgttgtcatttcagctgtactagatggacagacataagaaggggtaaggataggggagaatattccagacaaaaggagtaactgcaaaggccctaaaacaggaaaagacattggcactttaaa

SEQ ID NO: 221442 - DNA, 707 bp, Homo sapiens
tgcagaccatctgagtcccctttccttgctctacaagcatttaatgagcacctcctattggccagccctgaactggcggccagggatccagcaatcaacacaacaggatcagccaggcccggtgactcatgcctataatcccagcactttgagaggctgaggcgggcagatcacttgaggtcaggagtttgagaccagcttggccaacatggtgaaaccccatctctactaaaatacataacttagctgggtgctgtggctcacgcctgtaatcccagcagtttgggaggttgaggcgggtggatcacttgaggtcaggagttcaagaccagtctagccaacatggcaaaaccccgtctctactaaaaatacaaaaaatgagctgggcattttttgtatgaggcgggcgcctgtagtcccagctactcaggaggcacgagaatcacttgagcccgggaggtggaggttgcaatgagctgagatggcaccactgcactccagcctgggcgacagagcgagactctgcctcaaaaacaaacaaacatacaacacagtaggctcactgctgctgtgaaagttcacagtctgttgggagatggctaagtaacaggtggtcatggtgccaaaggagaagtggggcaggtgtccaaaggaagggtggggagggcttcccaaaagacgtggcttctaaactgtgtcccaggagg

SEQ ID NO: 221443 - DNA, 391 bp, Homo sapiens
tcgacagcaagctctgtccagctgctatttttatgtattatcttactttaaaaaaatactatcagtccaaaagtagggcagacagagcaatgcttctgcaagagcacatttgggaaaatctgttaattaataaatagttaagccacatgcaccggatttgtagtattgaaacagatgctctatcttaaaaatgttttaatacagtagatgcagcagtcctgagagtaattgtctcctgtaacacacagaagaatatctccaggaataagaaaatggtaaatggcatcactgatctctttcttaccttttatcatcagctatttctatcactttatcagtgaatgttcagggtctcacctgaattaacagagcagccctgtgtgctgattgt

SEQ ID NO: 221444 - DNA, 1114 bp, Homo sapiens
agcaacccactctctgtgctatgacttcattactctttcccagcccagccctggcaagccccttacgaagtctcaggctacctggatgaccaccctttcttatgatgctgcaaggagggcaggtggcagagccccgtgcatcctgggctcaggccagggacccaagagcttgggagaagctggttctcagactgaaggccagagcccagcaccttgtcaccatcctggggagcatcatggcacacaacaaccagagccaaggtgattgggcttgggggctcaggaggaggcagaaaagagagaagagctcaatatgggcctgaagatgtgcagctgcattcgttattgttcagctaagatgcattgagctctgcgtggggcactgtgctaggcactcagataccatcccacttcactgagatcctgatgctatctcctcctgcctgggggagttcatccctgactcaaaccttgttttatgtacccagtggtgccaaaaggactgggtcttaggtattagcaagagtaggacagaagtataagaccctctggcgtgagccaccgcacccggccaggtgaaaaaaatttatccaactttctcaaatccaggaaatgggaaaaactggcctttttctgacattcacctctcgccaccaccagtagttaataagaaacctggtgacctgagcaaaatatatttctaaccaatatcattttttttcatctagcaaacatttaagcctagtaagtgctgttcattttgctgttaccaataatacaccttacaatagcagctactagttcttgaattcttcttggtaggtcctacattaacactggcaaggattatctcatgttatctttacttgtgtggtagagactataattgtgtccagttgccaaatgaggaaagcaaggcttggagaggttccattacatttgccgtgggcatatagccagtagctgatgtgtagatcagggatttaaacacaatgctgtctgtgctgggccttcaggagggtgggtgagtatatgtggctgaacagtgcatgctgggtacatgggagggagccacatgctgcaggggagggagagcgggtgcagtgtgactttg

SEQ ID NO: 221445 - DNA, 368 bp, Homo sapiens
aaagtcacacagcaatccaagaggtactttaaatcttccccacctctttcccctccagaagaggaaacatttcttaagtaccaaacaatataattagtaccattaccaaaactggaatagtagaaatatttaattcattcaaatgtgcctctggtgattttgtaaatactgaggtattcatttcctacctactgcaaatctgtgaattctaccctggacaaaaggtcatccaaacatgatccttgttcagagttatggaaatgtatgcagcctaaaagaaaatgggccaaatgcagggtaaaaatatccatgtaactcccagtgccatttactcttgctgcctcaaatccttttcgaaattaggcagg

SEQ ID NO: 221446 - DNA, 373 bp, Homo sapiens
atatacaattctctttctagtgatgagtaactgtttactcctactctttgttaagacctcagggtatgtatgttcagtattccatggtaaggaagtctgaattcgatggaggatcacatgggtttcttttttatttttttccctctaatgaatcttgaatgacatttctttttctttaagagcattttccctacttattaaagcaataagttcttgtggaaaagtgcttaacataacagtttcacggccagctttcccttccagctgataacatcgcagagaaagacgaacacaaggcttggaaatttgggactaaatgctaacatgattttttagataaaaatgaatagtaataaaagaagtttgaaatttt

SEQ ID NO: 221447 - DNA, 611 bp, Homo sapiens
caccgctgggcctgcaggttctctgtcgagcagcggacgccggtctctgttccgcaggatggggtttgttaaagttgttaagaataaggcctactttaagagataccaagtgaaatttagaagacgacgagagggtaaaactgattattatgctcggaaacgcttggtgatacaagataaaaataaatacaacacacccaaatacaggatgatagttcgtgtgacaaacagagatatcatttgtcagattgcttatgcccgtatagagggggatatgatagtctgcgcagcgtatgcacacgaactgccaaaatatggtgtgaaggttggcctgacaaattatgctgcagcatattgtactggcctgctgctggcccgcaggatggaggagatgtataagaaagctcatgctgctatacgagagaatccagtctatgaaaagaagcccaagaaagaagttaaaaagaagaggtggaaccgtcccaaaatgtcccttgctcagaagaaggatcgggtagctcaaaagaaggcaagcttcctcagagctcaggagcgggctgctgagagctaaacccagcaattttctatgatttttcagatacagacaataa

SEQ ID NO: 221448 - DNA, 992 bp, Homo sapiens
caccgctgggcctgcaggttctctgtcgagcagcggacgccggtctctgttccgcaggatggggtttgttaaagttgttaagaataaggcctactttaagagataccaagtgaaatttagaagacgacgagagggtaaaactgattattatgctcggaaacgcttggtgatacaagataaaaataaatacaacacacccaaatacaggatgatagttcgtgtgacaaacagagatatcatttgtcagattgcttatgcccgtatagagggggatatgatagtctgcgcagcgtatgcacacgaactgccaaaatatggtgtgaaggttggcctgacaaattatgctgcagcatattgtactggcctgctgctggcccgcaggcttctcaataggtttggcatggacaagatctatgaaggccaagtggaggtgactggtgatgaatacaatgtggaaagcattgatggtcagccaggtgccttcacctgctatttggatgcaggccttgccagaactaccactggcaataaagtttttggtgccctgaagggagctgtggatggaggcttgtctatccctcacagtaccaaacgattccctggttatgattctgaaagcaaggaatttaatgcagaagtacatcggaagcacatcatgggccagaatgttgcagattacatgcgctacttaatggaagaagatgaagatgcttacaagaaacagttctctcaatacataaagaacagcgtaactccagacatgatggaggagatgtataagaaagctcatgctgctatacgagagaatccagtctatgaaaagaagcccaagaaagaagttaaaaagaagaggtggaaccgtcccaaaatgtcccttgctcagaagaaggatcgggtagctcaaaagaaggcaagcttcctcagagctcaggagcgggctgctgagagctaaacccagcaattttctatgatttttcagatacagacaataa

SEQ ID NO: 221449 - DNA, 275 bp, Homo sapiens
ggcatcagctaagtctggaacctgaggacacgtggttctaaaccaagctggcccttgggcagggagggtctgacggggtctgggctgctctgggatggcgggtggcacttcatgggggagggtgccggcacagcgaaggcttctgtcctgggatatggtggccttctgggtccttgcacggggagcctgtgggtgtggggggcccaggctgaccccagctgcattggtttcccagggctgctggaacaaacaccgcaaacggggtggctacaaac

SEQ ID NO: 221450 - DNA, 376 bp, Homo sapiens
tgttttaaaacaaaggaaatgttgtgccatatttagaaaaattgctggtttttaattctactgaaaagtatttttaattggcaattacataatatatacatcttcatttgaatggacgcaaatcgcactctgagtattgcaggaattttatagaaatattgcctgcatgttaacaggatgttaagggtttacagcttttttagaagtcagggaaaacaaaccctatacacgatgagaagattgtgcagcgacaatgagaaacaaacaagtaaacacagacgaagcacagacaacggagcgagacactgtgagatattttacaatttcaggacctcaaagataaactgctcctaccaatgctcaaataaaaggtgct

SEQ ID NO: 221451 - DNA, 137 bp, Homo sapiens
tcccaccattgcgctccagcctggtgacaagaaaaaaaactgtcttaaaaaaaaagaaactgggaggtggaggttgcagtgagcttagatttcaccgctgcactccagcctgaataacagaggtgagactctgtctc

SEQ ID NO: 221452 - DNA, 528 bp, Homo sapiens
ccaaggacaggacttctccttatctttctatactgaatatctgccattatccttcaccctgttgtactgtgaatgcttgagatagtgctgtcattcccccggttcttgtggaccactaccaggccattacggttcccattttgctgtgaaaaaaccttcctcttttccagctcataccatttgtatttaccacctcttctcctttttcattttccttcaactacaagtgatatctgcggttgaagtccacagtcttcctttcctccatcatgatgtgtgacttgcatatgttgcttgactcatgttttctgaccttctggagtctaatggtcttcattcactctacttccttagggcacattcagggttataccctggatcttattatatcctagaatttttccctccttggctgggcgcagtggctcacacctgtaatcccagtgctttgggaagccaaggtcagaatatggtttgagcccaggagttcaagccagcttgggcaacacagcaagaccctgtctctgt

SEQ ID NO: 221453 - DNA, 1243 bp, Homo sapiens
aagcctcaccccccatccccacctccccactccccacctgtctgagctggaatgagaagggcagcttagcaaaaggccaaggtagatgagctcaccatctaccaagagcagtgtggggcctgcttgcagggttaactttccaagttgaagccagacacccccaaactagagaatcaccccacatacaaacagcaggaccagaccttggtatctgtgttcccccaaccccaacaaataatggcaaaacctaagccagcactgcaatgaatgttggccatttaggtaagtgtccccttattgtggggtttcatgtatgtttccacctcccccaccaggctgtgagcaccagaagggagagctgggcctgtcttggtcacccctgggtcctcagagcccagcacgtagatgggctctccactgatgttcgtcgaatgaatacatgaaaatatcttgtatctctgtattcccaccacccagagcaaactgtagccctgatccaaatgaattgctgagcccctcaacgtgagacttttccttacctggaaaacatggaaaattcaccctaacactgatgatgatgaaagaatgagtgttgggctgaggcctgatgaatgagtgaatgaatcaatcaatcgatcaatcaattgaaagaaggaacaggttcttgctacatatgaagaggcccagagaggttaagggatgtgcccaaagtcacacagcaaagaaggaggccacctggaagtgaagggtcaccctcaccccatactcttccttggggccattttacctacgaggctgagggcacagggcccacaaactcttttcaaggggccccaaaattttcaaacctgaaaaaaaaacttgattccagtccaggcgcagtggctcatgcctgtaatcccagcactttgggaggcccagtgggtggatcagttgagcttaagagttccagatgagcctggacaacatagtaagaccccatcgctacaaaaaaattaattaattaatttaaaatagagaaaggatttgaatagacatttctccaaagaagatatatgaacagccaaaaagcccatgaaaagatgcttaacatcattagttattagggaaatgcaaataaaaaccacaatgagatattactttataagcatcagaatgactattatcagggaggaggaggctgggtgtggtggctcactctgtaatcccccagcacttcaggaggctgaggtgagaggatcac

SEQ ID NO: 221454 - DNA, 484 bp, Homo sapiens
ctggcattcctctttatagtgcagcccaaggactgatgctcataatgatgttcgtgagtaattaagaaaagataaaagcgaatggaatgaactctgcctaatgataatggcaattgtcagaacataggcttccctcaagaactcaaaatcgcactctgggagccattttaagatctgaaaagagatacctaataagttgtgccagagaaatcaataaataaagtcaccagaggggggaaaaagaccctcaaaccagcaggacttgattagataaaatatcttttaaaacaatcagtatatttggaattttcttcaggctaatatgggagataagggaagtgaagtgtgggtgtagataaaaccagactgaccacatgtggataaggatttcagctgggtgatgagtacgagttcatgatcttatatgtgtgtttttatatgtttttgaaatctccacaataaaaaattacaaaaaaagtttaaa

SEQ ID NO: 221455 - DNA, 502 bp, Homo sapiens
agcccagacatactccttagtatttaaataaacatctgttaagctccaggccatgttcaacgttggaattgttatgatcaattttaaaaagttagttttcctacaccaaacagcttacagtcttaatgaggaaatgttttagcatttattaattcaggaaacatttctggcactgtgctaataactatataagaaaatcattgtaagatataaagaccagatatagtccctgccctcaacctatacacttgaaactattggaaactattgaaactattagacaaaatggccacggtcatttagtgcataattaacacaccatgccttgttgttcttgctcaattgccttattcctgtgtcaacatcagcttcaaaaaagtgtattcaatgcaacaagaaacttcaaaatcacagttttgtaaaacggcagattatgttaaatgagtgaacctgtatattgtatttgttttctattgctgtcctaacaaattatcacaaactt

SEQ ID NO: 221456 - DNA, 412 bp, Homo sapiens
cagatcacttgagcccaggagttcaagaccagcctgggcaatatggtgaaaccctgtctctacaaaaaatacaaaatttagcccagctgtggtggcatgtgcctgtagtagtagctactccagagcctgaagtgtgaggattgcttgagcctgggaggtcaaggctgcagtcagctgtgatcatgccactgcactccagcctgggcgacagaaggagactctgtcttaaaaaacaaacaaagcagaaggaacaaatatggctggacctaggtgagagttatatccatatcaaaagatgactgtagaaggtgtctttaaaatggcttgacctattaacacatccctagacccttcagcaatgcgtgacaatgacctggctatgagataagtgatggttattacctagatacat

SEQ ID NO: 221457 - DNA, 466 bp, Homo sapiens
aagctgatagcactttctggctggattcctgcagtatcttcctaattataatctctgactttactccttttcctgtctgttctccatgctgtggcagagataccctctttcaatacaggtatgggtctcctgtctcctgtcttccagcccttttcatccttggcccctagacctacctagaagcagcacacttagctctgcctggggcagaggtggcaaactctgatgaatttagaggccaggcagctgatacagttgagggagtcaaagggagatgacatggcccatgataaatcggagtgtatgtccacttaagggcattaaaatttaaaattagttaaaatgatttcctgggcaagcaaaacatggctgtgggctaaaacaaggtagccagtttgagactggggataaagggtggattttagtaaaagatgaattaaaataaatatataattcttatactgag

SEQ ID NO: 221458 - DNA, 1340 bp, Homo sapiens
ccagaacattctcatgccccccaaaggaaatcccatccccagttactccccatccctccacccccagcccctggcaaccactattctgcttcctgcctctatgatttgcctgttctggacatttcagatcaatggagtcagacactgtcgccttttgtgtctggtaagcattgtttttaagtgacagtgatatctcagtgtcatcaggaatctgggcagtggctcaattctgtctcacaatgtcaaaaatgtgttttttcttatttccataattaaatacacaaccagcattatgactggttgatgtgtcttgtaagaattcttggctgagcgcaatggctcatgcctgtaatcccagcactttgggaagccgaggcgggaggatcgcttgagcccaagagttgtagaccagcctgggcaacatagtgagtccctcatctctacaaaaaaattgaaaatctagctggttgtggtggtttgtgcctgtagtcccagctgcttgggaggctgaggtgggaggattgcttgagcccaggaggtcaaggctgctgtcagccgtgattgtgccagtgtactctagcctgggcaacagagcaagcccctatctcaaaaaaataaaaaaaagaaaagaaaagaaaagaaaatatttcatctgtaggtgccttttctctttctgtctgtctctcttccctcttggaatttatttattacagaaattgagatagtgtccagaccaggtttgactcttaacatttggggctggatcattccctggggtgggacgtgtcctgtgcattgtagcatatatttagcaacatccctggcctccctgcaccagatgccagtagcagtccccttcccccaagttgtgacaattaaaaaaatgtgtctagatgttgctagtgtccctgggggacagaatggtccccgcttgagaatcgctggtctatatattttatcggcttcaaactcaacttttttggcaaagattccttatgggtggtgtggtgtcctcccactgggaagcccgtcatgtctgatggtctctctttgtccttgacacaccatcttgcattggttactacttactgtctcctgggccttggaagctcattctgtcagtttcctagaagtggaatttctgtgtcaaataaggcaccagctgaacattgagaggctttttaagaaatagaggatgggaaattagctaggcatggtgggcgcctatagtcccagttatttgggaggctgaggcgggagaatcctgtgaacccaggaggtggaggttgcagtgagccgagatcgcaccactgcactccagcctgggtgacaagagtgag

SEQ ID NO: 221459 - DNA, 763 bp, Homo sapiens
ccagaacattctcatgccccccaaaggaaatcccatccccagttactccccatccctccacccccagcccctggcaaccactattctgcttcctgcctctatgatttgcctgttctggacatttcagatcaatggagtcagacactgtcgccttttgtgtctggtaagcattgtttttaagtgacagtgatatctcagtgtcatcaggaatctgggcagtggctcaattctgtctcacaatgtcaaaaatgtgttttttcttatttccataattaaatacacaaccagcattatgactggttgatgtgtcttgtaagaattcttggctgagcgcaatggctcatgcctgtaatcccagcactttgggaagccgaggcgggaggatcgcttgagcccaagagttgtagaccagcctgggcaacatagtgagtccctcatctctacaaaaaaattgaaaatctagctggttgtggtggtttgtgcctgtagtcccagctgcttgggaggctgaggtgggaggattgcttgagcccaggaggtcaaggctgctgtcagccgtgattgtgccagtgtactctagcctgggcaacagagcaagcccctatctcaaaaaaataaaaaaaagaaaagaaaagaaaagaaaatatttcatctgtaggtgccttttctctttctgtctgtctctcttccctcttggaatttatttattacacctggggggggacgggccttggcattgacatatatttagaacaccccggcc

SEQ ID NO: 221460 - DNA, 481 bp, Homo sapiens
cccattctgaaccccctctccaacatcacagggaatcccgtgatagctggtgtggcccagccatgtttctgagtagtcacgtggtttggggtgttcaggagaagcaggatccagtcatctcagtcagacctaagacacagagttaaccttgcccctggatagagatccacagcacaggaggggtaagtgagtcagttagattcaaaaatcattaatgatgcaccaaattaagtgataataaaaaattgcaaccatttgttatcataaagtgccaaatatcatgttaaatgctttttatacactttctcctttaatttgctcaactgcactgtgaaataagtactcctattatccctgttttctagatgggattctttgctgcacagagcagtaaagtaacttgcccgagattacacagcttgtagtaagtagctgctataccacaagcttctggagggtagaatcatcatatgcccagtgc

SEQ ID NO: 221461 - DNA, 492 bp, Homo sapiens
atggtgagttctttttgttttatggcacttttggcacatgatcagccaattggaagacacacagccaacttaaaaatcagacataacttcacctcctgtcagggcagtgtggtcaagaccaacactgcatagccttagccaaaactttagagaaagggtgatgaagaaaaccacacagaggctgtgaggctactagaaaagtctgtcctggtcgggagtgatgcctcatgcctgtaatttctgcactttgggaggctaaggcaggaggatcactggaggccagcagtttgagaccagcctggccaacatggaaaaacctcatctctactgaaaatacaaaagttagccaagtatggtggtgcatacttatagtctcagctacttaggaggcaaaggcatgaaaatcacttgaactcaggaggtggaggttgcagtgagttgagatcacgcagctgtactccagcctgggcgacagagcaacactctgtctca

SEQ ID NO: 221462 - DNA, 373 bp, Homo sapiens
gtggtctcatttctctgacctgatagctaagctaatggaaccaattctcattgtctaacatggacttgaacactagcaaaagctcaacattaaataagatattgaattaggaaaaaaagagggggaagtatggggccagtcaacaaaggaatgtgaaaaataatttcaaggaggcttggatagttgcctgccttctccagaacagtgggattaaaggacttcaaagttcaacttctgccccaaactgtccagatacacctaaactcatagaagcagagttctcttccagggagagaaggttcaactgcaacttatgtagacctgatgaacctatttgactggtctaagatgcttagatctaatggtgtgttcc

SEQ ID NO: 221463 - DNA, 252 bp, Homo sapiens
taggtgggacctttacaaggtcatgacggctctgcaatcatgaatagatcagtgatgttactgcaggagtaggttcgttattctgagagtgggattgttaggaaaaaaagttgggtcctcttgctgtatctcctgtactctcttgttatgtgatgccttcagccacaggatgaagcagccagaaggtcctcacaagaagcagccacttccagcctcaagaactatgagccaaataaattgccatgttttata

SEQ ID NO: 221464 - DNA, 403 bp, Homo sapiens
gaagccattggatgagtttgaggcagaggaactgacatgatctgatagcatcacactggttacttactgtgtagagagtagatacacaaaagttgagcaagagtggaagctggcagaccagacagaagctattgaaattattcaagtggaattaaatagtcaaatagcagtgtcagagatgagacatatttggattccagataaattctgaagttggagacaataggatttcccactggattagctattttgcgtaagagaaagacaagttaaaatgatcccaatatcccaatatattaatatctagctttaacaatgagagaggtgaaattactattaaatgatatgtggaaatggaatagcaagtttgggggtcaggagtggaaatcagtattgattttgg

SEQ ID NO: 221465 - DNA, 548 bp, Homo sapiens
  misc_feature (41)..(41): n is a, c, g, or t
ctctcgaggagttaagtttacagcgcagggggcagggcatntcccagccctctgacctggcgtccaggccagcacctgtgcaggacagggttcaggaaaggagaagtcagggggctgtacccacctcagggaagaagaacgtaagaggccttcgacgaggcagtagttttcctagcttcaggggttgttactcagccagtttgaaaaaataaatgtggtcagaacattatctcccacatcgggctgcgaccttccatcgggtcataatcttctccttggccgggcacacagcctgcctgactctgtctaccgtctgtggtcagcgcacgtgagaagttggaatagtttggaacttagaggaccctgcgtgtcacgtgggaaacggggaactgtcttctccctccttgggcttccagtgtgttgtccttcctcctggcccctgacccactgtcttcccatacacacaggtgaagacacacctctcacatcacactcaggtacactgtgtcttgaagacacacgtgtggggctgtatagtctctgtttct

SEQ ID NO: 221466 - DNA, 669 bp, Homo sapiens
ccctcaggaaagaggaaatgggagacgaggggaggtgagggaaggttcataaggagagagtccagagggagaaaatgagaccccaggcagggacaaggggtgctagagagaacccagagagccaggagccaggagggtggaagggggcatgcaggggccaagtcccagccctctgacctggcgtccaggccagcacctgtgcaggacagggttcaggaaaggagaagtcagggggctgtacccacctcagggaagaagaacgtaagaggccttcgacgaggcagtagttttcctagcttcaggggttgttactcagccagtttgaaaaaataaatgtggtcagaacattatctcccacatcgggctgcgaccttccatcgggtcataatcttctccttggccgggcacacagcctgcctgactctgtctaccgtctgtggtcagcgcacgtgagaagttggaatagtttggaacttagaggaccctgcgtgtcacgtgggaaacggggaactgtcttctccctccttgggcttccagtgtgttgtccttcctcctggcccctgacccactgtcttcccatacacacaggtgaagacacacctctcacatcacactcaggtacactgtgtcttgaagacacacgtgtggggctgtatagtctctgtttct

SEQ ID NO: 221467 - DNA, 570 bp, Homo sapiens
gtatttgtgaaatctgtgaattattcagtatattaccaaatgtatcttgacactttattccactctttttttttcctgtctataatcattgtccctaatttcccatttataatctatatgactataattcttaatcctggctgcataataaaatctccagaagagcttttaaaaaagtgtgccacacctcacccaagccaattaagtcagactttctagaggttaaggcttgagcatgtgtatttttttgaaagctctctgggagattctaatgtgcaccataattgagaagcctggtttataactactattggatactcaactttttcatgatttgtaattaaagtggtagcatcttcctacatacatttgttctttctaaaatgaaattttcaactaacacatcttcctgtctctattcaaagaggtttctactaatggatttgggggtatgatgtatctgtataagttccaagtttgatttcccctcttcagaacttgaagggtaattttgactcattgcataactcataattattattattcttttgtacatttgtagaattttta

SEQ ID NO: 221468 - DNA, 368 bp, Homo sapiens
cttaaacagggtatttgtacctatcacatgttcttcttccttaatgcttgtatttttgtaaggtgaacacaggcctttaaaacacattagttaaaaatgatgatcacaagtctcccaatcttctcttggaaggtatagaaggtctcaggtctcatttaaaggatagacctgacatctggcataaaagatattgtcatatggaccttgagcctgccattgtccacaaagggaagggccaggccacatgctggaagctggcactaacacatatgtgagaaaattaattgcttgggcaatttgctctctttggctctggtgactaggttgggaattaaataaccacagttctctgagtcaaggaacggggg

SEQ ID NO: 221469 - DNA, 537 bp, Homo sapiens
atataatctcccagaatcatattttgaatactgtcttgattaaacaccagagcaaggggagggaggatgcagccctgctctctttggctgagcctgctggtgcccacagacagctggactgtgaactctgcaaagtaaatgttggtaaatgcagaaagttgaggttctcaggtttgtaggatgtatacaagctggacctccaaactccttctatggctaaagtggcccttccctcagctgcacagcaaccaggggctaggccctctggaggtgaggagaagccacccaggggagctcccccccacccccagcacacccagtgtcttccttatctctttcctgccagtgtcactagatggacactggattcattagatgatctctgtgatcacttctagttttaagattctatgatcctgttaatgataataagaacttctagagcccttaccatgtgtcagactcaatgccatgtgtcttagtctgtttggactgctattttacagagtaccataaattgagtgtctcataaaaaac

SEQ ID NO: 221470 - DNA, 270 bp, Homo sapiens
tgctggaattagaggcatgaaccaccacacccggccacctagaaggttttttaaacatatgagccacaccccacacactgtgcaggcaaaaaagtggaaagcctatcacagtgaacacctttgtcctctagagtcagtaattataaacattgttacagttcttttctttctcttctttttttcctgaccactgggagttgcagatatcatgacactgcatccttaacgacttcagtaggcatctggcgaaatcagggccttctcccgcat

SEQ ID NO: 221471 - DNA, 432 bp, Homo sapiens
cagtagaatggacataaattcgaatgtatttatgtgtggactattatacagcaatgagaataagcatattagaactatacacaacaacatggatgaatctcatgagcatgaagttagggaacttaagaagccagctacaaagagcacatgctgtgttatttcatgtacataaagttcaaaaacaggcagcactaacctatggcattaaaagccaagaaagtcaaaagatacccttggggtggtggtgacaggaagcagcatgagggtccttctgtgttggtgacattctctttcttcaagagctcgctatgtgggtggtttgctttgtaaaaattcagcaatgtgtacagttgtgtacatttttaatgtatacttttatatgttttaaccttcaaaaagtgaaacaaatataaaacttcatgtgttcaaatt

SEQ ID NO: 221472 - DNA, 436 bp, Homo sapiens
aaggacgcttattaccataatttttgaggggggaaggacaatggttggaaatgctttgtatagccacatcttagaatattaggtgactaggaaaaaggattaagatctgaaaccactgcctcgaagggatgataaatgcgcaagacaagaagcagcaagatgagaggaatacccatcaggatcccacattctaaaaactaggttgaaacttcaagcacatttgcatttgtacatgactacttcctagtgacgagagcaacctgttgaatcaagcttagcctaaagctgcctccttccatgttttgaatgtggcctcaaggtttttctgtacctcatgaactataacaagtggaggtataaacagaccgtagcctactcttgtgccaatcactgagttttggccaatccaatatagctgactgttcaaaccatgttc

SEQ ID NO: 221473 - DNA, 520 bp, Homo sapiens
catgtccaggattaaggccacacagctctcctaggagaccctcaggatggcttttctctgtggcagctgctcgtgtttgatttgcaggccgctaatacaaatccactgtttagtgacgagggagtacttgccttactagtaagtaaccctccttgagcccgtggtatgttctagttctgggctgcgtgcttcaattgcactgtgtcatctggctcctgagcctggagctggactcccattttacagacaagcaaacagaggtggcaagagggtcccatagctagtaaggtgccaagacaggactgtgacccaggcatgtcagacttcaaaacacacgactgcaagctgtgctgggaaatgattgctctggggaggacactgtcctcaggctcctgtggatgactgacaggaagtccagggccacctccaggctcccggttgccacttgtctctttctggtacaggtgaatcagtgatggctttggggactccctcaacgcttaggtgtcctcttctctca

SEQ ID NO: 221474 - DNA, 359 bp, Homo sapiens
tcttggaacaaccctcccggctcagtgctcataaaacacacagatacccaagcataagactacagttgtgactgaaatctattttgtaaaagatgcacttctatgctctgataggtagcatagagagatagcagcatgagaagtgatcggcctgacattgctggctttggagactgaggcaggaagccacaagctaaggaagtgggtaacctctggaagctgcaaaagacgagggaatggattctctagcagaccattcagaaggaacctagcactgctgacaccttaatttttgcccagtaagacccatttcagactctgaactacagaataataaagtaacaaatgtgtattgtttc

SEQ ID NO: 221475 - DNA, 457 bp, Homo sapiens
  misc_feature (427)..(427): n is a, c, g, or t
gacggccgtagatagagcacgaccgaccgctcatttacttggctcagtgcttaattatataccttctattgttctttgataatgtcttatgtgttagtcttctcttaacaaccagataataacctgttaaaggcagggtccatggaaattaaatgctatggattgaatgtacaatactttcttggtgaccactcaagtatggagatcaggaacagacatgtaagacatgttgtggtttattagtgagttttactatataatgaagagcaaggcaagtgtttctttgacaaaaaaaaaaaaaggggggaattttggggtaaaattaaaaaaacttttgggggggcccaattaaaatggcgggcccaaaaaggaattaaacctttggtaaaaaaattttaggctttaataaaaaggcttcccttggggnaggaaaaagagaaaaaaaggtttttttttt

SEQ ID NO: 221476 - DNA, 498 bp, Homo sapiens
  misc_feature (468)..(468): n is a, c, g, or t
gtgaataggtgagttactataacccattacctgatgtgtcctttccagaactactgaatttataatcggcaccatttacttggctcagtgcttaattatataccttctattgttctttgataatgtcttatgtgttagtcttctcttaacaaccagataataacctgttaaaggcagggtccatggaaattaaatgctatggattgaatgtacaatactttcttggtgaccactcaagtatggagatcaggaacagacatgtaagacatgttgtggtttattagtgagttttactatataatgaagagcaaggcaagtgtttctttgacaaaaaaaaaaaaaggggggaattttggggtaaaattaaaaaaacttttgggggggcccaattaaaatggcgggcccaaaaaggaattaaacctttggtaaaaaaattttaggctttaataaaaaggcttcccttggggnaggaaaaagagaaaaaaaggtttttttttt

SEQ ID NO: 221477 - DNA, 132 bp, Homo sapiens
tgctgggattacaggtgtgagccaccgcgcctggcccaataattgctttctttatcacagtagttctaagcatttttcccagtatgactaatgatgtttatgcgcatctttgtgcacatgtcatctcagcta

SEQ ID NO: 221478 - DNA, 1329 bp, Homo sapiens
gagagagagagagagagagagagactgagacagagagagatagagtgagagagagctctgacggccatcgtgggtgcctggcttgaccacattcttacccatgggattcggttcagcctgcagggagcgctgcagctcaaacaagactttggagtggtcagggagttgctggaagaggagcagtggagcctgtcccctgatctccgccagaccctgctcatgctcagcatcttccagcagctggatggggccctgctgtgtctgttgcagcagcccctgcccaagtctcaagtccacaggaggcccccctgttgctgtgcttgtcaggaggtccagaccacgaaattgcccagcagctgcctcaatagcctggagagcttggagcccccgctccagcctggaacatctccagcccagacaggtcagctgcaaagcacactaggaggaaggggacctagcccggagggctacctggtgggaaatcagcaggcctggcttgccctcaggcaacaccagcgaccccgttggcacctgccgtttttttcctgcctgggaaccagtcctgaatcctaaggagcctgggaccaggagccagaaagttaagagctccccatctctagctggaaaatccagacatttggaattgcatattaaggaagcccagaactggaagcttggaggaaagcatactggagaataagctacaaagagcctgggcttaagaatccaagattaggggctgggcgaggtggctcacgcctgtaatccagcactttgggagaccgaggcaggcggatcatgaggtcaggagatcaagaccatcctggctaacacggtgaaaccctgtttccactaaaaatacaaaaaattagccgggcgtggtggcgggtgcctgtagtcccagctactcgggaggctgaggcaggagaatggtgtgaacctgggaggcggagcttgcagtgagctgagatccagccacagcactccagcctgggtgacagagcaagactctgtctcaaaaaaaaaaaaaaaaaaaatccaagattaggcagggcatggtggctcacacctataatcccagcactttgggaggctgaggcaggcggatcacctgaggtcgggagttccagaccagcctgaccaacatggagaaaccccgtctctactaaaaatacaaaattagccaggtgtggtggcgcatgcctgtaaccccagctactcaggaggctgaggcaggagaatcgcttgaacctaggaggcgaaggttgcggagagccgagattgtgccattgcactccagcctgggcaacaagggcaaaacttcgtctc

SEQ ID NO: 221479 - DNA, 1579 bp, Homo sapiens
gtcataaacaagccatgcaaggtttcaagctctacatgccacggggtcggtactggcggcttcgtctctgtcctgaacctcccagtgctcctagtgagtatgctggtttagtggtccgcaccgtactggagcctgtgttgcaaggattgcaagggttgccacctcaagcccaggcccctgcccttggtcaggctctgacggccatcgtgggtgcctggcttgaccacattcttacccatgggattcggttcagcctgcagggagcgctgcagctcaaacaagactttggagtggtcagggagttgctggaagaggagcagtggagcctgtcccctgatctccgccagaccctgctcatgctcagcatcttccagcagctggatggggccctgctgtgtctgttgcagcagcccctgcccaagtctcaagtccacaggaggcccccctgttgctgtgagttactccccttcgctcactgctttgtgtgtcccaaaccctattctcaccattaatctggcttcagtatatccccagcagccacctaccttccactcctgccttaccaggtgcttgtcaggaggtccagaccacgaaattgcccagcagctgcctcaatagcctggagagcttggagcccccgctccagcctggaacatctccagcccagacaggtcagctgcaaagcacactaggaggaaggggacctagcccggagggctacctggtgggaaatcagcaggcctggcttgccctcaggcaacaccagcgaccccgttggcacctgccgtttttttcctgcctgggaaccagtcctgaatcctaaggagcctgggaccaggagccagaaagttaagagctccccatctctagctggaaaatccagacatttggaattgcatattaaggaagcccagaactggaagcttggaggaaagcatactggagaataagctacaaagagcctgggcttaagaatccaagattaggggctgggcgaggtggctcacgcctgtaatccagcactttgggagaccgaggcaggcggatcatgaggtcaggagatcaagaccatcctggctaacacggtgaaaccctgtttccactaaaaatacaaaaaattagccgggcgtggtggcgggtgcctgtagtcccagctactcgggaggctgaggcaggagaatggtgtgaacctgggaggcggagcttgcagtgagctgagatccagccacagcactccagcctgggtgacagagcaagactctgtctcaaaaaaaaaaaaaaaaaaaatccaagattaggcagggcatggtggctcacacctataatcccagcactttgggaggctgaggcaggcggatcacctgaggtcgggagttccagaccagcctgaccaacatggagaaaccccgtctctactaaaaatacaaaattagccaggtgtggtggcgcatgcctgtaaccccagctactcaggaggctgaggcaggagaatcgcttgaacctaggaggcgaaggttgcggagagccgagattgtgccattgcactccagcctgggcaacaagggcaaaacttcgtctc

SEQ ID NO: 221480 - DNA, 1466 bp, Homo sapiens
gtcataaacaagccatgcaaggtttcaagctctacatgccacggggtcggtactggcggcttcgtctctgtcctgaacctcccagtgctcctagtgagtatgctggtttagtggtccgcaccgtactggagcctgtgttgcaaggattgcaagggttgccacctcaagcccaggcccctgcccttggtcaggctctgacggccatcgtgggtgcctggcttgaccacattcttacccatgggattcggttcagcctgcagggagcgctgcagctcaaacaagactttggagtggtcagggagttgctggaagaggagcagtggagcctgtcccctgatctccgccagaccctgctcatgctcagcatcttccagcagctggatggggccctgctgtgtctgttgcagcagcccctgcccaagtctcaagtccacaggaggcccccctgttgctgtgcttgtcaggaggtccagaccacgaaattgcccagcagctgcctcaatagcctggagagcttggagcccccgctccagcctggaacatctccagcccagacaggtcagctgcaaagcacactaggaggaaggggacctagcccggagggctacctggtgggaaatcagcaggcctggcttgccctcaggcaacaccagcgaccccgttggcacctgccgtttttttcctgcctgggaaccagtcctgaatcctaaggagcctgggaccaggagccagaaagttaagagctccccatctctagctggaaaatccagacatttggaattgcatattaaggaagcccagaactggaagcttggaggaaagcatactggagaataagctacaaagagcctgggcttaagaatccaagattaggggctgggcgaggtggctcacgcctgtaatccagcactttgggagaccgaggcaggcggatcatgaggtcaggagatcaagaccatcctggctaacacggtgaaaccctgtttccactaaaaatacaaaaaattagccgggcgtggtggcgggtgcctgtagtcccagctactcgggaggctgaggcaggagaatggtgtgaacctgggaggcggagcttgcagtgagctgagatccagccacagcactccagcctgggtgacagagcaagactctgtctcaaaaaaaaaaaaaaaaaaaatccaagattaggcagggcatggtggctcacacctataatcccagcactttgggaggctgaggcaggcggatcacctgaggtcgggagttccagaccagcctgaccaacatggagaaaccccgtctctactaaaaatacaaaattagccaggtgtggtggcgcatgcctgtaaccccagctactcaggaggctgaggcaggagaatcgcttgaacctaggaggcgaaggttgcggagagccgagattgtgccattgcactccagcctgggcaacaagggcaaaacttcgtctc

SEQ ID NO: 221481 - DNA, 575 bp, Homo sapiens
ctgtattacccacaggagacataaaaataaattaagtaccaaatctgctttagaaaatctctcatttctattatggaaagtagactctaaaaataccaataggatatagtcataatgccattataaatgtgtatgcagaatattgtggaagcatgattaaaaaattagtaaattcaaggagaggtgagaaatgttaactgataaactgggctttgaagaatgggtaagaatttatcctataaacgagaaagggaacgacagttaacagaaggaacagacagggccataaaaacacacagcttgttctgaaaagaatgaatactcttatagaacaggagcatgtgatcagttgaaggaaatggttggtaatgaaactgaaaatgaagcctggagccaggttacaaactttctttgatgacttgttgagaaaagtataccttatcctgtaaccaaatttgggctgggggagcagtgtttggagaaggtcgggggagtggggcacagaggtttttaagccagaggtggtacaacagggtagatgttttaggaaggttgttctgatatcaggataaagt

SEQ ID NO: 221482 - DNA, 377 bp, Homo sapiens
atattgtcaggaggccgggaacacaccacctcattgacagctgaaggaagcaagagaatcagcctaggttttgcctgtaataggaaaaagggtcttcttttgctcccatcagtgattctgcatactttttgtgaatggaaacatgcattttttggagactcagttagagggggaaaagggagaggttgagaagggaacacccttggttttatgggggacatcttcttcacgtacctcctctcccttcctcctccttgcccctgcccagaagaaagtgcccgggggaggtgacatcttctgcagtcagggaggcaggcttggctggggcccagccgctctgcccttagaagcagccacccctccttacgaaggtgcag

SEQ ID NO: 221483 - DNA, 349 bp, Homo sapiens
ctattgagtaatacacaattctgccgatccgacactaacacatctaggaggctgtcctatgccatattactatccatcctcatcctagcaataatccccatcctccatatatccatagacaacaaagcatagtattgtcgcccactaagccaatcacttgtatagactcctagcccaccacctcatctgcctcatctgcacctctttcactggggtcactcttctgctccaaacccatcaatgggtttggatgccctttgaatgaatacccaacatcctacagggccttcctgaccaggcctgtgccaatccccctccaaagcccctcacacactacctcagcctcaaa

SEQ ID NO: 221484 - DNA, 558 bp, Homo sapiens
ctctcaggcttgctttgtaagactcctggactccttaggttttatcaatcctggtgcccttccattgtatcacatccttggatcacagtgatgggttcaggaatagacacatgacccaagggaggctaatcaggtgaatatagggagatgttctttctttcttaaggtggctacgtttaggacatgagccagggttgccagtgtcacccatcacatgtaccatatgaataactcttgtctaagatctggcaagagatggtggagcctaatgacattgttaaagatcctggatacagccatacctgaagcgtatccagaattccggctgagtatctgtactagtcaatgttctccaaataatatacacaggcataactcagagatactgtaggtttggttgcaggccacctcaataaaacaaatattgcaataaagtgggtcataggaatttttgatttcccagtgcacgtaaaagttacactatagtgtattaagtgtgcaataccattacatctaaaaaccactgtacataccttaattaaaaatactttattgcta

SEQ ID NO: 221485 - DNA, 613 bp, Homo sapiens
ctctcaggcttgctttgtaagactcctggactccttaggttttatcaatcctggtgcccttccattgtatcacatccttggatcacagtgatgggttcaggaatagacacatgacccaagggaggctaatcaggtgaatatagggagatgttctttctttcttaaggtggctacgtttaggacatgagccagggttgccagtgtcacccatcacatgtaccatatgaataactcttgtctaagatctggcaagagatggtggagcctaatgacattgttaaagatcctggatacagccatacctgaagcgtatccagaattccggctgagtatctgtactagtcaatgttctccaaataatatacacaggcataactcagagatactgtaggtttggttgcaggccacctcaataaaacaaatattgcaataaagtgggtcataggaatttttgatttcccagtgcacgtaaaagttacactatagtgtattaagtgtgcaataccattacatctaaaaaccactgtacataccttaattaaaaatactttattgctagcaatcatctgagccttctgcaaattgtaatctttttgctcgtggagggtcatgc

SEQ ID NO: 221486 - DNA, 322 bp, Homo sapiens
tgaggaaactgaagctgagagggagaatgtgccttgctcaagggcacacagagtaatggcagagccaggactcaagtccaggcacatgaaataatgttcttgatcttaacccctagcctgggatggtgcaggctgaacggtgagctccagcacatcagcaattactatatgtaaggaaaaaggagtagcttagcagcaggaatgaagcccaagaaaaatactccaagttgccttccaagattgaagcaatgatatctgagaccctattggttctcttcttctggagaacgctaatagagaggctctgtccacgcagaaatga

SEQ ID NO: 221487 - DNA, 219 bp, Homo sapiens
catcagtttttagctgctttccaatctgaactgaaaaactcagctctcctgggtctctctggtttgttgactgcagatcttggagcttagcagcctccataatcatgagtcaattccttaaatacatcccgatctctctctctcttcccccacgcagaccctattggttctcttcttctggagaacgctaatagagaggctctgtccacgcagaaatga

SEQ ID NO: 221488 - DNA, 717 bp, Homo sapiens
  misc_feature (48)..(48): n is a, c, g, or t
  misc_feature (50)..(50): n is a, c, g, or t
atgagcctggcccggatttacgcacgtcctcttcgtaggactcacagntncataaccacgtgatgggtgatcgtgggttcccatgtctcctcctccctggtcctcagacctcttcgtaggactcacagtccactaaccacgtgatgggtgatcgtgggttcccatgtctcctcctccctggtcctcagacctcttcgtaggactcacagtccactaaccacgtgatgggtgatcgtgggttcccatgtctcctcctccctggtcctcagacctcttcgtaggactcacagtccactaaccacgtgatgggtgatcgtgggttcccatgtctcctcctccctggtcctcagacctcttcgtaggactcacagtccacttagcctcccgtcctccatcgctacccaccagtagggtcctgtacccttggggacagctgcacttgtgttgacgggacaccgtgtgaggagtggtgctggctgtacctcagcagctggggcccaccttttttgtgacacgccacagcctcctgtgtgttttgcatgacacgctgtgttgtaatttctttgtgcacagtcttcaggcctcaccacgtgctactggagtaacacccgtgtcagttatggagcctcacacagcagatgtgtctagtaaatactgtgaatagcgtatactgtgttttgcttttgttttctttagtaatgaggtctcgttatgttg

SEQ ID NO: 221489 - DNA, 1247 bp, Homo sapiens
gctggtgtgtataagtggttttttttttaaaacaaatcagaagacataaaattgaaaaggcactccatttatatatgagggaaaatagattgtaaatagctaaggggccttgtgagaacttggaaaatgtgctgatacttagtaactacctcagttgtgaggaatttcctttttagcttagactgctattacttttacttggtagaaatgaatctggtctccaaaatatggctcagagagttatccccatagaccttgttagattgtttttaatttaaaaccttgaactctgcccagctgttttcttccagtcaaattctctaaaccaataacattttccaaattaagtattcttgaaggttcttctgaactcttactgatttgttttctttctttgcattttttcctgttactcttttattatttaaattgtctcttgcttttgaacttcaactatgaaataaacaaatcatagatttttccattcaggtctgactggataactcttggcttctaagcagctggcaagctcacccccactccccaaaaaagaagaaaggcaagttgaatattttaaaaccttaagagtttggagtatgaagtagaataaaagccttgttaggagaagacctgacttttccaaagttaacagcatgtgaagggcttgtgttttacaaagtcatttataaattatttttctttaaaacacatcacctactctgtaccttaaagattttacaactcttagatttatattttatttcaaaaatcgtaactagcacctgttattttgattaaaagacactgcgaagaattgacgtaaatttctaaagtttagttactgagtgttcaaaacctaacagttcacatgaagtaaaaattgtcatttgtgattacagaatcaaaataaaaataggtatgaatggtgctacacaaatttctgcttcccctttgttagcagaatatgtctatttacatagctaaagggtagtaggttattaggttagtgcaaaagtaactgcagtttttgccattactttcaatggcaaaatactaacagttatctactagaggagggtgtgtgtgtgtgtgtgtgcgtgtgcacgcacacgcgcatgcacatgtaatgtcactgctaagccaaatgtaactttctaccttttttgaaacaacaacaaagtactcaaaattcttctgactttgaacttcatgggaaaaaatataactgcataccgtgatacacttca

SEQ ID NO: 221490 - DNA, 607 bp, Homo sapiens
ccctcatgattacctcaaagtgggctaaaaaatataaaagagagagagagtcccagccctgaaagagttcataatctagataggcgggtagataaggaaacaaacaaattataaatctgtgaaatcaaagacatttcacagaatcaaacaaaacagtgtgggagtgaaaaaagtggcaattaaccaactgcctttgccttgcagagtcaaagagaattcactgagagatgatatttaaactggttctcaaaagataaaaccactaaggtgcaaaactacctggtatatataagaaagggtgaaaagctcagtgtgttaagaactttggataaacagtgtgcatggctaggaaaaaaaagcatttactaagttagagaatctggatttttctgtaagctctgagtcaaaacctttttttaaatacgttttctttaaaataaaataagtctggtaaacagtgtgggagatacatttttgtgtcaggaggctaattagagaaatgttaacattgattcaatggaaaagcaagatatgatagtttaacacaataggaagaaggagggaatggactgaaagatatttgaggtcaaattgaggtaatctggtg

SEQ ID NO: 221491 - DNA, 317 bp, Homo sapiens
aggctcatattctcaccactctataaccagcagaaaaagctggtttgtctagcttcgagatgaaaaaccctaggggaagaattcagtgatttatactggctcattacccattccttagaccagtccctgtggtcaaggaaacattaggtactgcatttagcccagctacccctgtggctggagtgagcaaagtctgttcccagaagaagactgtcacaggaagattctggacaaatatagttaccttactaaataactttgctttctttctaatttgtgtaaaatatataataaataaatccaatttttctgcagca

SEQ ID NO: 221492 - DNA, 217 bp, Homo sapiens
agtggtggtgatgatgacagtgacagtgatgctgctgttgattgtggtggtggtgatgatgtgatcagagcagcctccactacgaccaagtacttctcaagcttcaccaaatttaatacctgctctgacacttccattttacagatgagaacaccaaggcttagagaggtactgggacatctcaaagctacacagctagaaagtcatgggagtggga

SEQ ID NO: 221493 - DNA, 552 bp, Homo sapiens
ttcggcacgagaatgcatttgggtgaatattagcgctgaggttgtcacaggatcatagagaagtgttctcaatatatgattccttcaccagcagcatcagattcacctgggaacttagacatacggatttttggctctaccccacatccactcagccagaaactctgggggtggtgcccagcaatttgtgtttttataagcccctcagatgatttctagtgtgtactaagtgagagaaccactggcataggaaacagatgccctcactcagacttctgggttagaaaatcttcctagagtaggttgtgcctgagccgagttctgaaaaaggcattatccaagggaaaatgtggtaagtgtttaggcagaagacaactgcttttgcaagacaagaaagtgagagaaggcatggatcatgagaatgtgacaacctctgtactagacatgctacatagattacctctaattctcagcaaaacaattgaaagggtccgtgatgatttaacacaccctttagtacatcctgtagtatgacagtagagaggttaacga

SEQ ID NO: 221494 - DNA, 252 bp, Homo sapiens
tatatattagcctcactcagaaccacagggaacatactcaattgaatcacacctctatgagtagtgtataaagtgtaacattttaaaacaccagggaccagggctggcaaggtccacggggaatcctgaaggctggtttccagccacaactgtgctggaatgaaaatagaaaacaatgaggcatgtgcagagtcagcttttctttgtgtcacagctcagcagttttcctgctgtcctaaactttcctaaaaa

SEQ ID NO: 221495 - DNA, 417 bp, Homo sapiens
tctctgacgtcaacccaatcaactaccatctctgaaattccattgttatcatctactggcttcaattgctcttcctattgtgtgggaaggacaggaagacaggggacatagagctgccttcctcatatgtgtctcagtcttgggccttgccccttcccctagtcattctgtgaccactcttcacatgaacagttatgtcattcatactgtcatttggaaccagctttagaggcttctttttttctttccttgtcaaatgaaactgttatttattgttaatacaaactaatagagggtagtagtacagataaaaccaagtagattttttatatggtcaatattgtttccatttctaagggcataatagctgatcatttagaagtatcacttgtggttgattgggtgattacgattgta

SEQ ID NO: 221496 - DNA, 158 bp, Homo sapiens
ccaggaagcctagaactcaagcttgtttccaatcctactaaacatactacttccagccacctagtgcctgctctactctgtgggaactttctgtttccacacagggagttcacgagtgctgaaagtgtgatgccataagatttctttgagatggagaa

SEQ ID NO: 221497 - DNA, 349 bp, Homo sapiens
gacccccttattcctttttttaaacacacccaccgtcctcttctctacagtgttcctaattcctgacaatcactaatctgttctccatttccgtaatttttaaagtcaattttgacaaagggtatggagatagctgagagaaaaattaaacttataaagaaagaaatagtgccttttgttattgttttctcagtaaatggaattcatattctcctaaatgttaactttaagttagattgctagattatctataaatatgcatttatctgttgatattccttataagtaaaacttctttattgtttacattttcagtaaaatttctagattttaagagaaaatgttataa

SEQ ID NO: 221498 - DNA, 124 bp, Homo sapiens
aatgcccactactcccaggcttcgtgcgaggagctgtgggggatgcggtggtaagacactgccgtcccatcttctcctgtttggaggacagatttgtatgtaaataataaaaggcagtgaatta

SEQ ID NO: 221499 - DNA, 486 bp, Homo sapiens
gttttttttcccacatgtcatatttgtgaaggtttacaaaatctctagggtttacaacatctccagagttgttgtagaaagtgaagaaaactagagaaagggagatcatataaaaaactataatgaccattatccataataaatgaagtagtttaatctcaagtccaaggggcagtatagaaagtgatgggtttgaggctgggtatggtggtttgcgcctataatcccagcactttgggaggctgaagcgagagtatcacttcaggttgggagttcaataccagcctgggcaacatagcaagacccctgtctccacaaaaatagaaaattgagtgggtgtgttggtatgtacctatagtcatagctattagggaggccgaggcaggagggttgcctgagcctgggtgttcaaggttacaatgagctataattggtcccactgtacttcagcccagggtgacagagcaagataccatctctttttaa

SEQ ID NO: 221500 - DNA, 585 bp, Homo sapiens
taggagatattttatattcaaaacattttgaatacactatacttcttttagattagaaatttatatttcagtacattgcttctgagataaacttgaaataccagttaaattttaccctatttattgttagaataaaactgtcatcttagattggtcaacagatatttgctttataagcacagaaattaggctttttagacctagttattctatagaaattagtggttcagctggtttggtggctcaccatggtcatacatagactcattgttcctttggcagtccataacatgccaagctcatagttttaccccaccatgacccaagaatagcaacttgatgttctaagagaaaccaataatacagattccttgatagtgctatttataggtggtatggtttagttcatcagcataaggacaatggaaactttctataagtgaatggcatttaactgagaagatgcatccatttgagtgtgtctttcaagatgcatcttctaaactttgaagggattcagatactccctccaaagatgtactagttacctccacttaccaagtaataggctgcctacatttttta

SEQ ID NO: 221501 - DNA, 455 bp, Homo sapiens
aggaagcccaacaccaacagcaacgtagtaagtttcaagctatgcttccttcctctactggcaaatggcatgaatatgtaaagaggatatgttttatctagtcacagaaaatgtttagagtatttacaaaacaacagatatacatttttaaggccagaaaagcactgaccagtctgagaagcatcttgagaaaccgaagtcctgaagaacattctcattttcccatggattgacaaagaggagcaagagaagtatgacggtactctgatgtcttagtttaaaggaggcttaatattgatgctatataactacctacattcagaattaacagactgtaagtgctttgaaatcttgaaaaaaaggcattatgattttccatgagtagtttaatcaagatatacatgcaaattattcaacaaataaatataatagattacaaataaatatacatttgg

SEQ ID NO: 221502 - DNA, 350 bp, Homo sapiens
gcacgagaaagaaatgacagaatttgaaaatcaccattttgcaaacaccataatctaggcaatgattattgctgataatattgtaaaaatagaaacaacctttttcataattacagaatacacaataccacctttgaagtaggcttacactcaaaattgaatctgaatcttatcaatcctccagatctctgaatttagaagatacagatgcaaaacattaaataacaccacagggatgcaatcaaccaaacccagaccgctggcatatctacgggacacctgatttagtttctgcaacaaaaccaaaaatttttcctcaagggcaaattggaagtggaaacaatgtatta

SEQ ID NO: 221503 - DNA, 335 bp, Homo sapiens
aggtctctcattaccagagattgcacccacccttcaatctccatttcacctttcctgctctgcacccacacacagctcccttcatcttttagtaaacttcttgtatctccatctgaacagagactcgcaatccagtgatcacagcagctatgcacaatccttcaacttctccacttattacaaccctccttacccagcacagtctccttggaccatgagtttaatccttccctttcatattccctccactccttggaacttttcactcttcaccacgcttggatggcaaagtcccacctgggtaaaaacctgtctcctactaccccgtgcctgct

SEQ ID NO: 221504 - DNA, 466 bp, Homo sapiens
ccacctattgggtaccacattgattacccaggtaacaaaattatctgtacaccaaacccccatgacatacaatgtacctatataacaaacctgggccaggcgcagtggctcacacttgtaatccaagcactttgggaggccgaggcaggcagatcatttgaggtcaggatttccagaccagcctggacaacatggtgaaaccccatctctactgaaaatacaaaaattagctggtcgtggtggtgcacacctgtaatctcagctactcaggaggctgaggcaggagaattgtttgaacccaggagacagaagtcgtagtgagcagagatcatgccactacactccagcctaggagaccgagcaagactccatctccaaaataaataaataaaaataaataaataaaaataaataaataaaacaaaacaaaagaacctgcacatgtatccctgaacctaaaataaaa

SEQ ID NO: 221505 - DNA, 348 bp, Homo sapiens
gaccttaaacactgtacagtattttggctttatgccccctcccacctaatatcaaccttgagagagataaagctttgtctgagggggtgatttcccttttctattcaattccctcccttggagatagacacatggcatttatagtacctacttactatggaacctaatcgacattgtgttgaaatgttatgtaactcaaacacaaaagtatgcctttccagacacatcataaagtcttaaaatttatgctttctatctttactctctctactaggcccctaaacttcaactattatattatgcagacagtaggaacttaacaaatatttaagtagatgggtagctgga

SEQ ID NO: 221506 - DNA, 461 bp, Homo sapiens
gcttttggcatttctggcctggcatagtcatttaaaaccttggtttggggtctttttatttttctttccacacttcctggaatcactggtcagcttcagagccaggctgttgctctgaaagtcctgggagaggggaagagagcaagatggacgagtgcaatgaaactgtgaccctccttcctatgacggggcgagcgttatcatgctaaggccaggaattaggtattcttcatgcccagagaagacagacgagggggaagatgggacagccaggtggaagctgggagactgaaagattatagcttttaagaggatcctgtccagatttgatggcctctgaggggcctccttgttttctacatacaaagtttttctcccatgcaatattgaaatcgtgctttaaggcattcatgttaatccattctttatttcttaatttcacatcatgttccttagcctta

SEQ ID NO: 221507 - DNA, 650 bp, Homo sapiens
tgcctgacttatttctttaacgcatacctagcacttcctgtatgtccagtgccttataatattaactactatcatcctcagggctacccgtgaggtcggcactgtccccaccctttgtgcaaaggaaggatagggaggcgctgccagatgggttgagggcagaccggggcagcttgcctcaggcctccctggccttagcaggctttaagtttgatgccctgtgctccttccctaggaagctcagtttgccagttttttgctttatcttagtctcattcagattacaaggactgggactggactcctgttgccagtttctcaatttggaataggaaggaggtgaggaacaacaggcccatgctgggcagaagccctgcagaccaggccaacagtgggcctctcctcactgcctggccctgtctgtgcaccttcgtcctggccacagcctctcagagcccctcctttatgaagaggttacgctttaggggagggagtgcctctcccaagacccagagctggtgagtggctaggttggaatttgagcccaggtccctcctcccctgtctgcttcctgccaggcccagctgcctgccccagcacacgccttctcccaggcaccctggcctccactgccaggacgtgcctgtttg

SEQ ID NO: 221508 - DNA, 334 bp, Homo sapiens
taatgacttatcatttgaaaaatgctttgaagaaaatatgaaaataggtggaaatgcagaactctgcctaaagcagaaatgctaacataaaagaagtaacccactgcttttctcagactgactcgccccagccctctgttctcacccctacgtgctctgtctgatcctacctacctccgggaacaactgtgaggactaacggtgtaatctatgaagtgcacagggctccctggaaaagcatggctgttaaaagcccggatgtcatcactagaggcagctgagagaacatgccaacagtcgactgctaatataaaaatgtaaaaaagaaataaca

SEQ ID NO: 221509 - DNA, 373 bp, Homo sapiens
gagacagagtcttgctctgtcgccagcttggagtgcagtggcatgatcttggctcactgcaacctctgcctcctgggttcaagcgattcttctgcctcagcctcctgagtagctgggactacaggagcatggcaccacgcccagctaatttttgtatttttagtagagatgggttttcaccattttggccaggatggtcttgatctcttgacctcatgatccacccacctcggcctcccagagtgctgggattacaggcatgagccaccgcacccggcctcttcttttttcttttttttttaagagtttagtatgcatagggcaaaatcaaagccttgctgttactgtaccaccctcacccttcacaattctc

SEQ ID NO: 221510 - DNA, 400 bp, Homo sapiens
gaaagcggtgtcttgcaaacacaatcacattttgcttcttcatgctaaatcaagattgcagggtcattcagaagtgaaattaaatgagggaatgataacaatatgcttgagtagttttatttgtgccagtctggaaaagtatattacaccccaaagaaagaaataatagtacagctgaatgacagcatatttattgcttattgcaagaaaaaaaatgaattatttcaaagccataaaactatatttgataaatatgtttaagacaataaacataaacaaatctttgtttataatatgaccttactcaaactatagttcatccatgcttctgtgatggttagttaaagctagactctgattgaataagcaaaagagatttttcaaaggatggtaagtagtt

SEQ ID NO: 221511 - DNA, 726 bp, Homo sapiens
cgcaataagcagagacctcgggacgatgaatgacgttgctgacaaagaaaatgatttttttaattgctttaacaaaggagactgctagtctcgaaagcagacccgaactggacccttgtgcctgttcgaactgtagccttgcaaaggaatggacttactgataactggaatacgggacttcaccccaggcttgtttctcgacagcagcagcagccaatgagcattgaggacggagcctaggagaggtgcctcccctataggggaacagtgtttgggggaaatcactgcaaacgtacagctggagttttgtacctgaactttggctcccagaaggcaggaaaggaaatgaatgaagcaagctgagtatggcggggagggcccctgtgggtacacctacggagcaccttgagctcagtagggggacagtctgagttttccagaaagaacagaaatataaagtgatgattaaatctcgggatttttaatttttgagtgttgacaactaattagaacatttttaaagcaggtcaaagcacaggcaggctaactggccccacgcacaacttgcaaggtggggcgcaccaggctcactgcacagcccatacccacagacccctcagattggagtcggggcagaagcagaacgcaggactcgcaggaaacagaccaggttccaaggcccccagggtcccaaaggctggggtaactgaaggttcccacgctcag

SEQ ID NO: 221512 - DNA, 562 bp, Homo sapiens
ccggggtagcagtgctggcactccgtgggagatgggaggggctgccggagagccccaccccagaaggcagccctggcctggacccccgcccaggcacccctcgatgtcctcccttcctttgggggcagcggtaggaggctccgcctgccccttacgcacctggctcagcagaggggcacatgcctgtcccaccctcctcgtggctcccaggctccatctctgttccaagggtatttattcaagttcaggagaaggtggtgtctgacgacaaggcaggggaggaggtatctgggtttaaagtccctgaaggactcagtttgggcaaagcagatcattctttatcaagtattggagtgaaggaaactcaccagatgctgggaaagaccggctaaggaaagagcagaggtttcagaggaggaggtgcaaagggccaacaagcaaccgcttctttttttttttgagacagagtctcgctctgtcgccaggctggagtgtagtggtacgatcttggctcaccacaacctctgcctcctgcattcaagcaattctcctgcctcagcct

SEQ ID NO: 221513 - DNA, 526 bp, Homo sapiens
gaccctacccagactgatagacctacattggaattcttgggtttagagcagagaatcagtactttttcttttttctagggcatttgcctcatttttctgatgaagtagaaagaccctagcaagtctggggttttccagtagatcagaagagtgaagctttgatgtgatggaaattaccaagaaagaactcccatccccatcctgttcatgcatgtggttttcctgggctgagcttcatgtgtattgcatgccctccagtttgcatccaagtattctagcctttctgccgacatcctaaatttgcatgaaccccttctcagattccatgtccttctccttaatctggttctcttattcatgatacccaaaatctgctgtttcttcccagctccctgacctccctatctcatgttagatctgcagtttcaccccttacctctggatccttgttttattcccctagaaagtgtgagaacaacgttggtgcctaccctactgggattctgtttatttttccatgagacat

SEQ ID NO: 221514 - DNA, 751 bp, Homo sapiens
gaccctacccagactgatagacctacattggaattcttgggtttagagcagagaatcagtactttttcttttttctagggcatttgcctcatttttctgatgaagtagaaagaccctagcaagtctggggttttccagtagatcagaagagtgaagctttgatgtgatggaaattaccaagaaagaactcccatccccatcctgttcatgcatgtggttttcctgggctgagcttcatgtgtattgcatgccctccagtttgcatccaagtattctagcctttctgccgacatcctaaatttgcatgaaccccttctcagattccatgtccttctccttaatctggttctcttattcatgatacccaaaatctgctgtttcttcccagctccctgacctcccaaagtgctggtttacaggcatgagccaccacacccagctggaaaaatatcttatattttattattattattgagacagagtttcactccagcctgggtgacagagcgagactccatctcaaaaaaaaaaaggataattgcataggccaactaaacatcatagaaatatcactcctgaattctaaagttttcattgaaaaatacacaaccaagaacagtgaagaatgagtggggtgcggtggctcacatatgtaatcccagcaactctagaggctgaggcaggaggattgttgagtccaggagttcaagactagcctgtgcaacatagtgagacccccatctctccagaa

SEQ ID NO: 221515 - DNA, 1030 bp, Homo sapiens
agtccagacgcatctcctggcagcttaggaagctccatcttcacccaccccacatctgagggtcccgtgccttgtctccctccatcctcactgtacatgccaggcttcagcctgttctaactccgggcctaaattgtccctaagagagctgtaggcacacaaaggggctgggtgtctgcaggcaccactgtgagctaccgtcgccagatggtccccagggaggtgcagacagggtggttccggaggccggctggcagggctgggttcaagccccaacatccacaccagtgttgttcacagtggccccaggtgtcatctccgcagaggcctgtgatgtggccctgaccccgtaccccaacaacctccttccctgtgtcagagcccgtgtgagtaacccaatagcaggcctggggaccacagtgtggctggccccctcctctgcaggcctgggctccgggggcaggtggcccctgcatgtaacttatgttagaaatgcacaatgcttgttctctggtgccacaaagaaatagtgctcgaacattaattttctcagcaaggcagtttttactttctgcagaaagggtgcccctcgcagatggagcaatggcaagagcacacctgaacaagggaggggaaggggttcttattcctgacacaggtagccctactgctgtgttgttcccctgttggctaaggttggaccacacagtctaagccaattccaattggctattttaaagagggcagggtaagagtcagagtggtggggtgagtagtttgacgggaaggacggttaggaacaggtaactcaaggtgacttaggtcagagcaggtgaccgggatgagtcaggatggagcaggtgaccagggaacagatgtgaactactgattaggactggcgggaaaattgtttactgaaactagaagcaaggggcgaagagaaccaggaattttaaatggagaatcaaagaagagatctggccgggtgcagtgggtcacgcctgtaatcccagtactttgggaggccgag

SEQ ID NO: 221516 - DNA, 624 bp, Homo sapiens
gaaccagccaggttggtaaggacagaccaagggtaagagacagaaacctgttattttcattcacagatgtttgagtgcttgctgtgtgctggtacagacaagactttctggaagggaaacagagacagaagtcaaggtatagcatgagagacttggaaaagtcctagcagtagaaatggggtccaagaagtccttggttagtaagccttagcaattcagccttccactgggttcctctgttgcctccttgccatcatcgtttacatacatgtgaatatttagtgagtctgcagcaagcaggctactcagttcacactggaacatttgcattgatggggaagcgcagggtagcccaatcaaattccagacatgtatatttgaaattcttctttattttggattgaaaatcagctttctctcactttacccactgattctagtgctgctcccttgagcaacagataaacacagataaaatctttcatatgacagtttttcaaacatgtgaagccaggtatcatgtttaccctttgttgtttccatcataatatgcataccttgaattccaggtttttttcaggccatttagtctgttaaactagttcatgctaaacaaaacagaaa

SEQ ID NO: 221517 - DNA, 336 bp, Homo sapiens
tctttgtggagacagagtcttgcttggttggtcacccagtctggaatgcagtggtgcaatcttggctcactggagcctccacctcctgggctaaagtaatcctcccacctcagcctcctgagtagctgggacatctggggtctggcaccacacctggctaatttctgtaattttagtggagacagggtttcgccctgtttctctggctggtctcaaaatcctgggctcaagtgattcgcctctcttagcctcccaaagtgctaggattttagggatgagccactgcaccccacttcaattgtcgtattttaaaattatttttgaaaatgtgttcta

SEQ ID NO: 221518 - DNA, 460 bp, Homo sapiens
tagaactgtggacctacgggcacttggcgtctgatagaatcattggaggaatcatggactatttagtaaatggtgctgggaagcttgactcttcatgtgggatcatttaggaatgctcatttttaactaaaggtggcttaaaccagagcttgttaaatttgaatgtgcacgaggataacctgggtcttgttaaattgtagattctgattcagtacatctggggcagggtctgattctgcagttctaatgagatcccagttcttggcgatgttgctactctgtgaattgcactttgattaacaagctcttaaatcatcagaatattaagtgctcatttaacaaagagttggtctctgggatattctgggagctcagtgacagcagcagaaatccaggtgccttttatctttctgcttggtggcacaggttgactttttgttttaatatttgtgaccttatt

SEQ ID NO: 221519 - DNA, 583 bp, Homo sapiens
tggcttctgggtgatggaggagggaggtgagagaggacccgggttgtgaactcctttcctggggattctcctcggctacctgtgtctttgatcaggaatgagaagcctggtccaggctacagacctagggtggggagggaggacgtgtggacaaggacgatgaagattcaggtgagggatcacagcacttgagagtccaagctgccacctgagcctgctcctctcctaagccttccatctgctgtgtctgtgaaacccagcttttctccccaccccatttgcttataggcaccatgatctggggtgaaaacactcactaactcaacattttcttgtttaatttattttttttattttatttaaaaaaatttttttttgagatggaatctcgctgtgttgcccaggctggggtgcagtggcacaatctcggctcactgcaatctctgcctcctggattccagagattctcctgcctcagcctcctgagtagctgggactacaggcatgtgccaccacgcccagctaatttttttgtatttttagtagagacggggtttcaccgtgttcacaggatggtctccat

SEQ ID NO: 221520 - DNA, 224 bp, Homo sapiens
tctgagttttagatcatactaaggatgttggacttcatcctgtggtgttactggaaccataaagactctggaaacaaagactcatggcatggtcagatctgcacttaggagcagagtggaggaaggatttatggctgcaaaaacagtaggaaggtcagcttgaaaaatactgaaggaccctctcagttgaaagatggcaaggcactggcatggggggaaagaac

SEQ ID NO: 221521 - DNA, 814 bp, Homo sapiens
taaaatattctcccagttttcgtgcacagacagatttgggaattactgttataatggaaaatggagaataaccacccacatttaatatggttattggttttgttcttgagatttattgctaagattcatgatagcccaggcaaggtcagataatgtatttttattttacactgtatagttgattcttctcaatcccactagatcagactctttgggatactaggattggcctatttgatggtgagctcactacatccatttagatgttgtgtccatgcaatcattttagttctcctagtttctacctatcacgttgtcattttcccttctttatcatcctgggtagctgagaccccacataaatatataccagaaaaatgttgtggtcttttctaaactctctgaggcatctgttgtcaatgtgatgttgttttttgtttccagtccaaaatatatcaaagtaaaatttaactccacttttgctaagtattcatcttgccttgagtactaagattccaaaaatgactttcccctctgaaaaacacaggatttccttgcgaaaacttgctgggccactgccaatcttcccagaaactcctttttccttatcgttgaggggaattggggaagtgatcactgacggttgaaattcagtagttttggtctttaagctgagaccctgagtcttctgaggagtctactgctccccagtgggaaacacctgctgtcaaaattttcctgcttgcaaagagcacttttgaaattaatggcaggggatgaatatctggctagtgctgtgctcagctgagttatt

SEQ ID NO: 221522 - DNA, 818 bp, Homo sapiens
tccctgtggttcgctgcgctgacagtttttgggaattgctggttatggtggcaaccatggagtgagtagcctgccgctttttatgtggttatgggttaagtccttgcacgatccgtgctgggatgcgtggtcgcccaggcaacgttctgctcgtgtctgtgtattgtgtagcgactgtgtccttgattcttctcaatcccactagatcagactctttgggatactaggattggcctatttgatggtgagctcactacatccatttagatgttgtgtccatgcaatcattttagttctcctagtttctacctatcacgttgtcattttcccttctttatcatcctgggtagctgagaccccacataaatatataccagaaaaatgttgtggtcttttctaaactctctgaggcatctgttgtcaatgtgatgttgttttttgtttccagtccaaaatatatcaaagtaaaatttaactccacttttgctaagtattcatcttgccttgagtactaagattccaaaaatgactttcccctctgaaaaacacaggatttccttgcgaaaacttgctgggccactgccaatcttcccagaaactcctttttccttatcgttgaggggaattggggaagtgatcactgacggttgaaattcagtagttttggtctttaagctgagaccctgagtcttctgaggagtctactgctccccagtgggaaacacctgctgtcaaaattttcctgcttgcaaagagcacttttgaaattaatggcaggggatgaatatctggctagtgctgtgctcagctgagttatt

SEQ ID NO: 221523 - DNA, 1050 bp, Homo sapiens
gcctgcagaggggtccatacggcgttgttctggattcccgtcgtaacttaaagggaaattttcacaatgtccggagcccttgatgtcctgcaaatgaaggaggaggatgtccttaagttccttgcagcaggaacccacttaggtggcaccaatcttgacttccagatggaacagtacatctataaaaggaaaagtgatggcatctatatcataaatctcaagaggacctgggagaagcttctgctggcagctcgtgcaattgttgccattgaaaaccctgctgatgtcagtgttatatcctccaggaatactggccagagggctgtgctgaagtttgctgctgccactggagccactccaattgctggccgcttcactcctggaaccttcactaaccagatccaggcagccttccgggagccacggcttcttgtggttactgaccccagggctgaccaccagcctctcacggaggcatcttatgttaacctacctaccattgcgctgtgtaacacagattctcctctgcgctatgtggacattgccatcccatgcaacaacaagggagctcactcagtgggtttgatgtggtggatgctggctcgggaagttctgcgcatgcgtggcaccatttcccgtgaacacccatgggaggtcatgcctgatctgtacttctacagagatcctgaagagattgaaaaagaagagcaggttgctgctgagaaggcagtgaccaaggaggaatttccagggtgaatggactgctcccgctcctgagttcactgctactcagcctgaggttgcagactggtctgaaggtgtacaggtgccctctgtgcctattcagcaattccctactgaagactggagcgctcagcctgccacggaagactggtctgcagctcccactgctcaggccactgaatgggtaggagcaaccactgactggtcttaagctgttcttgcataggctcttaagcagcatggaaaaatggttgatggaaaataaaacatcagtttctaaaaaaaaaaaagaaaaaaagaaagtgg

SEQ ID NO: 221524 - DNA, 379 bp, Homo sapiens
tgagacagagtcttgctctgttgcctaggctggagtgcagtggtgcaatctcaactcactgcaacctctgcctcctgggttcaagccattctcctgcttcagcctcctgagtagctgggactacaggtgcccgccaccgcgcccggctaatttttcattgttttagtagagacagggtttcacagcgttagccaggatggtctcgatctcctgaccttgagatccgcccgccttggcctcccaaagtgctgggattacaggcatgagccaccgcgtctggccaaaattagtgatttttaaggccctttcctggtctaagctcttcaaggtgataacccagttaatatcacctccattttgctcaaggggagccaggctg

SEQ ID NO: 221525 - DNA, 340 bp, Homo sapiens
agtgagccgagattgtaccactgcactccagcctgggtgacaagagtgaaactctgtctccaaataataattaaagaaagataataattccaatggactgctgaaggaataacacaaggagcttacctttacctaccttgaaacctctctcaaaggagattgttgaaaacatttaaagacaaatgaactatccacaagtgtctggggaaaagcatatgagtagtggtaaatgatggacacgctgacatgtcttggaagaaaggctgtggagtgagatatttgggacatatgactttgaaaatttctcacgtattcctgggaatgtagaggtgaagctctg

SEQ ID NO: 221526 - DNA, 487 bp, Homo sapiens
ctgcacagagccatacagctaactagttacagataagatttaaacacattccgtttgacagtaaaatttgcactcttaaccattaggctgtactacttagaaacatttgcctgttaatatgtatctcatgcaataacaaaaaataaatcccgagtatctccaagtaaatttccacttggcttgaagaatctagcttccctttccaatgtacaagcagtgggtctggtttgcagagatgcaacctgcatggtgttcttgaagctggtcattgtgaggcagatgagagcctctgctttctttccaaagagtgggtgtaacagcaacagaaaaaaatggcatcacaacagagctgcttcttacattcttggattagattgactttgtaatatgttatgaccaagagagggaggctgaaagttatgctgtttttgagataatgcagtaaactggaatgcttaagtgcttatcagggaaattacttaccaaa

SEQ ID NO: 221527 - DNA, 487 bp, Homo sapiens
agtgagtgggagcggccagtgagggtgctcaggtggggtgggcagcaccatctctgagccctgaagctaatgctcctgctcctgggacatggaccccagactcgcccccttcgccctcttctcttctaatctgggctttctcggtccccaggagcacttggtagactcaaggttggaaattgtgccctaaaccgtgccagaccctggctttctccaaaggtggaaaatgggagccctactatttgccggagtgtggttgctatgccttgggtactggcgccagactgtctgagttccaatcttaccatccccattcaggcaagttacctaacctttctgggcctctatttcctcatctataaaatgggatgaaagttataatacctacctgccaggattgttgagatgattaatgcaataatttacatgaagcattttgcacagtggctggcacatagtaagaactcaataaatgttcactactata

SEQ ID NO: 221528 - DNA, 461 bp, Homo sapiens
agaaccagggggctcaaggaccagaaaaaggaatgtttgaccttggttttgccacatgtactagtcccacccagaagccattcctcccactccctcaccttcactgcagtcaaagaaagtatcattaaagagagtcaaacagaaagaaagaaaagaataaggcaaccatgtgagtaagtgattgggacagaacaagaggccagcaaaaaggaaagaggcgggtctggggctggacagtggctgccaaggccaagtggagaaacgaggccatttctcgactcctcagccctgcctccagtctcctggggtgggtggcaaagctagctactctggagcctgcgcctccacgggctccagtccctttaccaccggagacctgggtcagcccagagacgccaagaggcctgaggagcagccaaagagaacctgaaagccttcgagaagagggacagaaaaagaga

SEQ ID NO: 221529 - DNA, 463 bp, Homo sapiens
tcagcccaaaacataacatggaaacatatttccaaagaaaaggctttgagacagtggaaccatttgggtgccatttaaatttaaagaaggaaatagaagaaaaagaagatcaaagatggagactccaagtcttggcaattgattgaacgtgaagtcctgtgaagaccaaaggctccccactctggtgattagaatgaggggctattggctggagaaggaatctactaactagtgaggtaccaacagaatggagacccaaactaggacatttaaaacctgggatttttcttcacgggattgcatgttttctgaatcagtcattctgtttgacaccaaaagtagcttttattgctttccccaccatgggcccttgatttaaaaggcttcatctaccaaacactctcttttgctaaataagaatatttccccatttttattcattaaagtccttttgatcagtgtc

SEQ ID NO: 221530 - DNA, 398 bp, Homo sapiens
tgagccagggtcttgctctgtcaccaggctggagtgcagtggcgcaatctcagctcactgcaacctctgacactccctggttcaagcgattctcctgtctcagtctccggagaagctgggattacaggcatgtaccatcatgcccagctaattttcatgtttagtagagacggggtttcaccattggccatgatggtcctgatcttttgaccttgtgatctgcctgctccagcctcccaaaatgctgggattagaggtgtgagccaccacacttgtccttatttttatcttttaaaacaatgctatgagaacgtcttccttgattctgcatgtctttccccagataaacaggtacctccttccttgaggctgccttagtacttcactgatttttctac

SEQ ID NO: 221531 - DNA, 507 bp, Homo sapiens
tgccagtgattaaatggttaagattcttttgcatttgtatctgctcatccatgactcaagaatattatagaatatttgagcagcttttccctctattgttatattatatgattcattttagtattaaaagtagttcacaggaatgcacttcgtatgattacatagaaaattacaataaaaaatcttgaaagttaaaaaaataggtggtattatttaggtgaatcattagttaaataagaacttttttattcttaggttattttgtctttcatctttcaactttctgatacttaaatttgccttgttaacattcacagttgctgttcatattcttagatactttatgttttctgaaatatatctttagaagacaaatgacataatttcactttcatagaggaatttaaaaaattaatttgatctaaaagaaactgaagtttgtcaatctatacaagtaagaatgtgactaaaataaaataaatatattttagtaaaatttctggtaaa

SEQ ID NO: 221532 - DNA, 362 bp, Homo sapiens
atcaagtctctagtttggttaagagtattataccaatgttaatttcttagttttgacaaatgtactgtggttatgtacccagtgggctgggtgaagagtatacaagaattctaggtatactctgtattatttttgcagcttttctgtaaatctaaaattattccagaataagaagctacacatcaactggcatctaccatattaacatagtaaaaatgaaaacctgtaatatcatctcaatagatttagaaaaaaagcatttgaaaatattcaatatcaattcatgatgaaaactaacagcaaactagaagtagaagggaatctactcaatctgataaagggtgtatgtgtattttttttaa

SEQ ID NO: 221533 - DNA, 428 bp, Homo sapiens
tcgccctgggagcagctactgtgatagagccagattcccaagttctcattcatggtattttgaaatgacataaagggactgccaccaaacaaggcaggatagcagcagccaagatgggaaaaccttgccttccccccgggagaacagagggagcctccccacacaccgtgtaatttccagaaaacactggtgcttctccatggctctgctggccgaccacatcctcctaaccctttaagaatccagcccccctttcttctgactttaagcaccaggtagtgcttaaaagatagttgccaagccaggcgtggtggctcatgcctgtaatcccagcactttgggaggccaagtctggtggatcacttgagcccaagagttggagactagcctggccaacacggtgaaaccccatctctactaaaaaaaaa

SEQ ID NO: 221534 - DNA, 259 bp, Homo sapiens
tggtagaatatactataatatggatcatctctacttctgtatttatttatttattactagacctcaaccacagtcttctttttccccttccacctctctttgcctgtaggatgtactgtatgtagtcatgcactttgtattaatatattagaaatctacagatctgttttgtactttttatactgttggatacttataatcaaaacttttactagggtattgaataaatctagtcttattagaaaataaaaaaaaagaa

SEQ ID NO: 221535 - DNA, 606 bp, Homo sapiens
gtggtgtagaaatgcaagtattttggcttaacagcatgaagtctgggttgcacattgtatcagaggtgctgtaatctttccagtatctctgatatacggctttctggttgaatgtcaccctgggccctcttgactggataaacaaccatgagggctcttctctgtggagctgccgagagcttggtggtagaaagcgatgtttctaaacaactgcagcggctctttcctgtctgaactgcatcgtgtgtctgactgccttgctgtccatacatacagactccttcccaggcccggctctgtgcagaacttccatgttttaccacatttttctctcctgaactccctttgtcagccccagggtgttgaggctgggtcctctctagcaatctctaccttcagaagagacttttctaaatattttgcttttccagttcttgttgcttttgtcattgtgaagagtcacccaggatgctggcgcttggtaccctaagatcagaagtggtgtgtgtgtgagctgtgagacatgcacaccctttcagagtgatactgtgtggtggaaggactgttagaactcaaagaatagttaataaatccagtgtattattc

SEQ ID NO: 221536 - DNA, 532 bp, Homo sapiens
agggaaagtagtctttctcagaaaaacaaaaatggagataattcattaccactagactagccccacaagaaatatttaagggagccctacaccaggaaacaaaaggacaacatctaccatcatgaaaacttaacaaaagtagtgtagagcagatacacaaaacaggaataggagtgttgttactctaaaaaaaaaaaaaaaaaaaaaacccaccagatcataaaagaaagtaaaagaagaataaaggaagaaaggaataaaatagtcaaagtactgagagaaaaaaaaaaaaagaaactgtcaaccaagaatcctgtgtccagcaaaggtatcctggaaaaatgaagggaaagtagtctttctcagaaaaacaaaaatggagataattcattaccactagactagccccccaagaaatatttaagggagccctacaccaggaaacaaaaggacaacatctaccatcatgaaaacttaacaaaagtagtgtagagcagatacacaaaacaggaataggagtgttgttactcta

SEQ ID NO: 221537 - DNA, 408 bp, Homo sapiens
aggtatttgtagtgggtatgtgactgacaaaggattcgtatccagaatgtattctacttcaaaatcctccaaagaatccacaagagaaaaaatctggggcattcagcgcagtggatcaggtgagaggccagttcctagtttccagatgggcaagaactaaaaagatgatgaatacaaagtttaggcgaaaccacagactgccaaggagaggaaaggaagagaagaggcttccgtagtacatgtgaaatgtgtttctaaacaagaaatagacaacagatctgaagctttttaaaaatgaaacaaatctttttgacttgctaaagctgggtaataagttcaaaggcattcattagactattatctacatgtttctgtatatttaacattttttataattaaaaaaagcaa

SEQ ID NO: 221538 - DNA, 406 bp, Homo sapiens
tctgctttctttatggttttcaggctatgaagatattctgttggtttttgagacagctctgcttttatgtttttctaagaagtcatctatttcatttgtggttaaaagtaatataggtggtctgccaggcgcagtggctcaggcctgtaatcccagcactttgggaggctgaggcgagtggatcgcgaggtcaagagatcgagaccagcctgaccaacatggtgaaaccccgtctctactaaaaatacaaaaattagccaggcgtggtggcgggcgcctgtagtcccagctactcaagaggctgaggcaggagaatcgcttgaacccgggaggtggaggttgcagtgagccgagatcccaccactgcactccagcctgggcaacagagtaagactctgtttcaaaa

SEQ ID NO: 221539 - DNA, 380 bp, Homo sapiens
tgtacataaacactcaaatcaaaaaggagattggcagaatgaattttaaaaaaacatggtccaactatatgttgtctataagagactctacatagaaaaacacaaataggttgaaagtgaaagaatgggcaacaatgccggagaggttatattcatatagacaaaagtttaagtcaaaaattgttatgagagacaaataagaacattgtataatgactaaaaggacaattcaccaagaagatataacaactgtaatcatacatacacctaaaaacataggctcaaaatgtaagaagcacattctctaatcacaatggaatgaagcaaaaaagcaatagcagaagagaaacaagaaaattcacgaatacatgaaaattaac

SEQ ID NO: 221540 - DNA, 519 bp, Homo sapiens
acaggagagatggatcaaattccagttaaaggcaaagaaatgtgatctttgcagtccctgtgctgataaaagtacaatttcattacatttctgtagtatcccaaggactcgcatgatgaccttcactggttccagaggtcaaggaactttattgatggtgctgatagtacagaatctatcgtttcatagctaggaacactggcgcatgcctgtggtcccagctacttgggaggctgaggcggggggatcgctggagcccaggagttggaggctgcgatggagcctgtgaatagtcactgcaactccacctggggcacacagttgagaccctttctcctttaaaagtcaatcactgtatctctcttatcatttcatgattttcagatgcttctcttataactaatgttgtcatccacaaaattaaataaaacaaaggagatgaccaatatacttaattttttttgggaagtgtccatatgttgtagtaggtctcatcattcacctttgccgggtaccgag

SEQ ID NO: 221541 - DNA, 111 bp, Homo sapiens
ggtcttccttgcagtccagactttttctgtaaatggccagtagtaaatatgttagacttcactagccatatagtctctgttgcaacaacttaacccttctgtcgtcttctc

SEQ ID NO: 221542 - DNA, 261 bp, Homo sapiens
tcaagtgttggagttgtctgctctccctccacagccatgaaattggttagtcttgtgtctagcaatcttaattcttactttgtagaatctgtcggagttttttttaatatggacagttaattgttcacaaataataccagtttgttttttttttttttttttttgagaaggaatcttgctgactcccagggtgcagtgcagtggcacgatcttggctcactgcaagctccgcctcccgggttcatgccattctcctgcctc

SEQ ID NO: 221543 - DNA, 543 bp, Homo sapiens
ccaaatatgttaactgttctactttatttatgtaattatattttcattagtattttagtagatggggctgtatagaaaaacaaatgtatcatatgtagccaaatgaatctttttcttaaatgatattattatagtaggctacagtaatttcaacaattttacaatagagttttgatcctcttctttgcgatttgtttcagagacacctcatgaatcacacaagaaaattagtctcagtacttatagccctatttcatttttcaattcagttttatcacaccatggcttcgaagtgactttgattgtgacccctaagcaattatctgattaggggataaaaattcataattccaagatgtttctgaaaatgttctgaacaatgacaacatatttggaatgagggcgtaatttcactaagtgatgcttcgaagaacaatattcatttggatatgcaaacacacattttcaaaagttatattactgtgttaccatacctgttataaaataataaaaatatataagtatttattaagtcaaacttca

SEQ ID NO: 221544 - DNA, 404 bp, Homo sapiens
tctttttttttttgagacggggtctcgttttgttgcctaggctggagtgcagtggcatgatctctgctcactgcagcctccccctcccaggttcaagcgattctcctgcctcagcctcccaagtagcttgaattacaagtgcccaccaccatacccagataaatttttttgtatttttagtagagacagggtttcaccatgatggccaggctggtctcaaaatcctgacctcaggtgatccgcccacctcagcctcccaaactgctgagattacaggagtgagccacacacccagcctctatcttctctgtagaaggcaagatttagataggaataatcttgctttattgtaatttcccttatacattgtttcgtcgacgcggccgcgaatttagtagtaatag

SEQ ID NO: 221545 - DNA, 277 bp, Homo sapiens
agcagacagacttgaagggattgaagggtgacacattttggtgtgggtgtgggctggtggtggtgatggggaagcacattctcacaattcttggacacttgattggcctactgcactccagcctgtgcaacaagagcgaaactccgtgtcaaaaaaaaaaagaagaaaatgatcatattggtaagttgcaccgaggattagtggagggtattgggagccactcatatggaacttgatttttaaattggggcttggcatggtagctcaagcctgtaat

SEQ ID NO: 221546 - DNA, 565 bp, Homo sapiens
aggctgatctagaggatcccgataactggtaggagtgtttcctcaccaggcacctctgctgtacattatggtctttcctaatatgtgatagcaagattacacttgtccagagatctcttctctggccacctcaaatttcccccaaaagactagagaactgcagagcatatgaaaaagttgagagtccagaatgaaacagatgtgggtgactcgaagaggggactttggtgtcccaggcacttttttctttatgggacagcgccccttgcttggaggctttggactcagttctaacaagcacggttatccagtttcccagaccacggcagatgcagaggaaacccaaggaggtgaaagaggtgccactcgctgctggaggctatgatggtggctggctagggtgcaggctgaaaatgacccagtgacagtttatggccattaggggtggggcaagcagcttggacacctccatacctgagctcagcaccgagggctcctaatcatgacttgcagtcatcaagatggattggactgtattagattacattcaatactcggttgagca

SEQ ID NO: 221547 - DNA, 655 bp, Homo sapiens
atttcaaaaatggtagtggcaaatgcaaaaataattagagcaatttcctagtcttggtatgacctaggaacaacaggttatttctatcaaaggaccatagttaagggtcagctctctctatcaaggctagtttatccttctgggttgttctgcctgaggaccctaatagggtagaactgtcagggtgaagagggagagccgcggtcttcagagactacagaccacagctggagctactagtcatacaacatactacatacacgagaccatcatagagcttatttttgtctagctaaactgtagcctctctagtagcagtcttttttgccctctgtggtttctaatgttcagagcattaagagtacacacacacttcatgcctgtaaactgaatcttttggaaggttgaaaccctgtaaaatctaagtggttgtttttaataattaaataataattattattataactagaatcagaagctgcacatgtatgtggcactcagcaaacactactgtcccaagaaagcttaaagaatttcctttttaagttcaggaaaaacacctttgcaaaaataaaaccaaggccgggcaggggctcacgcctgtaatcccagcactttgggaggccgaggtggacagatcacttgaacccaggag

SEQ ID NO: 221548 - DNA, 806 bp, Homo sapiens
aggttcatcatttctcaagccatgttatctacgcattattagtctgatggccagtgtgccatttgacttgtagttttatttatagcattttggggcacaggaaattgtccttattcaatgtttagaaaagtcttcagctcttgaactccaggattctcaccagtggccaacagtttctcagaccttaggttttgaattgagttacgtcatcagctttcctggttttaaggctttcaaacatggattggcttctctgattctccagtttgctgacaacctatcctgggactttcctgccatcataattccaggacctgtgaagaattctaccttcagacaactgctcaactggattgaatctgggagaagaagatgggggcattatttcttgacagccacctagattccaacagcatcatgcaacaaatggtactaagaccttcagaacccttgaagagctaatcagcacttatgcatgaaggcaatgttctaaaccttagtggtcaggaaatgtttgagatttgaaacagttgtttgaagttgaggcagaaagtaataaagaatactaaaattatcaaagaaacaccaaacacaaatcaatagcatccaaatgagctttacctttatagctggtactctttctgtcctcttttctgcttcctaagagatgttttttggtgatttggtcctcctaagtgcatgcacattggacaggatagtatgagtatgattagagtgtaagcatgactagaagcacaagttaatttatgagtgattgaataaaagtaattttgtgaaaaataaga

SEQ ID NO: 221549 - DNA, 724 bp, Homo sapiens
cagcctccacggtctcccttatgactgtggctctctgtgactcacacgcccacaccgaagagggctgacctgtgtaagcattggaacgttgcagcagtgatggagcgtgacttctgaggctgggtcataaaatacgttgcacctttttgccttgctctttcttgggccactcactgtgggatgccggctgccatgtcatgaggttatcaagcagtcctgggaagattccatgtggagaggaactgaggctccctgtcaactgccagtacaaacttgccagccttgcaaggcagccacacgggcagcagatcctgcagccccctcaagtgactgtagccccagccaccaactggatggcaacctcacaagagatcctgagctaggaccacctagcccagctgcttctgaatctctgacacacagaaactgtgagataataaatgtgttttgcagccaggtgcggtggctcacatctcagcactttgggaggccgaggcagccagatcacaaggtcaagagatcgagaccatcctggccaacatggtgaaaccccgtctctactaaacatacaaaaattagctgggcgtggtggcgcgtgcctgtagtcccagctactcagaaggctgaggcaggagaatcgcttgaacccgggaggcggaggttgtagtgagctgagatcacaccactgcacgccagcctggtgacacagcgagactctgtctca

SEQ ID NO: 221550 - DNA, 269 bp, Homo sapiens
aagctggatacagtaaataatgagcattttgcgtacagtccagttgttctcaagcagagacagttttaacccccagagatatctggcaatgtttggagatatttttgattgtaacaactggggaagaggtgctactgacatctagtgggtagatgagagggatactgctaaacatcctacactgcaggacagcccctcacagcaaagaattatctggaccaaatgtcaatagtgctgtggtgagaaaccctgatctgatcttgtatgaa

SEQ ID NO: 221551 - DNA, 623 bp, Homo sapiens
ggaaaggcaaaatggtaaagccggtctggaaaacaatatgccagtctcaaaaagttacacatccaatatgacccagcaatcccacttataagtacttatcctagagaaatgaaaaattatgtgcacacagaaacctgtacatgagtgtttgtaagtattatttataattaaaaaaaaaactagagacaagcaaatgttcttcagtgtgtaaatggatacactgtggtacattcccaagatggaattctactcaacgataacaataatgagctactgaaacatgcagctacatagatgaacctcaaatgcattacgctaaaggaaagaacccagtcccaaaaagttacatactgtatgattccatttatatgacatgctggaaaaggtgaaaatataacaacagaaaacagatcaaatgttgctgagtgtctggggtggggtggggtctgaatacagaggggttgcacgaggcaattctttgaggtgttggaattgttttgtatcctgcttgtggtcatagataaaaaatctatgcatgtgtaaaaaatagaagtatacatacaaaaaagtgaattgtactgtctgtaatttttttaaataaataaaaatccctagctctgctt

SEQ ID NO: 221552 - DNA, 596 bp, Homo sapiens
tgaaaagctagacatccagctacgtacatccctggagatacccagacgatggaatggaatgttcactgtggctctaagtcagagcatctcatttaagctttatggacagtctgcgcaggatgtgtctgtgtggggacttctcctgtgcatcatgggaggtttagcagcatccttggcctcactcgccagatgccaatagcatccccctctcctagttgtgacaattgcaaacatatccagacattgccaaatgtcctctggggggcaaagttgccacagctgggagccactgctctgcaggtttggacgctgtgcctgcaattccatgcagcatcacgggctattgatcatgtgtcagacggagcttaaattggtcgatcgcatcctcaagtagccactccagagcgtgattatctgacacctgtaatttaccatcctggttacatggggggcaaacgtggaattatgcacatcagcgggcccagggcctgttttccatggacttagtgttcctgctgagcatggcctcggtctccccgagttgttaaagacattgacgcctcagaactgactctgcctccacttaatcagctcac

SEQ ID NO: 221553 - DNA, 269 bp, Homo sapiens
taaggcaagagcagaggtagcatgcctgagtgtgcatttcaccttgttcctcactccttactggtgggctaatcctatgcccataccctcctttttctttgtaattattaacaatgccctctttgactcttagaagagtctaggtgtgcataatagactatatggttgctgtatccatgggctctgcagctgctagtgacaaggaatcctgctggaattgagaacaaatctaccttaagaatatatattcaggtttttatcacctgaga

SEQ ID NO: 221554 - DNA, 450 bp, Homo sapiens
cagggactatagtcaactgatttcataatcaattaaaccactaatatcatgtatatattgcattatgggattttttttgtgaaatgctgtatcagaagagaatctggacctattctcaaggtgaaatagcactttattctgctattctcaaaccagtaagtcattaattatctttcataaatgtaagcagtaagtaaactcttaggaacagaatggcagcctttttctataaatcttatattttaaaatattatttctgttaagagatacttactgtcattgaacctgtgaccattgaagatatataagggttcattccattattttcctgtgaaattttgaacttacttggaggaattattggctctggtcataatcctaaattataactctgtagctcttatgtgttcaaaattgttgggagacttcatttcattaatttagcaagat

SEQ ID NO: 221555 - DNA, 369 bp, Homo sapiens
gaaatatgaaagtctgtgttttcttccaggactcgactctctttggcctactggatgtacaggaagtggtaaaagctgtatggtgtctccttaggaattgaaaggccttgggcaaatcaatcaggtcctggctttccacatcagcaagtcaagataatcatgttggctaaacttatttgaataccatctggattcacttactggcaagtgtaaagtgttttcagaataccaaatattatatagggcatccaagcagcttaaatttcagtgccctccattccttcccttcctgtacttcagtctactactgaatgcaatgagatataataaaaccaagatctcagggctcctagcccttttcctgaaact

SEQ ID NO: 221556 - DNA, 866 bp, Homo sapiens
gaacacttacattagtatatagttgggcaaaattatctaacacaaaagcttacttcacaataaagtgttgaatatctcatataatttcttgaatactgtagtggaaatgaaaaacaatggttgtatgggtaccatcgtaaagtcagaaaatcaagttgacccatcctaagtcagggactgtctgtattcgaaatgtcaaataggaatgagattttgtgaatatagtttaaaatacattgccagtttgttctgatggggaatggagaaaggaaagcaggaagataaaacacctgatagaaaaatgtcacccacagtccctttactttgaaggtgataaacaatgttaacattttgtttatcctttgagcctttattccctactaatgtttaaacaaaattaggataaccatgtacacgctgttttacaacctgctccccccttaatgttaaataaattttcccatttgattaacatcttcttacaaaatggaaaactgtgttcattaagaccttagagaggatgatgaactgtttcataccatagagtatgttatcaaagagagttaagtgcatgttatcacatcacttgccatttggactgataggaaaaagattaaaaaggcagtaaaacaatgtcactggttaatgaaatagatcaagaaaagatgaactgagagctatgcaagcagttctcattcttaatatcagctgagattggacaaactggcaactcttgcagatacttttatcatgtgtatgttagtgggactgttgatgtttagctgatttactcatactattgttgcttctcattgatggaagaatttttttttttagtgcattatcccggtcaatgtttgtttaaa

SEQ ID NO: 221557 - DNA, 361 bp, Homo sapiens
cttttcttccaggaacagcacgggctatccgtcaatctactggcaagccgctcatcaagttcactcgacaaagggttagggcagcaagcccccacaataatgtggaaacagaaatattacaaagtaaaggcttataaaataataaaaattctacttacttcagatacctccctgtgcctttggcaaaataccttaagcattccacataaggcgggcattgtctttataagatggcacctcataaaatggtattaaatatcaccaacggggcttcatatttcatccagcagggtttaggccaggcatgttctatatcacacattattagaatgacatctgctttgcaagttgtgtacccagg

SEQ ID NO: 221558 - DNA, 298 bp, Homo sapiens
aagtaactcctgttttatctttttcttggtttatgagtgtttttaaagttttacgtttcttgaagatcacagctgtagccccaattccatggttctggctacttacatttatcatacttattaatatcatgaatgtaattggaatacccctttgattttactggtgacgtatacccactagtgtactgagacggaaaaaaaagtctttagaactcagataaatatacagttcatatttactatttatgtatgtgtgatctcattattaaattactctatcatgtttgtggaattagca

SEQ ID NO: 221559 - DNA, 446 bp, Homo sapiens
caacgtcccctaccagagtagtacacctgctgcaactgatgagcctatactgactcctctctgtaattaatttattttttgttttgtaatttcaactatattttagattcagggagtacaggtgtgagtttgttacatgtagaattcattgttggtgttggacattctatcagtttggacaaatttataatgacacggatccaccattatagtatcatactgactatttgcactcccctaaaatcctctgtcctccacctattcatccctccccaacacactgccacagccactggcagccacacagtctgccattctttttgccattactgcagggtcacctgagtaatgtgccatctctttgagctaaagttttatttgttgaaagaactttggcatttacttagtattagaccttcagatagaatgttgatggatttttattg

SEQ ID NO: 221560 - DNA, 372 bp, Homo sapiens
gttgactggggtgattgatccagactatcaagatgaaatcagtctaccactccacaacggaggtaagaaagagtatgcatggaatacaagagatgtgggaggatcacttgagcccaggtgtttaagtccagtctgggaaacatagtgagaccctgtcactaaactaaaaacaaaaataagtattgttcagaatttgtggaggggtgaaattaaagacttttaaaacttaaaaaaaaaaaaaagatccattagggcatctcttagtattgctgtgctctgtgattaaggtcaatgggaaactacagcagcccaatctaggcaggactacacatggccagacgcttcaggaatgaaggtttgggtcactccacc

SEQ ID NO: 221561 - DNA, 536 bp, Homo sapiens
ccagataacagagtgaaaaccagtaaagtctcaaaaagttgtgatcgtgggccaaatgtaatggaaggagttcactagagacccatgaagagtctcgtagtgtaggtccgaaaacccaactgtgttggatggaatggaagaggcgtggaataacagcaggagacaggaaagaaggcggctgtaggtgagtaagtcaatgacgtgatctgactatttaaacggagctatgtggggagaggatttcttgtggatggtttagcagcttccccgtggtgctgtccttgtgatagcgagtgagtcctcgcgagatctggttgtttaaaggcgtgtggcaccttccgctctttggctttcttgttcctgctctggcattcttgttcctgctctggccatgtgatgagcctgttctggatttgcctccactatgattggaagcttcctgagggctccccagaagcagatgctgccatgcttcctgtacagcctgcagaaccatgagtcaattaaaccttttcttataaattaaaaaaaaaaaa

SEQ ID NO: 221562 - DNA, 420 bp, Homo sapiens
cagttatggcttggaataaggaggaaaggcatgaacattgttcccaggcatcatttaccctactgatgctgatacatggatatgggccagtgagcccaggaacaacagaatccctgaccagtgcttatttccccaaagttcctgattgctataggtgttccggggagtcaaagtaacctcaactgttttcttaattcacctggatttataagggttgatttatataagttgcttagacctgaacagactcaaagcagagtctgtaggaaatactctgcatatcaacatcccgtacccaaacctaagtcatcttttcactggggtgtgcggaagggctgattctcatgtactcttgaagccctaggcaatagaacctgaaatcctgatgcacatataccctaggataatttctctctcaaa

SEQ ID NO: 221563 - DNA, 385 bp, Homo sapiens
agggttttccgaatatggagcctttaagttgtttttctgataagtagaattgtaatattcaaatatgtttatcggaatcccacatttctaatagcctagtagctgtattgttaaacaccagcactggaccttggttctgggtgaaatactcacatgcataactcgtgctttctttaagacaccctttgatcccattatgcttttgccagagttaatattcagagtttgtaaggtcagtagttaggttaattgagttaaggaacgatatcatgacagcctgtaaaaaaggtgtaaatgtgatttaattttagctgtacctctaatgtatgtatatagagatgaaagcactattaaatgtatttttaaagactgatagaattgtaca

SEQ ID NO: 221564 - DNA, 325 bp, Homo sapiens
gaaagaaaagaagctgaaataaatgtttccctgcaaaaccgagggacagccgaggaagccagatgacgtgagcttgcgtggctcgtggacttggcatgcaatgttacagttttactgtggaatgtcctgcacttgggcaagagtcttctgatggagtccacatttttaagttggatatatttatattctggacccaaatggaatgccgttgagacagcctatgattttagagcatttaaatttagtgaaacattggaaagaatcacaaatagagacaactttttggaagagttttgcatgaagatttgtccagtttttttgttta

SEQ ID NO: 221565 - DNA, 335 bp, Homo sapiens
ctgattggatggtgcccacccacattgagggtgggtctgcctcacccagtgcattgactcaaatgttcatctccttggcaacaccctcacagacacacccaggaacaatactttggatccttcaatccaatcaggttgactgacactaagtattaaccatcacaagaccccagagggctcccttatcccttccaccctgttaggcaacagcgagaagatggctgtctgtgaatcagagagcaaaccctcaccacacactgaatctgctggtgctttgatctaggacttttcaggttccagaactgtgataaataaatttgttatttgtaagccac

SEQ ID NO: 221566 - DNA, 534 bp, Homo sapiens
atggtttagttttgcttttactttttcattaaaataggcaatgtgagatcgcagttaatttttttacactttcatttatttgtcataaatcagacaaatgtagaagttcaactgaaaattctctaagtcaaagaagatggggagaaggatctaacatttacaagatgccaattatttatatattgtattcatcctttcaagaattttataaaataaatattattgcagttttatagatgagtaaactacactcagtgggcttaaatatcaccctcaggttcacaaagctagtacattcagagataggagtcaaagtccatactctcaccattctaaccatgctgccgccactcaatgtagacttagccaactttaacaaatagccagttgatccttatccctatgttgtactttaccttttggggggctttacctcttatgtgtacttgaactgtaatttgtggaagatataattttaatttataccagccttattacccgtgtagccaacagcagcttcctttctgaaaaaaa

SEQ ID NO: 221567 - DNA, 502 bp, Homo sapiens
agctgtgggcagggctacctgggaagagggccctaaagggtccatccagagcccccacggggccccggtgggggtctcatgcagcatctgacccgccctctcctctcctggggcatcccctcggcagcctcagcctggcctctatctgcactggtgttgctaggtgactctgagggggttcccagagtgtctcatccttcgtgtgggcaggtctcaggagtggccagcagcaaaccccgtaccgcagtcttcgccagatgcccttggcgtactgtaggaggtttgctttctctgggagccctttagagtccggagggacttggccttggcctgcccttaaggctgagtttagagctttccactcatactcttccttcctctcccacatttcttgatctccaccccacccccatgccagccacccccatgccagccacctccctggaaaccagggatacagaaataaacaagacctggccctggtctgccaggggctcgcaaa

SEQ ID NO: 221568 - DNA, 596 bp, Homo sapiens
ccaatttgtcatttcggggaaatgctcagataagaactaaaaaccatactcagggattagcctcacccagatattaaagttattctaaataaaaaaatttagtcagtactacccaaaacagtttctatattcaacgtaatccctatcaaaataccaatgacattcttcacataaacagaaaaaatttatatggaaccaaaaaagaccccaaatttccaaagcaatcctgaggaaaaagaaaaaagctggaggcatcacactacctgacttaaaaatacattacaaagctgtagtaaccaaatcagcttgatactagcataaaaacacatagaccaatcccagaatagagaatccagatataaatacagatatttacaggcaacttacttttgacaaaggcaccaagaacataaaatgaggaaaggacagtctcttcaataaataatgctgtgaaaaataaactcaaaatggattaaatacttaaatctgagacatgaaactactagaagaaaacattgaagaaacactccaggatgttggtctgtgcaaaatactttctgtttaagatttcaaaatataggcaaccaaaggaagaa

SEQ ID NO: 221569 - DNA, 311 bp, Homo sapiens
acatggataaatctaaaaaacaattttgtggagtgaaaaaatctatatttggccagatctgtaatcccagctctttgttagggcaaggcgggtggatcatctgaggtcaggagtttgagaacagcctggccatcatggtgaaaccctgtctctactaaaaatacaaaaattagctgggcatggtggtgcgttcctgtaatcccagctactcaggagtctgaggcaggagaaccacttgaacccaggaggcggaggttgcagtgagcagagactgtgccattgcactctagcctgggcaacagagcgagact

SEQ ID NO: 221570 - DNA, 102 bp, Homo sapiens
attataaaaacctggggcagggacgaagttctttacatctccgtctccctgtagcatctggcaggtgcccctacctcacaccaggtgcttgatggttgttgg

SEQ ID NO: 221571 - DNA, 449 bp, Homo sapiens
atgactatgtgtaatcatcactagttatttcattaaatttgatagttatgcagctggtcatgaagttattttcttcttctaagttcttttttttccctgaattttactagaagaaattgcggtggcatcatgctgtcttttctctttcttcactacccatgaatctaaaaaccaagccacccctcaatagaaatgcagaatgcccataatcattgacttattcccttttaaagtaaataatatgtatgtactttgccttcagagcctagaaataatgatggattaagatttatgttgtattactttttgctttgacactatattactactgaggcctgtaattaaaatatgatcgatgagtacataaaacactgccttctcataaaatgctagtaaatatggttgttttggttcttgtatgaggtgggaataaatacatttgattgatt

SEQ ID NO: 221572 - DNA, 365 bp, Homo sapiens
cattttttaaaattcaggaatagtggtcttttttaattcagattttgaaggtttggtaagtttattgctaatgttggaccacacgcaagagaaagttagacattattttgtgaccagcattgttaagttgtcacattctgaacaaatcccttaaagacctggaactcatttacattttgcataaaatcctgatgggatttatggtttaaactttgactatactctttgtcttgaatttattaatttccttatcaggcttaaaacttgggggaaagtagacttttgcaaaatatttttttaaaccattaagttttatacaaagtccttctcaaaaaccctgtaaaccctctatctccagagctctt

SEQ ID NO: 221573 - DNA, 151 bp, Homo sapiens
tcttactcattctaattattttttgtacccattaaccatcttcatttctgctcatcctccaccccagcatctggtaaccgtcttttcactctctatctccatgagtttgttttaatttatagctcccacaaataaataagaacatgcaaaa

SEQ ID NO: 221574 - DNA, 478 bp, Homo sapiens
caggcgtggtgtccagtgcctgtaatcccagctactccatgagagattggacaaaacctgggaccagagactgattttcttctaaaatgctttctccaaaatatttttaaaagaaaagggggaaattggaaaggaaaatgttttgagccccccagatcactaagctaaaggggaaagtcaatctgggaactgcttagggcaaacctgcctcccattctattcagagtcatcccctgctcactgagatgaatgcatatcttattgcctcctttggaaaggctaatcagaaactcaaaagaatgcaaccgtttgtctctcacctacctgtgacctggaagccccctcctggcttcgagttgacccgcttttgcttcaggttgtcccggatcaaaccagtgttcatcttacatatgttgattgatgtctcctgtttccctaaaatgtataaagctgtcagatacagtcagtttctcttcca

SEQ ID NO: 221575 - DNA, 213 bp, Homo sapiens
acaatttaagaaacagtccctcttttcatctctcactttcaataatgttttgtagattttagtgtggttaacttggaatgtggttcattaggtttatttctaggtatttgatatttttgatgctattacagttttatgattttcttaaaattttattttcaatttgtttattgctgatatatagaaataaaattgatctttgtatattgatcc

SEQ ID NO: 221576 - DNA, 538 bp, Homo sapiens
ctatgttattgcataagtgtacttcagtgtgtgggtgcttcaattgttattgtttaaatggcacatttgctttactttggattcctgaagtgttggaatgaatatagatgtgggtatatatctgaatgcagaaacagcattcatgagaacactgtgatctgttttttctgccatgtttcacagtgagaagcccagataataagtttcttaatattgccaaacaagcaggtaacatagattccttcaatagggtaagacagtaacgtgctgctggaactgattatatttagcatatgtttaaataataatcatcatcatgataaatgtattctgagttttacatttggtttttattatatcctagtatcaatatcacatttccccacccagttagctacaattccaaataggaatttcagctgcctgctcttggggctcacttaaattttcacgaacactgtttctcagtgtgagaccctgttcatcaacatgtgccccagattgatgtttcatttgtgttctttaaaactcattatat

SEQ ID NO: 221577 - DNA, 529 bp, Homo sapiens
tacctttactgtaaataagacagtggtttcataggactgcgtttttaataatgtccctcagtgtacactaattgcctaatattaagtgcattttcgtgagaggcagaaattatgtgatttcgtatctgctgttcaggcttattctagggtagtgactagtgatctagttgtagaacccttcttcaaaggaaattttatcaggaagccccatgtataatatgggaaaaagtggagttgaagtggggtggtatatctagagtgctactagctcagctctcgccctttctcattttcctgagacagtctgtactacacctgtgcagaatgactagcgccctgagcacattatcagaactactgtccagagaaaattgttgaattgcatagccccagatctctacaaatgtgtctatgggaactgaattctgatttttgtcgtctattagtatttcaactactttattttaaattgtcaccccttttaaaaccccttatttagtatcattatcttactctcagaaactgacca

SEQ ID NO: 221578 - DNA, 727 bp, Homo sapiens
tgttaattatacttggttacagtcactggattggtttctatttgtctttcaagtagccaagtgatggataggaatcaacaatgttttctttcctgctcataaaaaaaaaaacaacaaaaaaaactttattgaggtctaattgaagtaaaaaactgaatgcaaagacaacaatttggtaagttttgacgtatgtaggcacccatgaaattatctccagagtcaagataatgaatatattcagcattcccaaaaagttttgtcatagccctttctaaatctggatgatttttctgtttgcttatgcttgaaatttcaacattagcaaatgttatttttgtgtatcattggtaaatccacttagtttgattgcagtgcttcagccagcctttcctatgtctggtttagagcaaaaccaccgcattaatgttttggcttgaggaataataacagaatcatggtgcatgttcttttttgtttgcttttttataaaattggtgtgaaaagatgcccttggtctccgtttcctttcttgctctttatttgttgtactcattctgcatgaaaattgattcttttgccagttgtaagattactattattgaggcactgctattgtgagaataagtggatccttcaaaatactcaaagacaactcagcaatttgcgtataatggacctacataatctgttctgagcttttaataaattaccactgatttagtttgct

SEQ ID NO: 221579 - DNA, 782 bp, Homo sapiens
ttgagctgaggagttcgaggctgcagtgagccatggacacaccactacactccagcctgagtgacagagtgagagtgagacccttactctaaaaaaaataggccaggtgcggtggctcatgcctgtaatcccagcactttgggaggctgaggcggacggattacctgaggtcaggagtttgagaccagtctggccaacatggtgaaaccccgtctctactaaaaatacaaaaattagccgggcgtggtggcacacgcctgtaatcccagctacttgggaggctgaggcaggagaatttcttgagcccaggagacagaagttgcagtgagccgagatcgtgcctctgcactccagcctggcagaaagagcaagactctgtctcagaaaaaaaaaaaggaaaaatatattgcaaaaagatggtagtaaaaatgctgctaaagtttataaatgtgtcagtatgaataaaaagtggtggctgttttggtagaaccatcaaaagaaataaccaggctgggaacagtgcttcacgcctgtgatcccagcactttgggaagctaagataggtagatcgcttaagcccagaagtttgagactagcctgggcaacatggtgaaaccttgtctctacaaaaaattagctgggcatggtggtgtgcatctgtagtcccatttagttgggagactgaggtgggaggatcatttgagcccctggaggggtggaggctgcattgagccatgattgcaccactgcaccccagcctgggcaacagagtgagaccatgt

SEQ ID NO: 221580 - DNA, 136 bp, Homo sapiens
ggctgttttgttctttttcctagttgaacacccagttctctacaatgtcccacagtgatggagtttctaaacaccttcctattcttatctctcatctgtggtgatcctcagagccactaaaaatcattaggttata

SEQ ID NO: 221581 - DNA, 276 bp, Homo sapiens
ctcaaacaggcagcactaatctctggtaatagaaatcaggatagtggttacctgggggtggtaatgactagaagcgggaattaaggggacttttagggtgtgagtcatatttggtttcttggtctgggtgtatggtatgggatggggttattttgtgaaaattcatcaagctgtacaatgatgccttgtgctcttttctgtatgtatcttatacttcattaaattttttatttaaaaaaacctggatccttacttcaattcttaaaccaaagtaag

SEQ ID NO: 221582 - DNA, 453 bp, Homo sapiens
gtgaggtgggcattgaggcaggtccatttcagtcaaaatgtcaactaagatgtagaaaaagtctttccttctaaactctgcctgaaagttcacttcattcttcacatgtggctaactctgttcaacctgactcttgatcttacatggcagctatactttccaactgatcaaattctctcatggttacatcgagtaatgcttctaagtgcattcttcactattgtattcctaaccgcagtagaagtgaacctctggggctcatcacaagtagaaaattatttgcatttttctccatagtacatgtgtatatgctataatatcaaatgatgtcttaaatatctttgggaaagccttttctattttatagttaatggataagatcactttgttctgaaatatcatgattttgaagtttgggctgcaaaaaggaagtaaacactgattatcagattc

SEQ ID NO: 221583 - DNA, 405 bp, Homo sapiens
atgtccctttgctgtctgatattgaaagtatatacatctggtttcaatataaaacatatctgcaccctacacacttgtcagagagcttaacctggcccactgtgtacaattttattgtatttcatttcaaggtaatttcaggaataagtaggatataaattaccataaataacacaaacttaaaacacagatcctccctcctgctttaggattggtgcactattagataaccctggatcaaatagaaaatattccttgtactttctttgctctgcttaagaaggcaaaaaactgttgtatattttagattttaatccagacacttcacttaaaatataaaagtattggcatgaaaaagtgtcagctctggaaaacgtgtctatgtgggacacctcattccccagc

SEQ ID NO: 221584 - DNA, 399 bp, Homo sapiens
tgatcctcccctcaaacttgctccacacttagttttttcatcttaattgtttgcactgcatcctttcagttgctcaattaactgaaaggatgttcctttcggttaaccttggagtcatcctttacttctctttcataccctatatcaagtcttgtcaggaaatcctgtcatctctacttcaacatgtatccagaatttgattacctctcactacctccactgttaccttcctggtcctagccaccatcatctctggcctgggatactactatagcctcctaacaggtttccctgtgtctaccctttcctcttatggtctgttcttaaaaatcagaacagttcttctaaaacttaagccagatcatgcccttccctctcgccacactcaaatgcttcagt

SEQ ID NO: 221585 - DNA, 439 bp, Homo sapiens
caaaatttgtttatatcctggaccataaagcgaaagtcagatttccaaggattgaaatgacacagattttaataccataataaaattatacctgaaatcagtaactaaaaaataactgaaaaatacctatatgattaaaaattaagaaatattctaggctgggcacggtggctcacgcctgtaatcccagcactttgggaggctgaggtgggcagatcacgaggtcaggatatcgagaccatcctggctaacacggtgaaaccccgtctttactaaaaatacaaaaaagttagccaggcatggtggcaggcccctgtagtcccagctactcaggagggtgaggcaggagaatggtgtgaacccgcgaggcggagcttgcagtgagctgagattgggccactgcactccagcctgggcgacagagtgagactctgtccca

SEQ ID NO: 221586 - DNA, 484 bp, Homo sapiens
  misc_feature (380)..(380): n is a, c, g, or t
  misc_feature (383)..(383): n is a, c, g, or t
  misc_feature (417)..(417): n is a, c, g, or t
  misc_feature (439)..(439): n is a, c, g, or t
ctgatggttttataaggggttccccctttcacttggctctcattctctcttgcctgctgccatgtaagatgtgccttttgccttccaccatgattgtgaggcctccccagccacgtggaactgtgagttcattaaacctctttttcttcataaattacccagtctcgggtatgtctttatcagcagtgtgaaaacagactaatacacaactcctctaccttctttattttctcagtgtggaaaatgcctgatgaaagctttggggccctcacagatgcacaactcaagtgctgattctatcacttatctaccagctctgtgaccttgaacaagccgcttaaccttgctaagcctctgttttctcatatgtcaaatggtgntantaatgcctacctcccgaggttgttgtaagaattntaagcacaaatgtatgtaaagngcctggcacaaagtaggtgctcaataaatggtagctattataata

SEQ ID NO: 221587 - DNA, 526 bp, Homo sapiens
atagcagaactacagttctgctaagacaagggaagtccgttagctgattgaccttgggcaagtagtgtcttgtcttaattacctacctgaagggattctgagattaaacgagctgttaactataaagtacttatttcccagtgagtgtctgacccaaagaagtgttcattaaatagtgatagtagttgttctttaccattttaaactatcaggaggcattatttgagagattcatatttcaatcatcatttttaattcctgtttctatggtatgtgttttccttgtgtcaccaaccatccttcaccccagaccctccatgtgtctgtctctcaagtcacagctaactgtagtaaggcctcatttattggttattgtttgagggaaaaactgtttggcatgagtgcaacaccttctgattaacttcctaaaaggtaaacttgtcttttagccattttagctttaaaaaacatagtttcctgcctgtttaaaacaaagatcctaaacatgactttaacttctcgatga

SEQ ID NO: 221588 - DNA, 524 bp, Homo sapiens
cactcccccagactgaatcccttagttaaatgtgttctcatatactttgaatattactttcttgcagtgcttatcccacactattgtaattagttgtgtatgtgattgtcttcccaactgtaagcagctattactcatgtttgggcccctagtgttcagaagagtgcctggcatccagtaaatatgtaatgtgtttattggctaaaaaagtaaaataattccctatgtgttacctggctacctgttataagaactagaaattatggtgaatgcagagtcaataaactcattgcttttacaggaagagcttaaaacaaacttagggaaacaagttttgttgttttttttttaaaaaggaaaaaaacagttttggatctgctttagggcacttataagaagagttttaacaactgttggtttaaatagttgttgcaggaatgagaactcttgcagggattgaatagcctaggcaaccgcagcattcaaaccctggtgggacggaattcccagaggccaactgggtc

SEQ ID NO: 221589 - DNA, 423 bp, Homo sapiens
ttattttttattaaaaaaatttttttatggctggtgtatggtggcttatgcttgtaatcctagcactttgggatttttatttttattttttagagatgggatcttgttctgttacccaggctggagtgcagtggcatgattatagctcactgcagcctctaactccagggctcaagtgatcctcttgctttagcctctcaagtagttaggaccacaggtgtgcaccactgtgcccagctgatttttgaaagacctttttttttaagacatgggggtcttgctatattgctcaggctggtctcaaactcaagagatcatcttgctttgacctcccaaagtgttgggattacaggcgtgagccaatgtccctggcccatctagtaaatttcatatttcagatattgtatttttcatctctagaag

SEQ ID NO: 221590 - DNA, 238 bp, Homo sapiens
ttggatgtggtgcatactgcatgaatcattatttaaagcatagggtgttcctttcacaaaggtaaaggaaataggggacctctggggtactcattcctccgaaacatttttgctccaagaaaactacacaggattatttattctcctttactttttcatacgcttccatatctggtactaagccagtagatccaaatagaatgggggaaggctgtgctgaatgcaaagatggcaggcc

SEQ ID NO: 221591 - DNA, 443 bp, Homo sapiens
cccatgctgtgggcaaaagaacagtgcccgcccctgggttgtctgagcagaagctggattgtgtgcctggagccctgtcgccctcagccagacccggggtcgaggctgggccggctctccgggagcatcagggatccggttggagagaggctcatacggcggtcccaggggccacctcgagggggttgaccggagctgggtctgggagctgcagcagagggaaggcggcatgaggagagagccgcaggtggggcgtgtgcacaaagtgcaggtgtgtggaggccctgtgggtttacattgccctgaggcaccacttcacgatcaccccattatttttaataaaggttgtggagaggctgcccttgtttgctaattacgccttatatctttaatcattgcattccaacttaacaaagggattttaacaaaggtcaccgtttatc

SEQ ID NO: 221592 - DNA, 417 bp, Homo sapiens
gcacccatcaactcatttacattaggtatttctcctaatgctatccctctcccagtcccccaccccctggcaggccccggtgagtgatgttccccaaccctgtgtccaagtgatctcattgttcaatttccacctacgagtgagaacatgcggtgtttggttttctgtccttgtgatagtttgctgagaatgatggtttccagcttcatccatgtccctgcaaagtacatgaactcatccaaaaagaagtagatgttacagactcatagctttccttgccattgccataactttgtataaactcatctactctgggcatggtggctcacacctgtagtcccggcactttgagaggcttaggcccagtaacttgagaccagcctgagcaacatagtaagacacccccgccgtcgacgc

SEQ ID NO: 221593 - DNA, 369 bp, Homo sapiens
gatgtgtaggtaagaaaggatagccaaccagtacgggccgggacacgagagatcacgtcattattcagatggagaaactgaagggcaggcgtgggaccaagggcccaccacgagcccaaggctccatcctcccaagcacgtaacaaaggtggaggcggaagacggaggagagagaagcgggtgaagttgggagataaaagctccccagtggctggagggcgggatctgcaacaaatgaagccccggggccgctaagcgggccgatttcggggcagggacccaggccctagcaacagtccgaccattggcggagcggggacacgctggcctgtgattggctcttgccatgcccgaggggaaggcggccgc

SEQ ID NO: 221594 - DNA, 484 bp, Homo sapiens
aggagggaaactagctatttacagaagaattgtaataatttcaagtcatcagattattgtatgcctgttaagataatttcatatacgaaaaaaaaagacattcagaaactactaagagatatgcattaaagcagaggtcaatacaaccatataaaaagaaagtaaaccttggctgagtgcaggggcccacgcctgtaatcccaacatttggggaggccaaggcgggaggatcacttgagctcaagagtttaagaccagcctgggcaacagagattttgtctctaaaataaaattaaaattaaaaaattaaccaagcatgatggtgcacacctgtagtcccaactactgaggaggttgaggcaggaggattgcttgagcccagggggtgaaggtttcactgaatggagatggtgcctaggcactccagcctcggtgaaagaatgagaccctgtctcaaaaacaacaacaacaaccaaacaacaac

SEQ ID NO: 221595 - DNA, 537 bp, Homo sapiens
aatgaagcaaaaactgataaactgggaagaatgggtaaatcaacaatcatagttggaaatttctgcattcttttcctaataacttacagaagaagtaaacagaaactcagcaacactatttactgaatagtgaataacactatttaccaacttgactaattgatgtaaatatgtccatgtaatagcaacagaatgttcactcttttccagtgcacatggaacatttgccaagataggccatgtgctgagccaaagaccaagcctcaacaaatttaaaaggattgaaatcataaaaagtttatgttctgcctataatagaatttaataagaagtcaacaacagaagaatctggaaagcccccaaatatgtggaaattaaacaacatatttctaaataacccatgggtcaaagcagaaataacaaggaggatcaaaaatattttgaactaactaagaacaaaaacgcagcatattaaaataggtaagatatggctacaaacagatcaaaacttccacttcaagatgctagaaagaagca

SEQ ID NO: 221596 - DNA, 588 bp, Homo sapiens
gtctgtctctctgtctctctctctctctctctctctctctctttctctcgatatacctatctgtatatagatatatcaatcgatatgtgtatatccagatctgtctatagatatatctgtatcttgatagatatatcgagagagagagagaaacatttgttatattttcagtctgcaccgggccttgcgctatgcagtttgcatgccttttctcatcaattcttacaataaccctgtgacgcaatactagtattaatattatcatctcttgtgtagatgaggaaactgaggcctcagtaaattttcaaagtcacagagctagtaattgttcagtaaagattgagttcacatctgctcgtctctagaacctagatacttgactgctgcactgttgtgcttatgagttacgaagctttattttagtggccctgggaagtgatagaaaggctttgaggtagagaataccttaatcagtattttattttagatatacccctttgcttgaaatttgcaggatggcttggtagagggttacctgaacttctgggacttggttatgcagtaatataagtgaaaaataatgagagt

SEQ ID NO: 221597 - DNA, 524 bp, Homo sapiens
ctgcagaggaatacccagaaaggtagcaggaaaattagtaataaaatcagaacaaatggtgactcgaatattagggaagagaatgtttcaagagacagctacattcaattaggtctgatgttacagacaagtaagactgtggcgttgattctgcaaccttgttggtggccttgggaacagccttgtctgaggatttgtgaacacagaggtcaggctgcagcaggttttggaataagtttaaaggtaaggagggtagacacctcttttgggaaatttggctgtaacttctggagcagtctatatgtaggtaggtgagaattccacacaggttttattttctcaaggtggcaaaaatttggacatgttaaaatgtgactgggaaactgccaaaagtgggagaagttaactataaaagaggacaggaacaattgagagtatatggtctctgaaattcaggatggataagatccaggggctagacagagggtgtgccttagatagacaggacacctcttccagtcaaa

SEQ ID NO: 221598 - DNA, 547 bp, Homo sapiens
ttatggatccagaaatatatcccaagtattatcttacatggttagatatttgcaacaagtgcgattcccaccaatataaatgatttggttcttagtctaggcactaagacccaggggagcaggaaaattagggctgaaagtaatcagcctgtaatcaaaagagacagtaatgaaattaggaagaactgcattttgcaggcatttagcaagcctctaattgtatgctgtctacattctgtcttgcagagccatttgaatcactataattagcctgctttgagaaggcagcattctgagagccagagtttccaagttcaaaggaaaatcttcctaaggaatatatgctggagtgaaaatccaaacacttctacccttaggggttgggaggtagcgtggatagaaggttctctgagagctttttgacacctcaggccaagaggacaagcagagaacaagctgctgggaaagtcaaatttataccaaactttgattccttatttcctaaccagaccctaacatggtcctagaaacacttttctttggcaaa

SEQ ID NO: 221599 - DNA, 819 bp, Homo sapiens
gtcaggcacagtggcttcagcactttgggaggccgaggtgggtggattacttgaggtcgggagttcaagaccagcctgaccaacatggtgaaaccctgtctctactaaaaatagaaaaaaaattagctgggtgtggtggtgtgcgcttgtaatcccaactacttgggaggctgaggcaggagaatcgcctgaacctggaggcggaggtagcagtgagccaagatcacgcccctgcactccagtctgggcaacagagtgaggctccatcttaaaaaaaaaaaaacaacaaaaaaaacaccacacatctgggggccaaatttggcctctccggtttcagccaaactgtagtatggaaactagctttatgtgggtatggaaactagctttatggttatgaagtggcaccacaatgcgatccatgaaatttgttggaaatttttaccccattaatgctggggtttcttaacctcagtgctagtgacattttgggctcgtaggtcattgttttttgtgtggggtccttccgtgcctttagcatggttcaggtaggaagtttagcagtgtccctgcctcgaccctctagatgccagtagcagctccttctccttgctcctgcacctgtcatggcaaccagaaatgcccagtgtctcatgcgggacaaaattgccctaagttgagaacctctgctttatacagatagattttaagtatttgtcaccaggagaatcgcctgaacctggaggcggaggtagcagtgagccaagatcacgcccctgcactccagtctgggcaacagagtgaggctccatcttaaaaaaa

SEQ ID NO: 221600 - DNA, 456 bp, Homo sapiens
cagccagggtgctgtggctctgggtgtctcctgagatgatgtaacgccggtttcgaagctggttgatgacaaaatgtcggcagcgatcactgcccctgcaacacaagtgcttgtggtctggggctgctggtcacaggcagcccagccttggcccagggtctgagctctgtgcctgggtgcaggtgaggggtcccagctcttgatccagaacagacctgcctgacctggggccactgtaccccacttggagccatggtgtgttcatcaggaagctacggagaggttttcaaaccgtggagccctgggatcctgggaagtacctaagcctgctctggtggagtcagggagagcacggctgtgactggagtgaggcaagtgaggcactcatcttaggtgcgaaatttaaaggggcaccaaaaaactcaataaagaaaactaataacgcagtattttaga

SEQ ID NO: 221601 - DNA, 433 bp, Homo sapiens
  misc_feature (432)..(432): n is a, c, g, or t
gggaacaaaaagaatcagggagacttttacccttgaagagttttcagactgaggagctatgctgtctacagactccaagacagggtcaacagtggggtgagatcaacgaacgctgctgttgttatttatgatatggagctggatttcatgttgactgaagtgtggaatatatacaaaatacagccggggtgcagtggctcacacctgtaaccccagcactttgggaggccgaggtgggtggatcacctgagaacatttttgggaagacaagactcttttcccctggtgtcagaagtaaaagacctacagatataccagcagtctctcagcatcggtagcctcattagggagctactgaatagcagctaatggtcttctgtagaacataagttgaaacaatactagatagaatgattattacaaaaacaaccna

SEQ ID NO: 221602 - DNA, 453 bp, Homo sapiens
cttcctgcaggtgctgggacccacctgggtgggcctgtgtgtctgtgtgtgccctgcaaacaggtgtgcagcttgggcctgaggtcatgcacccgctggggagacgggaagcggccctacccggccggcggacctggaggcctctgtgcacccctgggccaccacctcccacctttccagggcaccaggagccccagacccggagcggcctggctggggagccttggaggccgaggatcttcctgagctcaggcctccactggccacccctcacctggcctgcagccccgtgctctcacagcaaacttctccactgctcagcagggcctagagtacctggaagggggccttgggcagcccccctccattgccagccttgcagcccacactcagcacccccatggggtctctgaccagcccccacgcctccccctcctccaagggagggctgca

SEQ ID NO: 221603 - DNA, 861 bp, Homo sapiens
aaagaagcggagggaagcaacacagcgcagcgtgactacgtgcttgatctgtctcctcctaacgggcatgcaggcaacccaggtgccttaggtaagtgaccccattccctgccctgccttggagggccggatgagtcaaagagtaatcttatccctctgctagtgagtacaaatgaagtctgtgggccaacaaggagcgaggagcagtttcctggaagccctgggctggtgtttgacttgctttgagacagaataaatgggagaaggagactttatgggacatctgggcctagggctcctggatgctgtgctgaaaacaccacgtacagaagccagtctaaccttctggatgatgagagcccagatgcagtacagaggtgccccagccaacaatcagctgctatctgaatcccatctggatcccatctgaatcccatgtcaccatgaatgaggccaccttagcccagccagcacagctgaaagccagaagcagccgcatgcacaagcccaggggaagcccacagaggaaccaccagccaacacacagaattgcaagcagttaagcaactaagattaagacaacaattttaaaatgaaccaggtccggccgggtgcggtggctctcaggcctgtaatcccagcactttgggaggccgaagcgagcgggtcaccggaggttgggagttcgagaccagcctgaccaacatggagaaaccccgtctctactaaaaatacaaagttagccaggcgtggtggcgcatgcctgtaatcccagctactcgggaggctgaagtaaggttataacatggcctggcgtgcagtacgtgctcaataaatgctcaccgttattgttgatcaggc

SEQ ID NO: 221604 - DNA, 448 bp, Homo sapiens
tggtttgtagactgtctcccctcctgggtttgtctgatggcattctcacatttagcttttatcccttatatttcctttaaactggaagttagatttaaaagctcaattttgatctaattcgaactgtgtgtggtggttcacacctgtcatcccattactttgggatatgagagagaaaggaagaacgaagaaagatatttgggaggctgaggtaggtggatcacttgagcccaggagttcaagactagcgtgggcaacatggcaagaccctgtctctacaaaaaaaaaaaaagaaaaacaaaattagccaggcatgatagcaggcacctgtagtcctagctactgtggaggttgaggtgggaggatcaattgagtttgcaaggtcaaggtgctggccatgatcgcactactgaactctagcctgagcgacacagcaagaccctatctc

SEQ ID NO: 221605 - DNA, 479 bp, Homo sapiens
tttggctagcaggacaatgatcaattgatctctttctgtgggctgacaagaagataaacataaaggcaggcagttttcaaggcctatcctactgggaattcaagcatctgtgatcccaacacacaccacatatcaaatctggcagagcaatacccaaatcccctgtgctcacgcatacacaaatgtcctttggtgaaatacatgattaggtggaaaacccatcatggaagccagccatcctaagttaattcaaactgatattagaaattgatttatccaaaacaagggattttctttctacagaatgtaatgaggctctggaaaacacagtttgattactaacagcagagcctgtggtttgtgcacagatttgccaacctaccatgaagaatgaagcgttctgctgcatgccctcacagccccagactctgtgtgtgaagggtaggaatgaaatattccatatgttttctttgtcagtg

SEQ ID NO: 221606 - DNA, 640 bp, Homo sapiens
gggagatgtctgtcaaagtgtataaagattcagttagataggagaaagaactttttgagatctatcgcacagcatggtgtctacagttaataattaagtattgtatttttcaaaattgctttaagaatagattttaaatgttcttaccagaaaaaaaaaagtacataagtagatgaggtgatagatatgttaactggcttcatttagtcattccacaatgtatacatatattgaaacattatgttgtattccataaatatatacaacatttgtcaattaaaaatataaataaagtaactgaattaaattggatagggaaacaacaacaataaaaacccatgtccaactaaaatgccaaaatgatccagctatctgctgtcaacaagagacacattttagattcaaagacacaaatagattgaaaataaaaggttggaagaaaacatacagatataccatgaaaacagtaaccaaaaggagagctaaagtggctatactaatatcagaccaaaacgttattagagacaaaaaaattttataacggtaaagggttatccatcaaaaagatataaccattataagcatatatgaatttgataacagagcccccaaaatacatgaacaaaaattggccgaattt

SEQ ID NO: 221607 - DNA, 441 bp, Homo sapiens
attttttgtaaagtctgactttattgcttgggctggtaatcagtgtagtaaaattttgatgtttaatgaaatgaattttaataagcagccatttaagatctatttgaagttttaaaaaatatatagtaaaatatgattctactatagtaaaatatgatcttcctcaaggtctgaatgttactgattttttgtgaatcaccagaatttagtgtattgtctagtatttagtggttagtcaaaaaagatttgattttaatgattgttatttattgaaacttagaatgtttcagtcattttactaaagttatttccttatatttaatcctcctaacaactctatgatataggttaaatggtttgcccaaagtcatacagcaaagaagtggcagatacaggactccaactcatggctttatataataaagagcctattttaaattg

SEQ ID NO: 221608 - DNA, 459 bp, Homo sapiens
acccacactcaccacacaaacaactttgtttttacctgaatcatttgaaagtttcagatgtcatgacacttcacccctaaattcttttgtacaaatcttataaggataaattttcctacagaaccacaattccattgtcatacctaagaaaactaacatgattgaagaataatttaaatatggtttatattcaaattttctcagttctaccaaaagtgtcttttataagttgtctttcctcctgatatattacattggtttatggtatctttttaaaatctagaacaatcaccccacctctcttttttctttaaaaccacatcaggctatgctataatttttgtttcaatcatcaaacataatgtagaaaacttaagaggaaaaggaaagtctattacatttacctatacttttgcttactgtgttcattcttccttcctgaagtaccaagattcttta

SEQ ID NO: 221609 - DNA, 510 bp, Homo sapiens
tctggagatgactggaattgtgtaagccttggtgaaacctgaatgaaatgtactgaccaatgattagtataatcctgtgctagggactggtactcccaagggggtaacctctattaacttgtcaacattgtttatgcaagatggtcagattgatggtctgcacctggtttgtaaggtttttgttgttgttgttgttgttgttgttgttgttgttgttgttgttttggcttctgctgttgagtctgatcttgtaacttttataccctccgtgggtataaaagacccctcaccagatgagacgtcggctcccctgtgacaagggcatctctcacatttcttggtggttcattatctgaagatgaaggatgtcctgttgactgggacagcaccctgggagctatgtttggaagtctcagtcaactgtttttactgtatcagagacagatatttctcctgcagtcctgtgtcctttgccttcattaaagattttcatgagcataccctatagaa

SEQ ID NO: 221610 - DNA, 483 bp, Homo sapiens
cagagatgtgtcccggggcctggagggtgacggactagcccaaggctaggagtgcgagggctcctggaggacggcccctgggtaggaagtgaggccctgcgtgggatcgggcctgggcgaggcatgcccaaccttcaccgcctggctctgcctggtagcaaccgcagctgtcctgggacaccggggccccccggcttcttccttcttggtctgtgctgatttcaatactgtcgggtacagccggggcacgggtagcgccacttcccacacatctggagaagttgctgccgaggagtctttaccccagggaagaggacgaccccaggacatttgggtgcctgattgatgattaaacacaggcctggccgggcgcggtgcctcacgactataatcccagcactttgggaggccgaggcgggtggatcacctgaggtcgggagttctagaccagcttgaccaacatggagaaaccccgtctctact

SEQ ID NO: 221611 - DNA, 592 bp, Homo sapiens
tcccaggttcaagcaattgtcttgcctcagcctcccgagtagctgggattacaggcgcccggctctacatctggctaattttttttgaattttttttagtagagacggggtttctccatgttggtcaagctggtctagaactcccgacctcaggtgatccacccgcctcggcctcccaaagtgctgggattatagaagtgaggccctgcgtgggatcgggcctgggcgaggcatgcccaaccttcaccgcctggctctgcctggtagcaaccgcagctgtcctgggacaccggggccccccggcttcttccttcttggtctgtgctgatttcaatactgtcgggtacagccggggcacgggtagcgccacttcccacacatctggagaagttgctgccgaggagtctttaccccagggaagaggacgaccccaggacatttgggtgcctgattgatgattaaacacaggcctggccgggcgcggtgcctcacgactataatcccagcactttgggaggccgaggcgggtggatcacctgaggtcgggagttctagaccagcttgaccaacatggagaaaccccgtctctact

SEQ ID NO: 221612 - DNA, 402 bp, Homo sapiens
cactttccttctgttgctgcagtttggaagtagtttgttatcaggattatcaaagcatcattgctatttatgacaatgactttaagaaatgcaagaatatttggaacactgtagaaaaaatattttagcctggaaggcaaatactaatttcaggaactattgatctgttataaaacaggaccactcagacatttagctctaagacttttgcatatctgttgttagaggcgtatagtggggggcatgactcagcttctgcttaagtacaagttgttgtctgcagcgaaggaagaatttgattgtagtatcaacagaaccagacagaactctttgaatataattatatatcttggaaactgactcatcaaagctattagattacatagcatcatttaagcatca

SEQ ID NO: 221613 - DNA, 466 bp, Homo sapiens
ttttgcattaacctaatacaattgtatgtgtctgcatggaaacttttgtagaaaaagggtaaatcaatcatttgcttgttcataggctttaatttcttcctgagtcagcatggtataatctgaagagcttgggagtcggactcacatgtccttgtgtgcaaaaacccagttctgggctgggcgtggtggctcacgcctgtaatcccagcactttgggaggcctaggcgggcggatcacgaggtcaggagatcgagaccatcctggctaacatggtgaaaccccatctctactaaaaatacaaaaaattagccgggcgcagtggcaggcgcctgtagtccaagctactcaggagactgaggcaggagaatggcgcgaacccgggaggcagagcttgcagtgagccgagatcgcaccactgcactccagcctgggtgacagagcgagagtccaactcaaaaaaacaaa

SEQ ID NO: 221614 - DNA, 328 bp, Homo sapiens
caggaaaaaacattaaccccagcatcgacactttttaggttcactgtaaatgttccccgcttcctaaagagcattcccaatggagtagacagaagctgagaagcatctctcagttctacaatcattggccctcagctgtagacctagacctcattaagtgttattaactgaaaatgtctacactgtgtttgtcttagtatttctgtaagcttcggtccatttgtggctctggtcttacaaacttgtatatttgtctaaatgttgtctttgattttgtaatttcccatcgtgtacattttaaagtaaatcattggaatgtagtcggtgt

SEQ ID NO: 221615 - DNA, 166 bp, Homo sapiens
attcttttaaaagaacatctgttgaaactggcaatttacattcttcttaaaatacggagcgacataattaaccctctggggagactaatattagtttattagagacaatttctagttctgtttatttttaacactaaacgatttgttcagattggggaaaaaattt

SEQ ID NO: 221616 - DNA, 427 bp, Homo sapiens
aagcacattactggatgaactcattgacttcgcactaccaccctatggggtcaatttcttttctcatccccattttacagacagggaagccaaggcccagagaggttcagcaacttgcccaaagtcacacagcccccatggagggagatgacaccaccatgagacctggggaggagtgggggcagatggtgggtacgaggagggggtgaggctgtcaccatgcctgctctctgacctgcagtgacagacaggaagaggaacctctaccaggacagagaggagatgggtacagacagttggtctccccatgcctgctcccacttctcttttccctgggacggctgtgaccctcccactggaactcttcagccctagcccatgtgcagcaggaagtgagacctggaaagggaagaggacacacttctgc

SEQ ID NO: 221617 - DNA, 161 bp, Homo sapiens
agtcaggtgtgtgtgtacagcgggggacgcgcgctgccggctcctgggctggcgacagattgtgcaggaatgcgaggaatgcaccaggggcagagtccacacagcccgccgcggctgccctagcgccttccctccccagctctcgccgcgcagccagaggt

SEQ ID NO: 221618 - DNA, 205 bp, Homo sapiens
aggaacttgcttaatatgaagtccccagagcctgactagaacagtgcttaacagaataagccatggttgaatgaacaattgaatgaattaatgaacaagggagatgatttttaggacacatgtgaaactggggctctcagttccttgctccacaacacccttgctcctcttggcatatccactctcttctctctcttccttgctc

SEQ ID NO: 221619 - DNA, 342 bp, Homo sapiens
attctaaccctgacatgccatgatttggatttctttaaaattatgtactattcatcacatcagtattatgtgattcactatttagactgagccatgtgaagttaccatttttataggtcagaatggttctatctattatcatgtgactgtcccatttgccctgtttagttttcagatctttccttgccattccatccttccgaataaaagagatatgaaaaggccgggcacaatggctcacgcctgtaatcccagcactttgggaggccgaggcaggaggattgcctgagcccaggagttcgagactggtctgggcaacatggcaagaccctgtctgtattt

SEQ ID NO: 221620 - DNA, 327 bp, Homo sapiens
agcacaggcaaaaagagggtcatggtgccatccagaaaataccaaaaatcaccctctctcagctaaaatgagcaactgctactttaccagtgacagctttgtcccagctctagtctgccttccctatagagaagatgtattgagataatcatgaaattctccttctttctgatagtatccaatctggagcaaacccgtttccttagaccctctcccaatcccaaattctatactaggttcttctaaacactctcatactgagacaccccatggttccctatgttgtgtgttcttctttgctgcaatgagtaataaactcaacttgtt

SEQ ID NO: 221621 - DNA, 407 bp, Homo sapiens
cattagtgtattttatgtgtggcccaagacaatgcttcttccattgtgggccatggaagccagaagatctgcaacacccctgatctgtaacatgaaagacagagacctgagaacataaaagacaatttggaattaacagactaagtaggaagaaaaaaaatcttaaaaaagattaaaatcctctgagggataatataagatacccatgaggcaagaataggatgctacaaaagaaacattcaaagggaggaaagaaagctcttgaaataactgaaatagaaataaaactcagtagaggaagataaaataaggacatgaattggaaagaagcagagaaaaactgagtatgtttcacatctgaaaagcagaattctggaaaaacagagggaattgttatcaataatata

SEQ ID NO: 221622 - DNA, 602 bp, Homo sapiens
agctatcacatacccagtagctccaatatgattatcagcaaatttctaggcagaaacattgcaggctagaagagagtggaatgatatattcaaactactgacagaaaataaactgacaaccaagaatattataactggtaaaaacggtcctttaaaaataaaggagaaataagattttcccaggtaaacatagggcgagaaagtgcatcaccactagactggccctataagaaatgctgaagagagttcttcaaattgaaatgaaaaaaatgttaaacagcaacacaaaatgatacaaaagtataaaactctctggtaaaggtcaacatatagacaattatagaattctgtcatattataagcaaaaaaattacttttaaatctggcataaaagtatttaaacaatagcacagaaagtaactctaaatctatgttaatggatatgcaattaagaagcagtattatgcatcatcaagaacgtaaaagtggatgtggatgaagtaatacaaagtagagtttttctatgcagttgaagttaaattgttatcagtttaaaatagattcttatacatttaagatatttgatgtaattgcaatgttaa

SEQ ID NO: 221623 - DNA, 394 bp, Homo sapiens
gcacgaggcaagaccctgtctccaaataaataaataaacaaacaaacaaacaaataaagcaagagagagagggagagggttagggagagagagagagaacaattttaatagtatttaaagaaaaaaaagctgggcgtagtggctcacaccgtaatcccagcactttgggaggctgaggcaggaggatcattggagcccaggagttcaagacctgcctaggcaacatggcaaaaccctgtttctactaaaaatacaaaaaaagtagctggacgtggtggtgtgcctgtagtcccaaccactcgggaggctgaggcaggagaattgcttgaacctgggaggtagaggttgcagtgagccaagatcgcgccactttactccagcctgggcaacagag

SEQ ID NO: 221624 - DNA, 317 bp, Homo sapiens
gtagagagacttggagtggtggaataaaagtctctttgaagaccaagctctccatcgttagtgctcagagtcagccacttgaattttcatgacttttctggaaaacatgttggtgctactccatcactcttttcttagccattgtagtcaacttagagggcattgtacagcagataggaaggttgaaacagaaggtaagacctggagtattgctctaggaaagtatgtttgcattgagttattaaatctgtgtaagttcctggctggagttccggttgcagttgcaaaggtccagcctttttcctggccctagggag

SEQ ID NO: 221625 - DNA, 480 bp, Homo sapiens
catctactgagagcaaggctttaggagaattgtctcccttaagctcatgaaaattataaatttagtaccgtgatttctatgatagtgttttggagcttacagaggtaaacaggaccaaggtaccagaattcgagctcaggtctctctgacaccaaaatccaccataccatggtgcttctgatgtaaggtgtaaaaaagacaatagccacctctcccagtctgcctccttccaacctcccacacaattgattacgatggaatcaaacattgtcagctgagagctataataaggtcagagttacttgttgtaatttattttgactgaaatatgtacatatctagatatagttggaaggtatatgtgattgccagagtatataaagatcaacttagactacctaatgattatgaatggagcacatacccaaagctatgtgtgatgatatattttagtggattaaatatattaaaagttctctt

SEQ ID NO: 221626 - DNA, 556 bp, Homo sapiens
agaatagaagacctttgcaccagagaatttctaaggcccctgctagccctactctgtgtatgtgtgtgtataattgctttaaaacttagccccatctcagacttacctagaggaccactgggcattagctagctgtcctaggagcttaatctgtgtatgggacattggatagtcacagttggcctcctacaattgggaattctaccaagctccaagttgacctgggattccgacagctttcccttccactttgagggattaaaacattctactggctgggcgcagtggctcacgcctgtaatcccagcactttgggaggctgaagcaggtggatcacaaggtcaggagttcaagaccagcctggccaatatggtgaaaccccatctctactaaaagtacgaaaattagccaggcatggtgatgcacgcctgtagtcccagctacttgggaggccgaggcagaagaatcacttgaacctgggaggcggaggttgcagtgagctaagatcgtgccactggactccagcctgggcgacagagcgagactctgtctcaga

SEQ ID NO: 221627 - DNA, 356 bp, Homo sapiens
tggggattcaaaggtaaatcaggcatagtatctgcccttaagaaactcagttcactggatatcttgatgtggaaacagatacttaatggccagcacagagatgaggaaagcccagagcaggggtatgtagccccaaggctgggaatttagggagactctcccagaagaaatgatctgaacagaatcaggaaagactcccagaagaagtgatctgaacagaatcaggaaagaagagagtgattggaagggctcaggatttgtgtttatttgggcattaagatgcagcttgcctcctgttgttgcatttcttgtttcattgtatttttccaataaagatattttcagaaacctcacat

SEQ ID NO: 221628 - DNA, 488 bp, Homo sapiens
aattacaaaataaatataaatccatgcatttacagccaattccattttttgacaaagacaccgggaacatacaaccgggaaagaacagtctcttcaatatgtgttacgagaaaactggatagccacgtgcataagaatgagactagacccttgtctcttaccatacacaaaaatcaaatcaaaatggattaaaaacttaaatctaagacatgaaactacaaaactactagaagaaaacattgggggagaactccaggacattagtctgagcaaagaatttttgtgtgtaagacttcaaaagcacaggcaacaaaaagaaaattagacaaatgagattacatcaagctaaaagctttctgcacagcaaagaaacaataaacaaagtgaggccataacccacagaatgggagaaaatatttgcaaattatccatctaacaagagattaataacaagaatatataagaagctcaaatagctcaatagcaaa

SEQ ID NO: 221629 - DNA, 450 bp, Homo sapiens
aagaataaaagtgtaaataacattagaaaaaagtataacagggcctgtgttatgggctaaattgtgtccctccaaattcacatgttgaatactagcccgcagtactatgtggagagataatgtgactatatttagagatggggactttaaagagacacttaagtttaaatgaggtcatgggggtgggtcctaattcaaaatgactggtgtccttatgagaaatgggagagccactgggaatgcgcccccacggaggaaaggttatgtgaggacacagcaggaaggcagccatctgccagccaaggagagagaagccagaagaaaccaaaccttccattaccttcattttgaaattctagcctccagaactgtgagaaaattattcctctggtttaagccagtcagtatatagtattacgttatggcagccctagtaaactatggcggccg

SEQ ID NO: 221630 - DNA, 292 bp, Homo sapiens
ttgcaggccaggtgcagtggttcacacctgtaatcctagtgctttgggaggcaaatgcaggcagatcacttgagtccaggagttcaagaccagtctgggcaacacggcaaaacaccatctctataaaacattttaaaattagctgggtgtagctatgcatgcctacagtcccaactactagggaggctgaggcaagagaattgcttgagcccaggaggtggatgttgcagtgagctgagatcgtgccattgcactccagcctgggtgacagagagagaccctagaagatttg

SEQ ID NO: 221631 - DNA, 299 bp, Homo sapiens
gcctaaaatctgagacaccttcttgactcttcctctttccttcaaacccaccaagtctcattcattttatcttatcaatctctctcaatctgtctgctccattttattttcctgctgcctcaactcagaatctgtcatgcctaggttactgcagcagtccctttcatctcttcctacaggcttttaagtttttacctgctgggtactgtattgcctgtaggtagtcattataaatgcaaacctatgcagatttcttccaggggaatttagggctttgtgctttgaatagtttctactta

SEQ ID NO: 221632 - DNA, 449 bp, Homo sapiens
agtaattattgtagtaggttgtagcggattcagtaaatatatccagttcctattctatattctttctaggtgttaggaatgctcccaggaggtacaaaagctatcagtcgctgcaccgaaggactctaggatgctatgacttagttttggaccatggagattgcccagcaagccgagaatattccagccctccaacattgttgttaaaaagtccactgctgtatgttaggtgacttcccaaagctgctcactacttcttcttattctgttttctcaaccccacaaaaatccaatcactgaaatcctgaactcttttgatagtggcatgagtgttaagtaaattgcacacctcttgtggaattcattttcacttaatcatgctaattatgtggagacttgtttgttgttgttctttgtttttttaagtaaatcaatacctaaatttcctg

SEQ ID NO: 221633 - DNA, 1027 bp, Homo sapiens
tttgctttctgataataaaatgtttgtagttttacaataacttccctcaagttcttaattgattttaaaatatggtctattcagtattaaacccagtttttagagaggatctgtgatgcaaaaattatttgcttggcattttcacttctgtccaaaaagactgctgttttttactcacaggcaggtgaagtctctgtaggcccatactccctctccccagcagcttttgtttctagcttaccttaccttacagggtaactcaatctgtagggtttattccagagcacctccttttacctcaaggatggtatttctggttcccttaaagtaaagcctcctcagaatgttttattcctgggccatgagctgtcactctcagggaccagcctgtgcacaagtcatatattgtgtgcacccgtctttttggtctgctgctgagtctctgttttccatgccgctgtccccttgtcccatgaccacaatcactctagctcctccccgtggagcagcaggggcttaagaaattcaaacaaaacatgtatccacataaataatactgtcataagaaaaaggaagttgaaaaaaatggaaaacccacttcaatagatacgcttttgactcctttgaactctgcacagtgtgaatggagcccttatgcttgggctgaaaacttttcctctacttctgagcacatgtgtgacttaacattctccttgctgagttgaagaattctcagtatgtatcacccaaagccaaaaataagttatgattgaaatttgggcacataaagtgattttgatactcattttttcctaaaatgaaaacttagatgaatattaggtaggggtttgaacaatgtggaaatcttttaactgttctttgagtcaggtcatgtaaagtatctttgtttgccttccccaggatggggtgggggctcttaggcccttacatcttcgggtggtgtaaccagtctggataataggcatagaggactgcagatcaggagatggaaaagtactggaagtga

SEQ ID NO: 221634 - DNA, 485 bp, Homo sapiens
tcagatcatttataaaatgcctgcagctgtttggtagggtacacaggtactaatttaaagtctgattccaccctactcatacacacaagtgttgtatgcatgtatatgtgtgcacacacagcaccagaacagccaaaggcctagggaggcggaaagcttgttcactgtgtgtctgtgtacgtgcacaatatcaccatttccccaaaaggatgaaaccttgagcagcagcttctgcataacactaggtggcatttcatgtagaaaagaacaggcaggcacactgcaagtgtgaaggtcactgttcgtggttacatttaccctccttgaatctcgagatctcctggagtgtgaccgctgttggtgagccattcctgcttcggagactaaatcagcattgaacccatttgcatcaagatgtaatgaactagatgaatgggtgcctagagatgatgcggcgggtgagaagtgcgctaaggcgggccggc

SEQ ID NO: 221635 - DNA, 512 bp, Homo sapiens
cattgcaagtatggatcaatattcattgaaaagttccctcttaaatctcctttcagagcccagcatactcctaagttctagtaagtaaatggaaaaatagggcaaaactctcaacttagatccttaatattccctcttatatctcctttcagagtccagcatactcctaagttctggtaagtaaatggaaacatagggcaaaactctcaactcagatccttgataaagttttcctgtgcttctgaattttcttttcaagggttcttttcttggcccggcatcgtggctcaggcctgtaatcccaacactttgggaagtcgaggtggatcatctggggtcaggagttcaagaccagcttggccaacatggtgaaaccccatctctactaaaaatacaaaaattagccaggtgtggtggcacatgcctgtaatcccagctactcaggaggctgaggcaggagaaccccttgaacctgggaggcggaggttgcagtgagccaagatcgagccatt

SEQ ID NO: 221636 - DNA, 377 bp, Homo sapiens
aaaactggttcatttgtcctgtagagtttcttagagtcttgatttctgtggtaatttagcatgttcctccatcctctgtatttgatataaattggtaacttaatcaaatttagatttcttttggcaaaactaatttgtagatggttttagcacttctatcaggaggtatacaggaggtatacagtggtggtctttttgtgattttaataactgatatttgtttctcaaccgtggcactattgacattttgggctggaaaattctttattgtaggggctgtcctgtgtattgtaggatgcttagcagcatctctggcctctacctaatggatgccagtagcacctcctcctgactgtaacaataaaaaaatgtgtcta

SEQ ID NO: 221637 - DNA, 203 bp, Homo sapiens
attataggtaggagaaggtccaggaccactgcccctgtgttaagcaccagcatatatcccaagcagccagagagctaagcagatgatgagaatgaggcccaaatgcctcagccagggaaactcactgaaagtgacactccaaaacctgcactgcaaagaagacacaatcgtggatgctttggaacagtggactttccagggaa

SEQ ID NO: 221638 - DNA, 549 bp, Homo sapiens
attgctctataaatcatattggccaggagaaaggatgttcagttccctaggcttttcatcatggtcaattagggaatcagcccaaaaggtcagcatcactgcccttaaatgaggtcacactccatgcactctgagtaccccggaaagctgtggtgctggtgattaatgcatgtgtccagacacctggtttcaacgaggcaaatccctggcatacaatcccagcttgtctcttctcactgtgtgtatttctcgagctggcctgtcaccatgcaaagagtattttgaaaatgcagtttatgctcatcttggatgcagctgagatgccatggaaagaagtcagactttggaataggatgggtctcaggatttgggagcatgttccattatcccctcaagttttgattccctcatctgttaaaggttattgtgaggataagatataatgcctttcaagtgcttgatgaagggcctgaactatatcaggtactcatgaatgtttagtatgatgcaaatttcaagattaataataaaagaagctgcaccagaatg

SEQ ID NO: 221639 - DNA, 376 bp, Homo sapiens
taattttccctagggctgatgtcaagcatattggtctgtgatttctaaaatctttctctttttttgtttgtttcaaacatgggagcttttgtgcatctccaagtacatggcatttttctgtttatttctcaaagaatttgggtcaacttgtgggaaagtttagaaaatttcacttcagcctcagtagcttgacatctttttagtagtttgaagtgcttaaaatggtgaaaatttctctcgctgtttctttaatgtagtatttttcttaagaaaccgttttttccagaatgaagataaatttcagcttagatcatgcatgaagaaactcgttttaaattggaagagtttatgctaatgatatttatgctgtacaaaa

SEQ ID NO: 221640 - DNA, 264 bp, Homo sapiens
agtgttcctcggcaatatgcctgtgacaagcgtttgctgtatttgttgttcgacttagggtagttgaaagagtctctctcagccactctctctggatattttgttgtggctgtgggcactgtttgcccagcctctcactttgtagcggaggggtgggactctgcgtgaaaggaccagcgttatagtccctggcttctccggctaattcatcccgaggctcctgccccttcccattctggaaggggcgagcttatcctagacctg

SEQ ID NO: 221641 - DNA, 422 bp, Homo sapiens
atgaatgaataccaacagatgcaatatttaaaacttcccaattcataatataaccaaggctaaaaaagtaattttcttactgacacaataatttagacttaatccccttctggggaaatagactttaaatgtagatgtatgagacacttgtactgcctttttccgaagtctttaattggctgaaaatatttctaagtagggcaaatcattagatcttttttaaccattccagcattttagtatgtatgggagggaagaatgcctaaagagtctcaggagacatgccccttcagggatgaagcacagattgggtttggtagcttgagcctcctcgacaacacatgacatgctaggaagacagagatggaggactgagagcaaagagacactgggtgctgaaagatgacagctaatggacaaaa

SEQ ID NO: 221642 - DNA, 424 bp, Homo sapiens
aaagctttcagctttctgagaagtattttctggagtatcacacagagtctatggcagagtctatggcccagtgaaatcagaatgtgcaggtccatttaggctagagggagggtctctgctaaaagggcagaataatcagagggtgtttctgtctcactgtgcagcaggttggtttgctctgggctccctctgtgggtgccaaactaaatgctcaaggctgtcctgcagctgtggtcagtcattcaaggaaaaatctttgtggaggtaagtgagccctccaggagacatggttttatagactttccatattacttaggtattgggaggatggctctgataaaaacagtgcacttaataaatttaaaaataaaacaaattttgttgtagcactgtcttcttagaaatcttccaattgaaagcaaat

SEQ ID NO: 221643 - DNA, 1430 bp, Homo sapiens
gtgggtgatggcctttgaacgtaagtcaacggttgggtggatctaggagggctgccacgtctagagtaagagggtggatgttggctacaccatgggaagagtgactcttagagtgagggggtgtgcagttgtggattgagctgggagctctaccagtgtggataacaaagggagatttccctgaaggatgttcctggtatcatcacagctagggaatttgggtttaagtctaggggaaatgggcctttcgcaattcccatccaccctctcaaaggcctcttctggcatcttcattcaaaactcttccctgtcttgaccccagcccatctcaagaagccagtagtaatccagaatcattcaggtaatgtgcgtggctggcagctgagagattttagtctccctctggacactggagccatcttcatatttaagagagaccctgcttatccagaaagcaaaacatgtcataccctataaaactaaatactctttgctcaagttgatcaaagatctattacaataaagccattctgtgaaaagaaaatatagttttaaatacacagttctttatggatgccaattcgtttttcatttagttttaaaatgtcaaagccacccctatcatttagaaaggatgcatcatcgcagacaacagataaggtttcgttgaaaaacacaaattgttcaaaacacattaccttttgtattgggaggagagtagtggacatcctttagtcatcttttctgtcctctatacctaactcagttcctgtcaggtagtggacactcaatgtgtttgccgaatgaatcaatgaaataccaccgattatcccaaatagagtcagaaatgttgaaactgcttagaacaggacatttagatattttatattgcaatttcacagacccccttaaaattcttaagggtaaaagaaaaaatctcctgacacttagaactttgaggtgggcatgtggattttacccaggaaacatcttatttggcagtagtgaacaaataaagtataggagttttgtgatttacatgtagttgctaatggtttcctcaaatatttgacctgaaagagacctagttcattctccttatttaacaggtgaggaaatctgtaccatagaggttcagtaacacagctggctgatagcagaactgggattctaaatccttcgatttctaatctagtgatctttgtatttcactgaaggtttttcaaactgtgctgtccagactctaaggaattcaatagaacatgctttatgcataagtagaatgacgaaggacagagctgtacccctattcctacttccaccccacccagaattgagcagtttttctctgtcttataatagatttatgaataatattttgtttgttcagtttcaataaaacctaaaataaataatttgaaagctctaaa

SEQ ID NO: 221644 - DNA, 428 bp, Homo sapiens
agagtgtccagtaaggagcgcagcctcatcgggcatcctgtgagactctaagcagggtctgaccgactcctcaactatagaactgtgagataatcaatttgtattgttttacacctctaagaagcaattataaactattataatacatgggagaaagttcgctttgctgattagggaatacatgtactgatgaaagcaaaatacgtttgtttgaaataaaaatcgtgctaaatgggtttttttctcattgtgaaaattacatgatgaagggaaactgggtgacttaatcaccttttgggtgatttaaatcatattttatcacttgaaagcagcgtttctgaacttcccgtacaaacctaactaaggtaaatcaggattatgctgttttccttctagaaattatccaaaagttaaagacagagttaaaa

SEQ ID NO: 221645 - DNA, 566 bp, Homo sapiens
agaaacactcattttagctttgaaactccttagaggcttgttcagtggcctttgagtgaagcagtaaaaaaagagttagttatcaaagagaaaacttagaatacaaaactataataaaagatattgcattcatgcaataaaaagtgtgctatcaaaaaggaacagaacacaaatctttgttcagattttgtcttcatgaggcctacccaaatttgccgtatctgatattacaatctaccccccacgcaatgtccatcctctttaacctgttctacgtattctttttttctccagaagccctaccaccctctgatacactatgtaatatacttgttcactgttctattgatttattgtctatctcttctccctaccagaatgtagtaagcttattgtctgcttgttcaagaatagcaactagatgtagtagatgtgcagtgagtgtttgttgaatgaatgaataaataaataattcttgtaaattaaaaatatgatagcagaaaaaaagaagagttacaagataaagtttagaaaattgctttcagagcaggaaaattgtagaaaaa

SEQ ID NO: 221646 - DNA, 404 bp, Homo sapiens
caccgtctgttaattgaatgtaataaaacttttagaccaaacttctaatttacaggaaacacaaagaacaggagattctatctctcctttgctggcctggaagaagcaagatgccatgttatgtgctgccatagggccacgtggcagagctgagggcagcctcctgctgacagccagcaagaaacaggagccctcaatcccacagcctgcaaggaactcaatgctgccaacaaccacaagtgcttgaaagtgaatctgtatccagtcgtgcctcagatgagctagcagccctggcagacaagctgtttatagctttgtgagaccctgaagcagaggaccaagttaaggcatgctaggactcctgactcactgagatagtaaagatgtgttgttttaaaccatta

SEQ ID NO: 221647 - DNA, 356 bp, Homo sapiens
gccagtgagggctcaaaagaaaataagaaacagtatttgaacctacatgaagggaggttcttgtcatgtagtggtagaaagcttagggaaattgtttcctggaaacagaactcacaaatggtaaacttagatacgtagttaaagatatttccaagcaaggtattgaagatatgcctggtttgcttacagtaaaaagtgagagaaaggagacaaaaagtaaccaagactggatgacttttaaaattccagcttctctgtgtggcaaaataagcctagaatcagaaatggctgccaaaagtgtggcacaaaaagatggtcaagtgtatgactgtacaaccttttactaaaacctcaaa

SEQ ID NO: 221648 - DNA, 484 bp, Homo sapiens
actaaatgttttaagttgtgacaatactagcagggaggagtagtttattagcaaggcagcgtacaggagcacatgctttaatacatgcatataaaatgtgcatgtatgtgtgtatgcacacacatttataatgtgcctatcatctctctatatatatgtatttaaacatcaatgttttcttttttaaaaagtgagatgaggccaggtgtggtggctcacacctgtaatcctaacactttgggaggccaaggcaggtggatcacctgaggtcaggagttcgagacgagcctggccaacatggtgaaactccatctctactaaaaatacaaaaattagctaggtgtggtggcacgtgcctgtaatcccagctacccaggaggctgaggcaggagaattgctagaacccaggaggtggaggctacagtgagccgagatcgcgccattgtactccagcctgggtgacagagcaagactccacttcaaa

SEQ ID NO: 221649 - DNA, 539 bp, Homo sapiens
aaagtggtggtaatggatctttgttctagcttctgatatttatgttattagctattggtttaggactattatttttaacatgttaatgttatccttacttttttttaaaaatgagaaatggatgttaaattccaagactgacttattgttttctactttgatttattcatgttaaatgatcattcgatttgagtaataactttttaggtccttcttttagagattttgatacatagctactgaaggggggcttagcaccattttagtcataacaagaactaaaaaacttgctttttctttatgctcatcaacacttaaaatagcataacaatgactgggttgaaaatctgaataaatttttgcatatgaagtcatctgtgctgaaggatgttttgagaagtagctatataaaaatcaatttcaggccgagcgtggtggcccaagcttgtaatcccagcactctgggaggccgagacaggtggatcacctgaggtcaggagtttgagatcagcctggccaacatggagaaaccctgtctc

SEQ ID NO: 221650 - DNA, 641 bp, Homo sapiens
taaatggtatattatgataaaacagctgttatcctaatgcttggcatttgccaggaactctgggtatgtttatgtatataaaatcacatttcatccccgcaacaatcccatgagataaatattattgttattaatccctgttttacaaatgcagaaactgaggtacagagaggcttagtaacttacctcagtcacacagctgaaaacactagaatctcggactttcacctaggtctctctgactccagagcagcactcagtgttttgcttcctgggtttgggctttttggtgaagaggaaaaaaaaaaaaatggaaaaagtccaggtcattggcttttagcccaccaaaaaactaaccaaccaatcaactctgaggtaattgtcaactctttaccctccgtgtagaagaggctttctcaattgaaattataaaactggcacagaagcaaactggcgtggtgcacggggtatctgggcagttggaaatcttctagaaaaaaaaaagaaaccaataattcttcacttgcttaattcttaattctcttttctgacagtttctctctcaggaggttaaggaacaataagagatggcctcactgaaattatattctgagcaacaagaaggatctgtctggtaaaaa

SEQ ID NO: 221651 - DNA, 612 bp, Homo sapiens
catatggacaaactctgccattgcacctaacatcctatggaccaaagtcctgtggaatttccacataaaaataaatggaaagttgcccatgtctgaagaagaaaatatatttgagaagtactgtgaataaagaacagtgtttttctatgttgattcaaagatggtattttggtggctggaagaacgttagctgcaataaaatattaactattttcaatccaccaagtttggcgcattaattttgaatattggagaaatactatgcaacaagcatgtgaagacatgggtatggaatatttaaagaaagaaggttttatctaaaggtggaaacgtgtgggtctccagtaaaagatgacgaatggaactacagaaatggacaagatcattaaagaagaacagtaatagaagagagaattgttatgaagactaaataggatactatatcaatgcatttcatactatatcagatacataatatatgttcaataaaatgatagtttttccctttcctttgccttataaataaaatgtctgccatttatctcttgcagtgagacaagggataatcttaaaaatattttaacctaaaataaatattcttcaatttgtaaa

SEQ ID NO: 221652 - DNA, 247 bp, Homo sapiens
aattttagaattcttttttaaaagttcttgcatatcatttctcaggtttgctttaaacggctgtacaaatttttgaatggggtattattaattgttcgaattggttaaagcaagaatgctattgtttttgtatattgatcctctatccaaaaaatggactgaattctctaactactgctagtttgcagattttcctggatttgcaaagttaaaaatcatatgcaaataaataattttgtatcttcca

SEQ ID NO: 221653 - DNA, 250 bp, Homo sapiens
atgacatatgtccaccgttacactatcatacagaatcgtttccctgccctgaagatcccctgtgctctgcctgctcatcactctcaccgcccagtccttggcaaccggtcattttttactgtcacatggttttgccttttccagaatgtcattgaattggaatcacacagtatgtagccttttcagattggcttctttcatttagtaatatgcatttacgattcctctgtgtctttttaaaattttattt

SEQ ID NO: 221654 - DNA, 538 bp, Homo sapiens
ccaaagaaaggtcaagaaaaagcgaaaagacttgggaggatgctttgaaatgaaaagataagaattggagctacagtaggttgtaagaagccccggttgcaaaatattgaaactatgagcaagctgtagtgatggtggagagaagagtttcaggccaagggaaagaagcagctcagaggagactgagctaggccagtggacatggccccctaactcctgccacagagccctggagtctcctggagccagagtggctcctcagtcccagggcagtgaggcctatcccttccaatgcctcttccttccttctgtggaagaccaactccattgatgttccatgtttatctccctcctgagctaacctagctgagtctgctccttacaatcaagaaaacccacccactttactggattctctctgtgtgcagcgatggtggcatatatctttgtagctttttgcctctaatataatgcattataagggtaagtgatgagttctcagtaaatgaatgttgaataaacgaatttttgaaagcgc

SEQ ID NO: 221655 - DNA, 521 bp, Homo sapiens
gtggttgatagagactgagaaaggtagtgggaagggaaggataaggagaggttggtaaatggatacaaaattacagctaggccagcatagtggttcatgtctgtaatcccaacactttgggaagctgaggcaggagtattgtttgaagccaggagttcaacaccagcctgggcgttatactgagaccttgtcgctacagaaaactaaaatattagccaggcatggtggtaggcacctgtagtcccagcttcttgtgaaggctgaggcaggaggattgcttcagtccaggagcttgaggctgaagtgagctatgagcgcaccactgtactccagcctgggtgacaggcctaggtaacagagtgagaccctgtctctaaaaataaaaattaaaaataaaaaaatacaaatttacagctagataagaggaataagttctagtgctttatagcaccgtagggtgaatatatttaacgataatttattgtatattttgaaaaatccaaagaagaggattttgaatg

SEQ ID NO: 221656 - DNA, 386 bp, Homo sapiens
tatgcaaatactatgccatttttcatcagggacttgagcatccatggattttggtatccagaaggtcctggaaccaatcccatcccctttggataccgagggatgactgtattacagtctctaattatcttgtttactagttatgctctttcattagaatgtaaactccataaattcagggaccttctctgttctattcattgtatctccagcttgagcacagtgtctgacacatggtagtcattgaataaatgttccagagattgtctagttgcagaagataccaagttgttaacaagctaccctgtactcaggaagccacattttagtggagcagacaataaataaacaactagatgttctgtataatttcaggtagtaatgaa

SEQ ID NO: 221657 - DNA, 370 bp, Homo sapiens
agtgaatagaattaaattcaaactcatgtctgtttacctccaaagcccgtgctctcaaccgtcttgccatagtggtccccaggtaaatgagtgcctgaagacagtgagtgacttgtacagtccagcagttactgaggttgtcctttttcagggtatgcgagactaactcaccagcactctgttagctgtggagggaagggaggattctgtctggagctggaactgctcagggagcccctctctggattctgcactgacagctgcagacagaaaccacgtggcacctccgaaaggagaaagctctgaaatcatccaggtagcattctttgacttttcaatccttttcataataaagtatttaaaatgtaca

SEQ ID NO: 221658 - DNA, 419 bp, Homo sapiens
agctgggctatccttgagtacacaccatttcaaggagccaacgtggagtctacgatggaaatttgccccataggaatatgaaagtgctgtggcatagagtattttatagaagttaaatgtctaaccttaatggattgctaacgttggcttagattattgctaatgactacaggattttacagaatgtgataagctttgaaataatgactatattagtaacataagaccatgagagcaactaacagaattataactaaggaaccctgttacaggcaatagaataacgattgacttctatctaaaacatcaccatttatctttgaatatttatcactggggatgattcttagagcattcatcaaaaccacagcttaatatcatcaaattattccatttccacattcttttaaaactgtaac

SEQ ID NO: 221659 - DNA, 454 bp, Homo sapiens
gagtccctttcaagtgagtttgcacacaccatcaagcaacaagcctctcattaattagggttaggaaaccaaggttcaattctcaggaagtcataatttcattcatttactcaatatgaatttacaaaatgcctacatattatcagcttccatgtgcagtcatttctagataaaaaagaaacctggcttctctagaggggccaccaagttcctcctccaagtctatagctgaaaggaccttttttggaattgggtttcttctctacctctgaaagagtaacactttaaagctgaattatctttagcctggaaattaacatatttagcctgtaagtctaacatttagcaatgcttgcatcccagacatacagtagaagatacactaaattctgaaggtagctgtgctgcaaaataatgtaaaagtaaacaattgtacagtatttatgctcaaaat

SEQ ID NO: 221660 - DNA, 404 bp, Homo sapiens
cacgagaatggactaaaagccccaattaaaaagcaacaatgatcggattaggtttataaagctctactgagttacatgttgcctatgagaaacccaatttaggccagatgtggtggctcacacctgtaatttcagcactttgggaggctgaggcagcaggatcacttaaccccaggagtttgagaccagcctgggcaacatggtgaaaccccgtcactacaaaaaaataaaaataaaaaattagccaggcatggtggcagtgcacctgtggtctcagctgcccactactcaggaggctcaggtgggaggatcacttgagcccaggaggttgaggctaccatgaacagtgtttgtgcccctgtaccccagcctgggcaacagagtgagactctgtctcaggacca

SEQ ID NO: 221661 - DNA, 447 bp, Homo sapiens
ccactaaaaatgggaatatcatttattattaaataatggaaaaattttatagggacaatcatattgcaaagagaaactaaagattattttttaaaaatcaatcttacacttaaaaatttgtttataataacaattatgtcctaattcctacaagaaacaaaaatagaattaaggattgactttttgcttttggcatgatccttttgataaaattatatgaaagctcctatgtcagtctttctttcatattccattttcagacttttgaaaagtcttctagaatttcatcaattttcccaaggactttaccttaccctttgatattcgaatccctcatttctaaagtatctgtgttgccatcatcctttttttctttttttcttttcagacggagtctcgctcttttgccaggctggagtgcagtggtccgatctcagctcactgcaa

SEQ ID NO: 221662 - DNA, 408 bp, Homo sapiens
tgttatgggtatcaatgcatagacttcttgtatacttgtgaatggttttgcatgggagccagtgggagggaaggatttgctgggagatgcggtgtgtgcattttaaatttatggatactaagaaattatcctccaaagtggctatactgattacaatcaccccagcagtgtatgaagtatgagggtctttgtttccccagttcttttttttttttttttggtgggaatggcctcttgcttttccctgaccactaatgagttttatcataatttcttaactatacagggcacctgaatctccaattctatgaattgcatatccataccctgagtgtgttttaaaaataagttatttgtttgttttctcatttatttatagcaattttaaaataaatatttcatatatta

SEQ ID NO: 221663 - DNA, 221 bp, Homo sapiens
taattgaatcatgggggtggttaccccatgctggtctcatgacagtgagtgatacctgaaggttttataaggggcttttcccctttcgctcagcacctcctgctgccttgtgaagaaggtgccttgattcttgtttgcattcaccatgattctaagttttctgaagccttcccagccatgctgaactgtgagtcaattaaacctctttcttttataaatta

SEQ ID NO: 221664 - DNA, 507 bp, Homo sapiens
aattgccccatgtgctggcctggccagtccccgagggtccccagtacttgaggccggagaaatccacctcctaagaggcgctcagtctcagcagagtcgtgacgtcattggcctcagtccccgtccccataggcctgggcgctcttggctgtggcaactgtcttagaagaatggtcccccatggccgctgatgtgtgcagtaatgagtgccgcccgccttaatcgtggaacagttaatgaacacacctgggtctccggagcccacatgcacccacacatgctcaggcagcagcttagcccctcttattcacaggtgtgggcacagggaactttcgggaatggggggcccagtgtgttcatgttgctctgatctgccgcctcctcacagaaggcctttgttttggagctttgagtggggacaaaatgttggcatttcactcacattcctcttcattctttgaatcagacataaagtctagacgtccccagaggttaatcttgggaaca

SEQ ID NO: 221665 - DNA, 397 bp, Homo sapiens
gaggatagaactcttaaaaaagtaattaagcttatacgaggtcataagggtatagtccttaatccaacatgactggtgtcctcataagaagaggaagggatgcagcacacaaagaaaatgtcctgtgaggacccagtgggaaggtgtcatctgcaagctgaggaaagaggccaaaggagaaaccaaacttccaacacctgaagtttagacttctatcctccacaactgtgagggataaatgtctgttatttaagccactagtctgtggtattttgttgtggcagccctagtaaactaaggcactctaccttcattaagtcccccacattaaaaaaaaatgcagcaggacatggtgaatcacacctgtaatcctagtactttgggaggttgaatgaat

SEQ ID NO: 221666 - DNA, 599 bp, Homo sapiens
agagaaggagataaagtaaacaacctgaaaaaagtagttgaggcaataattcaagaaaattttcctaatcttgctagacaggtaaacatccagatataagaagttcagagaacatctctgagatacttatacaaaattaatatctccaaggcatatagtcaccagactgtccaaggtcaatggtaaagaaaaaatttcaaaggtagctagagaaaaaggtcagattacatacaaatggagctccatcagactaacagtggagttctcagcagagactgagactactagggcttgtatgctgccttctccaggctgtagagttagtgggaggggacagagaagggcaaggattttaaaactaactattgggtactatgctcagtacctggtgatgggatcactgataccccaaacctcagcatcatgccatatacctaggtaacaaacctgtatatgtaccctctgaatctaaaagttaaaaagcgaacaaacaaacaaaatataacctgataaatggttttctaaagtttcctccagagaggaaacttgcaccagagctctgttatctattctgttattcattattttaaaataaaagc

SEQ ID NO: 221667 - DNA, 443 bp, Homo sapiens
caagagagaggtgacatctagggagagacgggaaaaccacagtgtgggggtaggactgtggacctcaggtttgaaatccttagacccagaaggaaatgttctgggtccgttggttcaagtgccaattgcgggttcagaacacggagctctggactgatgagctccttgtccaagtgcatcctgcccaccagtgaccagtctaaaataaaggcctggtcacgaacactctggcctctctcagttttactctctgctgccttcaggagctaagcttttgccagatgaagctggaaacttccatccattagtaacaacttctcttccccggaactctagcaactcaactggaaacatgcaccagggaagagagtaggtctggaagaaggactgttctttattaggcccacactgaaattaaaaaagttttattcacatctctcatt

SEQ ID NO: 221668 - DNA, 509 bp, Homo sapiens
gcacgagaaagcattgcaggtgtgaaggtgtgaagagcacttgggcacatgggtggaactgacagctgattgattgatagatagataggagctgatcatgaggaaagctaagctggcaaagcttggatctggtaggtgatgttccttgaaggttctggaacacaagagcaatggggtgaagtcagtcttaaaatcaggctctcctgagcacatgtatgttagcacaaagttggttatctgctttagtgctccaaaagtgatccagataaaacgtacaccgagttttgtcatcttgccatagccagaaacttactaggatgcttcctttggcatggacatagatcgtctcagtctctgctctgcccatgctattacccatgcgctttaatttttcagtcacttcaacacttcctggttgacagtccagagttccagaaaccactgactctccagacaccacctttcactgggtaccacactggtgtgtttttctacttaacaaacacttc

SEQ ID NO: 221669 - DNA, 584 bp, Homo sapiens
gtaattaaagttaaatgaagtcaaagggccaataagtcaaatccaataggaacctattgaattggggctctaacccaataggactagtgtccttataaaaagaggaagagacaccaaagatgtgtgtgtcctgagaaaaggccatgtgaggacacagccagaagacagccatctgcaagccaaagagagaggcctcagaagaaaccaaacctgccgacatcttcatcttggacttccagtctttaaaactgtaaaaaataaatttccattgcttaagccacccagtctgtggtattttttggcagctctacctgccaaatacaactacatattgtacaattctatttatatgaagttttagaacaggtaaggcagatcagtggttgcctgggccctgggataaggagacagatactgactgcaaacggggacaaggaaacctttggggatgatggaaatattctgttttactgtggtggtggctgcatggatatatgtatttgtaaaactcatcaaaatgtacacttaaaattggcacatttatgaaaattatacctcaataaagttgattttaaaagaaaata

SEQ ID NO: 221670 - DNA, 514 bp, Homo sapiens
agtcagcagtgatgtcaaggagatttcctgcattgcctgggagaatagattgtggcctctaaaatatcttttttaactaataagtttttctggttctgtgctgaaggtctcttagtgtattagttagggttctacagagaaacagaagcagccaataggatgtgagagagaaagaataaaatagatccatttatctattaatctgtcactttatctctttatttataggaattggctcttgcaattgtgggagctggcaattccaaaatatgtagagtaggccagcatgctggagactcagggaatagttgataaattcaaaatacacaggctggaaactcaggcagggtttctttgtgacagtcttgaggcagaattgtttcttccttgggaaacctcagtttttgctcttaaggccttcaactgattagatggggcccacccacattatggagtgtaatctgctttctcaaagcctactaatttaaatactaatcatatctaaaaaaatatt

SEQ ID NO: 221671 - DNA, 457 bp, Homo sapiens
aggctgtttgtttcaccagagcattccgggtgctagccttgtgagtgtggcgatctagaaatgcgtcagtaaattggtgtagaaatctctactggctttaatcaggctatataactacaattaaacctctgggggcacgtcacagctttcttaaatggtttttattgcaaatgaaatgagaaatagggctttattttttttttcattcccttctttatctgctgccaaaacagacttatttatggtctgattttgaattttttctacatttttaaaaagttgccttaaagtatcttggtatgtggtaatgtggggctgtgcagtggatctttttcttattctaggcctgtgcctataaaaatcaagattagtaaatagtgactacaaaatagcgacttgctggctattattgaatttagtgaagaaagcagcctcgttgagatggttttgcttatta

SEQ ID NO: 221672 - DNA, 868 bp, Homo sapiens
ttaatttagtaaaaaattacttgcactttaggttttaaaaagtttaacacatttaagatttagagtagctaagagtaatgtccattcatttatcctaagtaccaaataatacgttaattcctttgtccctgactggatcttccaaattctgtctagttctaaaatattgggcttaatatttttatgaagccacaggttatagtgacctcgtgtgctcttcctttctaaggattcagtataatctctgagtcttttgccatcaaattttgaaagttttatgaagtcactttcttgttcctgttgcctagttgtcctggttgttaggagcatgttgacttttgagattaacacctcttatacagaaattaatttcctgaaaaggaagatttattgattcaaaatcattgatttctttagtttttgtttctttttataactggcacatcgtaagtgcttagtgctatatttttatttctaaaaatccaatctgctgtaacatttccccataattttgactccgaattacaaagtattaagatagattatattgtagttcctggctatgtgataatagttactcatttgtatcttttaatgtgtcagtgaagtattaattattgacttaagaagttgagtagaaagatgagagcataacctttggcacttcaaattaccccctagtttgaagtcaggttatgagccaataaatgtttgtatggcactttgtagccataagtgctattgaaaggtaaaataattggagtggctcagaaagctgttttccctgaggccctgagaaaaatctcactaagatatgcttggcttcaaaagatgactcaactatgaattattaaagtaatctttgttt

SEQ ID NO: 221673 - DNA, 454 bp, Homo sapiens
agatttctcccagccaagtataaccaagcctaaccctgcaaatccagatttctaccattatatcttctgttcctttgccaactttttcctgaggtttgcctttatgtgtttttgaagagtcagttttcatttcctaaaatctggaaatcactgagaaggctggattcctgagtactatggggagatagaggaaggaaggaaggcccacttaagctgttgatagtagaaaaattagaggagagaaagagtgaggcatagcggaaaaggaagaggacatttcataacgtatcttgtctcctgacatactttttgagctgttttaatcttttgtctccaattattgttgttgttagatacttccagaaaggtagtctcttctgggcaggacctagtcataaccttgggttgttacttttccttcatttgtttctttacagaggtaggtttgaggggc

SEQ ID NO: 221674 - DNA, 611 bp, Homo sapiens
atctgaaaacctgtgcccaagacatgcgtggctagcaactctagggtagctttttgttttgtcatgttatgtttttaagacagtctcgcttttgcactccagcccgggtgacagagcaagactctgtctcaaaaaaaaataataataaataaagggatctggactttcacagctttttgcgttttgcagcatcatatacagcagtctccaatttgaatggagacatgtgctgtaataagaatagcttcaggccagggcagtggcttacgcctgtaatctcaacattttgggactttgaggtgagcagattgcttgagctgcagaagttcgagaccagtctgggaaacatggcaaaactcttgtctctacagaaaatacaaaaattagccaggtgtagcagcacacacctgtggtcccagctactctggaggctgaggtgggaggactgcttgagcctgggaagtcgaggctgcagtgatccatgactgcatcactgcactccagcctgggcaacaaaatgagaccctgtctcaaaggaatagcttcatttttgttttagcactttgcactacacactttatggttattttctcatttaatctttacagcca

SEQ ID NO: 221675 - DNA, 664 bp, Homo sapiens
tcttcagtctgagaagaatttctgtctttcattgaagttccaaaggcttcttattttgatgactttgcctaaagaagggattctacagccaaatgctttctttttaacataccgaatgagtaaaagtgcaaaataagtacagaactatcaaacagcaacaaatgtgcttctgctgcctaccacagaattttccttgcctcagagttgatgatgaatgcagtcctgctccactttgattccatctggctctggaaggtgtttctgaagatttgtgaacagcatttgaatttgtttgtttttatttatattgtctttttactatgatgtataaatatgtcctgtaatgtcattgatctatatgatgagtgagacaatcaagtgttaaaatggaacttgttgattaggatatttataccatagtttagttttcttaagaaactctgacagacacgatatttaaaatgactaaatttacactttgacataaggctactaaaaggtagaatataccattgagatatgccacttgaaaaaactacttttaaaaaaatggcattactggtgtcatgaagaaaagaaatgcttttatctcaaccctggtttcaaaaatttgtgtaaaaattttcacctcaataaatagtttacttctgtgtagaaaaggaga

SEQ ID NO: 221676 - DNA, 714 bp, Homo sapiens
tcttcagtctgagaagaatttctgtctttcattgaagttccaaaggcttcttattttgatgactttgcctaaagaagggattctacagccaaatgctttctttttaacataccgaatgagtaaaagtgcaaaataagtacagaactatcaaacagcaacaaatgtgcttctgctgcctaccacagaattttccttggtaagaagaaaaccctacattacatttctttttggcttctgtctctgcagcctcagagttgatgatgaatgcagtcctgctccactttgattccatctggctctggaaggtgtttctgaagatttgtgaacagcatttgaatttgtttgtttttatttatattgtctttttactatgatgtataaatatgtcctgtaatgtcattgatctatatgatgagtgagacaatcaagtgttaaaatggaacttgttgattaggatatttataccatagtttagttttcttaagaaactctgacagacacgatatttaaaatgactaaatttacactttgacataaggctactaaaaggtagaatataccattgagatatgccacttgaaaaaactacttttaaaaaaatggcattactggtgtcatgaagaaaagaaatgcttttatctcaaccctggtttcaaaaatttgtgtaaaaattttcacctcaataaatagtttacttctgtgtagaaaaggaga

SEQ ID NO: 221677 - DNA, 556 bp, Homo sapiens
gcagcagatacaaatggtgataaatattcaaagggttgaataacttcctgaatctcatgacttatcctggaacaactttatttccatttgcacccttggtgcagaagcagtggtggagaaaactgctgacgccgtaacatggatcaaggaagtggcactaagctctactagtggtcattgtcatggtcttctttcccaccacaaacttgtggttgaaaaataaaagccatttttacttgagaatgtcttgaatgaaggattaaagactatcattttttttatttacttatttatttatttatttattttaatttttatctatttatttttttgaaacagagtctcactctgtctcctaggctgaagtgcaatggcgtgatctgtgctcactgcaacctctgcctcctgggttcaggtgattctcctgcctcggcctcccgagttgctgggattacaggcatagtggaggctgaggcaggagggtcacttgaggctggaggattgctttgaggccagcctgggcaacatggtgagagctcatctctaaaaaattttt

SEQ ID NO: 221678 - DNA, 362 bp, Homo sapiens
agattctctgaatggttttgtgcttatgatgtattttcaatattgagtaattatcaagatactaatttatagttatatagcattttatagttaacaaaatatttgaaatggcatatttttttcagctgtacaagaaaggtagttctattttccttttatatttgaaataggctcaaagtttgcccagggagcttaggttctttgacttatagagaattcatgatttgtttctaactcttctatttactgtaacttcaaagtggaaaatgaaccatataaatgtgtaatagaattatttctaatatatcaaaataagtaaaaataaaaatataaagcaatggcgattagaaggcagcttgtgt

SEQ ID NO: 221679 - DNA, 454 bp, Homo sapiens
tagagtgaagtatgaactttctggtatttagattgatttagaaagtacattaattatttttaaaaggagttaaaataattgtataaagcatttattgagcatttagggaagttcatgcaaggcagaatatgatttgttcttcatgagagataacagttttgctgtatgtatttctgttaatttgtacgtgtgtatgtgtgtgttccctcataaggggtacggttatgggtgtttatataccccataaagtagcataaaaaatattaacagaaacaaaaataaatgaatgaatggtttaactcactgttttactctatctttacttcttgtccttatctatatataatacttttattaaaacaagtattcttttttaggaaaattaagcagtcagtctgtgactataattatgtgtattcatgacaagttcagattgaaattctgttggtttttg

SEQ ID NO: 221680 - DNA, 328 bp, Homo sapiens
gaaacaccgtaagttcaaggctggcatctatcctgttcaccctgagtcgctagtttgtataatagtgtattatatcatgggcactcgatggctgaaagatgaatgtttgaatagattgagtgataacaagagctaagacttccatagctcttatcctgttccaggtacttcttcaagcactttaaacatcaatttatttcacctttctgataaacacatgaggtaggcactaggatggttcttatttacagattagtaaactaaggcacagagaagcaaaacaatttgtctaaggtcacacagtaataaatgctagaatgacaattca

SEQ ID NO: 221681 - DNA, 481 bp, Homo sapiens
ctgggaggtcctccaacctcccctgacatttctcttgaacttctcaaagttacctgcttggaccccaggggtatgagttccaagggcccgatcagctatgagattataggctgaactcaggcatcagaattgttagagctttatctcagttctgagaaatggttaaaaccacccttgggcagtcacacgtggaatcacttatttcattactatggacattttcttgtaggaacaatacatagtgaaaatccactgggataaccaacataaaactgattttgttttcagtttgatatagcaattgcattttatttgtttgttgtaagtattggtaaactttcttattttttaaaaacagacatctgtaaaattatatacttttttcctataatatcctttaaagctgcttgaaaaatgtttattatgacaatgtataaaactggtatacatggccaataataaattttttctctaggttaaa

SEQ ID NO: 221682 - DNA, 288 bp, Homo sapiens
ggtacatttaatacaccagaaattttttatgatggttaaagataagatcagttactatgatggccaagatcttcaaaacatctttggtaattgtgccaagaataatgaagagacaaaaccagaaatgctttccatggtaattttgttcttctcttttctaaaaagacgacatcagttacttttagagaaaaaaaatcacttctagttttgaaattcttatttaaccgatctccattaccacatttttattgaagtccttcataaaaatatgagatataacgcttttac

SEQ ID NO: 221683 - DNA, 570 bp, Homo sapiens
gtaggagctattcagataaataatagatcattttttagtacaaatatactttatgcataccctctacaccgggttggcatcctgtgtttttaattgctaaattcggcaaccctacctgggagtcctgtatttgtataatccacatttcttttatgaaaaaatgatggagttattcaacgtgcatgcatgtgtgtgtgcgtgcatatatacacacatgcacacaggctcgcattagttaatctttcaggaaagcaagttctagggcaatgctggagttagcactcactcagctctgttctgcatttctgagctgaagaaccttctaccaagtggttacctcatcttctagaaaacccttttttttcctcttcagtatagatgcccgcatcttttcatctcttaacgttatccaactctatattacttattattaactaattcagaaattataatttatttcattagtctgtagtttattgatgggtgtgaaggaggaataatccttatcattttaatgtatatgccagaatgcattctttaggagaactcaagcatcagttgaggaaagcc

SEQ ID NO: 221684 - DNA, 217 bp, Homo sapiens
aactcaaaattaacttttgtatgattttgggaaacaccccaatttttctcatgacaaacagagctaatacctgtctagtagggcaatgggagaataagggtcgccacagccagcacacaggagagctctgttgtcccaggggggagccactcgcaactgtggccacttccatctaaatcgcttaaaaatatgacattaaaaacacagttgttcagtt

SEQ ID NO: 221685 - DNA, 625 bp, Homo sapiens
cttgggaagagctgacttcatggaaccatagagccccttccctcttctaaatactgagagggagcaaggaagctgagttaaagagaaaatcacaaacataaaagcaaacttcggctgtttcctttaagagctagcccacagcctgtcttccctccaccttctggttgtgaaattgtgaaccagggcgccacgcgaagcattctgctgctctgctgtacagatccctggtttagctactggatgagaaagaggacttgagttttgactccagctcttccatgtattagcagtgtgaacttggtttttaggtcaaacctcaggcctgtgaactgccctgatctgagacatcctttattgacaaagagggtcttgaaatgggtgagaggcagaaagacaagaagacaaagttggaagttgcagctgtgttacagattattctaagccttctatccttgctctcttaggtcagtcgagcaaccttacatttttcatctagtatcagaaaacaaacaaaattctcatatatttcttttggattgtacagagatgctgctaaatgcaaacctttctggacacaaacttgccttatttaaacacgaacacacagacattcacatgcccacac

SEQ ID NO: 221686 - DNA, 506 bp, Homo sapiens
cttgggaagagctgacttcatggaaccatagagccccttccctcttctaaatactgagagggagcaaggaagctgagttaaagagaaaatcacaaacataaaagcaaacttcggctgtttcctttaagagctagcccacagcctgtcttccctccaccttctggttgtgaaattgtgaaccagggcgccacgcgaagcattctgctgctctgctgtacagatccctggtttagctactggatgagaaagaggacttgagttttgactccagctcttccatgtattagcagtgtgaacttgggcaagttatctcacctttccgatactgggtttttcttttctttctttcttccttttttttttttccagccaaaaaatggagatttataatggtcacaatgagccctttgggtagttggaaggatgaaatgggatcattcaagtagcatgtttagcacagtgcctggcctggcatctggttggttcaaaaccaatggcaactattg

SEQ ID NO: 221687 - DNA, 354 bp, Homo sapiens
aaaaaaaaaaaaaaaaaaaaaaaattacccaggcgaggtggtacatgcctgtagtcctagctgctcaaaaggctgagatgggaggatcatgtaagcccaggagttcaagactacagtgagctgtgattataccactgcactccaccctgggctacacagcaagagtctttctcaaaaataataaaaagcttcttaagggattctcaagtgtaaccacagttgagcacaactgctctaggccgtttaggttcctgaatttcagtttttccttactcccctagaaaggtttgcaactaaataggtcaaggacggcagtgtaataatagggaagaaacaaaaaaaggaaaagattct

SEQ ID NO: 221688 - DNA, 733 bp, Homo sapiens
gcaatgcgtgctatgggtccttttttctaacacttgcagaagatttcagccccggccacgatgtttgctgtcagcggatggaaaagtcttcctcaattgatggttcataccccattcttctgaagtgctggttatgttcaaaactctgccagaaaaggcagcttttaaagccttaaagcgaactctacaactgatagctcctctgcatgatatcgtggcctaccttgtcagttttgctaagcttggcaattgtccagcatgttttgaatttcctcgaagtcccaaccctttgagaggtgactggggaggaactgagggcattgaagaacatttttggcagctggaaatgttcctgcctaccagtctgtcacagacggcatgtgccatgggctaccagcactgagcaactctctcaggaagagcatttttgcctcacagctcagcctgccccagccactggatccacggagcctccaggcatttgagctgtttccttggagagcatttctggaagatggaggaccattcccagttatgagtaacagcccagataccctagaatataatatgcaggtaggataggtcttctccattgttgcagagagaactgagcgcagactgcaaagatggttgccattgggttcacaggtcagatcctcctactctcacccacgatgaataatgtgtgagataagcagggtgtttgattttgaggctgtaaacccagggtcac

SEQ ID NO: 221689 - DNA, 872 bp, Homo sapiens
gcaatgcgtgctatgggtccttttttctaacacttgcagaagatttcagccccggccacgatgtttgctgtcagcggatggaaaagtcttcctcaattgatggttcataccccattcttctgaagtgctggttatgttcaaaactctgccagaaaaggcagcttttaaagccttaaagcgaactctacaactgatagctcctctgcatgatatcgtggcctaccttgtcagttttgctaagcttggcaattgtccagcatgttttgaatttcctcgaagtcccaaccctttgagaggtgactggggaggaactgagggcattgggtctgagcttcaagagctgcagaacatgattgacagcctccagagcccccaagaccctatccgggtggcccaggcactcctcctccggagggaggttatatttttgcagtttgacgctgcagtaaggcatctcatccgaagaacatttttggcagctggaaatgttcctgcctaccagtctgtcacagacggcatgtgccatgggctaccagcactgagcaactctctcaggaagagcatttttgcctcacagctcagcctgccccagccactggatccacggagcctccaggcatttgagctgtttccttggagagcatttctggaagatggaggaccattcccagttatgagtaacagcccagataccctagaatataatatgcaggtaggataggtcttctccattgttgcagagagaactgagcgcagactgcaaagatggttgccattgggttcacaggtcagatcctcctactctcacccacgatgaataatgtgtgagataagcagggtgtttgattttgaggctgtaaacccagggtcac

SEQ ID NO: 221690 - DNA, 1065 bp, Homo sapiens
tgaatccagcgcctattctaaccagttatccaaacaatatcctaccaggtttccctgcttccagtcccatcgaatatacatgccagagctagagcaatctttctaaacaccactaagcttatgtcattttgctggttaaaatccttcagtgggcagggtgtggtggctcacggctgtaatcccagcactttgggaggccaaggtgggtggattaactgaggtcaggagttcgagaccagtctggccaacatggtgaaaccccgtctctactaaaaatacaaaaaattagccaagtgtggtggcgggtacctacaatcccagctacttgggaggctgaggcaggagaatcgcttgaacccgggaggtggagtttgcagtgaaccctgatcgatccaccgcactccagcctgggcaacaaaagcaaaactccgtctcaaaaaaataaaaataaattaaattaaatccttcaatgacatgcctcaccaccactgaggtaaaattaacatgcaaggcctttagtaactagcctcctgccaattcttcccgtcttcccttctttcttcctttctcctccagcaactttttctcagtcaacaaacgcagaaaaatccagtaactttttaaatcttgttacccttcagcctttgttccttcagttctccgggtctgtaatattccccccattttcgccgggaacattcttgctaatcttttaggaatctgctcaggaaccatctatttgagaaaacattcttaccccgccccgctgccgttacttttaccgaatgaccacactgaattatattatgtgtccccagctacctctgtgaaggaagcaaacatatttcagagagtagccccagcgcctgagaagtcaggcacaggcaaacacggaaacgtgatgagcaactgagtggagctcttcctccattcgccatcaccctcctccgccctcctctccatccagcagacctagcgagactctagcgtggtccacgagccccttccacccacttccgccaactctttctcagactcacaaacttccgcaagtctgagcctttt

SEQ ID NO: 221691 - DNA, 461 bp, Homo sapiens
cctgcagagtcccactccttgtttgctgggtgggtaagtgttcattagctaatatttttaacggtttccataaaaaatggattagtgtgctaattttaaccatagcttcacatggcataatgccttagcccaataaaatacataaaattgtatatacagcctgattataacttcattaaaaagcaacaacaaggggtaggatttctagccatggcagagtgaagataaaattatatgcttatattagaaaagaagatcttacatcaatgacctcgtttccaacttaagaaactagaaaaaggagagcaagtgaaacccaaaatgagcagaaggaaggaaataataaagattagaatggaaattgataaaacagagaacaatagataaaatcaatgaaatcaaaactggtactttaagaagattaataaaatagataagtatctagccagtctaaccagaaa

SEQ ID NO: 221692 - DNA, 672 bp, Homo sapiens
agaaaacccaaagtcctttcagtaccttgcaaggccccacactctggctcttgttatctctttggcctcaaatcccactactcctttccttcctcgcgcagctccgctagcctcaaacttgctgtaagtatgtatctttcagggactatatattgacagttccctttgtgtgggcaactcagcttctagatttaagtgttgctgcctcacttctttcaaataacaccctctgtgtgaggctggttgtgaccccactggcattacaatcctgctcccttcctcacggccttcccactatatttttccctgctcctaaggatcctgcagtctatttggagagtgaaaacatatccttatgaaaaggaaagcaggaatggaatattatatggaatgtcagatgagtgtaattcaagtcagtatcagaagtgatagttcctggcttggtgccagatgttggaggcctgttgggccaatgacaggaatgtagactttattctggacagcagagaaccatacaaaatctcccctccctgctttggttctgattatgtcacaattctagcatctttcatgaaactagtttttgcactgagcatattagactcaaattatgtgtttatcttaataagtgcctagatgaatataaataaaatgaatataaatctaaattta

SEQ ID NO: 221693 - DNA, 415 bp, Homo sapiens
agggtgaactttatgatatgtgaatcatatcttaaaagaaacgtagtaaaaattaaagcaatgctgctgaaaactcttattaaatctgtgaaggtaaatgaaggaaccatctcacagttcaagtacaaaataacaagaaagagagattgttaatgaagagatatgacagatttggtagttctagtatttgattgataggagacctagaagcagagagagagctggaaagaggagtagcagcaagccagaagcaacagaagaattctttccagagggaagaatggacttaagactcaagaatattccagctgccaggcatctccttatgagactaacaaattctaaggagaaagaaaatctttttctagataaataacaaacatcaaatctaccataaggacaactagaaaaagtg

SEQ ID NO: 221694 - DNA, 368 bp, Homo sapiens
gcacgagcccttctcctggcttttcaggtcccagcttcccttgactgtgactcccaaaagaatagagagactttgctatcctggctgcagtgccaaaattatagagaccaagcggaaacctcccccttgccctctgaagtttcactgaaaaatcaactttctttataaggaaagggagaaaggagagtcggggaatgtagacaattcttttgagggacagtaaataattattagggagaatgaattcctctcctccctaccatttattaaggtataattgatgattaaaaattgtatgtgtttacactgtgtatgatgttttgatatatatatacattatgaaattaataaagcaagctagttaacat

SEQ ID NO: 221695 - DNA, 580 bp, Homo sapiens
gtaatagcttatttatttcattactctttcttcataccatgctgacatggctacttgtcatactttcaaaaatgctattctattaaaaaaataaacatcatggaagtcttccactgaaaacataccaattattaaaacttatctaaagaattcagttcaaatttcttagctattcgatgtacctcctttgtctgcaaataagcccagaaatcatgtccaagctcaagaagtacctcctccacattcacaccttttccctcatattagaaaataatctctcactcttctaaacttcttagaatttatttttacctttctcattatgcctttacttacaatttgttttgtaattatttaaacatattttctatgtacattagtcataatattgagcacctttaaggactgtacctttattctttttatgtactcaataatttgttgaatgaataaatcagtgtttaattttgcatttgggatataagtatgtaggcttagaaacatttctctgagagcaaaatgattgatatacatgataagtagaaaattatggacacaaagactagttgggaggtttctg

SEQ ID NO: 221696 - DNA, 394 bp, Homo sapiens
tttaagaaaaagattctggaagaggaaataaactatctcaaagaattagaagtgtatttattaatgaaaaatgttgaatattgaatttcttcagttccgataaagcactaacagcactgttcctactataaaaactatggaaatacatgttacttttccattgcaaattacaagcatatcagtgatacctagaataatttctagtgactttagattagaaaaagaaatgtaaaaatatgtccttcagaaattttttcatttaattagtatgtttataggacacctaaaatatatcaagtggtgctttgggtatgtagcaagagtacaacaataaatgagatcaacacagttcccaaacaataaaacacatcatggtgataaagtgatgcaaata

SEQ ID NO: 221697 - DNA, 493 bp, Homo sapiens
gcagtgtagagcatggattaggggggtatgaaatagatattagtgagtgattttataacattcattgaaaagtcgttgagctaaaaatgtggctaagaggtttggagagaggtccataggaagtagaccttgattgaatgagaggaatgaagagggggatggggaaagagtgaaatgcaggtggagatatttcagagtctagagtttaaggggagagacctgaaatcttagagatttagatttttagatctaggtaacattgtagtataaagggtagttaaagcattaggtttaggtgcgataaaaagaggaaaacaaaagaccaatctataaaaataaataaataggttaaaaaagagtttgaagaaaccatcagagaaaccaagattgaaggttaatttcaagaaggaaggaaaggacaacgatgttaaatgctataaagtgatcctgtataaattgaagattgaaaaacacctgttatacttcgaaattg

SEQ ID NO: 221698 - DNA, 137 bp, Homo sapiens
aagtcaagtcttcggctattcaggaatacaaaatgtccatcaaattgttataattaacttttataaagaagcattcataatgttctttaggattagtagctcttgccaggcagtggctcacgcctgcaatcccagca

SEQ ID NO: 221699 - DNA, 533 bp, Homo sapiens
ttctgctgtcagtcacttaaaaataaaaactgcaaagttactgaaaaggcatctaagttacttttttttctggcctgtcactttagaccgtgtgtgaatttcatacatcagttttgattaccctcagtgctgaacaagaggttctattgtaatccatgatgagggtcttaatattatcccctcctccgaaactttataaaatgctccccaacataccctcatatatatttacgtggtaattggcatggggttatgcaaaatcagtgggaactgccttacttacaattaagcgtcacacaaagtaaaaaattaaaattaaagtgctgggcgtggctgctcacgcccgtaatcccagcactttgggagaccgagatgggaggatcccttgggccaaggagttggaggccagcctgggcatcacagggagacaccatctctacaaaaaaaaaattaaaaatttgccagtgttggtgtcgtgcgctttgtagttccagatagttgggaagatgaagcaggaggaccacctgagcctg

SEQ ID NO: 221700 - DNA, 635 bp, Homo sapiens
tgcacacacacacatctacacacacatacattcctccacacacacaattgaaccccagatcatttattcagccttgacctctctgcttcctagcgtttgcaacatctttaacttctctcctgttccagcttcctcatgctctaacccacctactaccatcataatttttattatgtagaactccaattctaattatattatttgcattaaaaccttcaataattctccattgcttctaaaattaagtgaattccggagtccaattgattcaggagtccgaaatcctcagtgatacacgttttcatcatacgttccagtggttctaaacagagagtgatactgtcgctctctctcttctcagatgcatcctaggctttttgaactgtgggaggcttttttgtttgtttgtttgtttgtttttgtattcccaaggactaaagagatgctattaccatttagtgagctgggaccagaatgttgaggtttctccaatgttttgggcaatctcaaaaaacaaaaaattatcttacacaaaatgacaatagcattcttggagaggaaaactacagacaaactagaagttccactagttcccataaacaccccatgtttatcctaccatcaacctatcactg

SEQ ID NO: 221701 - DNA, 317 bp, Homo sapiens
tgggttagaactgacgttttttggtataaggatattcaaatgggcggaagtccttcaaagcagtgattctcaaatttgagtgaacatcacagtctcctggagtacttgctaaaacacagacttctgggccctaccctcagagtttatgatttggtaaatttgtgacactagcctgagaatttgtatttctcacaagttaccagataataccaaggctgttgatttgggcaccacactttgagaaccgttcttaaggatattccgaagccaagagcaagtaaacatcctctgtggcaaagcttggagaatgaaaaaca

SEQ ID NO: 221702 - DNA, 436 bp, Homo sapiens
ttataaaacaattattattagaccaaataaatgaggtagacagcaacaaaataatagtgggggaccccaatactccactgacagcactagacaggtcaagacagaaagtcaacaaggaaacaatggactaaaactataccctagaacaaatggacttaacagatatttacagaacattctacccaacaattggagaatgtacattctatttatcagcacataaaatattctccaagatagaccatatgataggccacaaaacaagtcccaaaaaatttaagaaaattgaaattatatcaactactctcttagaccacagtggaataaattggaaattaactccaaaaggaaccctcaaaaccatgcaaatacatggaaattaaataatctgctcctgaatgatcattggtaatcaatatggaaatttaaaaattct

SEQ ID NO: 221703 - DNA, 386 bp, Homo sapiens
gagatggagtcttgctcttttgcccaggctggagtgcagtggtgcgatctcagctcactgcctcctgggttcaagctgttctcctgcctcagcctcctggataactgggattacaggcacacaccaccacacccgactaatttttgtatatttagcggagatggggttttatcatgttggccaggctggtctcgaactcctgacctcaagtgattcacccacctcagcctcccaaagtgctgggattacaagtgtgagccactgcacctggccagtgtcactagttcattcttactgctgtgtagtatttctttgtgaatgtaccataatgtattcattctcctgatgatggatagattgcttccattgtttgatcattgtgaata

SEQ ID NO: 221704 - DNA, 462 bp, Homo sapiens
atccgctgtctctttcgtcctcgctcagattccccttctctgtgaagcctttctgaccatcctcattaaaatcaaataaccccacccctccactctcttgcccattttcctcatccatttccccctaggactaatcactctctaacattctctatatatttttctgatatatttgtttatatgtcttgcataaacaaaatgatttggtttatggtctatctcttcttgctagaatgtgagctctacaagggtagggatgcttattttgtcaccgttgtgtccctgactcctaaaatgctgacggtgtggccagctgcatgccctgctgtctctattttgaaactctaacaaaattttggacaagaccctcctctttcattttatgctggacctggaaaattacagagcaggttctgacttccaggcacatggtacgcattcaataaataatctcttgaatga

SEQ ID NO: 221705 - DNA, 337 bp, Homo sapiens
gtgtcctcacctgtcctgagactagccagctgactgttgcccagagctagcaggcatagccagctgaaattctgaaagtggattatgcatggagtaatgctgttctcaggaaatcagtgatttattttataatctaaaatttaaacgttttaatatacctcccaagaagatacccagttcagaaaactgcagaggagccatggaactcagcagaaggccagctccctctctgggaggccgccttcaggaaaccaatcgtccccccacctgattccaaaggaattacagaaaaatggaaagccaggaacaaaaatcataaatcatattttcaatatga

SEQ ID NO: 221706 - DNA, 403 bp, Homo sapiens
gatattcaaaaaaaaaaaaaaaaaaaaacaacagaaaaaacagcccatgtgtggtttttctgagaatgctacacggctttcatatgtgcattttgaccctaatttcacttacaactttctcataagatactgttaggagtgaaaagccacaattagctctaggccaagagtgaataatttcaacagcctctctaagatggtttatatttttggagccatatatgggtgaaagtaacgatttccacaggaggacaaacaaaaggagatttttgcacacaacagggaaaagaaaaaggtttaaactttcacatgtgaaaaagttcaaattcccaagccttgctgaacacaaccccaggtagttttaaaatttgctttcaataaaaatttatttgaaatgaaatgc

SEQ ID NO: 221707 - DNA, 523 bp, Homo sapiens
acataagggtttctccacattcttgccaacacttgttattttctgtttatctttttatttttttaaacatgctcctctttctatgcaaatgctgagaagaagtggggctaagcttgctctgttcttaatatcacagaggcctgatgacctattggttaggttataccttttgcacatctccctccggagcacgacccagaagacacaaggcctgaacactaaaagaaaaaccactgtagacctttgttggaaggagcccttctcccaacagtcaaaaatgtccaacaacactcaagtacctttcttgcaattattctttcttttcttggtccaggaacacttgcactatatgatcattttgtaacatgtggaaataactaacatctgcctagatctttacaatttacagagagatttatagctgttatctcctttgaccctcatgataatatattacattcactttggagtatagaaattgaaactctgagttaactttatcatcagaactctataaatagga

SEQ ID NO: 221708 - DNA, 608 bp, Homo sapiens
atgaaaatgtgggcttcttttaaggaaaaattccctttgaacattgacagaagtgggcatagggaaggggaagattttgcctggattctccacttaactcttgtcaccactggagcatcctgactccctagacacaagtgatggaagttattttgtttccactctaaacactgtctcagggggacattgatgggatggtggagggtgtgtttcattgtgacaacagcatctttggtggggaatttgctgttggtgaaaacccagtgctttctctgagcatgggtgattgataagggcctgacatgctccttcatttggaaaatggtattaatagaattggtttcccagtgaatagtgccttttacccaagactcataaccaaatattttcacaaagatgttatatccccatgcatgagcattcattttgagatgttcattataatagagtttaagtatgaatgtgttttaaaaatgattttaaaatcatctgcaaaaaaatgttgtgtttcaaatggacagtgtctgggttttgtatagtcatcataaaaatgtctataattgtactgtttgctaataaacctacctgctttcagaaaatcatcctaa

SEQ ID NO: 221709 - DNA, 519 bp, Homo sapiens
ggcaatgaaaactaagcatggtgtctatctttaaagagcttactggtccttatactgttatttgttctgtataatgatttaagatatgctgtagcttttttagtgcttaatctttctatcagtgacatttaatgttcctcaggcatttctcacggtgcataactcaaggagtttcacttgatactagcctttaattatgtattaataaaacctgtataaaagtaccattatactttaccactgagaaaatccataagttcagaaatctaagttttaatgcacttatctcttcaatcccttggatttttttccccaagcactccatgcctcaaatgtgccaaggtatgatttttttttccctttcttattgctgttggagaaataggcaactaataaaaacagaccttttactctgctcttgtaaataccttagactttggcagtttgccttagactggtttttctctcactttactatatgggtgtaaacttcctccctgtacagtgtgttatttcctg

SEQ ID NO: 221710 - DNA, 514 bp, Homo sapiens
gggtgatttgacccggcaggggacgtttgtcgaagtctggagacatttttggttttcactactgggggctggagtgggaaacgactggcatctagtgggtataggccagggatgccgctaaacatcctacaatacccaggacaaccctccataacaagaattatccagcccaatatcccaataatgcttaattcgagaaaccctgctgtagctgggcgtgaggggcttattcctgtaatcccagtgacaggaggactgctcgaagccagcagtttaagattagcttgggcacatagaaagatcctgtctttaaaaaatataatatttaaaaattagccaggcagggccgggcgcggtgactcacgcctgtaatcccaaagtgctgagattacaggcatgagcccccgcacccagcaattttatttattttttaggttattattttttgaggcagagttttgctgtgttgccccccacgcctgggcaacaagagtgaaactcaatcacaaaaaaa

SEQ ID NO: 221711 - DNA, 371 bp, Homo sapiens
cccctcccacaccaactctgagtttgtttatggcttgttttggacaataagacattagcaaatgagatataagtacaggcttgagaagtacatgggcactggggcttgcttgctggctgctctgtggaacctgagactaccacgtgaagaagaagttcgaagtgctagaggttgagagaacatgtgcagcaaagatgaagcatcccagctgagattcccctagatcaatcagcttgccaactgccgcaaaagcgaataaagccttccaagagcatccagctataaggtgagccagtccagaccggaagaatcacctgatcaactgaaagatatatgtgaaataataaatgttagaggttttaaattttaag

SEQ ID NO: 221712 - DNA, 418 bp, Homo sapiens
gcatggagagtgaaaaatgagaggctccttcacacagccatcctatactgcaaactgaaggagacaggaaggatagacagaaggaaatactatgaaatgatatgaaagaagccttcagtcagggtttcagatggctgcagcatgcttgtggaacaaaatgggatttgctcatactactggtttagttaatacttactgatggaatgatgaatatgtgaatgaaaacttattaaatgcatgaacgaatgaaggtataaccaggtaaaatacttgaaaaacaaagcaggaagagtcaaattgtgaataagaaaaaataagaaaataattttggaaaaatgaagccatgtagctcaaataagctaacagtactgggctccactcacctaagctagaatagcaaaacaaagggcagtctttg

SEQ ID NO: 221713 - DNA, 564 bp, Homo sapiens
ctttcaatgcttaaaaactattaatatttgatatagtgctcctccatttaccaatctccacaataacgtgatatgagcaaaaataatgctttgtatttatgtagcacatgtctccatggagcccagaggatttggttgacgggatctaaaaatggctttgtcagggagaacagaaatctaatctcgtaattatattgccagtattaaaactgacactgattctatatgtggctactaatgtgaacattatgcagtcaaagtaatacggatggcttcttccagccatctttataatcaatagtaaccatactaagaagtcatactatgttgtattattttactttgccttggaaatgtttaaatattatacacatatacttccttttatttaataactctattgtaaacagtcatgtgctaaataattataattctaaatattttctaaggcaataaaacaaattattacgtgttacaatgtttatctttaaaaacagtcatttttaatgtgaaaaagcaggcactataatgttactgtgttgtgaattgagatgcttttaatgc

SEQ ID NO: 221714 - DNA, 542 bp, Homo sapiens
taatttacttaaattcagtcaactccagtaaggagaatgcttttgaaaatcttcaagaaggaaaaagagtcttgaagtccagcatagagaaaacactggaaaagaatatttagacttcaaaatgcagttgagttcctgggcaaagtaaactataccccagattagtgggagaactctcagatgtggttgcagagctgttgtcagttacattggtcagttatagttatggagatgggaaagtcaagcagaaatgagaaattctgtctgtgtttaaagaaactaaagaatgggccaggccccgtggctcatggctgtcatcccagcactttgggaggccgaggtgggtggatcacttgaggtcgggagttcaagaccatcctggccaacgtggtaagaccctgtctctactaaaaatacaaaaattagccaggcgtggtggcaggtccctataatcccagctactcaggaggctgagatatgagaatcacttgaacccaggaggcagagattgcagtgagcagacatcgtgccacagcactcca

SEQ ID NO: 221715 - DNA, 402 bp, Homo sapiens
taagtttaccaaaactgttttgtttatttctaaagatctttattttcctgtggtttttaatgactaaaagaaagttttaagccgaacacagtagcttgcgcctataatctcagctacttagaagtctgagatgggaggattgcttaaagccaggagttcaagaccagcctgggtaacatagtgagaccctgtctctataaaaataaataataaaaaagaaagttttagatatgttggtgattgttttctaaacatacttaaacttttaaactttgaggggaaattgaccatttctagacttcttatcaagaagttatttaaaatttttcagacaaaaactagatttggagcaaatgttatatgtagttttgcactggcatgtattattaaaacatgaaattg

SEQ ID NO: 221716 - DNA, 519 bp, Homo sapiens
cggtggtgtccttatttctgagacctggactttgcctaggcgggtgctggaggaacagtctcggagtgcaatgttgtcattgttggattcatgggaagctctgcctctctccacttgggctggtgaagtttgcagtggccactaaagacctctcaggccagcccaagcctgctgtgcctgtttctgtgttctctttggcaattgcattctctcttttggacccagcttcttcctacatgctgtggtcatcagagaggtgttttttaaactgcaatattttcctggttggattcatgggaagctctgcctctctccacttgggctggtgaagtttgcagtggccactaatgacctctcaggccagcccaagcctgctgcacctgtttctgtgttctctttggcaattgcattctctctttcggacccagcttcttcctacatgctgtggtcatcagagaggtgttttttaaactaatctcaacagctaaatacaaactcagaaagactctgttggacaaa

SEQ ID NO: 221717 - DNA, 371 bp, Homo sapiens
tgatacattaggtgcattaaatttattttggacttatgatattctcaacttatgatgggttattgggctgttacctcatcatctgccgaggaccatctgtatacattttcttgtgaacagtctggtcagtttcttcttataggagctcaaggcaagtccaaggggctggacaaaaaataggcagaatatggtttcttctgtgctccatccctgctgtagcactctctttcttgctcaatctcccaatcaaaactcctccttccaaatggcatgaacccaggaggcagagcttgcagtgagccgagatcgcaccacaacactccagcctgggcttgggtgacaaagcgagactccatctcaaaaaaaaaaca

SEQ ID NO: 221718 - DNA, 524 bp, Homo sapiens
tttgggatgattcaagcacattacatttattgtgtgttttattttggttattattacattgtaataatgaaataattatacaactcaccataatgtagaatcattgggagccctgaccttgttttcctgcaactagacagtcccatctgggggtgatgggagacagtgacagatcatcagacattagattctgggagtgcacaacctagattcctcatatgtgcaatttacaatagggctcatgttcttacgggaatctaatgctgccactgatctgacaggacgtggagcttaggtggtaatgcgagcgatggggagtggctgtaaaaacagatgaagctttgctagctcacctgctgctcatctcctgctgtgcagcctggttcctaacatgccagggaacatagatcagtacagattggcgacttcggttttagggcctatgttagctggacctaagaatgtttgctttatgatgcgatttcagagtattgaataaatctctctaatttaattgcaatgtc

SEQ ID NO: 221719 - DNA, 464 bp, Homo sapiens
aattaaaaagtggggattggagcatagaagaaagaaaagaaaagaaatttgaaggacagtatgtatagtataacaaacctgcaagttctgcacatgtatctcagaacttaaagtataataatttaaaaaaagaaaaaatgtaaaaaaaagaaattaaaaagagttggagcatagaagaaagaaaagaaatgcaatttgaagggcagtatgtgcagtgtaataaacctgcaagttctgcacatgtatctcagaacttaaagtataataatttaaaaaaagaaaaaatgtaaaaaaaagaaattaaaaagagttggagcatagaagaaagaaaagaaatgcaatttgaagggcagtttgttacactgcacatactgcacatgtatctcagaacttaaagtataataatttaaaaaaagaaaaaatgtaaaaaaaagaaattaaaaagagttggagcatagaaaaaa

SEQ ID NO: 221720 - DNA, 812 bp, Homo sapiens
aaaccaccatggcacgtttatacctatataacaaacctgcaagttctgcacatgtatctcagaacttaaagtataataatttaaaaaaagaaaaaatgtaaaaaaaagaaattaaaaagagttggagcatagaagaaagaaaagaaatgcaatttgaagggcagtatgtgcagtgtaatctcatttgtggaaacaatttttaaaagaaaaatgcatgtaaatgtataggaaacttctggaaagatacacaaagccaagagctgtatgggaagaaggtaaaagaaccatagggaagagttaccttttacttttcacataactttctttccctttttaaaataataagcatgttttatttttataatttaatgaacagatgtgttgatttgaaaaacacactgatcctgaaagttaaaattccaattcagagaaaattgatttctatgaaaagtatcaatcccccaacaatgtcatcaaaatgaagtagatagcatgagaaaaaatacttaatgtagaggatgggttgatgggtgtggcaaaccaccatggctcatttatacctatataacaaacctgcaagttctgcacatgtatctcagaacttaaagtataataatttaaaaaaagaaaaaatgtaaaaaaaagaaattaaaaagagttggagcatagaagaaagaaaagaaatgcaatttgaagggcagtttgttacactgcacatactgcacatgtatctcagaacttaaagtataataatttaaaaaaagaaaaaatgtaaaaaaaagaaattaaaaagagttggagcatagaaaaaa

SEQ ID NO: 221721 - DNA, 580 bp, Homo sapiens
tgaattcctgaagctgaggttttctcactggcacaaatctaccctgaaggcacaggtggtcctttttcagatgccacccaggaaagcagagagtgtgacatcagaactctaataaaacctcttctggtcgggggcagggagcagagatgaaagcacttttgaattttccagtagggaaaaaggtttgttccttaattagaggtagtctgggaaatgctagcacttgtgcaggtgccccaggagagttggaaaagcttagttctgtggtcactgtgataccatagtccccctgccttgggtagctaacgtagcataccagctggcgttaggaaaactagctaaagctcacagagaggctctgccaaagtgatcgatctttctctgtaatgtctgtaactcatttggcctgctccaggttactacttgattctcttcagcagttaagagttgcattctgaaacactttcagagagtagtgctagtgttgatttctggatctaattctggaaataccagctgtaaaattatattggaatttacatttaagaaaaagtcagaccccagtcaattctgtccagga

SEQ ID NO: 221722 - DNA, 806 bp, Homo sapiens
  misc_feature (665)..(665): n is a, c, g, or t
ggggttcgggtgcgaggccggtcctgcaggcggcagccagagctgcgcgccgcggcggcggaagatggctgcggccgaggtggcggacactcagctgatgcttggagtcgggctgatcgtgaccatctttccaccgtagaaaaggacacaaatggagaagttctgtgggtgtggtgttatccttccacgacagccacattaaggaacctgctgctgagaaaatgctgccttacagatgaaaacaaacttctccatccctttgtctttggtcagtacagaagaacatggttttatatcacaacaattgaagttccagattcttccattttgaaagactcatttttctattgtcctgaccgccaaagattttaacccagagaagtatgctgccttcactaggatattgtgtagaatgtacctgaaacatgggagcccagttaaaatgatggagagttatattgcagttctcacaaaggggatatgccagagtgaagaaaacggctctttccttagtaaggattttgatgcccgaaaggcctacctggctggctccatcaaagacattgtatctcagtttggaatggaaactgttatcttacacacagcactgatgctggactctgcctgccctggtgtggcaccgacaggactggaccatccttcantcttacgtgcacctcaacgccgatgagctggaagccctgcagatgtgcacaggttacgtcgctggatttgtagacttggaggtgaccagaccgaccttatgatgtgtttgggatctggcaggagtgagattacttgctccc

SEQ ID NO: 221723 - DNA, 784 bp, Homo sapiens
  misc_feature (643)..(643): n is a, c, g, or t
ggggttcgggtgcgaggccggtcctgcaggcggcagccagagctgcgcgccgcggcggcggaagatggctgcggccgaggtggcggacactcagctgatgcttggagtcgggctgatcgtgaccatctttccaccgtagaaaaggacacaaatggagaagttctgtgggtgtggtgttatccttccacgacagccacattaaggaacctgctgctgagaaaatgctgccttacagatgaaaacaaacttctccatccctttgtctttggtcagtacagaagaacatggttttatatcacaacaattgaagttccagattcttccattttgaaaaatgtacctgaaacatgggagcccagttaaaatgatggagagttatattgcagttctcacaaaggggatatgccagagtgaagaaaacggctctttccttagtaaggattttgatgcccgaaaggcctacctggctggctccatcaaagacattgtatctcagtttggaatggaaactgttatcttacacacagcactgatgctaaagaaaagaattgtggtgtatcaccccaagatagaagcggtccaggagttcaccaggactctgcctgccctggtgtggcaccgacaggactggaccatccttcantcttacgtgcacctcaacgccgatgagctggaagccctgcagatgtgcacaggttacgtcgctggatttgtagacttggaggtgaccagaccgaccttatgatgtgtttgggatctggcaggagtgagattacttgctccc

SEQ ID NO: 221724 - DNA, 451 bp, Homo sapiens
tccactaagtgtttctgagtaaccaatcaattcacttccttgctgctgtttgacattctcacagtgaccatctttccaccgtagaaaaggacacaaatggagaagttctgtgggtgtggtgttatccttccacgacagccacattaaggaacctgctgctgagaaaatgctgccttacagatgaaaacaaacttctccatccctttgtctttggtcagtacagaagaacatggttttatatcacaacaattgaagttccagattcttccattttgaaagtttttgcttgtaacctttttctattctacctacaggattgggataaaggcttcattaataacttaaggtgtttctcgccttatcagataagttataaaagtaaatgaaagggcctaatgtaactgtctcttaatcattaagcttactgaactacagtgatgccccactggga

SEQ ID NO: 221725 - DNA, 1250 bp, Homo sapiens
  misc_feature (1109)..(1109): n is a, c, g, or t
ggggttcgggtgcgaggccggtcctgcaggcggcagccagagctgcgcgccgcggcggcggaagatggctgcggccgaggtggcggacactcagctgatgcttggagtcgggctgatcgctctcaccaaggaccgaggggccgtgggaaacgtctgacgcccacttcacggaggagcaaatggaggcccaggccgtcattgtgcacggacacaccataggccgtacagagccgggagtgggaccctcgcagtgtagcccagagcccccaacccccaccagtggagagctcctgcatcatgtgatcgagcttgtgcataaataaagcaggagtttctacacaatcctgtgtggtggaatctcggttagctctgaggaatacggggtctccctcttatccaggctggagtgcagtggcgcaatcaccgctctctgcagcctccgcctcccgggcccaaaccatcctcccgcctcggcctccgagtggctgggacctcaggcgtgcaccaccacccgattaatttttgtattttttgtggagatgggataccgacatgttgtccagtgaccatctttccaccgtagaaaaggacacaaatggagaagttctgtgggtgtggtgttatccttccacgacagccacattaaggaacctgctgctgagaaaatgctgccttacagatgaaaacaaacttctccatccctttgtctttggtcagtacagaagaacatggttttatatcacaacaattgaagttccagattcttccattttgaaagactcatttttctattgtcctgaccgccaaagattttaacccagagaagtatgctgccttcactaggatattgtgtagaatgtacctgaaacatgggagcccagttaaaatgatggagagttatattgcagttctcacaaaggggatatgccagagtgaagaaaacggctctttccttagtaaggattttgatgcccgaaaggcctacctggctggctccatcaaagacattgtatctcagtttggaatggaaactgttatcttacacacagcactgatgctggactctgcctgccctggtgtggcaccgacaggactggaccatccttcantcttacgtgcacctcaacgccgatgagctggaagccctgcagatgtgcacaggttacgtcgctggatttgtagacttggaggtgaccagaccgaccttatgatgtgtttgggatctggcaggagtgagattacttgctccc

SEQ ID NO: 221726 - DNA, 1538 bp, Homo sapiens
  misc_feature (1397)..(1397): n is a, c, g, or t
ggggttcgggtgcgaggccggtcctgcaggcggcagccagagctgcgcgccgcggcggcggaagatggctgcggccgaggtggcggacactcagctgatgcttggagtcgggctgatcgctctcaccaaggaccgaggggccgtgggaaacgtctgacgcccacttcacggaggagcaaatggaggcccaggccgtcattgtgcacggacacaccataggccgtacagagccgggagtgggaccctcgcagtgtagcccagagcccccaacccccaccagtggagagctcctgcatcatgtgatcgagcttgtgcataaataaagcaggagtttctacacaatcctgtgtggtggaatctcggttagctctgaggaatgtaattatcttccataattaaaaaatatcacacggggatctttgggcagcctcgtgcagtatttaggggatggaacccgttggttcccttcgaaaaagttttattttcccgagatttttgcacacccctaaactctttctattccccaagtgcgcaataacattgcttaggctttagcaaaactgaagaaatatgctgattatttttcagtgcctcaaagcagtgcgtttatgtgggaatcgcttactgtttttatttctttgtctttcttcttttttttttttttagacggggtctccctcttatccaggctggagtgcagtggcgcaatcaccgctctctgcagcctccgcctcccgggcccaaaccatcctcccgcctcggcctccgagtggctgggacctcaggcgtgcaccaccacccgattaatttttgtattttttgtggagatgggataccgacatgttgtccagtgaccatctttccaccgtagaaaaggacacaaatggagaagttctgtgggtgtggtgttatccttccacgacagccacattaaggaacctgctgctgagaaaatgctgccttacagatgaaaacaaacttctccatccctttgtctttggtcagtacagaagaacatggttttatatcacaacaattgaagttccagattcttccattttgaaagactcatttttctattgtcctgaccgccaaagattttaacccagagaagtatgctgccttcactaggatattgtgtagaatgtacctgaaacatgggagcccagttaaaatgatggagagttatattgcagttctcacaaaggggatatgccagagtgaagaaaacggctctttccttagtaaggattttgatgcccgaaaggcctacctggctggctccatcaaagacattgtatctcagtttggaatggaaactgttatcttacacacagcactgatgctggactctgcctgccctggtgtggcaccgacaggactggaccatccttcantcttacgtgcacctcaacgccgatgagctggaagccctgcagatgtgcacaggttacgtcgctggatttgtagacttggaggtgaccagaccgaccttatgatgtgtttgggatctggcaggagtgagattacttgctccc

SEQ ID NO: 221727 - DNA, 786 bp, Homo sapiens
  misc_feature (645)..(645): n is a, c, g, or t
ggggttcgggtgcgaggccggtcctgcaggcggcagccagagctgcgcgccgcggcggcggaagatggctgcggccgaggtggcggacactcagctgatgcttggagtcgggctgatcgaaaaggacacaaatggagaagttctgtgggtgtggtgttatccttccacgacagccacattaaggaacctgctgctgagaaaatgctgccttacagatgaaaacaaacttctccatccctttgtctttggtcagtacagaagaacatggttttatatcacaacaattgaagttccagattcttccattttgaaagactcatttttctattgtcctgaccgccaaagattttaacccagagaagtatgctgccttcactaggatattgtgtagaatgtacctgaaacatgggagcccagttaaaatgatggagagttatattgcagttctcacaaaggggatatgccagagtgaagaaaacggctctttccttagtaaggattttgatgcccgaaaggcctacctggctggctccatcaaagacattgtatctcagtttggaatggaaactgttatcttacacacagcactgatgctggactctgcctgccctggtgtggcaccgacaggactggaccatccttcantcttacgtgcacctcaacgccgatgagctggaagccctgcagatgtgcacaggttacgtcgctggatttgtagacttggaggtgaccagaccgaccttatgatgtgtttgggatctggcaggagtgagattacttgctccc

SEQ ID NO: 221728 - DNA, 483 bp, Homo sapiens
gaattcccccaacctctggtaaccatctttctattctctacttttatgagttcaactttttcagattctacatataagtgagttcctatgatatttttcttttcgtgcctagcttatttcacttaacataatatctcctgggttcatccatgttgtcaatttccatttttcaaaaggctgaataatagttcattgtgtttatactgtatgtatttatactttattcatttatccattgatggacatttacattgattccatctcttggatattgtgaacaatgctgcaataaacatggcgtgcagacagcagtatgtgaaatcagacacactgatttcattttcttgctatctatacacagaaggcaaaacattgagccttcagaataaaagtaagataatatactgaataaagaacattatatacaaaagtcagatcactattggatgtataccgaatagtgggattgctggatcatatagt

SEQ ID NO: 221729 - DNA, 411 bp, Homo sapiens
tagtctgacgtaactgctattgttgtacccggatggcctctttctcagtctttaggagtacttgtcttcaggcggactctcttcctccttctgctgtcttgctggcgcaagttgctgccccaagttgcaccttggaactgggcctgagaagagaggagttattcatctccttaagctttcaggccccggggagaatcttacaagcacttcatagctaaataatgctatggtgatttattcatgtgctgacattgtatagcttctttattgtattttttaaaaaactgaattgcatgagaccttagtagttaacgttttatgggaggaagctattgtgtttgtttctattataccaggaaggttgaatcactgaggaacttggtatgatgaattcagttagtaaaaaaaaaa

SEQ ID NO: 221730 - DNA, 396 bp, Homo sapiens
ccgactgttgtttttgcactatctgtgtgtcaacacagtccacaatgctacagtgacttcttaggaatatcttagtatgatgaaaatagttttgatctctcggatcccttagaaaggtcttggagaccctcaggagttcaaggccatactttaagaaccactgttaaagacataatcctaaatgatgaaggatatgcaggtattggggatatttaaaaaggaacaaatacaaggtttctcttaaaattgctcttgaatgcttgtggtagtgtgtgccttgtagttttggctagttttagtaggatgtaataactaagacttggaccaccatggaagaagcaactttctgcctttcaggattttccctgataagaaaatggccagtgccattatgaa

SEQ ID NO: 221731 - DNA, 686 bp, Homo sapiens
cttctgaaaatttggacgacagcaaaatgataaattatgtcgataatgataaatgggcacaacatactcataaagcaggtcatttctaccaaaatatttctagatttcatcaattttcccaagaaccttgatatcctttgaaattcaagttattctttttgagggtctgcttggttttcatcctggtagcatttctgattatctaatctaacctccaaatccctatttatccttagttccactgattcaagcaagcatgcaagttacataatttgaccttgaaattaatttctgttgtcaggtattctccaagaatcaaaagagacacactccataaagccacatattgaataggctggggcaggaagctagaatatttgagtaaggccaaattctttaagagattaattttacattgtgatgaagcttgctcccatgaagcaaccttctaccttgagaggtgtgataatgagaacctctattatctcatgtaaccatttcaagtcttgtcaggtggctggtatctacattttactaaactaagatgaacaaaataatgtatttaccgaagatcatagagaaaatcaacagaagacccatgactgaaaacccaagtttcccaatagctcctactgtatcactatagtgcctccatgatatacatattcatgcaacaatatgcattc

SEQ ID NO: 221732 - DNA, 612 bp, Homo sapiens
taaagcatatttcaatattaaaatgtgcaggaaactgaaaaatcaaagtccctttgtctttgtataaagttgctgacaatttcatttatgagatcagggaagtaataaaaataaaaattttctatcaggaaaaagctcaagacctaccttgtgtgtaccatttaaaaaaaaaatattagatttgtagcaactagttttgggggtgagggctgagggaggagtcataaaattacatataggagactttttaatatttgatgatgttaaatatgatgccaaaaggatagttcaaagattaaggaaaagaacatgaagccgggcacggtggctcacacctgtaatcccagcactttgggaggccgaggcggtcggatcatgaggtcaggagattcagaccatcctggctaacacagtgaaaccctgtctctagtaaaaatacaaaaaattagccgggcgtggtggcaggtgcctgcagtcccagcaacttgggaggctgaggcaggagaatcgcttgaacccaggaggtggaggctgcagtgagccgagacagcaccactgcactccagcctaggcaagaagagcaaaactcagtttcaaaaaaaaaaaaaaaaa

SEQ ID NO: 221733 - DNA, 277 bp, Homo sapiens
tagtttcaacagcttagcaagctgagtccttgagacacagagtggctttatcagaataactccaagtgcgcagaggacgacagagagacaagaggaatgcttctcagacttactggtttcctccaaggatttgcttgactctaattattggaagacctccaggggccaagactgcctgagcttgtcaagggattcctctttctaccagaggacaccaccacccagacactaaatcagatgagagctaacattttcacagcaataaatctctggaaca

SEQ ID NO: 221734 - DNA, 340 bp, Homo sapiens
cattaggtagctaatacatagtcttgcaagagttcgttttttggctgagcattatgttcttgaggttcatctgtgttgatacctgtagttgtagttcatctgttttcattactatgtgcctttcccctgtaagtagtcccccccttatctgcaggggatacagggcccccagaaggtgcctgaaacttcagatagtaccaaaccctgtatgtactatttattttttcctatgtatacatgcctatgagaaagtttagtttgtaaattaggcacactgagagatgaacaataatgaataataaaatagaacaattatagcactatattgtaaaaaaaaatg

SEQ ID NO: 221735 - DNA, 522 bp, Homo sapiens
aaaaaatctacatcaagcttgtcctgtctgtggcctatgggctgcatgtggtccagggtagctttgaatgcagcccaacagaaatttgttaactttcttaaaacatgagattttttttcacaatttttttaaagctcattagctatcgttagtgtattttatgtgtggcccaaggcaattctttttcttccaacgtggcccagggaagccaaaaaattggacacctctgatctacataaaaagtggcagttcagatgtgttattcaagggacaactgtaaatacagaaaggcatatcccatggtgatccattgctgtgggggaaagaggaaggagggagtgtgagaaggacgctttaaataaagtgatctgggaaggcatcagcatagataaatagtagttgtaaaaaattatctacctagtagggactaggtgcagtggctcacacctgtgattccacactttaggagcctgggagtttgagaccagcctgggcaacatggcgagaccttgtttctatgga

SEQ ID NO: 221736 - DNA, 681 bp, Homo sapiens
agacaagatgattaaatgtaataggagatactggaacaacaaaaaagggacattagatgcaatttgaggaaatctgataatggacttttgttgatttatcgatattggttgattaattgcaagaactaataaattgtaataccatactaatgtatgatgctaataatgggggaactgcggtttccaggttatataagaactctgtaatgtcttaaatttgtttgtaaatctaaaccttttaaaatagctaaaaattatagatacaatttctaaatgatttaattaacaaaaccagtttaattcttcagttgaaatgagcaaggttagggatacctgtgtgtttcagtgtaatatctgaaaggaaaagaatagatacataatttatatcacttctctctggacttagggtctcttgtcatatacatgactgggcatccatcagcttcagtggaggaaaggttaggaataatagtgtcagaactaacatgagaattttaggagattactgagtcactcaaaatgtctgggtgacccagctgatgagggccatttcacatgaaaaagattcctgcaacaccttcttttctttagcacatgatcgtttatgaagctcttttacattgttttatctttatagcaatcctcagaatagatcaagctttttttttttttttttttgag

SEQ ID NO: 221737 - DNA, 439 bp, Homo sapiens
tctgcacaggggcagtggagagcgcacggcttctgaggcagcggcctgggatgaacctctagcaattccgctcaccagcagtgtcacctcagataagctacttaaggtctctgggcttcagttttgtcacttgtcaaggaggaagtcgtcctccccctgtgtcatgaagattcaaggagagacacatggactcaccctgaacaacatggacactgagcaaaacctcaatttatggttttaaagatgtcaagaagtattaccttaatatacatgtcacaaaaatccttgtcagactctgttctgatttacttgctatgtaggtcacatagcaagtaaatgcctaaaaagtgcaatttaatgatcctttcgtaaactcctcttcccctgggctggaatgatgttctggagttataaattaaaagaatgctggtaccctaaa

SEQ ID NO: 221738 - DNA, 496 bp, Homo sapiens
ggggctgtcaaggccgtagcatggtgtccctggaagtccaatgtcccggcaacaggagggggcaccagtgatcgacacatttgcatctggaacgtgtgctctggggcctgtctgagtgccgtggatgccctttcccaggtgtgctccaccctctggtctccccactacaaggagctcatctcaggccatggctttgcacagaaccagctggttatttggaagtacccaaccatggccaaggtggctgaactcaaaggtcacacatcccgggtcctgactctgaccatgagcccagatggggccacagtggcatctgcagcagcagatgagaccccgaggctatggcactgttttgagttggaccctgtgtggcggcgggagcgggagaaggccagtgcagccaaaagcagcttcatccaccaaggcatccgctgaagaccaacccctcgcctcagttgttttttatttttctaataaagtcatgtctcccttcaaa

SEQ ID NO: 221739 - DNA, 455 bp, Homo sapiens
caaaaaaatgaattttactgtatataaattaaaacataaatgttaaaaaagtggagacaaactcattttgagagactacagtgtaaaaagggagagagatttactattttatattttaagaattcagaacagttttctgttaagcctcatgtgcatgcctcagtatcaggcaaacacttctgttaactctgccaaggataataggatttagagccaaagggactcctgaaaattattttgtgcaaccccatcatttcataaataagtaaactgaaggctcaagaggctaattgtcttccaaggctctaaatgtagttactcttgctgctttctagattttctctttgtctttgtctttcagcagtttgattataatgtgactcgatgtgactctctgcatttaacctactcggagttcattgagcttcttggatatgcagattattatttattta

SEQ ID NO: 221740 - DNA, 496 bp, Homo sapiens
caggtgttatctgcaaatttaatatacaaaaaaatgacgtggtgaagagagaaagtactgaatataattttaaaatataggcccagagaattaatagtttcctttcattctgctctggttaggctctctgcaggagttttgtgttgaatttggggagccactttttaagagaaactctgacatgcacatctgaagaaggcagtcaagataataagaaaaccaggctgagcacggtggctcccacctgtaatcccagcactttaagaggccaagggaggaggaacacttaagcccgatcaggagtttgagaccagcctgggcaacatagttggatccctgtctctacaaaaatttttttaaaaatcagctgggcattatggcatgtgcctgtagtcccagctactctgaaggttgaggtgggaggattgtttgagcctggaagtttgaggttgcagtgagctctgatgcctgggtgacagagtaagaccctatctta

SEQ ID NO: 221741 - DNA, 520 bp, Homo sapiens
gcattttggtatctcttatcaggcctcctgccatctggttaagaaataattatttttttaaaaaaattcccaatcggtaattatattatccttgcattataattgcccaaataattattggacttacacagagtctttcttcccttccatgaactctgagtccttttctagatgttatatcattaacctattattttatagaaaaggaaagtgaggcctggccgaggttgcccagctattaaatggaatacttgcctaaggtcaatgtcctttttcctaatcactgctctggaatgattggtatttaacaaatagtaacaataccactgtgctgagtgaattcctattggttcctcaaggctccatgccctttcaagtcccagtcctggtttcacatttatccctgcctgaaacactgcctcaattacccctcacacacttagcctggataactcctattcatccatcccagaatagatattatttctttttaataacagctttattgagatataatttg

SEQ ID NO: 221742 - DNA, 397 bp, Homo sapiens
ggtagggtcctgccaggctcccaaaacgccccgtcccagcactcagtcccatggaggcagcacagcctcagggaggccagcgactctgggcctgcgggtgagtccttcagcccctgcacagcccaatccatctgccacccacttggtgaccccaaattgtagtaagacaacacttccagttactcaacagcttctgaaatttaaatctctggaacaatttacagtaataagaccctaggtgcacctgtctactatccttgtcctccctaatgaaatgggctaggcgtggtggctcatgcctgtaatctcccattttgggaggccaaggcaggagaactgcttgagcccaggtgttgggagaccagcctgggtaacatggcgagacctcacatctaat

SEQ ID NO: 221743 - DNA, 371 bp, Homo sapiens
agtcatctaagatctttagcacttagcttctaaaatacacgataaccatagttcttttcctctttggtaaagaaattattattttgggccgggcgcggtggctcacgcctataatcccagcactttgggaggctgaggcaggtggatcacctgaggttaggagttcgaaacgagcctcaccaacatggtgaaaccccatctctactaaaaatacaaaaatttagctggacgttgtggcatctgtctgtaatcccagctactagggagactgaggcaggagaatcgcttgaacccaggaggtggaggttgcaataagccgagatcatgcaattgcactccagcctgggccacaagagtgaaactccatctca

SEQ ID NO: 221744 - DNA, 377 bp, Homo sapiens
tccacagtaataaagaatcgagaaacagatattttttcaatttcttcccattacattttatgtccacatttagatgtatctgggaagatctctaaactgacaccactgtgagaggcccctgggattcacaaatatcatttccatgacactcagaaaacgggggaaaagaggaaaatgtgagcggtgataaattggagctaatctctttctgccacaacctgaaatgatacttggccagatgtacacacctgaattcaggatttacccagagaagcctgcccagaactttgagcacagtaggtcctcaataaacatttcctagggggctaactgaaaggaaaacaatcaaaacaaaacaataaaattaaggtgttgga

SEQ ID NO: 221745 - DNA, 245 bp, Homo sapiens
  misc_feature (224)..(224): n is a, c, g, or t
cgtggtcgcggccgaggtacgttttacaagttcagcactgtgctagcctctgtggggattcccaaagcagaaagtagacgggtgccataggatgcgcagaaggaagcgctggtgtaggtgtggtccaccgatgatgggaaaggaaacggagcttgccttggtgtcattaccaacaggtttgtgatatgtatacatttctggatgcagtatggttaaacaggggncatttaaaagagcccccaccg

SEQ ID NO: 221746 - DNA, 435 bp, Homo sapiens
cactgtgcccggctgcctttttattttgcttaggagagtttccagtcctcattgagagagtgcgtatgtatgtaatttcttcttttttttcctaagggatgaggttttaccttgttgctcaggcttatcttgaactcaggcttatgagctcaggcaatctgtccactacggcctctcaacgtgctggattacaggcacgagccaccacacggagccagtgtaatttctttagagttacaaattacaaagtaaaaatatttatgatcaaaatacttactcttgttgcatttaatttcagaaagaaactctctaatattaaagaactaaatcccagtactttgggaagccaaggcaggcagatcacttgaggccaggaattcgagaccaggctggccaacatggcaaaaacccatctgtactaaaaatacaaaaatc

SEQ ID NO: 221747 - DNA, 352 bp, Homo sapiens
gagatggagtctcgctctgtcacccaggctggagtacagtggcgtgatcttggcttactccaacctccagctcttgggttcaagcgattctccttcctcagcttcccaagtagctagaattagaggagtgcctggctaatttttgtatttttagtagagatgggttttcatcatgttggccaggctggtctcgaactcctgacctcaagtgatccccccaccttggcctcccaaagttctaggattacaggcatgagccaccgagccaccgagcctggccagatcagcaaagttctgtgatgcaaaagcctgggcaagtaatgcccttgtctgtcttccctgctgtctccag

SEQ ID NO: 221748 - DNA, 418 bp, Homo sapiens
cactggccaggaggagccaacacaaggtcctgggcatctccgtcccgggaaggtgggtaatgcccctgtcgctctgggctccagggcgcgcccccgcagcttccccagcggggtctgacgcctccgggccgaggtgcgccaggtggcgagggtgccaggcgcggccaagtcgcggcggtctgagtcagtcacccaactatgctgcggaaccagggaggccggctgggccgcccccgccgttgagctccggcttcccccgcgcggggcgcctgctccccgcccccgcgggcggagaggaagcggcggccgaggcgaggcgcgggagcacctgagcaaggcgcgggcgccgggctcggcgtttccggagctgagcgcgggtccgcggcccgcgctccccgcctccaggtgcggcggccgc

SEQ ID NO: 221749 - DNA, 420 bp, Homo sapiens
gctgagcaataattcattgtatggacatacagcagtttgtttattcattcatctgatgatggatatttgggctgttttccacttttttggaagctgctatgaacactcacatttaagtctttgtggacatatgtttgcatttttttaagataaatgcctagaagtgaaatcttagatcctgttgtaagtgaatgttttacttgataaataaaagactgccagtttggtgcagtggctcatgcctgtaatcccagcactttgggaggccaaagcaggcagactgcttgagtccaggagtttgagaccagcttggacaacatggtgaaaccccatctctacaaaaaatacaaaaattagttgggtgtggtggcccaggcctgtagtcccagctactcgggaagctgaggtggtaggatcatc

SEQ ID NO: 221750 - DNA, 429 bp, Homo sapiens
tcctggaggaggccacctgtttagcacaccctgctggagagatgaggtccctcaccacttagaactggagttgaggctaataggtttgtatacattcagaccagctcaaaagacaaagaccacggaaccaagccactgaagacctgtgccacaattcctttagccagtatattgaaaatgcaatgagctgtcgacattctcgccccttcccgtcccttcactttatttcctgtgtaaactataatatactctcagcttgacgttggggaagtggctcactctaaacctgtttcctcatctgtaaaatggggataacaagaaaacctttgtcaaagggcagagaaggcatgagaggacatgtgtaaagcattgaatttgatgcctagaacatacaaatgttcaataaatgttagcgactattatgctaga

SEQ ID NO: 221751 - DNA, 428 bp, Homo sapiens
tttttcctactgctgacttgaatattcagctttctgcagtctaagtcatttgctatttccagttcccaaattttgttgctctcatttctaccttatctaaaatgatactcccaattcaatattgtctctcataataccctgtatgttctttccacaacaatcatcatctttaattattttcctttattatttatctctgccactagaccattagctatctgagggaagactggttcttatttatttttcatgcctatcacagcaatgaactatggcacagagactaggaatatagggtcaggagtctgggttcaaatcccagctctcccacttagttacatacatacccttggataaaaaatctctctgtgagtctcatttttcatcagcaacagtgggataatagtaaacgtttctcctagagcttt

SEQ ID NO: 221752 - DNA, 474 bp, Homo sapiens
accacctctgtgctgttcactgttgggtccctgggaacacaggcgagctcaatacctgtttggtgaaggaaggctcaaaggaaggagtggttgaagagggttaatcgtcatctctctggctttaggtgccctgcagccttggcaagggcattccacttcctgacctgtgttcattcaagcagccaccctgggaggtgcgctgggtggggacagttcttcctgttaagaacgcaagtggtggagggggcctttgtcaaggtcagagacaagcaccctgtgagccagaggccaaccagtccccaaggtcagctgcctgccaggccattctaaaagcaccagttcttccaggaagctgtccccagccttcccaaccgggaattaacctctgggcctcagttttctcatctgtgaaatggagatgtgaaaagtgagcgagccttgatgacagtcataataaagatggttaatatcgac

SEQ ID NO: 221753 - DNA, 571 bp, Homo sapiens
agctatgtgtgtgtgtgagtgatttattagctacaggtaatgcttacttcacagagtctgaaaatgatgtaagatgatgtcacacagtggttgatgagatcacacttgaactgcctaactcacaggcttgtgatcaagtttcattcaatttgattaaaagaaaattaagcgtatcaagggtgtaaaggctacaatggtgaacaagtttttgggttcagtccatggaggcttgaacagtgcttggcacccaattagtgccccataactatttgttgaatgaaagactaatgtgtgaagtgtgtttctctgtgagttattcttgttcagtaggtgttcagtaagggcttgctggttcttctaattgcctgtgggtttctgctgcaaatcacccatctctagctacatgggttcttgttctgtcaacataggtccacaccctgtggaataagtgaggcagaggtgtcattttaagcctcagtggggaaactggtatcagatgggttgctggtaaaaccatgtaaagcaaaaaaaagtcgacgcggccgcgaatttagtagtagtaggcggccgc

SEQ ID NO: 221754 - DNA, 298 bp, Homo sapiens
tgtgtgcctcttagatgtactgagaacatgtttaaggatgcaaactttttataccatgtatgccttatccactagccaaggacctggtgtggcattgaagtaaagatatgacaacttgttccaatgttggggaaaaaaaaactggctcatatggctcagtgggagatggtgtagaaatgtgattcctttcttaggaattttaaagtgactttttaaactctctactttgggagttttcaaacatacacacattgagaaaatagtatactgaaccccccatctaccgaccttaatgata

SEQ ID NO: 221755 - DNA, 484 bp, Homo sapiens
gagggtgaggcgtaacagggagaccgggtgtcgggagaaccagaggagaggagactggaaagaagcggggaagtgtgcctggggcagcttccgaaggggaacggcggggacagatgaggggggcgcgattgcaaccagagcgcccgcgagctcccggatttcttctctttcctcgctatttcccgcacacacagccctgcagccctcccttcttccttcctggcttgtgattagaacgcagccgcaggcggaagtgcagtgacgccatcagccgtcgcctgagccgtggcgcgcgggtggccgaaaggcgaaagtgagatttcaagggccgggtctggggccccgcgggcgcgcagtgctgcggcgtgtggggagtacggggaggctggagaggagccggccccgggcagtgtgaggtgcggaagcgcggtccagacactttgctgacgggaggccggtccgccagatccgggaggtggggcct

SEQ ID NO: 221756 - DNA, 470 bp, Homo sapiens
caaagcccaccttgatttaagggaggggacatagaccccaccccttgatgggctgttatgttagatactttgtggccattttgaaacttccacactttaaaaattttgttttggcattttttttttgttaacaaaattatgccagttgtatgtggctaagtatttacacaatttttatgaagtggagggatatagagaatgataagcagaccttccccttcactgctccaccaaacctcagcccctttccagaagtaacccctcaactctctgatcggtattgttctggacttactggtgtgtgtatttgcatggtgttttatcagatgacattgccatcttttacttattttaagatgaaagggattgtgctttataaggatttccatggcttaaggacatgttgggccatctctccatctcaggccgtctgcatgaaccccttcctgtctggcctctgcagcatattt

SEQ ID NO: 221757 - DNA, 499 bp, Homo sapiens
aataatgttgctaataatactcatgtttgtcttatgttatttactaattctaggatgaaaagccagaatacaagcagtgaccaccacacctgacagacctcttgctgcacatatctgtactctccaattaacaaaacctgatgctaaaaacagaaaagaggggagatgtaggagattggtcagggtggtgggaaaaattgtagaaagatgaaaccttggaaggctggaaggttttacaaaagcttcagaataggatttggctgaaggcagccagattctcttatcctgtgccttaaagcttaagttagataacaaggggatataaagaaactgatctaggtaagttagtttacttaggccttggaacctggcctttaatcatctgcaggactgctctccagggagggcgactatgttaattatccacaagtgtgttaactcaaagcctttgttattaaatttatactgaataaatgcctgcagtgccagcatgtcaggg

SEQ ID NO: 221758 - DNA, 483 bp, Homo sapiens
agaggcatcagaatgaaatcaaccctgctgacaccacgaacttggacttccagcctccagaactgtgggaaaatacatttctgttgtttaagccacctagtctgtggtattttgttatggcatccctagaaaactaaaacagaggctaactcacctggaatggccaaggacaatctgctggcttaggcctgtctccatctcagttccctggggcaggggcaaagccatatctgaaattttctttttcctcccatatggttcttacagcctcaagaggcctcttggcctttccttccttaaagaagtgaccccagcctctctgcctcccagatgagacagtctggagcctggatcctctccttaaagcaaaatatctagttcatcatttattatctttttaatctatttgtttatggatgggctttgagctccccttcttctgggccccttttttttttttacgtcaaaagctgaaaactggct

SEQ ID NO: 221759 - DNA, 259 bp, Homo sapiens
gcgaaactgtctcaaaaaaaaaaaaaaaaaaaaaagtaaaatatgttatataaacttgctaaatgtaacacacacacacataaaacgttaggggtaccctctccgaaaccgtatttctggaaaagtgtgacgctacagtctgtcactgatataaaatcccagacaaagaccaactaaagaaaatccccaccaaagaaaatacatttttggtttctttaagggagtcagttccggactgtggaagttcttctggggataa

SEQ ID NO: 221760 - DNA, 430 bp, Homo sapiens
ctatagatttctggcttgggcggctgggtagatgttggtaaccagattgagagaatagaggaaatgggacaggtagagtacagaagagaagaaagatgcattttactacagatacaagtttgaagtaccaggaaacatccaaagggagatacctagtaggcactcagatatatggaactggagctaagcagataagatatattttgttacaggtaacagaaacttatttcaacaagcttaagcaaaaggggaagttggttggcacatataaccaacctgagaagaataagggtagagcagagccaggcctgtgaacaagaacagatgtttacatcccatcaatacaaccccaaacctctcacctctatttatctttgcaagtaagagaccccacagtcaactgggttcttcacatgatgaaggacatgga

SEQ ID NO: 221761 - DNA, 691 bp, Homo sapiens
tattatggttacataagatgtcaacttcagtgcaatgtgggatcctgtatatgctcctggaatagagaaaggatattaatggaacactggggaaacttaaataaggtttgtagtatagttaagaacattgtatcaatattaatttcctgttcttgatcattatactatggttacgtaagatgtcaactttaggagaagcagggccaggagtggaaaggagttctttgtactattttgcaacttttctctccatctaaaattagttagaataacgcccttcatgggaaataaaggcagagcacaacactgtaaatattacaatcccaaatgtttaatatatgcgtatatagaaaaaagactgggaggaattgcaggaatgtggtgacattgggtatcgctgaatggtggaaattatggtaaggtttgctttcgttttcatattcatctgtactttctaagttttctactcatttgatggtttaatatggtggatccttggaaataacggtgaatgagacaagatgaagtttatctctcatggagcttatcttctaatggggggaaatggaaaatgaatacatgaattaaaatctttgtgcagaaaattaagctgatgtgatagatggtcagagggggcctctctgagaaggtgacatttaaggggagatgtgaataacaaggaagagaacat

SEQ ID NO: 221762 - DNA, 482 bp, Homo sapiens
aaagttcttgaggagcctttatgactccttttagctcaaggaattataaaagatgccttaaggtgcattccctgcctcggagtggctttgcgattgtttatacgttgctaccatcccaacaaagagatggcaaataacagttttctccatccctggtagtctactctgtcttcaccctcagtttgtttcagcagtgtgagctggctgaggtcctgctgagtggtggttttcttttccttccccacttaatttaacagaccagctgaacacacatcagagagctaagctagagtgtggagtcattatggtcttctagtatggttttatgccccactttggggactctggtttgggacctagtttattattctgggcaagaggaaaagggcacacgccaaataatagcaaccacaacacagatttgagtagaacttcacactttggtctgtttcaccatcatgacaattttgtgagataggaaa

SEQ ID NO: 221763 - DNA, 430 bp, Homo sapiens
tcaagcaataaaagaaagggattttatctataactttagaaacacagcatttcatatttaaagttgatagaaatgtaaggaaaaataaaatccgtatgggtatcatcttccaagaagaaaatatgaattaagggatagatactttttacaatatgaaaataatcagaatttaccctatagaaatttaagtctgaattaactacaaggtaatagaagaaacgttcttcttaatctcatgtgtgttctctgtaactgattttcttgagtgcaaactgcacgtatctggaccaaggttcattttataaggcaacaagttagccagggggagggtgtggctaggtgtttctcttgctttgaacatctaataaaccaattcagtggaaaagaaccgaataaaatacagaagaatgatagttctcaatgaaaggtt

SEQ ID NO: 221764 - DNA, 530 bp, Homo sapiens
actgtctctcctcttccttcctccatggatctgcttattcaggacagccctgattcttccaccagtcccaaaggcaaacaacccacttctgcagagaatagtgtcgcaaaaaaggaagacaaggtcccggtcaagaaacagaagaccagaactgtgttctcttccacccagctgtgtgtactcaatgatagatttcagagacagaaatacctcagcctccagcagatgcaagaactctccaacatcctgaacctcagctacaaacaggtaggcttgttttgtccttgcaataaggtgaacaaaaattggactaatttgcatggctaagatctctgtggatgcatgtagatgtgtgtactatgtgtccgtacatcgcctcttgcaagtaatttatgaagatgaaatgcttttgtaacttccttcacctctttctttccttaaatattctattatgtgaataattatgtcataatttaaccactttcttgcacagaccaatattgtgaaaatctttccaacgtttccttaat

SEQ ID NO: 221765 - DNA, 512 bp, Homo sapiens
ttcaattcctttgggtatatatctcagaatggaattgctgagccatatggtcattctgtgtttagcttttaggaactatcagactgttttccatagtggctgcacttacattctcaccagcaacatacaaaggttccagtttttccacgtccttattaacacttaatttccattttaaaaaagcttatttttattatggccgtcctcttaggtgtgaggtggtatggttcaggactttacttcttgtgctgagttttttaaaaaattgtgattaaaaacacataacataaagtttatgattttaaccatttttaaatatatagtacagtaagtgttaactgtttgtggtttgttgtgcaacagatctctagaactttttcacttctcaaaacttaaactctatagtcattaaacaacagctcccaatttccccttcaccccagcgctgtgtaacctactttctcgttttatgagtttgactacattaaataccttgtataagtgaaatcatg

SEQ ID NO: 221766 - DNA, 465 bp, Homo sapiens
ctaatgggagaaggaaaactggttagccaaaatgacctgtgagctatcaccaaccctgacatgctgggattctatggaaggttttatattgcaaagaaaggttaagtccccatttgacagatatttttgattgatgccatcatgaagtaaagattagagaatgacaaaataatagaatttaccagatgctgaatcagaagtattttctccttttggaaagtaatgtgcctcacgattgcctccacacgtgccttcgaggttagctggtcagaatgagattgcttagagtggccagagaaggcaaagatgttcttatgtcctgaatatgctttttcttgaaatcatgttttgctcttttaaaatcagtttaaagatacattctctttttctggtttggccccctagcattttttatatgttctgttgagataagtattgcttaaatgaatcgtttattgaaggaaa

SEQ ID NO: 221767 - DNA, 420 bp, Homo sapiens
ttagagaggtagtcaggggatttgagttccaggtctgactgtgcacttgactcaccacgtcatcttggttaataatcacctaacaataaaaataataaccttaatttatataatgctctgcagtctgcagagcacttttaaagaaagtataggctgggtgtggtggatcacatctgtaatcccagcattttgggaggctgagacaggtggatcacttgagtgattaggagttcaagaccagcctggacaacatggtgaaactctgtttctaccaaaaacacaaaaaagtagctgggtgtggtgaaacatgcctgtggtctcagctactccagaggcttgagcctgggaggcagaagttgcagtgagctgagattgtgccattgcactctagcctgggtgacagaacgagatcttgtctca

SEQ ID NO: 221768 - DNA, 367 bp, Homo sapiens
gaaaaagggaaaaatgtgttctctgcctctccccaacttcccagaaagaaaaaaaaaatcataactgtcagaaatgtgataggactgtcaaagacatatggaagaaacccaaacaaaccatggaagttgtgaaacataaatcccaattctatttgttctacgacagtgtataaaccacacatttttcatcaagatagaaaattaaaaccctcgccaggctcagcattgctggggaagttggatagaaaccctagtgtcctggcagaaggagaagcagctgctggctggcctgggactgaaagatgcttctgaaccgtggactggaccacagagtttagctgcctccctgtctctacattttagtact

SEQ ID NO: 221769 - DNA, 557 bp, Homo sapiens
gtgatttttatacaaccagcttttaagaaaatgtatttattaaacattattgagtagaggttatccaattacctttgctcccagaaacctttttgtttttttagtgttgctaatttccctgagtaaaatactaactatcaaaatagaacaaagggaaacaaggccaaagaagtggcccagactgaaatattcgtccccgagtaagagaggatgatggccttaaggccggtggaggtgagatttgtgccgattcacccctgcctcagccctccctgccaaggggctgcttctgtcctcagccggctgccatttgccttcttgactttggaggcttatcattaaaagagtgttcaaaagaacggtctccacagaacctaggcagattttaaacttacattttcatagaggtttatattttccttggattaacacaacattcatttaccacaaatctcttgtttagggaagagtggcacaccaggcacaaataaatcattgctaagtgctttcctatgtgttatacttgttaattaaaccttgttttgtcttgaccaaat

SEQ ID NO: 221770 - DNA, 513 bp, Homo sapiens
tagctagaaactgcaatggaataatgcaagaacacagaacaggaagagaaagcagcgatcctgcaatcattcaaatgtgataatacatgcaggagagaaaggaaaagaattaggccatgggtcagctaacctttggaactatttttagcctcagaagcacttttatcccccttataaattccatacttaaagttccagaatttaaaatttgatgagaactgttgtgctgtttcaggttgtgaaaattcatttattcatacacgtaattttacctttgagcaaacttcaaaaagaatgactgccaaaatgtattataacctgttttctcaaatgtttttctcattctcttttttaaaatttctctctaaaaacgtcatagggacaactgtaattaggctaattgcgtccactcatatgtgcagcttatggcaataacagagcagtcatagaaagaacgaggtgcagtatgcttcaaaatgcagcatctgcagtgctgtcaaggccagccatgcc

SEQ ID NO: 221771 - DNA, 670 bp, Homo sapiens
  misc_feature (602)..(602): n is a, c, g, or t
cacggcagaatcacactcaaaaaaacaacaacaacaacaacaaaaaaactacccaattttgtttaatgggcaaaagatttgaacatttcaccaaacaagatatacaaatggtaaataagcacatggaaagatgttcaacattattagccatgagggaaatggaaattaaaactacactatacacctattagaatagttaaaaacaaaaacaaaaaaaactttttaaacctgacaataacaagtgccgatgaggaatcagagcaactggaactctcctacattgtttatggaaatgcaaaacaggccaggtgcagtagttcacgcctgcaatctattatatttagtacagtaacatcctatacaggtttgtagcatagcagcagtaggctatatcgtatagtctaggtgtgtagtaggctataccatctaggtttatgcaaatacacttaaatgatattcacacaatgacaaaaccacctaacaccacatttctcagaacacatccctgttgttaagcaaaacatggctgcacttttgccatacttttacctaccaatcctactcctaggtattttaccataaagaaatgaaaacacatgacncacaaaaattgcataccaatctccatggcagaatatggttttgggttatatttcttgtacggattagc

SEQ ID NO: 221772 - DNA, 518 bp, Homo sapiens
ccacttttacttatgccactttggcaaagttttggttgcaaccaaatcatctctccagcagtgtgagaaaatacagagtgtgaggcacttgcagttcaataaagttacagatacatagtttactcagtgagtttggtttaactcagtgtagtttttatttcccttactgcaggtgtctcctgcctgtccctgaggctggctgcttcttaggcccagtccttaggaaaacagatggagcgtgtgtgtctggtcaacatagttttaggtagaaactggctctttgaagccattcaaacctgagcctattggttgactcccaaaattttatggctaaaacttgtttaactttatttttcagttttctcagcccacagtttaaaccagaagtagctttcctctgaacttccactaatttcatttactagatcatgttttctgagatcttagtctctattctgtgccttgcattcttccacatctcctggctggtcctctggcctgccggtcctttggtcagg

SEQ ID NO: 221773 - DNA, 434 bp, Homo sapiens
cagtgttaagcatataggaaacaaagcagatgaaaaaataatacaattacaagttccaggaaaggcaaaaaggttaataagaaaggaaacataatgaaagaacattatgtttacatagtcttaataatagaaatattactatgggccggaggtggtggctcatgcctacaatcccagcactttgggaggccaaggtgggtgggtcacttgaggctgggagtttgtgaccaacctggctaacatggcgaaaccctgtctctactaaaaatacaaaaattagctgggtgtggtggtgcgtgcctgtagtcccacctgcttgggaggctgaggcaggagaattgcttgaacttggggggcagaagttgcagtgagctgagattgtgacactgcactgtagcctgggtgacagagtgagaccttttctaaaaaaaatt

SEQ ID NO: 221774 - DNA, 658 bp, Homo sapiens
ttttaagccaaaaaaaaaaaaaaaaaaaagagggcagttttgctaagatctatcaatctatcaagcaccagcttggaccactgaattaaacaattttggctttaccatgacagcttcccaagtagctgggactgcaagtgcgtgccatcacacctggctaatttttaaaaaacttttgtagaaacagggtctcactatgttatccaggatagttttgagctcctggtctcaagcagtccttccgccttggcctcccaaagtgctgaaattacaggcgtgagccactgatgcacacctttggttacaaaccactacatttttggaaaccctcctggttctggtaggaatttatatttgggctatatggtggtcggtcttttcaagcataatggcacaccaagggttaggtaagctaaatgctttcaagtgcttctcttgcagtctagagttccagcaggatgatttgctttccctccaagctctcttgcaggattcacaacagttctccactaggttggtcctccttaatatccccattaagatttttccccacagacttatcagatttaacttgtctaaaagaaaatctttaattccctgcctactcgctgccaaaaacagaaacaaaaaatcattcttaatcttctgtatcttctga

SEQ ID NO: 221775 - DNA, 321 bp, Homo sapiens
aagcttcagtgagctgtgatcatgccactgaactccagccggggtgtcagagcgagactccatccctaaaaacaaaacaaaacaaaacacagattaattcaacaaatgtatcttgactactgtgtgccagactgaggatacagcagtaagcaataagcttccctctagagcttatcgttattgccatctaatcatgataacatttttgtccatagagttgccatgaggaagtctctttgagactgtgcaagagctgattgattgcaaagctctattgactgggaagttgttcatgaaggaggaatatttcaaaatacatag

SEQ ID NO: 221776 - DNA, 380 bp, Homo sapiens
agcggtgtggctatggaatgtgggaggcataggcttctggtggtgtggagctcagagccctgatgtcatcatgtacagggtgtcacttcagaccctgtgtcgctgaatacaaaaagctgacatttactgagcacttactatgggccagtccctggtggtaagctttatagattcatgttcatgcatttatacaaacatatatatgtataaaacacttatatgtgtaattttacacacacacacacacacacataattttttcatttaagcctcacagtacccctatgagatagtattaccattatcttatttttacaggtgggagattggggctcaaatttaaggaatttgttcaaggtcatagtggagccaggattcaa

SEQ ID NO: 221777 - DNA, 516 bp, Homo sapiens
cctccgctacaaactagcactgaatgaaatgtgtcagttttgaaaaaggaggtttttatacattacacaacctctaagggcacttaacagctctaatatgttttatcagggcccactgcagcaaaatttattttattgtaaagcaatattttatgctaaaataaaatagttctaaaagttgtttccacccctctttatgaataacttctcacttctccatggcgaaagaggactgaccacagcaaaaattcggtggaaaccaacagctcctggaacacaaaaactggggttgtttataatctctccaccctgaatatctagcaccattactatataataataggtgctcaataaaggtttgttaaataactttatttttaaaccttaaacagatactagaagagtccatagttgatttctggtcatgcaacggtttatttctatattgtaagttatgtattgttatgtattatttctgtattaagagaactgagaccacagtagcaaacatcattt

SEQ ID NO: 221778 - DNA, 429 bp, Homo sapiens
ggagagagctctcacgaattccaagcctacaaaacaacagccttggagctccgcggcggcagtcgccgcgccccgggccgccgaggccactcgtgggtcgtgggtcgtgcgtcttccgtgtcctgtaagggctgtctggctctccctgccaggggtgcagggggctgggatggtgggtttaatattaagaggaggaaatctcaaatcttcctcccctcaatgccctcctcccccccgctcccaccccccacacacactctttctctagatgcccagagaataacctacctccctggtcgggaccccttcccaccccacaccccacagctaggcccaagctatggggatgcagcccgagtgggagattatgagaccagaaacgggaccctgtctccactgatccgtctgcaaaccctcattcgccctgcc

SEQ ID NO: 221779 - DNA, 437 bp, Homo sapiens
gaggtttttagtttccgttactgggaagcgcaggatggaagacttcaggcatatttggattcaagctcaaaggtatagttaagactccttaataattatcttcatccctctttatatgctagcctcattctcttcattggcagatcgtgttcttccaatttggtgggtagagccatactcatggacaagcaacttttgcactcaccaaggttctggcaccgagaaaggccctgagtacagacacttgaacaagcccagctcctactccctgagccagactccaatcagcagaaccttccagctgacttacaagcaaaaatcaatccttattgtgtttgagattaatccttattgtgtattgtattgtggggactatttgttatatagtgttagtatggcaatagctaataaatacatgtcaccatgattagtcttcc

SEQ ID NO: 221780 - DNA, 555 bp, Homo sapiens
acagaactctaagaacaaaataatccaccatggaacagaggaaaggcaataattttctgtctttctctaaactgtaaagtaatttaaccatcaaaagaactctttgtagtttgagtgtaatgtaagaaatatgtattccataccccagatttattaaaattgcatattggaacaattttgctgaggttaaaataaatcttaaaacaaataaatattttcacagtacacatatgaaaccatttttttttggacaccaatcatataataaccaggcagtaggtgggcaaactggccaaatcaagaatgatgtctggctggggaagattgttattaagatccacctgatttcttttcttttttcctttttttttttcttgttagagagagggtctagctctgtcacctatgcttgagtgcagtggtgccatcatagctcactatgatgtcagactcctgggatctggaatcaagtgatcctccctcctcagcttccctagtagctgggactacaagcgcgcatcaacacgcatggctattttttacttttattttgta

SEQ ID NO: 221781 - DNA, 460 bp, Homo sapiens
atttagaattcagtagtctatgagctcctgtaaccagggatgacatcatgttcatctcagcctccttagtgcctagcacagtgctgattcataaatgatgttaaaaacacattatggattcactcctgcctagtgtctgtgcatctttatgtgcccagttaaaaatagttgatcaggctgggtgcagtggctcatgtctgtaatcccagctgtttggggggccgaggagggcagattacctgaggtcaagagttcgagaccagcctggccaacatgataaaaccccatctctactaaaagtacaaaaaaaagtagccgggcctgatggtgggtacctgtaatcccagctacttgggaggctgaggcaggagaatcacttgaacccaggaggggaggttgcagtgagccgagattgcaccattgcactccagcctgggagacagagtgagacaccatctca

SEQ ID NO: 221782 - DNA, 226 bp, Homo sapiens
ttctctgtcctccttcccccggctctcagcatcgtcacggtggacccctccttgtccagcatgctgcctcccgcctgctgtgacctcactctcttctgctgtcctgggacctcgtgggcctcctcccgggtccccttcctgctcctcatcctctgtttggccgtctggttgttagagctctccccaggcctcaggaggatgacgaataaatgaaccacctccgtcc

SEQ ID NO: 221783 - DNA, 477 bp, Homo sapiens
ctccttgaccttttatttaaaaaggcccaaacttttcagttctcagtgataacagtaagacttgatttatgtgccaaaaactattctttggtcagtgtttttaaattaacataataagcaataattaagctatttgccatgtagttaaaatttgggaaacactgggtgggtctaacctttaaggaaatctgtttttttgccgggtgcgatgtctcacgcctatagtcccagcactttgggaggctgagacgggcagatcatctgaggtcaggagttcgagaccagcctgaccaacatggagaaaccccgtctctactaaaaatacaaaatcagccaggcgtggtgggcatgcctgtaatcccagctactcgggaagctgaggcaggagaatcgtttgaacctgggaggcggaggttgcagtgagccgagatcgtgccattgcattccggcctgggcaacgagcgaaactctgtctca

SEQ ID NO: 221784 - DNA, 484 bp, Homo sapiens
aatatttcaccctgctgctccttagttccttaatctgtaaaataaggtgacaaagcggtagtaaccttctctcaaaaagaggtttcatcgtgttaatacctataaacagaatagtgcctggtacttaataaatactggccattattaaatttcctagatgtgtgagaatactgctatggttttaagatgtctcactttgcctttagagtttggaaaccaggctcatattggcatcacaactaatgtaagtcaccaggcaatttcaagtaatgaggccaggctatagcaaagggttatcaaattgagaggcacgcctttgtccctaacaacacagggcaaaaatccaacagctttgtcttatttttgttgaaatcattgtgtgtttgaagaagtctcttcatgaatagcttatggattttggaaaacttcccacaaaaacaagactctttgatccacaaggatttgtttttcatcttaaaaatga

SEQ ID NO: 221785 - DNA, 326 bp, Homo sapiens
tccagcgtggcacgaggagcaagactacatctcaaaaaaaaaaaaaaaaaaaaaaaagagagagagagagagagatagaatgagaattggcaacctagaagctagatagtaaaaacttaaaagaatgtagcaaaatggagaaagaaattgaaaataggaaagatgttgggcatagtggcatgaatctgcagtcccagctacttgggagactgaggtgagagaattgcttgtgcctagaaattggaggcttcattgagctgtgatcataccactgcactccagcccgggcaacagagtaagaccccatcatatatatatacaaatta

SEQ ID NO: 221786 - DNA, 354 bp, Homo sapiens
cagcttcaacaccaatcaaccactctactcatgtaggaggggaaattatcaaatcatgcccaagtttggttgaactgttcccctccaacttccccctcctgaattattctcaggcaaattccagagtggatattatttcattggcagtctagtaagaatccttgtcttttaaagatacagactatatctgcatatgtatatatccacaataccattatcaccccttcattctttaatatcttcaagtatctagtattcaaatttgcatttgtctcagatgtcatagttttagtaatggtttaaatcaggatccatataaagtctctaccttgcagttgattgggttgacgtcag

SEQ ID NO: 221787 - DNA, 586 bp, Homo sapiens
aaaattctatttccaacaaaaccatctttaaagaatggaagagaagtcaagacattttcagatacaactatttagaatgtgaaagtttggcactaaatgacttaatttcagaaacacagaacactaatttgtttttattatattaatccatgattattttatttaaaaaagaagttacttagctgggcgtggtgggaggatggcttgatccctggagatcgaggctgcagtgagagctgcgcttcagcttaggcgacagagcgggaccttgtctaaaaaaaaaagggaccgagggcagtggctcacgcctgtaatcccaacactttgggaggccaaggcaggcggactgcctgagctcaggagtttaagaccagcctgggcaacacggtgaaaccccgtctctactaaaaatacaaaagaaattagccaggtgtcgcagtgtgcacctgtagtcccagctactcgggaggctgaggcaggagaactgtttgactccaagaggcagaggttgcagtgagccaagatcgcaccactgcactccagccagggccacagagggagactccatttatacaacaaaaaaaat

SEQ ID NO: 221788 - DNA, 991 bp, Homo sapiens
gcttcactgaagttctccttggtcctgattcttggcctcctcccaccagaacgtgagctccttgtgggaggcagtgcccctcccagcctcctccctgtcacagactgtgtgggggccacccaggggctgaatggaccagggggtcagcagggagagtgctaagtggtggcggggggcctgtggcagaggccttgtgacagtgagggttgagggctggtccagagagatgatgtgatccccaggagaagccacaggggaccatgacatgggcgccaccagcttccaggtgaacgtggacctatcgaaagccagcttcagggcaggacactgtcctttctggaggggatggccccaccccacagacaaggcaggcccagacaactctaccccactgcctagaagtgcgggtccccagagccagggtagaccccctgagtcaggagcccgggcacagaactgagcacctgcactgcaggcccagggccgggttccctggagaaggagaaagactgaagccactgcctacctcctgcccacaacagactgcaggcccatttggtgacacaggacaagcagcacatgtgtcgaacactgccgagcccgcaggcacgcctgcatcccacagccacgagcctgtgaggctcaggcatgtgacctgcaggagctggaggcgggcgggaaggcaggtgggggcctctccctggctggagcagggagctccaggagacctcaggacggcccccacccggtgggtaaggaccctgtttcccaatttgcccccaaggcctaatggacccaccgggcttagggagtcctcactcagaggagaggagcccacccctcccaggacacctggctgagccggaacagcagcgcaggggagctgtgacagcagagagcagcaccaggtcacacaagcagccgccccggaaggacacggcccatggtgacagaggacaagcagcatgcgtgtgtcagacactggcctggc

SEQ ID NO: 221789 - DNA, 527 bp, Homo sapiens
cgggggatgccgggctgccgcatcagcgcctgcggcccgggggcccaggaggggacggcagagcagaggtcgccgccgccgccccgggatcccatgccgtcctctcagcccccgcccccaactccgaccttgactcctaccccgaccccgggtcagtccccgccgctgccggacgcagctggggcttcagcaggcgcggccgaggaccaggagctgcagcgctggcgccagggcgctagcgggatcgcggggctcgccggccccggagggggctctggcgcggctgcgggggcggggggccgcgcgctggagctggccgaagcacggcggcggctgctggaggtggagggccgccggcgcctggtgtcggagctggagagccgcgtgctgcagctgcaccgcgttttcttggcggccgagctgcgcctggcgcaccgcgcggagagcctgagccgcctgagcggcggcgtggcgcaggccgagctctacctggcggctcacgggtcgcgcctcaagaagggcccgcg

SEQ ID NO: 221790 - DNA, 488 bp, Homo sapiens
cgggggatgccgggctgccgcatcagcgcctgcggcccgggggcccaggaggggacggcagagcagaggtcgccgcccccaactccgaccttgactcctaccccgaccccgggtcagtccccgccgctgccggacgcagctggggcttcagcaggcgcggccgaggaccaggagctgcagcgctggcgccagggcgctagcgggatcgcggggctcgccggccccggagggggctctggcgcggctgcgggggcggggggccgcgcgctggagctggccgaagcacggcggcggctgctggaggtggagggccgccggcgcctggtgtcggagctggagagccgcgtgctgcagctgcaccgcgttttcttggcggccgagctgcgcctggcgcaccgcgcggagagcctgagccgcctgagcggcggcgtggcgcaggccgagctctacctggcggctcacgggtcgcgcctcaagaagggcccgcg

SEQ ID NO: 221791 - DNA, 239 bp, Homo sapiens
gcaaaacaaaacgaaacaaaaatccaaaaacagaaacgaaacaaaattctcccttaaaaaaacccctaaactaatgacattttctaatagagcaatctgattagttgaaaataaaggagagctgggtgtggcagctcatgcctgtaatcccagcacttagggaggaagagctgggaagatagcttgagcccaggagtctgagacctgcctggacaacataatgagtccccgttctccac

SEQ ID NO: 221792 - DNA, 443 bp, Homo sapiens
gtgtagttgagacctcttatattaccaatgaattactgaggcctagaaaggtcaaatgaattaattgcttgaggtcacctagctagcatgtggcaagtctgagactaaagcctctgtcttttgactcttggtctgtgcttttcctgtacttttttgctcctgtgcacaattaccatgtagcatgcgcatagaaacacagattagaaatacacagaagataatcacataacttagaaatgagttttgaaaaggtgtagccggactccttatctaaaattaatctaactgaaattgtattttagattaactttgctacttgaaaaatgctaagtggctgcctgagagcaatgaaatttcttcctctaatgtgctcctcagggcaggtagcccttatcattgttttccaaaccactagccattaacatttgtggggtgcctgtgga

SEQ ID NO: 221793 - DNA, 521 bp, Homo sapiens
ggaattataaaaatcactcaatccaaaataaggcagaagaagtggaaaagggagatgaagatcagatggaacaaagagaaaacaccgagaagacagacttaaatctaaccatattaattatgacattaagtgtaaatggacttgtggtaggtaggctgaataatgagccccccatgatggccatgtcctaattcccagaaattgtgaattacgttactcacatggaaaaaggaaatttacaaatgtgattaaattaatgctcatgagatgtggatattatccttattatccaggtaggacaaatgtaatcacaaagtctttataaggaggaggcaaaagagtaagagatcaaaaaggcgatgtgatggtagaagcagaagttggagtgatataaggccacaagccaaggaaggaggccagcttctagggctggaaaaggcaaggaagtggattttcttctagagcctcctgaaggattggagccctgccaataccgtgattttagacttatgagctccaga

SEQ ID NO: 221794 - DNA, 414 bp, Homo sapiens
agtgcaaacaataactgcacggctgcatgtggaaatctacatatggacaggaccatcattttcactgcagtccaggaagaagagagccactcactcatttcatccttatgcagcaaattgttgttgttgttgttgtttcctcccattaaggctattatatgacactgacagatgcttaaaagcatttagacctgaaagaactgttgggaaaattgctgcaaaaggattgacaaatgatgatctttctgtccgcaaggttcttatttcctgtgcaaaatggaccaaaagaataaaagaaaggagaaagattcattaatgtgggaacttggtattgttttctgacatgagtttatactttttattgcattggggccaaaacgtgactctgtttatgaaaggctgcagtattcttaa

SEQ ID NO: 221795 - DNA, 441 bp, Homo sapiens
gagtcaaagtccaaactatatgcagccttcattccttcagcaagtatttactgagcatttactatatgtagggcatttctgaagctctgaagttcatggctggatccagggttggatgctgcaaacctttggctggacactgagctaagtaatgcatgtggaacaatcccattggctgcttgtggaaactgagtgagggcagggctagttcctctcatttggggcagcctgagagaggtatcctgacccatgcagtagaaatagaggctagatccccctgtgcagagcaaaagcaccaagcactgaggttggaggagacttctgtcctcatgtagcttatgttggatatagtgtggggacacaggaaatgaacacaaacaagtaaacaatatacttcaaaatggttataaaggctgtaaattaaatgtaacatggaaatga

SEQ ID NO: 221796 - DNA, 305 bp, Homo sapiens
gtttggagaggaaggaggacttcccaggtttggtggtcaaagcctgggcagctggtgtagctgtggcatcttgtgtaagtgtgggccggctgctgagtcagcatgtcacactagacctccagacagccctgccaggggagtcaactgaggctcaggggtgacacagctggtttgcagtcgcacatgggagccagaatgagtgtggaccagccctgctcacaggccaaagtggggcccatgggggtgggcctgttgctgggaccccctccccaggaggtgtgacccttccccatctctgcccagac

SEQ ID NO: 221797 - DNA, 443 bp, Homo sapiens
cacgtaggtgaaccggtcctggctttcttagaagattccctgctgcataaaaccaaatcccgttgcactttcctgggttccttggctttgtcctttgtcatttccaggatggagcagaggcactggtaatttggcttttacttgcctggtacctctggcatggagtggctaaacggtggcaccatgtactagttgctgccatcttcagataaaatattgaatcaatatgacaaaagtcagatgaatactagctgccaattaccctgcttcccttgggggcagcctgtttggagcatagaccagctttgacctgcaagaactctggatatttggaatatttaaaattccaaatacagtatcccaggaattcaggtcagctgaaggccgattgggaagggcttaccttaaatgaatcagaaagaaaaaggtgtgggtgtgtgcta

SEQ ID NO: 221798 - DNA, 329 bp, Homo sapiens
gaataatcattctttttaaattcttaataattagaccagaattgagctgaggcttatatctttaacatctatggcaaaagaagctgtttaagcaaatatctattataaataagcatatgtattatattaaggttataacaggccatattaatcctacttgtgagaactaaatttttaaatacttttatagtgattagtggttatttgcacataaaaggatttaggcttttaaaaaatgagtcatgtatttattaaagcataactaactcaatttcttcatcaatgcttcgttgtattcttctaatgttgtttcctttaatgatgtacta

SEQ ID NO: 221799 - DNA, 272 bp, Homo sapiens
taatacttctctcaatgtatcttctcagctttcttcattagcttatctcttttttctttaagcatttatatttttagatttctggacctgactctctgtttaactatgtttctcttttttttgaaatggagtctcactctgttgcctaggctggagtgcagtggcactgtctcagcctcctgggttcaagcaattctcctgcctcagcctcctgagtagctgggattacaggcgcctgccaccatgcctggctaatttttgtatttttagta

SEQ ID NO: 221800 - DNA, 348 bp, Homo sapiens
actacttcttgtcctcttctgcatatattcagcaagtgtctctgcagtgcctgcaacacgctgggcactgtgctggtacagtgatcaataaagacaagaaggtccctgggcagacacagtccagtgggggaggcagacaataacaagtaaacaatgaactaccagtggtcatgagttttatagcagaaatgaagatggtgtagtgattgaatacggggaggcaggggtggctttgataagcctcttctagggacagcatatgcagaggtggaaaaacatacatattcaagacaaaggaagccagggtagctggagccccaagaataagagaatggtgaagatggagtt

SEQ ID NO: 221801 - DNA, 200 bp, Homo sapiens
atgactagctctaaatgcttacatactatgtggaacaaagagtggcaattgtagaaaagtgactaggaagagaggggttagtttaagaaggtctgtttgtacagatttctttcagccttaactcccctcctcttgtgatgagactatttctcttctcctggtatagggaaggtatgggagtttcaactcctgctttatga

SEQ ID NO: 221802 - DNA, 515 bp, Homo sapiens
gacttcaggcagctgagaaatatttgtcacaccctgtggacatggctctgctagctctctttctggtaggagaacagggttttcaaggtggagagcgtgcgtgaagggtttgtttatggaaatccaaaggttcagttcatgaagttggccaggggcccccttctcatctctttctggaaactcttcctactcccaggagccccttctcttccaagaacctcccagaacctggatttcattaaataccaaggaggtaaaacactttttaatcatctgtaagatttgaactcaggcccacatctgtggttgtcaaaatgtggccccagtaccaatgataggtgcctgagagtgtgtcagaaatgcaaaagcagaccaagcgcattggctcacacccatgatcccagcactttgggtagccacggcaggaagactgcttgagcccagaagttcaaggctgcagggagcgatgattgcaccactgccctccagcctaggtgacagagacagacaatgtc

SEQ ID NO: 221803 - DNA, 616 bp, Homo sapiens
acttgctctccagctatacctattcccatttcacagggtgactcattgccttcctccatcttcaccaagatggctccttcttgaagaaaaccaggccatttcagtatgcctaccctcactgagaatatgtaaggaggaaagaacaggtctctgcctgagggatggggactgagttaggatgagctgggacttctctgcacacaaatggaagtttaaactgagatggccctctgctgaaggggagtgcaaatcagacagccaaggagagtgcttgagtatttcacaaagtcttcaaagcgctgcttccctaaatattaaaatatttcactacaaaaagatggggtgggaaccatttgataaagtaagatttggtcacaccggttaaaggaatagctagtaaacacttctgctgacctcaggtgatccacctgccttggcctctcaaggtgctggtaaatacttctcaaacccatttgaccacagagttaaggagcattctttcatagagcatctccttctttcatagagcatttcccaaaatatagaatgtatttttggaaaaactagattaaggtcattagaaaaattacaaagaattttttttttttgagtcaga

SEQ ID NO: 221804 - DNA, 338 bp, Homo sapiens
caagaggaagacagcttgccctctaggagctcttaccagaagcattgggctgtggtggtataggtacagggaagacataggaggaaggaagtaagttccccgaccttgaaagagtcagggaaaactaaaggaaagaagaaatcgttgagacagaccctaagatttattggctaagtaaattgggataatatagctaacatgtattgaatgtttattatatacccaatattttgctaagcacttttaattatcccattaattcctctcatccctatgtggtagatgcatgtatcattgtaaaaatgagtaaactgaaacttaaatctgtatctatcttc

SEQ ID NO: 221805 - DNA, 285 bp, Homo sapiens
tggcatgggaagtttttcctgtttaaagtagacaccagaaacatctaggaatgttgcagaacagttgaggattactcaaatgaggtatttccaccctggctcactgataaatcacccctcagaatatagtcatactgcttattgaggagttcttatgacccaggccctgggctctacatacattatttaatctcatcactggttgagagaaaaattgaagctggtaaatggtggaacaaaattcaaactcatagctgtctgaaaagtacatgcttttcccctgta

SEQ ID NO: 221806 - DNA, 422 bp, Homo sapiens
ctcccgggtagctgggactacaggtgtgtgctaccatgccccgctaacttttaaaatttattttgtaggatgggctctcattatgttgcccaacctggtctccaactcctggcctcaagtgatcctcccacctcagcctcccaaagtgttggaattacaggtgtgagccactgcacctggcctcttacctaacttatttggtaatgaaacctgatctgattggacatgaagctctttatacttgttatttaccccatttgatgtaaatagttacacattttatggcagaaatattgtgtttgattatagggctgccttagacccagctgagggtgtcatgtcccacatgggaatctcaaaatattctcaactttgaaacacatctgcctgtaacgatttcaagtaaggaactgtggatgtgt

SEQ ID NO: 221807 - DNA, 268 bp, Homo sapiens
ttcattgagagagggtcctgtgaaaccatggatatggggcataactcagttaaggagtgtagttggagaagctgatgcttaagcttaagagaactggagccagttttaagagaactggatccagcatagtggtgcatgcttgtaatctcagctactaaggaggctgaggcaggaggatcacttgaacccaggagtttgaggctgcaacgggctgcagttgtgccactgtactccagcctaggagacagaacaagaccctgtctcaaga

SEQ ID NO: 221808 - DNA, 435 bp, Homo sapiens
acacaaacgcacacacgtacataattgattttccacatggattcaaaagagtaaagcctgcataaagaagacagtatagacccaaagcaagtggactctacttttaaaatctcagatgacactaagcaggtttgatttttctttctcttttcctcacttaataatattctagggcagacagaataagaccttcttgcctagtgtctgtttctctgtctgttgtctgccctcagacactaactcaggtcatagcagaagatgaagttggccatctccttgggttgcaggtcgagtttggtgcatcccagagccctcccgccatcccactggatggtggccatggagagacagaggagcagagggagagacaaaggaacagggatggaaggacctgcattggtcactagtaacttagcaacccatgggccaatatga

SEQ ID NO: 221809 - DNA, 343 bp, Homo sapiens
aggtgaccttgattgaattaaagaggtaatgactgaagcttttttctgtagaactaggttgcaatttttgcaaatgataaactatatgttgatttaattttctctttcttttttctttctttcttttctttctttcttagtaattgaaagtcattgggttcttggactttgaaataggaaataaaatttaaaatggactttttgacccttctacgtaacacttaggctcctaaggaatattgtaattgatgctggatcatcagtgtcatgttaacaaagcactttagatgaaactacccatagtcccttccctctcatgttcaataaaaagctagtaacaaga

SEQ ID NO: 221810 - DNA, 559 bp, Homo sapiens
gttctgaggattaagtgtgaaagctcctagtctggaccacccttaagaggagcttaaagaagggtggcaacaggccaggcatggtggctcatacctgtaatcccagtactttgggaggctgagatgggtggatcacctgaggtcaggagttcaagaccagcctggccaacatggtgaaaccctgtctctactaaaaataccaaaattaattggccaaagttgggggtgcctgtaatcccagctacttgggaggctgaggcaggagaatcgcttgaatccaggaggcggaggttgcagtgagccgagatgatgccactgcactccagcctgggtgacagagcaagactccgtccgggaaaaaaaaaaaaggcaaggttagcaagtgtccgggaggtgttaatgacctaggctagcaccaacttgagactcgatgaaattaaaacaactgaaaacaaattagaaagagaataacttctactaggtgattctgctgcgttgaatgctggaggggtacatttcatgtaagttgcctgcatcatcgacaattctctcacgtact

SEQ ID NO: 221811 - DNA, 218 bp, Homo sapiens
gacacacaccccctttctcctcgcctcttctcggagggtggaagagacaaaaacggggggtcagttctccagtccgccggctgccggcacgcggggcggcgctccgtccggcccccgaggaccagcggcgtggcggctgcgctcggacccggtccgccggccggaggagcgcgcggcgcccgcggtcgcgcccgcaccgcaggccccttcagagagtc

SEQ ID NO: 221812 - DNA, 495 bp, Homo sapiens
gcacgagattcactgcaaaaattatgataatagaagtcattatattttgaacctctatgtgccaggtatcatgttaagcactttatatgtattatctcctttaatccttaccgtaattttataaagtagttactattgtcatcatcgctgttttatgaaggaagaaactatggcttaaagagattaagcaggccaggcacagtggctcaagcctgtaatcccagccctttgggaggttgaggtgggaggatcgcttgaagcaaggagttcaagaccagcctgggcaacatagcaagactctgtctctacctccctcccccacttaaaaaaaattagctaggcatggtggtacacacctgtaggcctagctacccaggaggctgagacgggaaggatcacttgagcccagaaatttgaggctgcagtgatctataatcatgccactgtactctagcttgagtaacagagccagaccctgtctgtttaaaaaaaaaa

SEQ ID NO: 221813 - DNA, 396 bp, Homo sapiens
ccgaggccgcctcgcccgccgcgcgcgccggtccggcagcgcacgggttaaggctggcaccgcgcccggcgggagggggggcgcccacctcccctcctccccgcgccgggcatgcggggcccagtgggcaccgaggaggagctgccgcggctgttcgccgaggagatggagaatgaggacgagatgtcagaagaagaagatggtggtcttgaagccttcgatgactttttccctgtggagcccgtgagccttcctaagaagaagaaacccaagaagctcaaggaaaacaagtgtaaagggaagcggaagaagaaagaggggagcaatgatgagctatcagagaatgaagaggatctggaagagaagtcggagagtgaaggcagtgactactccccg

SEQ ID NO: 221814 - DNA, 393 bp, Homo sapiens
ggattacaggtgtaagccactgtgtcaggccattgttttgagaaagacctattcaggttttttgcccattttaaaatcaggttatttgtttttttgccattgagttgtttcttaattcttaaaatattaataagatgtgagcaaacagtttaaatttcagaaaactaaatatctttgaaggtcactgtactagtctgttctcatgctgctgataaagacatatctgagactgggcaatttacaaaaggaagaggtttaactggactcagagttccacgtggctggggaggcctcacaatcatggtggaaggcgaggaggagcaattcacatcttatgtggatggcaacaggcaaagagagagagcttgagcaggggacctcctctttttaaaa

SEQ ID NO: 221815 - DNA, 465 bp, Homo sapiens
tggtttgttgcatctaaactccaaaagggagcgagtagaatgaagcacgtctgacccctactttccatatagcctggactagttttttaggtttctttggaatcccgttgtctgagaagggggcccattcaattacttagggggctaggaattttctttgtggttgacgttcataaccttaatggcggcttaaactctctgacccttactttctatgaaataatgtaaaatctcacaggtaagatactgtagatgaagtcacctaggacatagtagttatttgataaattttcttttccttctttcatcccctgaaaatgaaccaaacctcacaccctttcctctctttactcacaacccaaacataagaaatgaatgtgaaggttcataaagagcacatatcacttttagaaaagataaactcaatatttttagtaccacttataaacaataaatttttattca

SEQ ID NO: 221816 - DNA, 374 bp, Homo sapiens
tgtatccatttcgctcactaaactatagcttgaaaagcaagatgagtgttaaaacgtatgtgttgaatgaaggaatgatgaatgaatgaatatatgaatgaatgagcgaatcatttttgaatagtcctgccagtgatgaagtcaaggaaacaagctcagggaatgcgatgggcgctgagactgatgataacttgctatgtgttcttttttctgcccttcctcctttcatttcagggtttcaaagccagaggagataaaagaaatttgttccccttgcaaagatgaaaatcagatttgccctggttttggttaatcgaagtattgatacgtttttccttatttaattttattttttaattacctccagttccatc

SEQ ID NO: 221817 - DNA, 579 bp, Homo sapiens
tcatttctgggagctggtctgagagtctgccttggagatgtgttggatgggaactaggggtttgtaggctccattgtgagcaatactgatgggaaatgaccccaactggtatggatattttgcataaagcccctgaaatctgacatgctcagggtcagagccatgaaccactgtcttgacaaaccccatgtacatggactaataaggaaggtgtgggcaccatggcgttagtgttcaactggagagtgggaaagagatttgcatgtgccaccagccctgatagagacagtgacagaacacactgattctcaacattgcagacacctgctgtctttgtccctatgtaggtttcccccaatatttaggggatcaggtcagataaaggccttcctctgaaatggaaattatttaaaatcgatgaggaagtcatccaggaatgacttcctctggggatctgtggatgatggtgctagggtttgtaccagaccaaatcaaggtaactagagcctccccaggtgattgtaacccatctcctaaataaaacttgcatcgactcggttgcattacaatttgattttc

SEQ ID NO: 221818 - DNA, 557 bp, Homo sapiens
tttctcaagaaaagaggctgcaggggcagaaaactggaaacatgaagctgtatatgtatagaattccagggcaagtaaaatgtaaatgagtgatgaaacaacatcactcctcacaacccgggtgatttgcaaagtcaccagggaatttcaggacacctggattacaaaaccatagcaagacttggagtccgcattagcatagtgaagtggaagctgccagctcagttaagggctatgcctagaactggcatagcaccacttctcccatgttctcgtggtcaaaggagttacaaggcccacccagatgaaaagggatggagaaatagattctacctctggatggggactggcaaagtcacattgaagagcatgtggaatgggaattgtgttgtatggtagccattttggaaaatacaatctactgcaacagatgattaaaatacttaaaaagaaattttagtgtgttatcgtctttaaacattgtacaaatttaaggtgtataatgtgatgttttgatgtatattttattaaagtgattactagtcaagcaaaaaaac

SEQ ID NO: 221819 - DNA, 445 bp, Homo sapiens
gcggaaatgatgacctattttccccatatgcaaaagtgggtaacatgagaagttaaagtgtgtgctggatttattgattcactgctaaagaatggaatgcagcagacagaaaattcaactacgtttttgtgggctgttctatgaagaggcccaccttgcaaacaactgaagggaactccattccaacaggagtgactaagatcctccattcaacaatctgcaaagatgttaagtcctgccgacaaacatatgtgagagcttataaatggatatttccctagctgatacttctgatgagactgcaatactgtttgacagctcggctgcaactttgtgagagaccttgagccagaaatatgccactttgccaaggctggatttctgacttacagaaattgtgagataataaatgtgtgtcactttaagcagttaagttttgcggtaa

SEQ ID NO: 221820 - DNA, 406 bp, Homo sapiens
ccacagccagacaaaataaacaaggaacaacatttacttaatcccacagatttggccaagttttatccgataagaaggtggttggtgctaagatacaaaatagattcttgggactctagctgcatagtacaaatatccttttccttcacaatgtctctagaacataacgatgatgagtgtaacaaattttaaaggatgcaaatgcaataggaaaaaaaaattcctatctgaggcttttacatgtaagaagtgccaaagttaataatgacacagtccccatactaaaagcctcggagatgatcctcaaatattatttctcaaacagtctcacaaatattactgggacagttcgcaaagcactaaagaacgtcacaactatgataagaaagaattagtcaatactgtc

SEQ ID NO: 221821 - DNA, 375 bp, Homo sapiens
gtagagacagggtctcgttttgttgcccagcctaatcttgaactcctgggctcaggcaatccaactgccccagcctcccaaagtgctgggattacagttcaacaatgttcttcagaaatgtttctttatttcactttgccatttttggggagctaactttgtgctgttcatttttcaaccacatatacctattctgtctacactggaaacaacatgattcaacttattcatttaacaaaaaaattttttagcaactactatgtaagcaggcatgttctgaatactaaaaacaccatggtaaacaaaacaaaatcccctcctcatggagcttacattctagtaaaatatgtcaggtagtgatatttgctgtaagag

SEQ ID NO: 221822 - DNA, 215 bp, Homo sapiens
cagtgattgcctagggatggagttaaataaagattgggatagattaaggagggtggaaggaaactttagggagtaatgaaaacgttattttgattgtgacggtggtgtcacaagtgtaaacagatgtcaaaattaaataaattgtatactttgactgtacaatgtagttcattatatatcaattatcctataactcatgaaaaaagaaaagctgt

SEQ ID NO: 221823 - DNA, 990 bp, Homo sapiens
gatcttgatatgttggccaggttggtcttgaactcttggcctcaagcagtcctcccacttcagcttcccaaagtgctacgattacaggtgtgagccaccactgcagaccattggaaggtttttacgcagagaagtcacgtgacctggcatagcttagctcagtggtggctttggaactccaggctggagtgcagtggcacgatcatggcccactgcagcctcaacttccaaggctcaagcaatcctcccacctcagcctcccaagtagttggtactacaggtacgtgccaccatgcccggctaatttttgcatttcttagtttttttgtagagatgagggtctcatgtttcccgggctgctcttgaactcctggctcaagcaatccacccacctcagcctcccaaagtgctgggattacaggggtgagtcattgctcctaacttttcgttacactagaaaattgtagaagacaccaaagagcctctgtttatgtggattgtggctattgatattcaccaccatagaaatgaaaacaaaagttttaattcattgaaaaataatgaaaattctcaggtcaatggtaaaaataatgataataaaaccatttcatgttaacaaaaactttttttgttttatgaaaaatggcaatttaccaagacataatttagtgagaagaatggcttttaagaaaaaccggtttttcagaggtcttctgtgtttggcttaatagaggacagcttgattcccatatttgcttttgcattcaaactgttgggatatgaaatttttgtcgaagtatgaaaaaatccacttctcataaatatttagtataggagcaatatttaactttttcaaatagatgtacatatacttctttgatattatactaaaacccaacaagtggtagtttcttaaaggttagttacaacatggaatctgaaactggtttaatgaactttttattctgttccattaaaattcattcatgt

SEQ ID NO: 221824 - DNA, 567 bp, Homo sapiens
acattctataattaactggcctgtaatctttaagagtcaaggtcatgaaggtcaaagacagtatgaggaactgtttcagaaggaaactaaagagatacattaactaaatgcaatacagttattccccggtatccatggggggtgggggtgcagggatggtttcaggatccaccctcccaacaccaaaatccagggatgctcaaataccttatataaaatgatgtggaatttgtatacaaccgatgcacatcttcctgtataaattatctccagattacagtcacgtgttgcatatgttctgagaaatgcatcattaagtgatttcatcattgtgtgaacatcatagggtgtgtttacaacaaatctggatgatacagcctacaacatatctaggttatatatggtatagcctattgctcctaggctataaacccatacaagcatgttactgtactgaatactgtaggcaattataacacaatggtatttgtgtatttaaacatagaaagggtacagtaaaaatatggtattataattttatagaaccaccattgtatatgtggtcta

SEQ ID NO: 221825 - DNA, 471 bp, Homo sapiens
aacatgtacaccaccaaaattgaccctaatgtaaactgtggaatttgggtaataatgacacatgtcagtgtaggtctttcgactgtaacaaatgcacccctctggtggggatgctgacagttggggcggccgtgtgtatgtggtggcgggcgggacggcatatgtgaaatctctgcaccttctgctcagttttgctgtgaaactcaaactgctctaaaaagtatagtcaattaaaaaattgttatagattacagaatgaaatttagcaagtttcaagaagagaatgtgtaacatctcattttttaggaaaaaaatatattcataggaaaagatctggaagaacatacactaacctgtcaatagtggttattcctaagaaggatgaaagaggagtttattgggcaactgtgttctttacaatgagcatttaattactcagttttctgaataaaaaattaaggacgaagactt

SEQ ID NO: 221826 - DNA, 397 bp, Homo sapiens
cttgggggttttctccctctccttccctacattttttccccattcccctctggtttgcatcctctccagtctgtgtcccactcctgacaggaatctcaaggtcattctgacccgccatttttaaaccagtctactctcgattacctagattccaacattgtttttccccaaagctagaatattaggtggcatcacactgctgttctatttcagagttggaaaatttccactctaatgtcatgaatatttgcacaatactgggtatattgggtgcagaagccctttgtgtttaggcctctttatcctgcttcacagggagttagaactgggttagtcaatcgaagtcctgtccctgaaatgggagatgttattttcctacacctatctttactggatc

SEQ ID NO: 221827 - DNA, 297 bp, Homo sapiens
cttggtgactaccgattaattgatttgaatatatcaatgtctggcagttggaccaattactcagcttcccaatctgatggtgtggttgatagaaatgtttcctggtggcattttcccacaggattaggatggtggtggcattagccaggatctcttttgtcactgccactgttactgaatgatctgtattttgaactttcttgacttagtatagtattatacatccagcccttaccctaaatgcttattatttaatattgacaacttacaggttaatgttttaaatctttttttttt

SEQ ID NO: 221828 - DNA, 641 bp, Homo sapiens
cggcactgtgggggatttttttaaatgtaaataaccagcaggcttatatataatgcagcaagtgtgaaaagcatcacaggtctaataataatgtatgtagatgtcagtaaagtatacttttgcttctagtgcttcacttgcctcatgatatccatcaagcttttgagaagaaagtacaggatctgttaggttcttaacctagcagtttaccagatgcattccttgatcagcctgcatgtgtcaaaccactgagtaccacatgtgtccacaaagacacctctgagaggggcaggcgctgacaagatcctggagtcagaggctgggctgggctgttgcctgattgactatgcgaccctggatgtgcccatccccatgtgctttgaattcatcatggatcacatgagggagtccacagagtatgccagatcctttttggcatctttccccaagtctaaatttctttagtgtcattcatttttctgattttgtaattgttttgagtctattattgccttatttttctgattttaaagcaatataagctcattgtcaaaattttgtaaaatccagaaaagtatgataaagggaatcagcatgctgagccctactattcagcagcaaccaccaataacattttgaga

SEQ ID NO: 221829 - DNA, 478 bp, Homo sapiens
tgctagtttggttactgtagctctgtagtatcatttgaagtcaggtaatatgattcttccagttttgttctttttgcttgggatagctttggctattctgggtcttttgtaattccatataaattttaggattattttttctatttctgtgaaagaatgtcattaatactttgacagggattgcattgaatctgtagattgctttgggcaatatggatattttaacagtattgattcttctaacccatgtacattgaatattttttcagttttttgtgtcctcttcagtttctttcatcagtgtttcatcagtatattgatgtatgtgtgtgtgtgtgcatacctcacatgtatgtttatatacttcaattaaaaaatacacatagataacttgatgaatttttacatttttttgtaggggacaaataaataatagcattttattcttatgccatttgaccatagcatttgtgttctg

SEQ ID NO: 221830 - DNA, 389 bp, Homo sapiens
acctcaaattgtaatagtccctatgtgccaagggcagggccaggtggagattactgaatcatgtgtgtggtctcctccatactgttctcatgatagtaaatgagtctcacgagatctgatggttttataaatgagagttcccctgcacaagctcttttgcctgacaccatgtaacacaaccctttgctcttcctttgtcttctgccatgattgtaaggcctccccagccctgtggaactgtgaggccactaaactctctttcataaattacccagtctcaggtatatctttattagcagtgtgagaacagactactatacctgccttaaaaggcctgcaagtttgtgtaccatctaaattcatatgttggaactttaacccccaatcgg

SEQ ID NO: 221831 - DNA, 625 bp, Homo sapiens
gggatggtcagtacattggagtactttgaagagggctgaagttacacatatttatggctcattttgacttgattgctctaaagtggctgatatattacaaaattctccttttcagtaactgtccagttttataattagagatgggtaaaatagggaaaaaaaatcttcctagtcccatcatgttcagctgaggaaacaaaagcaccgagaaataaaatgacctgcctaagtgagttagtgacagagttagaattagaacctaggtctttggctccaaatctgtccatgccattttttggtgttcttgtgggaaacctatgcctaggagaaacaaattgcaattacttttgaaaaattaatatttgaaaaataatatttcatttttaaagccattttaacttttagggaggaggctacatcttatttaagagagcttaacttaaacttcatttctaggtttaattttactttgcttttaaatcctcaattgtctaataaagctttcttaagtagttaagtagtttttataatttcacataaattaggtgacttttgcatttattttaaatattcaagaacctttacaaacttagcaaaattctcttaaacctttaaacttaaaata

SEQ ID NO: 221832 - DNA, 387 bp, Homo sapiens
gctataggcctttgagcaaatcaatgtttttttgtcccatagtttatcaaaagacagctccaaatttgttcattcctttaaaatatgtatttctttttgcaagatgaaaaagttctgggccaggtgctatggctcatgcctgtaattccagcactttggtaggctgaggcaggaggatcaggagtttgagaccaggctgagcaacatggcaagactcttgtctcttcaaaaaaatttaaaaattagcagggtgtggtggcatgcacctgtagtaccagctactccaactccaaaggctgaggcaggcaggaggatcacttgaggccaggaggtcaaggctgcagtgagctattccagcctggatgacagtgtgagaccctggctcga

SEQ ID NO: 221833 - DNA, 456 bp, Homo sapiens
ataaataaaaataaataaaatttaaaaaatatagtatgtacatttgcatatcctattccattgaatattatctaaacttgcctatatttcttaactcagaagttacatgcatcctccttaacaagtgggtgagctagataaatctcagggggattaaaaaagattcaattacttatcttttggggtgaattgatgaataagaaactgtaatagcaaccctctggacctactaggcatctgtaattggtaggcttttccgacattttttccttcacagacttagcaaccgaagcacaaggtggattaaataaatgactaaataaaagagaaacagaaatatcatatcctggctccagatccatgattgtcagtagtgtgttacagtgtttttaccagtaacagttagcattgccttgattataagcaaacaaaagtagattctatttagcttaagca

SEQ ID NO: 221834 - DNA, 515 bp, Homo sapiens
aggaaattaagagtttgactagcaggctggatgtggtggctcgccaggactttgggaggccaaagcaagtggatcacctgaggtcaggagttcaagaccagcctggccaacatggtgaaaccccatctctactaaaaatacaaaaatcagctgggcgtgagtatatggcccttggtgacagaaggccaggagggtacatgcagagatttcagcagcagccacagcaagggtggaaggtggccaacagcttgaagcacagccgacagcttgcttcctttgccaagcctgcacaggagcccctcaccaggggatccaggtcacacctcctgggaagaggggaggagagagaggagagagtcctaactgagctgaacataaaccctgaattgatcatgcttaacacgaagtgtctgagcatctgagtctcctggaattggcaaagttttccttcagcaatagaagcagaggctcatgaaccacatctagttatagaaaaataaattgtgttctgcata

SEQ ID NO: 221835 - DNA, 395 bp, Homo sapiens
ggagctgtatgttttgagatagcgataatctactagtggcccagggctgtgctgttcaataaagtagcccactagccacatatggctatttaaattatctaaaataggccgggtgcagtggctcatgcctgtaatcccaacactttgggaggctgaggcagatggatcacctgaggtcaggagtttgagaccagcctggccaacatggtgaaacctcgtctctagtaaacacacaaaaattagccgggcgtggtggcggctacctgtaattccagctacttgggaggctaaggcagcagaatcgcttgaatccgggaggcagaggttgcagtgagccaagatcctgccactgtactccagcctgggtgacagagtgagtctccgtctcaaaaaaa

SEQ ID NO: 221836 - DNA, 525 bp, Homo sapiens
gcacgaggcaaagatgtaattcatgttgtttataatagtcataagctaaaaacataaaataataatacaagaaaaactggttaaataatcgactacatccacggtgtgatactatgcaaccagtagaaatgataaacatacataaaatggcatttgatatttcatttcagtgaaattgatgttataaaatagaataatatggccccattattataagtttagttacatttacagatgtatacaaaaaagtctagaaggatattcatgaaaatattaacggtgattagctctggatgttgggattacaaattatatacttaatatattgtaattacatgtattttaattttttactataagcattttacttttataatcataaaaagaaagaaaatattttttttcataaaggacaacacatagtatttcctgaaagaaggagcagtagtatttagctacaaattaaagctttcatagcaaatgacataaaaactggtatacatatatacagtaccatagaattca

SEQ ID NO: 221837 - DNA, 384 bp, Homo sapiens
gtcaactttgctgatattttgcttaaaaataacactttggccactacaatttgtatttttgtttctatctctagggaatatatgaaaagcttgaaactgttacatagcaatatgatagaagtgccttctgaattacacagttaatgtgccttgagaaatattttaattgctaatagtcaaaaattttagtttatttttctttataccagaattatattatcctgaatattgatttggaaataaatggactgtcatttgaaaccttgccattcccattgctagagacctgtgatttttaaaagctttcaccgaagctttttcttcctcagctgctctaatttgtgaagggtccgtttgaaatgagggtataggggcaggccatga

SEQ ID NO: 221838 - DNA, 302 bp, Homo sapiens
cctcatcagagagacctcctctgactaccctgttaaaaatcacccttccccaccatccctctccatcccctctctgctcttttcttcctagccaagcattactttctagctcagcgatgccacttgatgtgatgtcctgtatccacttttgtgttatttgtcatcttcgttagagtcaactcctcgagggtgaagacttaagttcactgtgtgttgcttctacctgtttataatagtgttgagtgttcggttgatgctcagtagacacttgcagaataaacaaaaagagaaccaaaaccaca

SEQ ID NO: 221839 - DNA, 321 bp, Homo sapiens
aaagaacgtggctgcagggcgatcttgcccttaagatctgtgaaactttgaacttgagggtgataatttagtgcatatctggtggaatgaacttctaggcaccatagcacaagagggatcctgtctgcatcaaacagcctgtgctcttatgtgtgactgaggaaatgacctcaagttggaatttctatttaaatggcaagcagagctcaaaagtttggaacatttgcagcctggccaagtggtcaaagagaaaagctgattttcagggggaaaattcatgaagcctccagaaatttgcataaaatggaggccagtgctaat

SEQ ID NO: 221840 - DNA, 771 bp, Homo sapiens
gtgtgttcagagtgtaattgaatagataattcacttgaaaaaaatacaccaaagttttttcagtagtgtttcagtttgacaataaaaaaaagtacattgtgggatatttatagtatttttgaatctatttttaccagtagactgggagtgataactgatttggggcataggggttaaaaacaggaaatgtggtttatacagtaggtagtatctccagagtttccagggttgatttcttatagtattgtctgaagagtgttatgcgtcaaaacaacattaggccgagtaccttgaaatccgcctgtgtttaaaggagccgtctttccaattacaacaggaaatgcttcatggaaaagtttgcattcttggtataggttaagatggcatagcagttgtttattgtaattacaacacgttcttcctctccagcacttttcagacactttttatacagtcagagtaaatcttgtgtcacttctagtaaatttccttcaattttcgtattaaaattttattttattttcatgaaaagttttgtcaaatagctgttaagaatgttttaaaatagactatcatagctgaggaggagcatatattagggatactgttaattacagtaatcagagaatccaagttaagaggataaaaaggcatgaagaaataggagtataattctgtgtggccttttgcatgataggttggcagaatccatgaaaactgaatagcttgattacctttgcactcagcaattccacttctgggaagatatct

SEQ ID NO: 221841 - DNA, 350 bp, Homo sapiens
ctcctagctagctgtgtgcactggggcgtgctctcacctctggagttctgcctcctggcagcaaaccaagagagtgccacacagactatgcaacctccgggtccacttttgttcccatgttctatgacttggggacctccaccctgctctactcatttgcacaaacatgtattcactatgggggtcctatccctgaataggccattccttctactcgttggtgcccgagagttcctccctatggaaacacaatcaaagacgacacttaaaaacacagatccctgcgagagagggcatttgctgtccccatgccctctggcagacaaatgaatttcttgagagctgactta

SEQ ID NO: 221842 - DNA, 431 bp, Homo sapiens
atggaatattcaacaactttggatagaaaaaaaatttgtttgttaagattgctctttttccactaaaaaattatggaatatttattataaaatgtacaaaggcagagaagatagtgtaatgaatacctatcacccacatacgtatcacccagcaaattgatggaaccaaatctgatgttgatagggcccaggaaagcatctgagggtgaacttgacctttgaggagaaaagtgcctggtgcaggtggtccctgggcaccctcccttccagcctgcagctcagaggggtactcttgctgatggagatgaccacagatgcccagtgctaatctgggggtaaattgagcctggcaccttcagtacagaatgcttattgttccttgcatttaaaggggctctttccaggattcctgggtgatggtgcatgattct

SEQ ID NO: 221843 - DNA, 325 bp, Homo sapiens
gggctccgggcccgaggagcgctgcgcctgtggggtgtgcaggcgaagtgtgggtgtccgcgcccatttcctcccctcccccagcgccgcacgttttatttacatgtttatctcactgcagcggcacattcacttttatagcctgtgctttcaagtatatttatacacctctgcgcagacacaccaaatctcctgggacgcgcacacgcgcgtggattacagacccccctccccctcgcagaaagctcagatttccatgcgggttgggaaggctaggaaaagatgtggggattcggttgggcaccgaagttcgccggccctttcc

SEQ ID NO: 221844 - DNA, 305 bp, Homo sapiens
cagcctcccgaatagctgagacctcaggcgtgttccaccgtccccagctaacttttgtattttttggtagaggtggggtttcactatgttgctgaggctggcattaaactcctgacctcaagagatccacctgccttggcctcccaatgtgctgggattagaggcatgagccaccacgtcctgccctaaacagacgttttaattacgcttgtcaagtcctcttgtgaaatattcatctgcagtgacttggtaaatgtgtttgctaccacacaggataaacagtgtacagacaaacatttgacata

SEQ ID NO: 221845 - DNA, 547 bp, Homo sapiens
aggtgctggtggctgggacagctgagacaggagagggcagttactattttccagtctctgcctccaagggcatctactgtactgtcagttgactactggatgcagctgaaatctgtctcctcaagtttagtttattcaggctattaaaacagtcttaaaactccaattggctgggtgcggaggctcactttgagaggccaaggcaggcagatcacttaagcccaggagcttgagaccagcctggccaacatggtgaaaccctgtctctactaaaaacagaaaaattagccaggcatggtgacacaacgcctgtaatcccaggtacttgggcagaggttgcagtgagccaagattgcgccactgcactccagcctgggtgacagagcaagactctgccttttaaaaagacacacacatgcacacacatttgtaaaacgaagacaataattagtacccacttcctagggtcgtttggaggattaaaagagttaatatatacataataaatcttttaagacagttcctggtcatttaaagacttagcatt

SEQ ID NO: 221846 - DNA, 500 bp, Homo sapiens
ctcgcatgtgcagctcacaatagggttcgggctcctatgacagactaatgcctctgctgatctgacaggaagcatatctctggcgataatgcccgctggctcgcccgccagccgctcacctcctgctgtgcggactggttccttacaggccatggaccgggggttggggacccctgccatagagtactgttgaatagaaactttagctcgtccggcggtgggctgggggggtgggggtagctcatgcctgtaaccccaccactttgggaagccaaggcaggcagattgcttgagcctaggaacttaagcccagcctgggtaacatagcaaaaccccgcctctacaaaaaatacaaaaattagtcgggcgtggtggtacatgtttgcagtcccagctactcggaaggctgaaatgagaggatcgcctgagcccagagaggtcgaggccacagtgagctgtgattttaccagcctggatgtcagagtgagaccctgtctccg

SEQ ID NO: 221847 - DNA, 357 bp, Homo sapiens
gaggctttaacttggaagacaacataacacctgctaataaggaatctgtgtaagtagaacagaaggtagatttgcacagagttcctgaagaggatattgaatatttgcttgggttgtcccccatggattaataaaggaagtcttgctagaattagaagaacaaaagcaactggaagagggtcctagcagtcaatccgggccttgggcacaactaacagtaaagtgactgccataggcttttgaccatattttagcagcaattactatttttgaaggtgatctaaatgtggattgctgttcgtggtggcaagtctaaagatgaaaaatgtgtctgcataccaagaaatcctcagtgat

SEQ ID NO: 221848 - DNA, 332 bp, Homo sapiens
gagagtacgaccaaggaattggctacagtcatgtgtttgagaatcaaatctgtggatcttaatgtgcacctggtgaaataaaggaaactataacgttaaagaagaaagacatttcctaggaattcaactataatctgagataagaagatcattccttttgccaaataccccagggcatttgtcattttttcagtgacttttatttccatttagagtgagaggatcctgcatagaaacatgaagtctgctttaatgtggaacctgaaattcacttgtccacttattgttatttccacctccttaatttcttattaaaacccattttttcttcc

SEQ ID NO: 221849 - DNA, 107 bp, Homo sapiens
cttcatggctaacagctctttagtttcattcatgtcagctaagtggccactcttagctctgagccaatcactattctttgtttccctggcccttctgtcgtcttctc

SEQ ID NO: 221850 - DNA, 591 bp, Homo sapiens
agatgacagaaggaagcgattggccctggaatgactgggctccaggtccccacctccctcatacagccttggtctgggaagcccaggcttgatgcgtatgcagaaggaaggcagcatacattctagacagaacgatctagtaactatggggctgtcatttggggaggtggatcaatgtccttataaaaaatgctacagactattctctggggcccacaggacgggaccatagacttaataaacaaaatggggacggtgtacagagatccacaagtagaaattttctcaaggtgctttttttttttttttttttgagacggagtcttgctctttcacccaggctggagtgcagtgaccttgtcaaaaaaagaaagaaaagaaatggggccaggcgcagtggctcacgcctgtaatcccagcactttgagaggccaaggcaggcggatcacctgagattgggagttcaagaccagcctgaccaacatggagaaaccccgtctctactaaaaatacaaaaaaaattagccgggtatggtggcgcatgcctgtaatctcagctacttgggaggctgaggcaggagaatcgcttga

SEQ ID NO: 221851 - DNA, 528 bp, Homo sapiens
aatttggtcaatttataagatttatcaaaagatgtttcaaattaaactttggttcaatctgctatgttcaaaggaactggtggcctatgaatattttccaatggctatttcttttacaatatataatggattttaataagatatggctcatgaaaagagttcagagagaagactgcactgagagaaataagagtttagaatatcatttaaaaagtattcacttaagaggattggtaaaaaaataaaaaaataaaaaaatgtatttctggacaaagttgacaaagtaagattttgaaagtaaagttttcaatgcaagtgaaaagaaaatacggcaaccataaataaagactaaattcaggcctctttaaaagccaggccttctgtaaatcattacctcaattttagcaaaagtctcattagagattaatttattggcaatgggtatatgcatgtttgggcccattgttgcattttgttcattagcttataggtggcaacattattattccatcttcatttgtgggtggt

SEQ ID NO: 221852 - DNA, 298 bp, Homo sapiens
gggcacagctaggcagtctgctggagcaccacatgaggcctctccagcatggagttttctcaatgctgcatgctgcccccacagcaagcaacccaagaaaaccggtgaaagctacatggcctttccttttctagtgctgagaagcctcagagtaacttcttccccattcttctggttacaagagaatcaggagccagtcccacgtcaaggggagggaaggtagacaccacctctgatgggaagcatgtcaaagacactgtggctaatttttaaaataaagcaatgttgaaactacact

SEQ ID NO: 221853 - DNA, 285 bp, Homo sapiens
gattctctaggcagacacaattgcgatgtgagagttttctctctcctacagctttgcttgtttgtctccctcgtatttgtaaagcagtaaaataccaacctgtaagattattgtttagtaaacataagcaaatccagacatttattccctactattgctatatttagaaatgatcattaatccatatcagagaactctcacaaatatatgttatttttgcattccttagcgtttaataaatatcatggggaaacattaagaagtatgttatccttttgaggagac

SEQ ID NO: 221854 - DNA, 817 bp, Homo sapiens
tcaagacatttacattttgtagttaaatatccttgatatgtgttgccaaaatgtttccaaaagagttgcccctgactgatatgccaccctcagcccaggtttgagagggctggtgttacggtctacaccagcttatggtaacaccaataaagccagtctcatgatctgaaagagaaataatggtatttcaaaattataattgatacgattattaacgaaacgcaaatgttcatacttattaagccgtttaaaactttcttggttgattatctgttttctttgcctgttttcctaacaaggttttgatggatttatttaaaaatcatttgatgagctctctgtatgttgtcattttgatatctgttgcatatatgtgttgcttaatttttgcttttggaggctttgaatgtaccaaagctttatattattatattgtcaaagctattagcttttctttttgtgacattgtttgttagaaagtccttcctgggaaatggctttttaaatgggtcaagagcttgccttttcctcctttggggctctctatttttggtaaattctaaacaaacatccttttcccaaataccattttcccgggaacatctggaatgcgcttgcttttatttcttcctccccagaggacggtgtattggggtgggaagaggctgtcacactgagatgatctctgggtggagaaactggacggggaagccctgagcttcagaaacagccccttccccagcttcaaggtggctgtgctctgttgtgaaagatgtctgatctttcccgccaaaaaaataaaaacattgtccaaaaa

SEQ ID NO: 221855 - DNA, 454 bp, Homo sapiens
ttttagaagattatggtttaaggtataatttcattcaaagttttgtaacacttagctagtgataagctagaaggaaatttgcattttaaagaagtttcagaatttgaaattttgagctaggaaaatcctcagtatagaggaataatgactgcaacaaatttgaactctgaggaatttcttgacaaatatatactgacatccagattaccttctaatgcttccgtcaggtttgtaagaggtgtgagtgaagaaaggtgctaatttgtaaagggtgaatgatcagataaatggagtatcagaaggaaaacaatgtccactgcttatgtccaatatgaactccagcatcttactctgtatccataaaataatgaaaccaattttccttcatggcctgtcaatcagtcttaaccgctttatagtcctacctcaaacataatgataaatctttagatac

SEQ ID NO: 221856 - DNA, 264 bp, Homo sapiens
aaccttttattttcttccaaataaatttaagatgatctgaatcattatttttctcaccatctatttatgacttaactaaagctactgtatataaaatattgtgccagtattgatgggagacatcagttttcttttgtgctaaccacttttttgttaatttttattatgggaatttttaatcatatgcaaaaataggtggaacagtatctggcgaactcctattttcttattatcctgttttgataattatctacagtcgtgctg

SEQ ID NO: 221857 - DNA, 755 bp, Homo sapiens
aagagctggtgagcctggggtttcccacgggcggggctgggtgtgatctgtaccatagccgggaggtcttgtcaggcatagaggaatgaattgcaacccaaagccctattctggatttgatgcaaatgagattttcctttgtttgctgtttttttcttttcttttttgagacagagtcttgctctgttgccctggctggggtgcggtggtgcgacagtggctcacttcggccttcgcctcccaggttcaagcgattctcctgcctcagcctcccgagtagctgggattacaggtgcccgccaccacgccctgctaattttcatatctttgttagagacagatttcaccatgttggccaagctggtcttgaacccctgacctcaagtatccttctgtctcagcttcccaaagtgctgggattacaggggtgagccactgtgcccagctgtttttttagaataagagtgctttgtccttcatttaaattcttgcctttgcctgacttccatttctcccctggagttcgttctaggacctattatcaaagttcagacggaataggaaaatgcggcatttaggtttacttctgtaatcaagcttatgatcttgttcccagtggttttgtactgaaatagcagagcggctgtcctgagggggaggggagaggacgcagggaggaaggcagctgttgacctgcttcgtctttgggccccagagcagaggctgtggcgaagggagcgcgagagggagaaagg

SEQ ID NO: 221858 - DNA, 643 bp, Homo sapiens
cagcagcatagatattaccgtcccaaactggaaacagcccaaacatctacagcagagtatgtacaaaatgagatataatcatacaatggaatcctaatctgcaatgaaaaagaacgaaccactgccacatacacaacacatgagaatgcaacatgttgaactgaagaaaccagacacaaaagaatatatactgtgaaatttccatttataaaaagttcaaacacaggcaaaatgaatctatgctgttatggtaatacagtgggtacctctggggatgaggaagaaccagatggtggttatacaagtgtgttcacttactacagtgacatcttatggctaaatctcaaaaatataggcagtatgtaaagtaaattcatagaaacacaaagtagaatgtgattgccaggcactggggaaggaaaaaaagggaatttgtttaatgagtatagtctcatttttgtaagatgtaaaagttctagagatctgattcacaacaatattcaatattcaatatttaaaacaattgaattgtacacttaaaaatgtttaagatgggccaggtgcagtggctgaggcctataatcccaggactttgggaagctgaggcaggaggatcactagaggccaggggttggagaccagc

SEQ ID NO: 221859 - DNA, 507 bp, Homo sapiens
tccagtgtctgaaatgaaaaataacctagatggatttaacatttggctgattttggataaaattacaaaagcaattcaatgaagaatagatagtctcaacaaatggtagtggtaccattgaatatccatatttaaaaaactaaactttgttgatatatatgcctcacaccatgtgtaaaaattaactgaaaatggatcataggcttatgtttatagtttcttccaaaactattacacttttggaagaaaacagaaaaacatgttttgtgactggattaggcagatactattttagatacaacaccaaacacactattcctaaaagaacaaattgataaactggacttaaattacaagattttgttcttcaaaagattcttaagtgaatatatgcacaggcaacagactcagaagaaatatttgcaaatcatatatatgataagggacttgcatctaaaatatataaagaactcttacaactgagtgttaagaaagcaaacaacctag

SEQ ID NO: 221860 - DNA, 543 bp, Homo sapiens
ggaatgtcagtcagcaagagggaccatgcaggctatttagccatgtctgtatagtctgatgttacatttatgttcctcccaaggacaatgcaacatatgtgtggaacttgtttggaaacctgctcttttggacaaagaaatatccatgactcagccccctaaaactcttccagaattttgacattctaaaaatgcatcttgtcctccatgtggaattttgtccttcctaaattcattcactaagtaatctttcattgtgcctactatattctaggtacttttattaagtgtttagtattcaaaaataaataagaccccatccctggcctttacagatgcaaaaagcagtgctcatctccagtggtcttttttttaagtcctatgattaaattttaaaaaaatatatgacatacatacatacaacaaaaagtttgttaaagataacacagagaccaatatatttttttttttgaaatggagtctgggtgacagagtgagaccctatctcaaaaaccaaacaaaaaacctgaaaacaattttaaa

SEQ ID NO: 221861 - DNA, 475 bp, Homo sapiens
acccccgcttaccccatgtttcccaaatgaggaatccaaggccaagaagaagggaaaggatttacccaagggcattcctcaaccacagaagggaatccagggatttgggattctctggactagaggaattaaccgggactgggctagagcctgggcaagacacctaagaaatccaacccccaagtccagcctaagtatccaagtccctgtcccagcagcccaatggggagcccacctggacaggaggtaggcctctccagaccacaccagagaggtggtcccactcctacttcaagactccaggatggagaaaagccactgcctcctccaagatgctctggccactgagagtggaatccagcccatagctgaggaagaccagaggaatggttgctgctgaagacagaccaagtggccagaggtgctctcaatggagaaggaactctagccaggagaataggttgaggaggagcag

SEQ ID NO: 221862 - DNA, 431 bp, Homo sapiens
cgtttcccagataaggtgtgtcctctcatccctgctgcatttgcccagacctcctttcctggaagtgtcttcttcttctttgcttatataaatattctatttatcccccaaggcccagcttaactgtgacttcctcagtgaaatattttctaaaaccctaattacaagaaatgtgtttttctgctcaactcccataacaaactgcataaagctttattttctcctgctttgaattatggttcatttttgtgttttcagactattagtagctggtagctgggtcatgacttttgcacctttttatctttccagggaacctagcacagttctaggtaatcaactcacatcaggcaaaaagataaaaggaaacaggtaaactaccatgaagaggaaagagcaggaaccaattctgcaggtggggacagcgagta

SEQ ID NO: 221863 - DNA, 353 bp, Homo sapiens
tgtctgatcttgatgaaggctgataacatgtcactcactggaagaaaatttaaatttatcaataaagataatataaactcatatgccattgaaataagacattgaagacaaactggttaatgagtgtggccaattcaaagagaacttaagatttatcactgtccaagaaaacttgaaatgcctttaaatcttacagccaatatacaaaaaaaatttgatagaggctttaccaaatttgacgataatcctaaaaatatacatggcattacttgtaatggattatagctaaataatgaagctaaaagaaacttttctaaatgatcaataataaaaacaaatttaaatcaattatg

SEQ ID NO: 221864 - DNA, 1034 bp, Homo sapiens
atgctaggtggctgaaatggagatgactaaggtcagaaaattgttttgctgcccagaaaaatggagcatctttatagaagcaccagtgagccatcatagaataaaaatgaattaaatacttttctcatcattctactagctctctgaagcttcaagtgtttgtgctaggtatcattaaaagaaaaatcagtgttcatagcagctttatccacagtagccaaaaggaagaggtaacccaaatgtccattgacatgagtggctaaacaaaatgtgtgatcgaatatccttttatttatttatgtttttattagttttttagagacaaagtctcgctctgttgcccaggctggaatgcagtggtatgatcatagataacttcagccttgaacttctggcttcaagcaatcctcccacctcagcttttcaaggtgctaggattatgggcatgagccatcacacttggccttgtttcctttttaagcatgagtaaaattacatgtttatttgtttgttttgttttgttttgttttttgttttttttttgagatggagtttccctctgtcacccaggatagaatgcagcagtgtgatcttggctcactgcaacctccgtctcccaggttcaagcaattctcctgcctcagcctccccagtagctgggattacaggcgtgcatcaccacacctggctaatttttgtatttttagtagagaaggggtttcgtcatgttggccaggctggtcttgaactcctgacctcaagtgatccacccgccttggcctcccagtgttgggattacaggcgttgagcttccacgcctggctagattccatgttcttgagcatagctttgagctagtttttcttggattttctgccttagtcgtgactatatagctcacagtgctttgagagcaagctgtttccctgagacgagtgaaaccgttttgccaattgccagaattgcaggtgggtttctactagaagacacttgagagaaagccctctccgggtcactagacgagtctgacacag

SEQ ID NO: 221865 - DNA, 649 bp, Homo sapiens
aacaagtcaggagtcttggagcagctcatctggatggtgtggctcagggcctctcgtgagactgtggtcaagttgacagttggggctgtcgtcatttggaggctgaatggactaacggatccactttcaacacggctcctgcacctagttgctggcaggaggcctcagttcctactgtgtggacctccacttggagctgcctgagtgtcttcatgacacactctctctcggatcagaaaggagacattagtaatgccaaggatactcctttactcccttcacaagtgggcacagatatggtcctttttccaccagctctagaaagaaacatgcagagatgtttgaaggcaagaagacagtggcctgcatgacttggagcttttcttaattgtaagtcagagataataattaatgtcatgcctagttcagagaattattgtgtgactcaaatgagatgatgagcattaagacattggaaactttaggtactatatgaatgttttcttattggggcaaaccattttcctcttgtaaaggtgagcccagggacatgtctctcccccatctctatactatcagttctgatctttgaatgattgcagtgcccctcatagggttgggtaaggaccaaggcagagaatatgtagat

SEQ ID NO: 221866 - DNA, 455 bp, Homo sapiens
gacttaggtaaaagaaagcaaaaaggtcttcagttgccacgttagagccattgccatacgcttgctttgcagttagcacttggggctgcagcattcctgatacagtgaaggagaacaaaacgggcttttctgtggaagcctcttctcttcatttatgtggtagatttagagcttcaaagaccccacagcacaggccctttttcatgtagatgaggattctgaagggaagtgcctgaccggataccctctggttctgctttgtgtggccatgttttctagctttctgcaccataccatctgctgccctgggtcagatcacaaaaaatgaatccaggtcctgtgtgccaattgtttttgatttgtagtcttcctcttttgttttctgtaaggtaagagtgtctcttagttggcaggcagtcagcgttcttgagaggttgtttgacagtcactttatc

SEQ ID NO: 221867 - DNA, 416 bp, Homo sapiens
gggtgtgataagagcacccactctcagagggaatctgtgagaactgtacaggaaaatacaataatgctcagaatggtgcctgacatgcagttagtactccaaatgtttgctattcttataaacccctgcatgatcttccaaaggtttcaccgatcactgtgacctgagtcaccacaagctctctgtggttagagcagtgagaattggagcccacctgagaagtattcagtatgtcagttatctaatgtggcagaaaaaatgacccccaaaacttagaggtttaaacaaacaaacatttatgatctcacagtttctatgggtcagaaacccaggagtggccacaccctggctcagggagtcttacaaggctacagtcggcgtgtcagccggggctgcagatgtctctgtttgactag

SEQ ID NO: 221868 - DNA, 299 bp, Homo sapiens
taatcagtacaaatgccagaccctaaaatggggggctgcagaccagtaacggtcctctgggaatctttttggtcattcccgtttttaaaatttcatccgatcacttttatttaagtatcttttcagctattctccttgcaaatggtaagatctggttctgcaagttgcaaagaacccattacaggcaatttaggcacagtttggagatgcaatgacttctcttgccatgctacactgccgactctgggcctaatgacctggctacccatcaggatacctgtgcatgcctgaatgatcac

SEQ ID NO: 221869 - DNA, 1177 bp, Homo sapiens
atccatttgtcaacagacactttgattctttcgtatcttgagactaatgtgaatatgctgcagtgaacatggggtgaagatctgtcttcaagatggtgattttctttcctttgaacatatacccagaagtgggattgctgggtcatatggtagctctatttttaattttttgaggaacctacatactgttttccataatggctgtaccagtttacattcccaccaacagtgtgcaagagttcccatttctgtgcatccttgttctcactttttaaaagagaaactacccttctatggccttactgaacagtgaccatgttttgaaccacttgattcctgtctcccgtctctccctcttgccacatctggaatgagacataatccaaagatgaccaacctgtgggcttaccaacaacctgtggcttgatttgcaaagtttaactcagtcagttttaagtactatgcatgttgtctagattgaaattccgacttagccacttgctagttgtgtaaccttaagcaggttacccaaagttcactatgcctcagtttccttctctgtaatattagatcctatataatgtggttttgagaattaaaaatagttaagtccttagaacagtatctggctcatactcaaagcttcataaatggtagccattattattattctggtaggaatttggaattaagaaactgaataactaaaagagttactagtagaaactaaaggtagagtgtcatgagatagaacagtggtttttattcctttttggggtcattgctttcctgaagcatctgatgaaagtatggacattccctgcagaaaagttcataagtatatataaacaataaaatcaaggttgaaagcacctgatgcagagaatgatggagaggaggccacagcaagtcagagccatgtgcaagtcagccttgagaaggagcagaaactgccaccaaagcagagggaactgttgagtaaacggaggggaatggactgaatgaaaaggcagaagcagaagctgggagatagcccttcagttccggtccagtgatttctaccccagaattcctgtgagatctctgtttatctcctcacagccaacttccctgcttataaccaagctagcatagcctcccttcttgcaatcacactatccagaccgaaaaaaaaaaa

SEQ ID NO: 221870 - DNA, 439 bp, Homo sapiens
  misc_feature (15)..(16): n is a, c, g, or t
  misc_feature (88)..(88): n is a, c, g, or t
  misc_feature (90)..(90): n is a, c, g, or t
cataggggtgcaggnntacagagttgattcctagagtctagaagcttcctcgggagaaaacaaaaaaacgaacaaggaaacgtttttngnggggcgcacaacaattttcctcctttggtgggatattttatatacagacttttacttaatccccaccctcagctgtgtgcagtgttctcagatatagtcctctggtcaacctctgcagaagggaaacctctagcctgctgaaagttgtaactgttaaaggcttgtaactgattctcctattttagccccaccagcccctctacctttagatgtacatgaacattcccaaaattctaccaagggaatcggcctttgcattacaattggtaaaatgttgttgccctttgacctctgttgtctgctgtcatctttacctagcctactttttaggtatatatacccgctaaaa

SEQ ID NO: 221871 - DNA, 788 bp, Homo sapiens
ctgtgtggttgcatttggagattaaaggtctctaaggaagtaatgagggctaaatgaagtcataagggtgtgccctgatctgacaggattagtgtccttataagaagagacaccagagagctttcactcccctccccgctctctctgcactacacctaccaagaaaaggccatgtgagcacacagcaagaagacagtcatctgcaacccaaaggtaaagccctccaggaacctggcaccttgataatgaatttctaccctccaagaacgtaaaaaaaaaaaaaaaaaaactcctgttgtttaagcatatagtgctttactgtggaaacctgggaagactaatacactgcccttccttctttttccagtatgatcattagggtctgggagggtaagggtctgagtaaatgcagttattgagtatagagccaatgctattatcataattttatattactgtgagcaataacaacaacaacaacaacaaaacagggctaccctttggtggcaagtatcttatatgtatatcagcattcaggctcactaacaaagccagatgaggcgctttctcagcagatgcagcactacaggtgtctgattctagcctggcaaattttcattttcataactaaaattacagggagaaaatgtgaaatggtaacaaagaaactaaacttatattgccttgttcaaggttttcatttaacgaaaatgtgctctgcacataccagaaaattatacgtgtaaaaagaaacacttgaattcatctgtaaaatgcaattctaaatg

SEQ ID NO: 221872 - DNA, 834 bp, Homo sapiens
tgatatgaaactctgacgttgttgtgattacattgtattttttcatatctgttatgtgatatagcaaccaacatattagttataataataattaggtaatgagttcacacagttattggatggagtgctgtgtccatccctaggtgtttgttattgtagtgatacttataagaagtacagcttggtgtacctacattagcgcaaatttcactagtcaggaaaatgtggataaagtggtccctttgattcattagccctatacgaagtattttgaaaaaaatattttaacagatttgtatcctctttccatatctcatataaactgtaattatttttaattcccccaaatgaatgaaagccatctttaccattcgattctttaaaaaaaaaataagaattagtatttatcgattacaggtcctgtgcactttacatactttctttaatttagtcttacaacaatgctatgtaaaaagtactttttgaaaaaatgaaataaaatttatgtaccataacatttatcactttagtgttcagttcagtggtttttagtatattcacaagattacgaagctatcggtactaattccagaacattttcatcatcccaaaaagcagctccatactcactagcagtcactacccattcctccttctgccagctattagaaaacgctgatctattttctgcttctgtggattggcatattgtggaaatttcatataaataggctcataaaaggctggatggggtggctcatgcctgtaatcccagcactttgggaggccacggtgagcagatcacttgaggtcagaaattcaagaccaggctgg

SEQ ID NO: 221873 - DNA, 401 bp, Homo sapiens
attcatctcagcggtcaaaaccggacttagctagtctccaaatttgcctactttaggaacattaggaagttatttaacctatttgggctttgtttgtgtcgtcgtttggttttgtcttaaaattgtggtaaaatacacataaaatttaccattcttaagtgtacatttctgtagcatgaagtacattcagtattgtgcatcagccatcaccaccaagccatttctggagctcttttcgtcttgcaaaacaaactctgtccccatgaaaaactgattccccatttctccctcccaccagcccctggcatccaccattctactttctgtctctatgaatttgacaactcatgtgacctcatataataagctttgtttaagggtaaaataaaatttaatagttg

SEQ ID NO: 221874 - DNA, 224 bp, Homo sapiens
taattggatatcataattgaaaaactgcagttaggctggcaaactaatcacataaaaagtaaattttttaccctcaatattttcaatagtcacttctcaattatgagaaaacattgtttgttagaagcatattctaagttgatgttttcagtataattttggattcctgtgaatgacaatattatatataataattattaataaatatttaattacaataaata

SEQ ID NO: 221875 - DNA, 508 bp, Homo sapiens
aaaaaagaacagatctttggtacttaggtcatgccagaattgcttcagatccctcagtgactgaggggacacttgaagcagttggcgaacgaggcaggggacaaaaaggacgtggtccttagagaagcctgtacctcctgcctctgactttgtcccactgtaattggagcaaattttcacggcaggtgctttttcattccttgagaatccaggagcagaagttctgaatgaataggaaagtgagggattggatgagactcagaatcataccattaaggcatttattagacttagtaacagaggcaaggagaatccacaacagttaacagaataaatagaagttgctttggggctgggcgcggtggctcacacctgtaatcccagaactttgggaggccgaggcgggcggatcataagttcaagagatcaagatcatcctggccaacatggtgaaaccccgtctctactaaaaatacaaaaattagctgggcatggtggcatgtgcctg

SEQ ID NO: 221876 - DNA, 390 bp, Homo sapiens
gacttatagatggtcaaggagatgtatcttctcatcatgtttcctctgtaggtgtgtgtgttccaaatttcctctaaggacatcagccatattagattagatcacatcctcattaccttattttaacttcattacttctgtgaagacctttctccaaatatgatcacattctgaggaactggagtttacttcatgtagggattttatatttttgtagataaattcagtccataacaatgagtctcatgtccataaaagaaaaatcctttgcttttgtgagatgcatgtacatctctaatttttgtaacacacataagcagatatatacctatagtttaagtgaaatgatgtacatatttaataattttggccttctgtcttcatatttct

SEQ ID NO: 221877 - DNA, 500 bp, Homo sapiens
acggcacagcaggatttaggccagacttccccaactcctgggcaggccctgtcatctgtaccatgccccaattccatggctctgcgtgatgtgacaggaccctcagctcactgtttgcccctgctggaggcatcacaccttctgccagtggctgttaagagctgacctgtatatcacaagcccatttccattatctgctcactttttgttccctgcatcaaaatagttgactctgtaaggatatctctcaaactagcagattcttctttaaaggaaatcagaaatcccagctgtttaacttttttctaatttcctttatgaggcaccattttgcttccttcctaaaaaattaataatgtatattctggattcatttttcctttctcttgccttcatccttgtacagtgtgttcctaatacagacatttttctgaaagtatgaaaaagatttatggacacattaacattttaacgttctgcaataaaatctagtatcaatt

SEQ ID NO: 221878 - DNA, 326 bp, Homo sapiens
ggtatcacacaagagaagttctctcatttatttaaaaaaatggaaaatggtaaaagatgtctaatgtcttgtatggaccttgtatgagataacttactcttttattcccatattttctataaattttttagctttacccctcaaacatgggagaaaaagtttcagcattttaattcaaattggtaaaaggctgagcaacccttaaagctgccataatggaagaagactgtgagctagcttaaaaaagagagaatgaaggggaagaaacaaaacccctgtgtggcagagtgtcgagatgagatgagcatttatttgtctccgtcgaa

SEQ ID NO: 221879 - DNA, 725 bp, Homo sapiens
tacattaaagggaacaataataaatagttttatgaggatctatacttagctacaaaaattccagatgacaaagaggcatcaaatgcccacttccaagaagaatgttatttacagagctgaactatatacatttaaaaaataaaccattgctactgccctgtaatcaggagacttgataataaccttcatgtttattctctgctgttcacctatctttttggggctgttttctaagaataagtctacacctttaattgctttgtcacacatgcagtgctgaatgttttgtttagttcttttaattaaatgcttatatatgtgcctggaagagaaccattgagttgctgcactttgaaccatctgttacctcatagcacaggttattacataaaaacaagttctagaatttgtgatgtttagagacctcagtgtccctcctattcagcttgttcaagttacattattagctgtacaaaatcccagattggcttgtattttaaactggaactggaggtggtatatagttgacaaaactgcctgagaaattcaagctgttcacatcatatgagttatctgcccataaaggagtccaatcatattgttattgctaaaaggattagtaactttttttgttttgttttgttttggccacattacctgtagcacatctgggaacaatttgcatgaaaacaattgatgcccatgtcccaagaccaggaattaat

SEQ ID NO: 221880 - DNA, 265 bp, Homo sapiens
tagaccaactgaacagaaaactcagaaataaagccacacatctgcaaccatctcatcttcaacaagggagataaaaacaagcaattggaaaagaattccccattcgataaatggtggtggaataactgaatagccatatgcagaagattgaagctggacccctacttttcaccagatacaaaaattgactcaagtgaattaaagattgaaaagtacctcaagctacaaaaattctagaagacaacctagcaaatatttttcccaa

SEQ ID NO: 221881 - DNA, 474 bp, Homo sapiens
cctgtgctaagaccatcgcacaatatctgaacttccatttccatgtgaaagaaaataaaattgcaagtgtgaaggcagatggtgcttgcaggattggcaggcaccctcacgggtggccgggtggcacgcgatagccatgtgtgcgccatttctctcctctcgccggttccaggctggcacacagccggcttcttctctccatggttggccaagttccctccctccaaatcgaggctccaagaaatctcatggctgtctcagtagatcaagatccccttcaccacaatcggccaggcataatgtaacaggaaagtgtgagggagagacgagttccccccaagaatccagcagccttgctggaatgcaggccctgctgaaagctgttgctgatcaagtgttaaaagggtgtagcatttggcctatgtatattttgtcacattccttttgtaataaggaagggggtaaaggccaaga

SEQ ID NO: 221882 - DNA, 776 bp, Homo sapiens
aagtctaagaactctttgcctcaggtcttaaatattttttcctgtttcttccagaagttttataagttttatctcttatatttaggtctatgatctgttttgatttaatttttgtgtgtggtgtgaggttaggatctaagttcacttttttgcatgtgaatatccaattgtctcagcaccatttgttgaaaggacagttatttctccattgtcaaaaattagttaaccataaatgtgcaggtttgtttctgatcctcagttctgttctattgctctatgtgtctgccttataccagtgtcatgccctccttattagggtagttttacagtaagttctgccattggagagtatacatcctctaactttgttgttctttttccaaattgttttcactgttgtaagtcctttgcattttcatataatttttgagattggtgtgtctacatctaccattattaagatttcataatgattgagtgcttagtatttaaacattgcatttaaactgcttcatttttgactgggtgtggtggttcttgcctggaatcccagcactttgggaggccaaggcaggtggatcacttgaggtcaggagttcgaggccagcctggccaacatggtgaaaccccgtcactactaaaaatacaaaaattaaccaggcatggtggcatgtgcctgtaatcccagctgcttgggaggctgaggcaggagaatctcctgaacctgggaggcagaggttgcaaagctgaggttgcattactgcactccagcctgt

SEQ ID NO: 221883 - DNA, 466 bp, Homo sapiens
agtggcagcaactggccaaaggagatgcagccagctaagactgtccacactttggcagacaaccggttttcccttttctgggtctgttcaaaaagcaaacattaagggtgggcacataatccacaagccagaaagttgtgcacggctccagtgttgagatgggtagggccaagatgaccagtgtgaaaactctcagatagaaaggagccatgcatattaaatgaggggcaacaaacatttcaaacgattagataacattttctcccaactcaaagatcccaacaatgaataggaggcatggaagtagatgtgccaatggggagggatgaggagtgaacatgaatattatttgaatagactttacctcttaattcttgcaacatgcattcttgattacctactgtgtgccaaacaagattttgtagaatattgcaaaaatgaccataaattcctcgtgataatgtga

SEQ ID NO: 221884 - DNA, 646 bp, Homo sapiens
  misc_feature (434)..(434): n is a, c, g, or t
  misc_feature (506)..(507): n is a, c, g, or t
  misc_feature (530)..(530): n is a, c, g, or t
  misc_feature (550)..(551): n is a, c, g, or t
  misc_feature (568)..(568): n is a, c, g, or t
  misc_feature (575)..(575): n is a, c, g, or t
  misc_feature (589)..(589): n is a, c, g, or t
  misc_feature (592)..(592): n is a, c, g, or t
  misc_feature (616)..(616): n is a, c, g, or t
gtggaaattaggaagctcatctcatcttccgacaccatagttctaagggaacgagcagaaggaacctgtctcagatctcaggggtgcttacaaatccccacaaatacctctgcttatgtcgaattagggcatccaggaacttcttaccgcttagagaacaggcctgattgccaaaataacgttcaggctctgtaaatatcagcccgctggcctcaagtaattccccccgtgtttaagaaggccaagcattaggaaacctgagcgttaagaagcctgagtgtgggccaggcacggtggctctgcctgtaattccagcgctgtgggaggccaaggcaggtggatcacaaggtcaagagatgaagaccattctggccaagatggtgaaatcccatctccctgtctacttttacatttgtatttttgtacacccccancccggcccccagcagacacacaaatcagcatgggttgttgtagggatttactttaggaaggaagatatgggnnaattggaaccaagaacacttgtntccagaagacgacttctggnncagagcagtggcaaggnatgaaancataattgcatcangtnctccaagcttcctcggagctggangagtcagacaaaaagtcgacaccgtgaatt

SEQ ID NO: 221885 - DNA, 178 bp, Homo sapiens
acatggtgctagcatttccgtgtaccaaggtgagcccaagatttggtgaggaacagccaggcttgtgcgctggctctcttgctaggaaaatggtcacagaacgttccggcaaacaggtcaagcctgtggaattctgtgcctgcattcatctacaaattaaaatataacatgactcctg

SEQ ID NO: 221886 - DNA, 307 bp, Homo sapiens
agcttcttgacatcacgttccaaatcaattacttgccctcaaaacctatctcagggtctgtttctagggaagccaccctgagatgctgaagcacagagacgttggctaagcaactcaccaagtttataaatttatgatgtgggagagcaggaattcaaccccagggagtcagctgctagggtccatggtcttatccgcactccaccagaacctttgcaaactacggccagagggcaaagtttggtttgctgcctgtttctgtctgcctgtgagttagaaatagtttgtatagtttcaaatggtcaaa

SEQ ID NO: 221887 - DNA, 396 bp, Homo sapiens
aataaagcccaattctactttttggggggcaaatgttccatctaagttaacacaaaaagaagaaatttaaaatatcgatataagcaactgcttactaaatagagtgctttatccttgtcttggcatcacttacagttattttaagcaatggcctattttctgtgtttaaatatttctaattagccagaaatttgtcatgatatttagatcattaaaagcctaattgaaacatcctttctctccaaagcctggagttttctgttcctgtttttttggtttgtttgtttttttaagcagctttattgagatacaattttcataccactacatttacccatcataaacctacagtttaaggatgataattaaacttataaagttgtccaaatatcacca

SEQ ID NO: 221888 - DNA, 179 bp, Homo sapiens
gctctccttccccattgagtttcctgaaatgttttgtcattcagaatcattccacttcaacccaacttttcttgctgagttcagaaagcaaatactaagtattcccatagacagcagcttttccatttccaccctctcctattttcagatggagcccttatttgtagcagatgtaccta

SEQ ID NO: 221889 - DNA, 409 bp, Homo sapiens
attcctccaggttgtggggaaaatggagattctaagcacgatgtccatttcacagaaagataccaatttggtggcttatttcctttctaccttcagaagtggctatccctgccacccaaacagacccttgactctcaagtggacggggtcccatttgcacagggggagaccttacagcctacgttgagtctatacttaccacttagtgagcatggtatccactcaggggcctctgtgggcatctgtctcctctgcagcatctttcctccccactgctgggtctgcacatgaccccctccttgggttaggcctctgatcagtgatgaccttggtatggtggtaatggtcagtcttggcatcaaatgagccagtttatatcatcagctattcaataaaatactaatctagg

SEQ ID NO: 221890 - DNA, 362 bp, Homo sapiens
taagtccaagtgaacagaaatggaggaggcaggaatggccatgtggggttcagccagagacaacggagatcacttaagagatgactctcaccttacccaccctgagctcaatgtcaatgcatttcctattcagattggcataaagatggtggctgataaccacttatcacctgtatgaatgaacaatgaatgagcataatcaaagtactcagggccctattctatgtaatggagttcaaatgaaaagtccaaactcccttcccaagcaattgtttagatgacttaaatgtccctacgtagtgattgttggttatttcctttgaatcagagaaccaaatgaaaaggaaaagaaaaaggataaa

SEQ ID NO: 221891 - DNA, 368 bp, Homo sapiens
ggagatgttgaatggacagtcaggtatataaatccggagttcaggaaacaggtcaggctggagatatacatataggaatcatcaacatatggatggtccttaaagtcatgaggttgtacaaaatcactatgagagtgaatgcagatttaaaaaaatagaagacatgcaaggactaatccttgggactccaaaatcaagagaccatgaagctgagaaggaatcagcagcaactaaggaggaaaggcagtacagcctggtatcccagaaggcaagtgaagggctcatcgagaaagaagggaatgaccctgtggccatctgtggcaaagtcagtcctgggggactgagaactgctcattggagtacctgaa

SEQ ID NO: 221892 - DNA, 528 bp, Homo sapiens
agacaaattctttgaaaggcataaattaccaaaactgacttataaagaaattttgaaatatcagaataggactatatcaaataaatggaacttataattaaaaaccttctcaaaacaacaacaacaaagattaaaaaactccagacaggtttactttgaaatctatcaaactttcaaggaaatagtaataccaaatctatacaaactcattcagagaacagaggaggaagacatacttcccaacttagtctatgaagtcagcattctactgataccaaaaccagacaaagacattacaaagaaagaaacctacaggccagtccagtgtctctcaggaatgaacacagatgcaaaaatgtttaacaaaatgcaatcaaattggattcaacaatatatagaaggtgggggggggattgtatccaggaatgtaacattcacttaacgttcaaaaatgagtcagtggaaaatagtgttttatctgggaactgcaaaattcataacaaaataaaatacataaacactgaataa

SEQ ID NO: 221893 - DNA, 507 bp, Homo sapiens
aagggcatttaataaaatttttcatgcattcatatttaaaaacaaaaacaatggcaatgcaaaataagctctaagtagtatttacatatttcgatttattatgcaacatttctaacatatataaagatatgaagcataatgacaaaggtccatgtacctgttatccaatttaagaaataaaacattaaaaattcagtagaaatcccttgggttctattccatgatcatgttcccccagagagagccactattctaaatttgttttttatcattttatgcatttctttaaacaatatgtagtgttgttagcacatagtgtttcttaattttaaataaatggcattctattatttgtattagtgggagacttttccactcaacatcttaagactgtatgtacatatagtcatttacaaatgattgattattcttctagagaacctgaaaaattttaaatattggaataatgaaagtttagtaagctgacaatataaaaatgacaatttt

SEQ ID NO: 221894 - DNA, 844 bp, Homo sapiens
gcctctgcacacgctttacctgcccctcccagagagtcacagccaggccaccccctgcctctcatttttagcatagctttcggtgtccttgttctgatgccttgggttggaaacagtgtttaaatgatggggaaaatgtgagagtttgagacagtcagtgtgcagggagatgggaaggaaaaaggagtcaaatgagacctgggttgttcctctctccactgcctttagaacggggtcagcctttgcccctgccccacaaagtcgtgtaagatctggccctacccatcccaaccctgggggccactgtgctctgtgcacccctgccctgaacacacccagctcgcccggcctccagctcctgcagatgctatgctgttcctcttcctggagctccctttcccagacctcctcatctccctcagctgccagctcaaatgccgtctctccaggacgtccttctctgcagccccgcgcactccatcatcctctgtctccatggtgtttcttgaatcagaagcggtttgttttggccaggcatggaggttcacacctgtaataccagcactttgggaggctgagacaggagaatcgcttgagcccgggaattcaagaccagcctgagcaacatagtgaggcttcatctctccaattttttttttttaaatcagccaggtgtgttggtgtgcacctgtagtcccagctacttgggaggctgaggtgggaggatcacttgagcccaggaggtcgaggctacactgagctatgatcgcagcactgcactccagcctggacaacagagtgaaaccctgtcttgaaaataaaggaagagaagaaaagaaacaag

SEQ ID NO: 221895 - DNA, 831 bp, Homo sapiens
gaagaatggcattcagtgataagaactgttcatgagcctgaattccatggctgctcctgcacaaaccaccggacacagatccggggaaaggcaacaaagttgcctctactttgtgagtggctagaagttactggacatctgggagccctggtgccttgactgtaaaatggagacaacaactcctctcatggttgttatgacaaggaaatgagagatacatatcaagtgcctaacatagagctggctcctatgaaccagaacttattaagcaattgtagaaggcaagatttaaagcacagactttggagcagtccttgggttccaatcctggctgcatcgtttatcatctctgagcctcagtttccacatctgtaacaaaagctttcattttacagatgtaaaagcagtgtgtacctccaaggggtggttgtgaggattaatcaagttaatacacatggcattctcagatcagtgccttgcacggcaatttactcaataaatgttagcgattttttttcaatacatggtcattttttttttttttggtctctttttaactgctcaagaggaagactgtgaggattttaaatagcctggattctcttccttctgtcaaccatatgtcttaacatactattacgagttactcctccccaatagtagcagtattgctggttgtgaggagttaacccggccatgcctattaccttgggaaacctacagaagcctgctgaatgcaattttctatctgcaaaatggtgaggatactgggtgtttacatgactgggttcctgacatggaataggcatttaataaatactaactataatt

SEQ ID NO: 221896 - DNA, 429 bp, Homo sapiens
tgctctttggtgtccaggcccctggcgctgtctggacctgtggtctgaggtggaccaggtgcctcccctgggaaagtggggatgtcctttctgtcattcagtacctgcctcccttccgcaccacgtggggcttctagcccatgagagacgtttcaaattcatatgacccacataaggggaaattctgcccatgcagtcccacttggaattctttccagactgaacttcggggcatcaaagcttttggtgtcccggcagcctctttccttttttttattttatttattttatggatctggaagctttagaagctcactgtgcactccagcctgggcaacagagtgagaccctgtttctggaaaaaaaaataaaagcaacaacaaacaacaacagcaacaacaacaaataaagtctatgcttttaacataa

SEQ ID NO: 221897 - DNA, 455 bp, Homo sapiens
tgttgcaggtgtgcattttataagagtacacaatagattctcgaaagcattctcgctgtgctggggccgggcccaaagaggtggcacctggcatgtggcagccagtcgtctttagccctgggccaccctcatgactcggattcgtcttagctgagacaccagcacctgggaggcacagcctgggcccactccacaggactgtcctaccaggatggagacaatctcctggccctggttcttggcaggtgggtcatgttacggggactttctgtacatggacattcacgtttcagtcaggcccggcctggacgggagcaggaggggcctctggggactgggaatattcctctcgagttggctgctggctgcacaggtgttgttggtttgtgaaattcatcaagctgtgtattttctgtatgtatatgtcaacaaaagtacaaataaaataaaaaata

SEQ ID NO: 221898 - DNA, 329 bp, Homo sapiens
ctccccacatccctcctcctccctgaccccacctcccaagcctctgaccaatgcttcattgaaccactttgaaacgactttttcttttgtatcctctatgttttgaaaactgcctacagcatttactaaataataatttatctttcacccttcctaaaataaagtttgagtctacagcttccaatcagaacttcgtccattaaacactgactgagcaattactatgcccagcactgcactaggcatgagggctgtgaaggtgaacgggacctgccctggccctcccaggtgcacggcctacttgtgggggaaagtcacataaagagaga

SEQ ID NO: 221899 - DNA, 366 bp, Homo sapiens
gctgactccactcctaagcctgctcgccaaccgcagcttccctagctggtattttaatgcgaagggttgggaggcactgccttaataggaattttgttttgatttttaggtgttgaatcataaagctgaattgaaactgctttttagatgctgtcatttgggggtcaggaagcaaatggctgtgatttaatagcagcaacttctacagatcaagtagagaagggtacttcattgatgaagtacagtcttcgactcaaaattttatttttgtctgtgggtttaaaaagcggaaatatattttgctctcaaactaagtattcccacaaatactttaataaaatggaaaggatgaaaaggaggaatgct

SEQ ID NO: 221900 - DNA, 373 bp, Homo sapiens
tcccctttccactaatgttgatgttatatatacataatggcattatgaatatacagcattattctaaattaaaggttgaattacagtgtcaaatgacagagaggaggctgggcagagaagaccttagatgtctactaaaaatatcttctttgcaatgctattgtgatgaatagacagaacatatgtaaagctccagaccacagtgttgacagaatacctgctaattgttgacattattgccagaaataattttagcaatagagcactttgttcattttttttattttatggttttgggatgcgagacaatggaacatagcttggaggatttttaaataacagctcaattgcgatatgattcacatgccacaga

SEQ ID NO: 221901 - DNA, 329 bp, Homo sapiens
caaaaacttggatgatcagcataagattggctaaatacatttgtctatatctctacagtgaaaattagattttcaaagaatatctaacaacttagagaaatacttattcagttgacacttgaaccatgcaggagtcagagacactgatccccacgcagtcaaaaattttcacagaactctggacttccccaaaacattaactaatagcctaatactgactaacaccttactaatagccgagtaatacatatttttgtatgttgtgtgtgttatatgctatattcttacaataaagtaagttagagaaaagaaactgttattaagaaaat

SEQ ID NO: 221902 - DNA, 659 bp, Homo sapiens
gaggagagaaaaaggaaattctttgtcatttgtgttgtccatttacttgtgttatacctgtattaacttgttaataacctcacagaaaaggatataaaagaaaactcaaattatatgtaattctaccacttataactgctgctagcattttgtgtatttccttaaagtttgtctaaaccattttaacataaaaatccatattgagctcatgtggcagttttatatcctagttttttctccataatattgtatctaaagcatttttccaaatcattaaattcccataatatttttagggacaggctagtattttatagaaatctccaaatttaactatttttctatggttaaatatttggattgttgaacatttagattaagtttttaagtaattttataagtaatgcttgtagatgggtatttgatggcattggaggttattacctcatgatagacaagaaaggtaagatttctgggtgaaagagggtggactttttgtggcaagctcctgcaacattgttaaattgctttctataaagattgtacagttaaaattcccttaagcactgtaaacttttgcatatcaccatacctttaccagcagtgaaaattttcttttcaaaatttgtcaccttgctaaataaaaaagaagttgaggc

SEQ ID NO: 221903 - DNA, 435 bp, Homo sapiens
tcggctgttcttcctgaggaaatacaccatgttaccattgaggaagttcttcttctctctttccccgtacatttttattgtacgcagaaagacagaagaaggaagccctgaaggaagattgtgtatgaacccaggattctgttattacgtctgatgtttgtttctagttaaaaatgagaagtaatttttgggagggagacagaaatgggaaaagtttataagcgagccagtggaaaaagcacattcattatcagtgtctttctcactgagtcgtttgaagttggaaaattagcagcttctttgaagctcataagatctttcatctttgtgtatgtgagtgtgtgtgtgttaatactaagtggagattctttctcttgccacttatttggtttttctgctaataatgaaattataatgagatccctgatgggattt

SEQ ID NO: 221904 - DNA, 482 bp, Homo sapiens
tgcactcaagagagcgacgatgagaaaacccttcgtggcagacagatctcgccaggaacagacaagttgatcaagctgtaaactgtcccaatctttagtccaagtgtccttgccaagaacagctgtggagattatgggcagaagacagatgagaggagagcagtcttcacatgagtccttatcaagacccaaatatatacggcattgctgggagccgtctctgatgtgggtgaaagagagtggcacagaccaagccgaggtcctggtgcctcctttcctatcctacaaatcttgcctggagttattatgtacctgctgattttccttctcctctctatgacacaacctttctttgttgtctccttctccctctgtgacttaaaccgctctccctgcccatcttgctgccatctcacctcttccagagacttccagaggattggggtatgaaatgcacttaataaatcattgcttttttcatt

SEQ ID NO: 221905 - DNA, 356 bp, Homo sapiens
gtattttactttctgcctagtctttgggtagatgctagtgttcactgagacctagctctttggctcagcagaataatgtgcctgggggcttcagacggccctttgagggatgagggtcaccacagggaaggccagctccaaggggcccttggtgtctttgaactctcgcctttgactttcaggcttcataatgaatgcttggtcccttgactatgagtcatttagaaccacacactcattgagattttgagatggaaggactggaagtcatgtggttcaaactcatatctccggccccgttgctcagatggaaagactgagtcctgggtgagggccttctgatataggtatgagag

SEQ ID NO: 221906 - DNA, 629 bp, Homo sapiens
gaagacttactgacactttaatgtgctgacagtataggcatactgaaagttggaatttgggagaacacctctagatagacatcaagcccataaagtgaacttgacaagaaaaaaataatttaaaccatgtaggagattatgcttgcccttctgctcactgattatatgcctagaatcaacacaaaataggagattaaattttgctgctctccattgggtctcacttcccaagtgtctctcagaatgtgagcatcttactatgctgtcagattctaatatttagagccatttatttttcccatattataggccatatacacaaacctactctttctctgatatttaacaatgaaaacatgatttattccaatagtggagggaaaacgggaagtgctagacttccagagactgcatatttataatgtatatttgggcaactttagggatttccaaggttatctttgactaaatgccatttttgctttccttggatcagtatattcagacagtgaagtgaaaattcttgttacaagaaacaaaaaacaccaagatattaaacaactctagaatactggtttggggaaaccaagaattcattatcctgcatactgatgtcagctactttattt

SEQ ID NO: 221907 - DNA, 548 bp, Homo sapiens
aaaaaaaaaaaaaaaaagaaaagaaaaagaaaaaaagtgttgtagattagttgaggatatatatagggagaagttacttcaaaaatgttattttttataaaagtctttttgactgtgtttctcacccacttaaacacctccagggtagagactgtttcttatttatatatattcagtcttgtatatagaggatcctttcctcatgaatgtttatagaataaagttagacattagaaacaagaatgagccttttgcttcttgttgcctgcagggctaaggcgaagctcatggaataagtctaggatgtttgtttttatatgaactgtggtgtaatagaaagagagcaagaaagaacagcagtaagtaggacaagaattagaagctgataagttagtccttctactttagcttagcatttaaagcccatcccactattcttcagcatatgattcagttgatgtgaaactctcactggcttttcatagctctatacatttgcacatactgttctatatgcataaaaattcttttattcctttttcacctga

SEQ ID NO: 221908 - DNA, 415 bp, Homo sapiens
gtctggaagtaggaattggttgattgggggaggggagagccaatgtaaatcagagaagcaataattactaggtcaagaaatagggcaattaaaaaaataattcatggcaagtaggagtgagatatttacattctgaaattaattatggtactttttatttaaattaaaatcaggaagaaaagttcaggaaaaagaggttcagggaaattttatatatattcatctcaactacaaattagtaaagatcttatattcaacaaatgtgtcagagtccattaaagacattagaaaaccctatttcattgtaactaaactgcttgacattttaacctccaaacttttttataatcaaatgtagagattgtgtctgtcttgataagtctacatatagtatccatgctgcaagaataccaaa

SEQ ID NO: 221909 - DNA, 587 bp, Homo sapiens
gaatatcatcatatcgatgatgcttgtgccacctaacctcacaaagttgtcaagagcaagtgagataatagaaacatgctctgtgaagctgtgggctcttgggaactgtaagtaccactccttagaacatggctggcgtttacttccctgctacttgcggaggaactactgagttggtgactcatttaatcaatggggatttatggagcacctgtgtaagcccaaaataagcactgggtctcttcttcccctcttccctcctacgtcacagcctcattctgtgctgattcacccttatttctaggttctaacctattgacctcgctgttcacagcaaattaagagagaagagtttatagcggcaagaagtttttatacctgaaagctggatagtgaagaagacagaaagtttattacaaaatcggtaatgaattataaagaacaagttccttaaggtcagttagtaggttcagatagtccttcctaaaaaccgtcagtagtgcctgagaatatcagctatagcttataagtatttatctcagcgactcttagtcaccacagaacagttaaattataatcagcttagc

SEQ ID NO: 221910 - DNA, 1089 bp, Homo sapiens
actcctgagcccttgggtactagtgttccttacatcgaacaagaactggccgctgtttcagaccggaagggtgcagagatgagatgcctgttgcctcctaagagagttggacatttctattttgatttgcatttcaattgaggttgatagggagtgaccttcacgtctgaatgacctgcagatgagaacagaatagacttgattatgaagcaagaaatttttaaaggatttatctgatggaacatcaagaggattctttctttcttttaagagatatgaggtctcactctgtcatagtggcacaatcatagctcagtgcagccttgaactcctgggctccagcgatcctcctgcctcagcctcccaagcagctgggactacagatgaataccatcatgcccccagctagtaagagggttctatgtgttgattcactgggaaaccagagactagagatacctgtgaagacactttcaagaagttagaagaattacccttgaatgaagaaaggagctgactagaagtagtttattgaataacacacaaagattgtttcaaacctacaaaagataaatgtgaggaagggatttggggaatcctcctatgtcctccagtctggctatacattaggatggaacagaaatcctaccaatgtgatgaatgtggcaaagctttcagagtgcatacctcaatggccatcagaaaacctatactggagtgaaaccctgtgaatgaatgagtattataagacattcaggtagaattttccatttttatgtcagacatttttatctctagaaatcgaattttaatttttttaatatcttttgtgtctgctaaacaaattcaatccttccccttgatttttgcttatatagtcataatatcattaatatccttgtttgttgattctttgtgtcagttctaggtcagttttgaataactgatttttctcatcaatacaggttgtattttcctatttgtttacatgcctagtaataactgtatgtcagacattttccattttaccttgttggagacagaatacttttcattcctataactattctagggagtggaggatgcagt

SEQ ID NO: 221911 - DNA, 251 bp, Homo sapiens
cttacatcgaacaagaactggccgctgtttcagaccggaagggtgcagagatgaaagacaggacccagggtctcaggatgcctgttgcctcctaagagagttggacatttctattttgatttgcatttcaattgaggttgatagggagtgaccttcacgtctgaatgacctggtaggtgacttttctggtctcttcttgaacttatgcaattctcactataaataataacatgacttataaatcaccctct

SEQ ID NO: 221912 - DNA, 289 bp, Homo sapiens
ggggaagagaggcggaactcctgagcccttgggtactagtgttccttacatcgaacaagaactggccgctgtttcagaccggaagggtgcagagatgaaagacaggacccagggtctcaggatgcctgttgcctcctaagagagttggacatttctattttgatttgcatttcaattgaggttgatagggagtgaccttcacgtctgaatgacctggtaggtgacttttctggtctcttcttgaacttatgcaattctcactataaataataacatgacttataaatca

SEQ ID NO: 221913 - DNA, 388 bp, Homo sapiens
gaaactgggagggccaacatctctgcttctccctgggcccagggccgctggcggcgggcggcgggcggcgggcccttccgcggacacttgtcttccacgctctgatgcccaggcgcgctccagaactctatcggctttggcgtattatcctacatccctcccatcggttctgcacggctgccctggaggcctcttttccttcagggaagaaagggatccaaagctagcggtgaaaatagagccagcggcctggcgcggtggctcacgcctgtaatcccagaactttgggaagccgaggtgggcggatcacgaggtcaggagatcggtggctaacacggtgaaaccccgtgtctactaaaaataaaaaaaaagtagctgggtgtggtgg

SEQ ID NO: 221914 - DNA, 599 bp, Homo sapiens
  misc_feature (372)..(372): n is a, c, g, or t
cgtctagaggatccctgctgatgtactgcttcagctgcttctttcacttagcgcttcaaacttcatgaatgggttttctatctctttgatatctgtctcttagatatctatctcttagatatctttctttgtttttgtaccttcatccatccaatgtatcacctgaaggagacaatttgataccatggaacttccaggccttgtaactgtgtgaggtaaatcatacccagatagcttcagtgaggagtatatttaatttctgaaacaacaggactcttgagaagcatgggtggtccaggcctcatttggctttcagatggaaaaaaaaaaaaggtaaaattccaacagtaagaccgggtggcaccaaatggnacaattctccaggtagccatatggcggggcatcttggtctcgggggggcgcccttacagacgggaaaggcgggagtaaagggccccaagatagggatcccttaatacggtgacgcacgacggccaccgtgagaaattcctttgaagacacaatacgccataacagcgtcctccccagaaagactgctggggggggaagcctgactgggggaggtgcaaacgctggcc

SEQ ID NO: 221915 - DNA, 576 bp, Homo sapiens
ataagtgttctgaaggtacattagtttgagaactgctgtttaaagtctattgcaggacttcttatgtaagcataatcagcctcttacatactagtgtgcaatgtgaatgtctgagagggggtttacttacactgggtttctcaaatgtatttgactgtgataccattcacagagcatctatcaggggcaacgtttcatgtaataaactctggaaaatgtccaattttaaatttcagctctgccttgcattctacctgaaccataatgcctgtctaaccttagccacatccttcacccaaattctgtttgtaactcactgcaacagagagctgctcactgacttcaagctttcctacttgctattgctctaccttggagttgtctgtaaggattttcccatacaaattgagcatcccaaaatataaagacccaaaattgaaatactccaaaatctgaagcaatggcatgacattcaaaggaaatcctcaatgaagcactcagattacagattttttgattaggagagctcaaccggtgtgtattctgcaagtattccaaaatatgaaaaaaaattga

SEQ ID NO: 221916 - DNA, 440 bp, Homo sapiens
tgtccacacacttcttttacagttttactacccaaatcatttgctcttgctcatcagctttgcaaattaatattttgttaaatgcaccagggtagcttatttgaaaagaatgctaaagtaatttttttataaatgactaataaatatacctgaaatgacatttagtaagtttaaggtttcttatagtagggtaagcttgtgtttcttggtaaattgcacactttccaggatattgaaatttattaagaccaatagcagcagcattaataatgatgataataactacccattgattttgccccaaatatggggtagatgctaggtattttatcaactcttaaaataagactgtaagctatttttatccctattttaaacttcagaccttatgaacaaatccagcatctcatggatgattatgcttttacatatttgctttc

SEQ ID NO: 221917 - DNA, 165 bp, Homo sapiens
ccctgttgcttactatcttatctcctgtctgtttgctccatccattccccattagtcagctgaagatgctccctctcagttagctttctccattttggtttgtagagacctttccctttcctggatgttgaggtcatcttggcatttgacccacacattgtatgg

SEQ ID NO: 221918 - DNA, 652 bp, Homo sapiens
ccccaacataaacaaaatgacaaacacttgagatgatggatatgctaattagcctggtctgatcaccatatgtattaccacatccctatgtactcccatgagatctgcaattattatacgtcaattatttttaagattaaaattttttaaattgaaagaataaaaagtttttaaaggtggcaggtgctacatagatggataagtaatagacatgaaaaactggtagactaaaaactgttgatagtgattagatgtttttattatataatctttaaaactatttctactttttatagtcttattttcatagtaataaaagttatagtaatattataattataaaatattataatactttataatattatacagtattatagtgttattttcataatactataaaaagttaataataattccaaggctcacaatcctatattttataatttaattctacatatagtgcatatgtaggataccaacagcaatatgtagcttcagagaaagcaagagaatttttggaaaaattttgaaaccgtaacaatgacactgaaacatttcagtaatctgtaattggagatggcaggttgaacacttgtatagccaaccttctatcctaaaacagaacagtgaaataatttttataagggct

SEQ ID NO: 221919 - DNA, 242 bp, Homo sapiens
tatagaagactctctacataccaggcacagggtgtgtgtgtgtgtgtgtgtgtgtgtgtgtgtgtgtgtgtgtgataagttacaataacaaccctataaagcacaaaatagtatccttcccactttgcaaataaacaaattgagacccagagaagttaagtatctatccaaggtcacacaggtggtaagcagtggattcaggatttgagtctaggaagcctgagttggggagaggggttggg

SEQ ID NO: 221920 - DNA, 416 bp, Homo sapiens
agcaatgtgtatgcattaaccttttacaaagaaaatgcaacagcaatgtttttatttcttacattattttctgcaaactttaaaatttaacatttgtgttagttatatttgtaagattataagcttgtatttcaggcatatttttaaaaacacagggatatatgcaatatgtacgaagtcatctctggtgctttgcactttaaccaattcattcaccatttaaaaacaattaaaaaattaattaagctggattctgcccttggatacacacaacaaaacccccattgaagtcaatggaaattgtgcatgcatatccaggggcagaatttggcccgctgtgtttaattcactctgatcattcctattaattcaatattaatatttccgttcatttattcaattagttctgtggtatt

SEQ ID NO: 221921 - DNA, 926 bp, Homo sapiens
aatcaacgagaacaccctgaaagcggtggctctggctatgccgggaagggcctggggagtttccagtacaggctaggctgggaagcagctgtgagaaggagtgtgtcggtcaggactttggagtgggacctgggccgtgctgggtcttgggagttgggaacgaggagggctggctggggctgctctgtcttgggagctgggaatgaggagggctggctggggctgcctctgtcaaggggctggcaggcaagaggacgtgttgatgtttatttgcttggctgtggagtatcctgaagggtggatgggggagtgggtgatcggaacagtatgttgacttatgggtacaggagggccttgaaatgggaagagactagaagctcagaccttctggacccacggggggagttgggaggctcctgtggtgttgatgggagaagtgatgacattttgcgttagagaagataatgagagtgggaaggctgtggtgaacaaggattgcaagagtcagggaccccagaacaagaagcagggttgggggtggtgctgaggccacacatttgggagcacgcgttgggtgccctggctgagctctgcactccaggccctgggtgtgtggggtgagcagccaagccctggccattgacatcctcaggttgggagcagacactaaacaggctgctggtggtggttctctgaggaggaataaaccggttagagaggccaagtctgtagatctcttgcaggtggagactgaaaggaggtggaatgtgtggctgtctacaggtgtatgagttggttctcatgctgctataaagatgtacccgagactcagtaatttataaagaaaaggggtttaatggactcacagttccgtgtggccagggaggcctcaggaaacttacaatcatggcggaaggggaagaggc

SEQ ID NO: 221922 - DNA, 1002 bp, Homo sapiens
atgccagaatgcgacctctacgcaagactgcgacgtctatgcaagactggacctctctgaaatggaactgggatccgaggcgcgcctgaagggtcggagcggtggctctggctatgccgggaagggcctggggagtttccagtacaggctaggctgggaagcagctgtgagaaggagtgtgtcggtcaggactttggagtgggacctgggccgtgctgggtcttgggagttgggaacgaggagggctggctggggctgctctgtcttgggagctgggaatgaggagggctggctggggctgcctctgtcaaggggctggcaggcaagaggacgtgttgatgtttatttgcttggctgtggagtatcctgaagggtggatgggggagtgggtgatcggaacagtatgttgacttatgggtacaggagggccttgaaatgggaagagactagaagctcagaccttctggacccacggggggagttgggaggctcctgtggtgttgatgggagaagtgatgacattttgcgttagagaagataatgagagtgggaaggctgtggtgaacaaggattgcaagagtcagggaccccagaacaagaagcagggttgggggtggtgctgaggccacacatttgggagcacgcgttgggtgccctggctgagctctgcactccaggccctgggtgtgtggggtgagcagccaagccctggccattgacatcctcaggttgggagcagacactaaacaggctgctggtggtggttctctgaggaggaataaaccggttagagaggccaagtctgtagatctcttgcaggtggagactgaaaggaggtggaatgtgtggctgtctacaggtgtatgagttggttctcatgctgctataaagatgtacccgagactcagtaatttataaagaaaaggggtttaatggactcacagttccgtgtggccagggaggcctcaggaaacttacaatcatggcggaaggggaagaggc

SEQ ID NO: 221923 - DNA, 854 bp, Homo sapiens
atcaggcaaattaacctctctgtgcttaacatttctttatctgttaaatgtgcataataatagtcccctacctgtgcagtgcatcatgtagtaggaggtacttttgtaactaatatggaattgcagaccagtatcctctttaagtaccatcctcaccaaagcctgaatggtaaagttagaaaatactgtggcctacaggattataatcaggctctcaattacctgtctaatcatatcttctgccattcttgccctagctgtcttcactatagctagatagaccttcttgctgttcccaaacaggcagagcacccacctttatacctgcatttcccaatattgaattttcttcccttagatctttatgtagtagtctcatttatacactattctatattatcaggcctcagcttaagtatttctgtcttagaaaagccttccctgttctaactgaaatagcttttcaccatattatatcttttgttccaaatacttgtacttggtgctttttaatgatttcttattctttacaattctaatatcttgctgtatttccttaagaattacttatttgggctgggtgcagtggttcacgtctgtaatcccagcactttgggaggctgaggtgggcggatcacattgtcaggagtttgagaccagcctgggccattgtggtgaaatcctgtctctactaacaatacaaaaattagccgggcgtagtggcaggcacctgcagtcccagctacccggaagaatgaggcaggagaatcgcttgaacctgggaggcggaggtagcagtgagtcgagatcacgccaccgcactccagcctgggagacagaatccatctcaaaac

SEQ ID NO: 221924 - DNA, 236 bp, Homo sapiens
cagaccacatatataaagagtgcctacaaatgaataacaaaaagtcaaactactcaaacaaaaatgggcaaaatacttaaaaagacactccaaaaagaatatgtacaaatggccaatagcaaacaaaaaggtactcaacatcattagttatcaggataaagctaattaaaatgacaatgacatacaatttcacatccatcagaatgactaaaatcagaaagaccaacaataccaaa

SEQ ID NO: 221925 - DNA, 343 bp, Homo sapiens
cctgtgtctggtctttgatttccatttcatgtgaggtgctgctaaaactgatgtttgttagtcactgagtctctgttgatctaaattcagctgtttctttaagcattctgtagtccggccctactcccacgtatccaacctagtctaccctagaatccactaacgctttattatgttacattcttttagttctctagcttgtcgtctctccctcctctcccctaaggatgaaacaaaacaggcatgtatagattcaagtttggatgtcttgtatagctttcagtttcggtaagtccttcaagggccgacttatgtctctccttttctattaaaaacctttacc

SEQ ID NO: 221926 - DNA, 582 bp, Homo sapiens
ctgtaaatggggtcctcaggcagcatttatttttgcagtccaaaaatagtgaccaaacacctactgtcagctaggcgagagttggggttcttgcttcatctgtcttgacaccaactaactaaatccctgttaaaatccaagtgcaagatggggaggaatctgagatgaaaattaggtggttaaaacaggggtcacgaaaagttgatttggggtgtttggtctctgtaggttacttatggagccccccataaaatgattaggtaatctatggagccagggaaaaattccaaaatcttgaattggcacagtttatttatatatttgaacactatgttagatttgtctcgtttttattgagagtgtatgtgtgcgtgttgattaaaacctaacagattagaaggttggagaggaaactgtccttagatgacccagccttccattaccatgtggagtagcatatgatgcaacacttaaagtattgagccatattcatatcattttctccctgctgtgttttccagcatttaaaaaacatggtcaaaacttggccctttttttctcaaaatcgctaaagtttaatgg

SEQ ID NO: 221927 - DNA, 219 bp, Homo sapiens
gagtgattctcataccagtagcatgagcatcacctagaaacttattaaaaatataaatttttaggttcaaccctagacctactgaatctgaaactgggagagtaagactgaattttcagctctccaaatgattctcctgtaacccaaagtttgagaaccactggtctacagcggaggtgctcacccatccctaggcgtcaatatcaactgtgaacatta

SEQ ID NO: 221928 - DNA, 498 bp, Homo sapiens
accggaagtggaaatcctgtttcctgtaggcatttttgaaaccctgctttttggatctgtagcaaatccagtgcaggcaacattatgtggaaatagaaacagggctcctgctaggagattgacattctggctttcctttggaacccctcactgactcatcgcccctgaagcaggagccagcaggtcccaaggctcccctgctcctgtccctgccccagggcgaggtaggaagccggaagcctgggcaggctgagcccagccgactggaaccagggaagagcctgtgggtgggtggaagggagggaaggaggccagattcctccagaactggggaagagaacaggttttgaagttgggggagggtttgggtttcacagtgatggtttcatgataccctggagggttgcacactcctggtgcatttttgtattcgtgctttgaatacagcccgcttcctttcaaccctccgcttaaaaagttttgatgttttaaggaaga

SEQ ID NO: 221929 - DNA, 480 bp, Homo sapiens
gcctcagtaaaaagctgttaaataaatactttttaaaaatggaaaacacaccagaatcataatggacatattggcaatgtccttctcaataaaaactaaagaaatgatctagatttgatgttcctaaaaggtaaaataggagcaggatttagctgtagttttctagcaatgccctttttaagtaatacagcctcagggcaatcccttaattaatattttccgctgtttgaagtaggtatttttatctccatcttataaatgaatgaaatggacctgagcatgattaaataacttgcccaaggtcacacagctagtaagcttccacactagtacttaattccagtatgttcctcctgaaagcccacactcattctccatcaccaccctgtgaattggtttaaaaaaaataagggtcactatgatggtccttgtggcagaaccacactacagagagaggctacaccagaaagaggaaggcct

SEQ ID NO: 221930 - DNA, 538 bp, Homo sapiens
cgtactttgacgcgttctcctttttaagatgacaagattactgctcatctttctttttgaaatgaagtctcactctgtcatccaggctggagtgtagtgggtgtaatctcggtctcactgcaagcctctcctgacctcaagttatacacccatctcagccttccaaagggctgcgattacagctgtgaggtgccacgcccagcctatgtatttatttatttttatttttgtagaggtgaggtctcactatgttgcccaaactgatattgaactcctaggctcaagtgatcctccctcctcggccttggaaagtgctaggattacaggcatgagccactgtgcctggcccactgcattattatatagaggcaatcagcgttaccttcctgagagatactgaggctgaacaaacatgtcttgtatatgcatttgcatctttttgttgttttaacacaagtggcagcatgctatttagacatagccttctgtacctgctgtacctggctcttctcacttaccaatatatcttggaaattat

SEQ ID NO: 221931 - DNA, 543 bp, Homo sapiens
atacatgtctagcaattttcaaaggcatgctaattcatcatgctttctctttcaaatagtttttttaagagccctctgcttattccagtccccccctttaaaatcttttaaaattattaataacctattaactttgagcacttcattaaaatccaaaaaatttgagggagtacatgtctttgtcctttacctttagaaccctcaaacatagcttggtattgctgtttttaaaattttctggagcatttaggattcacttagaaacaagcctttagggagaaaaatttatctagcaccactcactctatttttttgcactgactacttctatttttccccctttcatttccctagacttttcaatgcttttttataaaggtgcttgagttctgtttctcaacagctccctcatttattgaatgattcacacagtcactggaatattataggctcttaataaaatttttgaatgattgaaagagagaaaagtattttacctgtgatatattgatatttaaataaactagaacacttaaaggaaaa

SEQ ID NO: 221932 - DNA, 596 bp, Homo sapiens
cttctggcactgaagcagctggctagttctagcgcctgtgcactccagttcccacccatgaaagagtcagggaaaatttcctgcctcgctatcttgtcctttcttccaaaagaaaggaatcattttgtcatgtgcctcctttctaggaatgagaaatacagtcatgtgccagattccttttgagcaacgcagcattaggcgattttgttgtgtgaacatcacagtgtacttacacaaacctagatggtatagcctacaacacacctaggctgtatgatataatcatctcgtcatgtgcctcctttctaggaatgagaaacacagtcatgtgtcgcatgatttcttctgagcaatgcatcatgaggtgattgtgtcatgtgactatcatagtttacttacacaaacttagatggtatagcctatgacatgcctaggctgtatgatacagcctattgctcccaggctacaaacctgtacagcatgttactctactgaatactgtaggcaactgtaacacaacagcaaatatttgtatatctaaaaatatctaaatatagaaaaggtacggtaaaaatatagcattataatcttatggg

SEQ ID NO: 221933 - DNA, 365 bp, Homo sapiens
taggcatttgttttcatcaggtgaagatgaaatgcctcttgcttaaagaatcagattggctgggcatagtgtctcagacctgtaatccccaaactttgagaggctgaggtgggaggatcccttgagcccaggagttccagaccagccctggaaagacagggagaacccctctctccaaaaaaaggaaacaaaaataaaatatagatggttgtggtggtctgtgcctgtagtcccaactacttgagaggctgaggtgggaggaggttcagttgagcccaggagttcgaggctgcagtgagccttaatggtgccactgcactctggccttggggacagagtgagacactgtctaaaaaagaaaaaaa

SEQ ID NO: 221934 - DNA, 636 bp, Homo sapiens
ctcagctgtgatgctcctcggaggctggctcctgttggccttcaatgcaattttcctcctgtcttgggctgtggcccccaaagggctgtgcccaaggagaagcagtgttccaatgccaggggtgcaggcagtggcagctactgccatgattgtgggtctgctgattttcccaatcggccttgcctccccattcatcaaggaagtgtgcgaagcctcctccatgtattatggtgggaagtgccggctgggttggggttacatgactgctatcctcaatgcagtcctggccagcctcctgcccatcatcagctggccccacacaaccaaggtccaagggaggaccatcatcttctccagtgccaccgagagaatcatctttgtgccagaaatgaacaaataaaaatctcctgggagtagcacaaagggcacactccagagttttatgaaatcatcatgtagccaacttcaaatcccatctctgctccttcttgctgtgtgacttcaggcaagccactttacctctctggaacagttttttcttctggaaaatgaaagttgaaatcatacctacctcataaggttgttctgagaattcactggagatgctctgtgtaaataaagcactttgcaccatgt

SEQ ID NO: 221935 - DNA, 493 bp, Homo sapiens
  misc_feature (15)..(15): n is a, c, g, or t
  misc_feature (34)..(34): n is a, c, g, or t
  misc_feature (70)..(70): n is a, c, g, or t
  misc_feature (137)..(137): n is a, c, g, or t
  misc_feature (156)..(156): n is a, c, g, or t
aaggtggaaggcccncttgaagcccaggagtttnagcccaggtgggcaccaaagtgagatcccatctccncaaataccaaccaaaaaccaagaaaccaagattgagaaagaggttgccataatctctagtagtctgnacagtcttcctcttcttcnttttttttttttttttttttttttttttttttagacagagtgtcgctctgttacgcaggctggagtgcagtagggcaatcttggctcactgcaagctccgcctcctgggttcacgccattctcctgcctcagcctccaagtagctgggactacaggtgcccgccaccacacccggcctttttttaatcagctggtggaatgtgcctgtggtctcagctacttggcagactgagatagatcactggatcactggagctctgggggtcaaggctgtagtgagccatgattacatcactgcactccagcctgtcagcagagggaagaccctgcctcaaag

SEQ ID NO: 221936 - DNA, 429 bp, Homo sapiens
gagacagagtcttggtctgtcactaggctggagtgcagtggcacgatctcgacctaccgtgcaccgggttcaagtgattctcttgcctcagcctcccaagtagctgggacgaccggcacacaccaccacgcccagctaatttttctattttcagtagagatggggtttcaccatgttggccaggctggtctcaaactgacctcaggtgatccgcccgccttggcctcccaaagtgctgggattgcgagtgtcagccaccacacccggcctttttttaatcagctggtggaatgtgcctgtggtctcagctacttggcagactgagatagatcactggatcactggagctctgggggtcaaggctgtagtgagccatgattacatcactgcactccagcctgtcagcagagggaagaccctgcctcaaag

SEQ ID NO: 221937 - DNA, 304 bp, Homo sapiens
cttaaaggccgggcatgctcgtttatgcatgtaatcccagcactttgggaggctgagcttgggaggattgcttgagcccaggagttcaagaccagcctccgaggccaatgctgggattgcgagtgtcagccaccacacccggcctttttttaatcagctggtggaatgtgcctgtggtctcagctacttggcagactgagatagatcactggatcactggagctctgggggtcaaggctgtagtgagccatgattacatcactgcactccagcctgtcagcagagggaagaccctgcctcaaag

SEQ ID NO: 221938 - DNA, 825 bp, Homo sapiens
tggtgtttataaaattattggtaaaatgatgttaccaaaggtaatacatagaagttaaaatagttgtgttagagatttttccctcttaatgacagatttgtccttttaatcataatacagagggtgagaaggttcaggaaagtgtacatataacaaacaggacattttgttatgactccaaatgtagataatttttcacatgcgttaaacatagttcagaggttctcagctggtggctgcacactaggatcacctggggggctttaaaagtgaacgataaaagtgaatgatgaagccaggcatggtggctcatgcctgtaatcccagcactttgggcagccgaggcaggcagatcacttgaagtcgggagttcaagaccagtgccactccactccagcctgggtgacagaacaagactctgtctcaaaaaaaaaaaaaaaatagtgaataatggtcacctcacatccatcagaacggctaaccaacaaaaaacaccagaaaataacaagggttggtgaggacgtggagaaatcagaagtcttgcacgctgttggaggaaatgtaaaatggtacagccactgtggaaaacagtatggtggttcctcagaaaattaaaaatctaattaccatgacccggcaattccacttctgggtatatgccccaaacaaatgaaagcagagtctagaagagatatttgtacaccatgttcatatcagtattattcacagtagctaaaacatggaagcaacccaggtgtccattgatagaggaatggatcagccatacaatggcatattactcaaccttgaaaaggaaggaagtcc

SEQ ID NO: 221939 - DNA, 494 bp, Homo sapiens
aacccaaacagactttatctctgccttcatagagcttgctttagtgggcaaatacagccataaatgagtaaatatttactaactcttcattatggtcagtgtcgtgaaggaaaaaaatgtgggatggcctttcggttgcattattaggaacgatttccaggtcaggaagtgatgcttctgcacccagcagtacctgtcagtgtgaaatctggggtggagaccaggtcagagctttggatggctgatgacacccaggaggaagaggcagcctctacacgcaggtgggacagtgagcccctgccttgtggtctgtgctgagcttacccacaatgcaagccaaggcatcagctcccacccacaccccaagggacctgcaggaaaccaggctgcatttcaacaacaagcagaaagcacagagctttacacacaacctaaatacatcaaccatttgaagatgctaaactccatacaagagcatcaccaaactccacaaa

SEQ ID NO: 221940 - DNA, 163 bp, Homo sapiens
acgcctttttctttaaaagtctaacatactagaaaacatgctgaatgcaaaaatgccctacgtgatctcaaaaggtgatagaaaaaatcgaaaaaccacttctagatggtacatgctgccttcttaaaccccataattgcactttattaaaaggcttcaatgt

SEQ ID NO: 221941 - DNA, 403 bp, Homo sapiens
caaaattcacacacacacacacacacacacacacaccagcagcaaaattcagtctccaaaacttaacatttataatatatgtccaggatataatgcaaaattacttatctaaaaagaaccaggaaaatggaaggcatttttagtagagaaaagaaaatatggccacaataaattttaaaaatatgaaatgaaatggaaaccataaaaaaatgaaaattccaggagtgaaaaatacagcatttgaaattaaaattgttgggtagatttgtcagccaaatggagaagaggaaagattaactgaacttaaagatagatcagtagaaattgttacgcagttggaagatgagagagatgagagagacaaagattggagaaaaacaacaacaacaacaacaacagagcc

SEQ ID NO: 221942 - DNA, 471 bp, Homo sapiens
gaggaaatacaactccagagattccttcagtgatcaagatcagtgggccataatatttggttagagtttctgagaacacaggaagcaatgccacactcaggccaccacaatggagctgatttggcaggacttgttcaaacctttcaccttaaagcacgtgatccttcttcgtacattttcttcacttgggctgcttaagtcacagcctaacaactttgaggcaaaactgagaactggcatattctcctgcgtttcttctaatcgagtcccatcatccagctagacatgagagatcaaaccagggagggtgacctttctccttcccacttttcagagtcattggggcaactttttgacttttgtgaccaaagaaacattcccccaaaacatttatttttcattgtagggcattcagctgacagctgcattttagaaagttaccatgcctgtgagattctcatgtcaaagacc

SEQ ID NO: 221943 - DNA, 474 bp, Homo sapiens
gggggtgacctgtgatactggaaagggtgggataagcacagtagaagaggtaggaacagcattttgaggaagggcaatctaagcttctaggaagaggtggtctttgccccaggtcttgaagatcagataggaaggaataatggcaggaatgctgttcttccttccggctaggcactaggaaaggtcagggtgtgcaggtgttgcaaagggtatgtgctgcagagtggcctggcatgaggcttgcaaagtaggttggagccagtttgtagaaggcctcaagggcccaataaggcaaactgacaggtgctgtggggaacctgttgtgtgtctgtgcgggtgtatggggatgccctgtggaatgttctgagctcattcagacccatatagaagctggggtcactgataggaccatggcggatgctgttgcctggagaacttccaacctgggcttgtggcttaagcttaatgcaggct

SEQ ID NO: 221944 - DNA, 355 bp, Homo sapiens
gaaaaccaactcaacaacttttatctatcaatttccattacagaatcaagaatatttttaaaaggtttataaagaataatacttgcttcttgtatttctaaataactatgcatccattcatccagaatgatcatttaaattggtggtctggtacctgttaagctgttacaactgaatctttctgggaggaagactggtcttcagggacatagagctagaccctataagtccaggtatggagctgaacttgactttagagattcctggagaatgttaatagatacactgtgttctgtctcccattcgtctccttatgttggctcttactgaattcttcttcagccagcgttcttca

SEQ ID NO: 221945 - DNA, 387 bp, Homo sapiens
ggagcctctccccctgacatctccacacacctctgccgtctcgcttcccctccctctagcatcctgtggactttgggtgctggacagttatgggccccagtcccagccctgccacctcgtagctgtgtgacttggtagagttaaactctttgagtctcaatttcccttttctacagaagaggaatagcaagactccctgcctcagaaggctgctgagaggatgaagtgagttcaggcatgttaagcccttaaaactgtacctggtacatatcaggacttaataaatttgagtattgtgtgtgccccccacacacgtaagcatgtgcacacctacaccctgcaaacaacgtgttcctctgtgggacccatgcctggaactggtcataa

SEQ ID NO: 221946 - DNA, 431 bp, Homo sapiens
aagtagagatggtgtttcaccatgttgactaggctggtcttgagcttctgacctcaagtgatctgcctgcctcggcctcccaaagagctgggattacaggtgtgaactactacgcatgacctgtagcttagtcttttaatgcagtcatttttaaaaaaagagatgtggtctcaacatgttgtccaggcgggaatgcagtggctattcacaggcatgatcccactactgatcagtacaggagttttgacatgctccgtttctgacctgggtgagttcatccctctttaggcaaccttgatagccctcagctcctgggaggtcaccatattgatgccaaattcagtgtagacatttaactggcatagcgcactgcagcctagaattcttgggctcaagcaatcctcccacctcagcctcctgagtagctggga

SEQ ID NO: 221947 - DNA, 363 bp, Homo sapiens
gaggcaggagaattgcttgaacccaggaggcggaggttgcagtgagctgagatcttgccactgcactccagcctgggtgacagagcgagactctatctcaaaaaaaaaaaaaaaaaaaaaaagaaaaaaagaagtcctgattatggaaaatttcagacagacattaaagtagagagaatagtataaggagccccaacgtatccattcccagcttcaatgattatcagcactttaccattcttattttgtctattgactcctctgctgtgtggctggaatagttttttaaaaaagctgtaaatattacatcatttcacctgcaaacacttcagtatgtatttcaataaataaacgattaaaaaa

SEQ ID NO: 221948 - DNA, 234 bp, Homo sapiens
gagaaaggatcttgctctgtcacccaggctggagcgcagtggtaatttagctcactgcaacctccactgccctaccctgccccgggattcaagtgatcctcccatttcagccttccaagtagctgggaccacagagtcagctacattttttcttctcaaatcctgccttcaaaatgttcattctgtaatttggaatgaactcttcacaaagcatgtgcaggccgggtgtagtgg

SEQ ID NO: 221949 - DNA, 490 bp, Homo sapiens
tcttaagtcaccattaaattttggtggtgggacaatctcattagctccttcaaaatcatgtggctttgcataagtcttttgaaaatgtattttcagggaatttacagatggtgaaacattgttttaatccaaaccagttaatgctttaaatctacctttaaaaaaattgtactgtttttcgaagtacttaaagggagtggaggggtagaaagcatataagtgaatccatctcactgtggcaaactgtttttcaagtaaagtcataataatgaacaacacatgatctgaaatttgatcagcaaacatatccttatgccaaggaattttctttttttctttccttttttttctttttcgccattcacataccaaggttctgtaaatcagtaaaccaggcagagagtaactattgtaagggggaaaccaaatcataatacccagagtggcccagaagctgtctttctgaagaaacattaacgccaccaccacc

SEQ ID NO: 221950 - DNA, 387 bp, Homo sapiens
agcagcaaaactgtattaccaacccttgccaggtaatctatttttcaatctttcctaagcataccaaagtgctgattttcttttctaatggcccctatgcttgtgcagatgtttttgtcgtcccagcccaggcttcctgtaggtccttcctttatcatgcgcctgtaaactcagaacccatcaaattccataagaaatctggcttatccactaccatgtaaagggaaacgtacgtacttacggaaggcagttgtctctttcacagctctctgtttgctcttctaggtttatcttggagctcctggggactctaggaattccacagcctactagagtttcatctacttttgcagattgctaaatcttagaatggagacttgagaattc

SEQ ID NO: 221951 - DNA, 391 bp, Homo sapiens
ctaagctaaagggaaaggtcaagctaggaactgcttagggccaaccttcctcccgttctactcaaagtcacccctctgctcactgagatatatctgtatccgattgcctcctttggagaggctaatcagaaactcaaaagaatgtaaccatttgtttcttatctatgtatgacctagaagccccctccccacttcaagttgtcctcctttgcttcaagttgtcccaccttccagaccaaatcaatattcatcttacataaactgattgatgtctcatgtctccctaaaatgtataaaaccgaattgtgctctatcatgtcatcaggacctcctgaggctgtgtcatgggagtgtgtcctcaaccttggcaaaataaactttctaaattaaa

SEQ ID NO: 221952 - DNA, 397 bp, Homo sapiens
cactgccatgtgatatactttcagctttgatgtgaactcaaagagaagactgctttcaattgtaggcctatgatctttgcttgattattttacttcatctccaaccaaattcttttcactaatttttgtgcagcttgcaccgaataaggcaatcttcagtctcagtactgagctactgcagtggttcaaaaagatctgtgtcctcgatgtgtactgttttccctatcagttgtcacaggcagtgatgtgcatgacagggtgaattgtataggattttatattccatcagtttggtgtatatatatatttggatatatatgtatataaatgtctgttagaatgaatgtgataatggacaaaaataaatgtctattagagtgtttccctaaaattaaaa

SEQ ID NO: 221953 - DNA, 370 bp, Homo sapiens
ggaccattcctactcctgacatgctctttcctaagtccttcagcaataagaaactgtgcccagaacaaaagttatgttttattttatgccacaaaattaggagtggaaaagaaatgtgaatatcttatgagaaaaaaatgcaagttaaacttcctggaaaagacctgaattcatcgagctttggtgcttgtatactataagctcagacaataaaattctacccactctctttaactgaatgcggtaatacttttgacaacaactttaaggtgtcaaggagaaaaatatttttcatggttaactgtacagcctatcatctttatttcagccagaaaactgattagtgttcattgatagaagatgtcgacgc

SEQ ID NO: 221954 - DNA, 533 bp, Homo sapiens
tagtacagaataacagctgggatacagctctgaagtgaggaaactgcatttgaaccctggttaaacaaatgctgggtatgagttcaacattacaatgtataaattacatttatactacggtgtaggctatgttacattattctgtaaagaagcaatatactccttcattcttccacatactaccttgttccaaaaaatgattttaaatgcctaatagaattaaactgtaatgcgtgctactctgctaaaaccactttaaatatgctatctcatttattcctcaccatgattctctaggaggttcttggctcactgcaacctctgcctcctggattcaagagattctcctgcctcagcctcccgagtagctggggttacaggcatgcgccaccatgcctggataatttttgtatttttagtagaaatggggtttcaccatgttggccaggctggtctcaaactcctgccctcgtgatccgcccacctcagcctcccaaaatgctgggattacaggcgtgagccaccgtgcccgg

SEQ ID NO: 221955 - DNA, 377 bp, Homo sapiens
atctgacaaaatcactccgaaatcctcacattatatgatggatatggtggagaaatgtagactgggttgttactctgtttaggtgaatatacagctgcttgagcaactacattcaaacctcatcgatagtggaatgatgtttaacctggagagagatctcttgttctctttcttgttctgatattctttgaaacctatagttgtgaacctctttattctagaagtgaattttaatgtaaagaattttgtccaaagtaatgttatactccagctcaggaatgtacatatacatacacacaggggacttcaaaaagtttgtagaaaaattgaaataaaagataaaaatacgaaataaaaatttctcaacataagctcca

SEQ ID NO: 221956 - DNA, 391 bp, Homo sapiens
acattaccagatttcaagacttattataaagttacagtaactgagataatcttgtatgggcatgtggatagacatataggtaagtgaaacagaatagagaggccaataatagatccgtacatatttgtcattgattttcatccaaagtgacaaggcaattaattggggatagaatagccttatgaaaaatggtatgaagaacaccagagacgtggaatcaacctaaatgcccatcaacagtgaactggataaagaaaacatggtggccgggcgcagtggctcaaacctgtaatctcagcactttgggaggccgaggcgggcagatcacctgaggtcaggagttcaagaccagcctggccaacatggtgaaaccccatctctacaaaaatac

SEQ ID NO: 221957 - DNA, 398 bp, Homo sapiens
tgtttgtttgtttgtttgttttgagatggagtttcgctgttgttgcccaggctggagtgcaatggcgtgatctcggctcactgcaaactctgcctcctgggttcaagtgattctcctgcctcagcctcccgagtagctgggattacaggcatgcaccaccacgcctgactaattttgtatttttagtagagacggggtttctccatgttggtcaggctggtcttgaactcccaacctcaggtgatccgcccgcctcagactccaaagtgctgggattacaggtgtgagccaccacgcccggccctgaccaacatcttgactgaaactcacgagacactgagccacaaccttccaactaagctgttcctggatttctgaccctaggaaactgtgtgagg

SEQ ID NO: 221958 - DNA, 816 bp, Homo sapiens
gccaccatgtgaagaaggtccttgcttcctcttcatcatctatcatgattgcaagtttaggcctcctcagccacgtgcaacttttatttcaccctgaagccaaagagaactttctgaaagacaaatttgctcatgctataatagttactgacaaatatttaaaggactaagttgtgtaaggaatctacactgtcaggcagaaccaggattcctggaagtagaactgggctgcttcataagtctgacttcatatgacagctagattcaaaaggatgaaatcagtagaggtgagacctcttgatgccttggcttggaagtcacatattctattggccaaagcaaatcacaaggccaccacaaattcaaggagatgaagaaatagactctacctctcttgattggcttataatatggtcagttcttcagaggaagaggaaaatttcatctggcctcaaatctcagtgatcgcatttgtgggaacataatgtctgaagtaaagactaagtagaagtctgacaagcaaaaaaagaaaaaaagacaaagacactccaagcaagagaaacaacctgagcagaagcacccaggtatgacagaaaacgtagagaggaaaggcttccaaaagcaacagagattcacaggaagctccacagaaaaacgggtggtgcaaaaaattaggcaagagggaaaatggggttaggccatgtaccaacatgttcatcattatacagtgattggacttggaaaggcagaagagaagcaagagccagcatcctcatcttataaacagaaaagctgtctgggcgtggtggctcatgc

SEQ ID NO: 221959 - DNA, 559 bp, Homo sapiens
gccaccatgtgaagaaggtccttgcttcctcttcatcatctatcatgattgcaagtttaggcctcctcagccacgtgcaactcttataatatggtcagttcttcagaggaagaggaaaatttcatctggcctcaaatctcagtgatcgcatttgtgggaacataatgtctgaagtaaagactaagtagaagtctgacaagcaaaaaaagaaaaaaagacaaagacactccaagcaagagaaacaacctgagcagaagcacccaggttgaagtcctaacccccaacatctcagaatgtggctttatttgaagagaggattacctttgcagaggtaatcaagttaaaatgaggtcaatatagtgagtcctaatccagtatggttgatgtcctcatgaaaaggagaaatttgaagacagacacaccaaaggagaatgccatgtggagacacagggagaagttggcaatctacaagccaacgagaatagcctggaacaaattcttccatcacacccctcagaaggaatcaaccctgactgcacctccattgcagagttgtagc

SEQ ID NO: 221960 - DNA, 490 bp, Homo sapiens
taaagataaagtggtttccttgctatgactttccccttgctgttgatgagctggtgaatgtagcaagctatgtgacggtcattgctgacaagtatagactactttcaggtctctggagtcctcagagtctggcttttctttatattattttatagtaaatggaattatcttcacaaataacttccatctgttttcaaataaatagaaatttgatacatagcaaaacggggtattcgtctcacagtcctacagtacaccaaacaaacaaacaaaaatttccacaacaggtctggctaacaaggagagaaaatatttttaatgttttaaataacatatattctccacatatttaaaagtctgtgttcacactaaaaaaagtgaactggtatgctactaaaagtcaatatggcctcgaattccagagataaagtaagtctacatattcatgaagcttatctctactgccttaaacactggtatttttatctac

SEQ ID NO: 221961 - DNA, 605 bp, Homo sapiens
gttctggagcgttgaagtccaagattggccaggcatggtatctcatccctgtaaccccagcacttaggaggccaaggtgggcagatcacttgagctcaggagtttgagaacagcctggacaacaaggtgaaaccccgtctctacaaaaaaccacaaaaattagctgggtgtggtggtgtgcacatgtagtcccagctactcaggaggctgaggcaggaagattgtttgtcaaggaagtcgaggttgcagtgagccgtgattgtgccactgcactccagcctgggtgacagagcaagaccttgtctccaacaacaaaaaaaaaaaaagttcaagatcaagttgccagcagggttggtttctagtgagggctctcttcctggcttgcagacggccaccctcttgctgtgcatggcctttcatctgtgtgtgagtggagagaaattgagagagtgctagctggtgtctcttcctccttctatggggacgccagtcctattggatgagaacccccacccttatgacctcattaaccttaattacctcgccaaaggccctgtcttcaaatacagccacaatgggggttagagcttcaatgtaggaacctg

SEQ ID NO: 221962 - DNA, 264 bp, Homo sapiens
cttttgatggcttcctgaaataatgcatcttttgcaagaaagattctcaacctcactttgcaaccagcttgcaccgtatttgcatcatgggaggagccagccttaggctaagctgagaggggagtctgagtggaggctcattctgcaagtgttcagctcatttggaaaggtttcatcttgagatgacgtttgcttccccacacaatctccaaaccacagggacttgaacagcaaagacttccagtacttttttttttttttgag

SEQ ID NO: 221963 - DNA, 286 bp, Homo sapiens
tggagtgatgggtgcacagctctgcacatttactacagtcgctgaactgcacacacaacacgggtatattttattgcatagaaattgtattaaagctgttaagaattttacttagattagcatttttcccacactgtgccatcaacttagtatatgattagattcattgtttctaactgtatttaaatttaatgtttgtcacattttgcttgctaaatttttaaaattttaaatttctaaagtcccccaaggtgtatatttttagaaaaattattcaacggaaaaa

SEQ ID NO: 221964 - DNA, 284 bp, Homo sapiens
taaggtgtgtatactagaggcaggttcaccttgggaagacagacctggatgcagtctcaacgccttttgagcgggaaactccagagtctcacatgctcagagcttggttagaagagggacactggtatttcttctaactcatagctttttggggatgacatagaaaacagaggaagactacagcagcaaggccctctaacgagtgaggcccagggcagcccgtccccacaacctcccaacccccttgactgtgtcttagggcagtactgatggcaacagaatat

SEQ ID NO: 221965 - DNA, 403 bp, Homo sapiens
ctttcatgcttcattctggcagggctgaatgtcttatgcatagccagctaactaaattcttaaaaggtgagaccaataaacagaaatctcaaggcagctaccctactgctgttcctcttgcctaaaaaaaacttgtccagagtacagacttgtccagagaaccctaatgaaatacctggttattctctgaaatggtttgaacctatttattatgtgcagaattgtttcaagctttgtagtttgtctttcctaaccgtatttctagtaaataagcttttgaggttatttggaatatattttaagagctataaaagtatttatacctcaaatcagtctatatttccacccatgataatttttctaaggaaaagaaaataaatataaagccatattcataaatacc

SEQ ID NO: 221966 - DNA, 476 bp, Homo sapiens
tgtattttttagtacagacggggtttcaccgtgttagccaggatggtctggatttcctgacctcgtgatccgcccgactcggcctgccaaagtgctgggattacaggcataagccacggcacccggccctctattcaaattctttagggccaaatatgcttgggtatgctgatccatatctgtcacctgaaatatttttcagttataaataaactattgacaggtgaccacacattgctgatccttgaccatctctgaagtaatatagaggaaaggcgtctcaataggtcagtagactcatttgagagttggcttcacctactattcaactgctctgttttggtgatgtagaaaagttcattttgtcatcaaccttgatcataggattttctctgtaagactgaaggatcaaaacttctctgaaagtagctaattcactgtcacaaagatgtaaagaatgtctgtcgtttctttgg

SEQ ID NO: 221967 - DNA, 496 bp, Homo sapiens
gctagaatgactatataatttactatttagattttgttacttttgttggtaaaatgctaaactggacggacactgggaaaacagagaaagaccagggctgttacaggcaaatgggggaaatatacgatgtcttaggtgtagaccagaggagtggcatcgtcttggcttttagcagagcacccaggctgctattttcagactagaatgaaagtgagcaagcgttaacacaaagacagttgtaggagcctactgtaatatccaggtgagaagtggctgaggcaatggcaaattctgggtgttttgaaatgcaaggccagcaggacttcggaatggaactgatgtggagcattagagaaaaaagattttgagatgaaacaattgtaggaacggagttggccttaatatagctggagagactacagaagaagctgctttaggagagtcaggggaggggaaacaagaagctccagtagccatccaagtggagatactgggt

SEQ ID NO: 221968 - DNA, 533 bp, Homo sapiens
tggatgtgggttatagtctgcagatatcaagacaagtttcggtaattctatcccaagatgtgcttcaaaatgtatctgttaccattatattagaagtagcatctgaaaatgtgaagttcctaagtaaaaatcagggttgctttcctaaatatgccttttttaagattacttttcctattagagtaagaatcaggctttaataatatacatttcattctaacagtcaagtattcataggacgactataggaattctcctccctaacgctaactgtgtttccacaattgctattcccaatgggtaaaaacagggagacacaaagatacagaaatactccatttgcctctttagttgttttcccagtcaggaaaggatttaaaactgtagcatgaagtgaaatttttgaatgactgtggattttgtttatccgttgtgcttgttctccctacatcagtgatgataagatattgtcaaaataatatttttccatactataaaggcaaaataaaagcaaggacatatgttctaataaa

SEQ ID NO: 221969 - DNA, 558 bp, Homo sapiens
tggatgtgggttatagtctgcagatatcaagacaagtttcggtaattctatcccaagatgtgcttcaaaatgtatctgttaccattatattagaagtagcatctgaaaatgtgaagttcctaagtaaaaatcagggttgctttcctaaatatgccttttttaagattacttttcctattagagtaagaatcaggctttaataatatacatttcattctaacagtcaagtattcataggacgactataggaattctcctccctaacgctaactgtgtttccacaattgctattcccaatgggtaaaaacagggagacacaaagatacagaaatactccatttgcctctttagttgttttcccagtcaggaaaggatttaaaactgtagcatgaagtgaaatttttgaatgactgtggattttgtttatccgttgtgcttgttctccctacatcagtgatggttccattccgtcaaacccataccctcccagcccatcctggaaagacacaagatggccataacgtagtaatatctaaaatctggaaaaagttggcggcc

SEQ ID NO: 221970 - DNA, 497 bp, Homo sapiens
gtacaacctaaaccacgttactcaactcctctgagacgtggtttcctcaactgtcacttgcaggtgataatatctaccttacgtggttgttatgagaattacctgaattaatatatataaagtgctgtatttagaaatgtattggcacagtagaaacattagcaattattactttttcctcatcttcattctcaaacacagttgaaaatgtttcgtgagttccatccaggtcactttaggcttattctcaagatctgaaggcctggccgggcgtggtggctcacgcctgtgatcccagcactttgggaagccgaggtgggtggatcacctgaggtcaggagttcaagaccagcctggccaacctggcaaaaccccgtctctactaaaaatacaaaaattagccaggcatagtggtgtgtgcctgtaatcccagctactcgggaggctgaggcaggagaatcgcttgaacctgggaggtggaggttgcagtgagtcga

SEQ ID NO: 221971 - DNA, 943 bp, Homo sapiens
gagccttaagatagtaacttggcgcatggtctaacagcacgcgtcattttccccctttgtgtggagaatgatgagaccaatattggcccaattagccagctgtgcgtcttttatgtttggaggatgtttatttccaagcaggcactggcgaataatctctcggacgccagtttgctccgcgtgggtttattgccagcagctgctatgtggaaggtggggatccagcggagctggaatgaggagacagggacctggtagggcaggtcacaggccctcagacccccaggctcccaagagtgggtgagatgccacttgccaaccgtggaggcttttgatgccattggcttcccccaaagaaataggaaatttctcagaaagctgatttcagtgttttcctttagtgtgggagtaaccagctggtggtggagaagcagaaagctggggaaacaaatccctaaagaggccttgcccactctgctggcatcctgctgggagagacaggcaggtgcagggctgggggtctcacagcccccaaactgactgttaagagcaggtttctctgcttgtcctcgaagggtctcgactgagttttgttccccgccataaccggggggtctcccccgagggatggtggccctttgtggaggcagcagggcctccagtttgccttcccggggagcctggctgggtagctgttagggctggaagactgagccatggccctgctgctgggggctcccctcgcctccccggagctggcctgagaggtcccgaggcggccggcgagccgtctggacttgggaatgagctctgactggtcaaggccagttcactccccaagttgtttgaaagctgggcgtcctgcaggtaaacttcagcaggtggctgcgttgcctgtgaggttgtgtgggggatcctggccctggatcctgcaggctctctt

SEQ ID NO: 221972 - DNA, 405 bp, Homo sapiens
tagtctatcccgcaatagtgtttaagcttatttcaggtatttcaaatggagaattcaaagcatccactttaaatgagtcttaaaagtctattctcttctaggagtaactattggtatgtaaaaacactacattaatacataaagatttcctaggaagtaaattataagcacgaaacttgtgccatacaaaatggctacttgtttaaaaaattgttcagagaagtcagattaggtcctattggctataattggataatggaaatccattttatatgcattaccaaactctcatcaaatcatacctcaaggcaccaagaggcaaatcacctcttgtattaaactagatatggccggtgaataatgggtgcagaggtggtcatttccatgagtggaaccagatataga

SEQ ID NO: 221973 - DNA, 539 bp, Homo sapiens
ctagagtggatatactaatatgtgacaaaatacacttaagaatgttattagaaatactgagggactttttataatgttaaaaagatcactctacctggaagatacatgcatacatacatacatacatacatatacatatacatatatatatattccgtatatgtatatgccatatatatgaaaatattcaaataatggttgaaaacctctcaaatttgattaaaatatatatacatctaacaacagaggcccaaatttatgaagcaaaaactaatagaattgcagggagaaatagacaattcagcaataatagttggggatttcaataccccattttcaataatggatataacaataaaagatcaacaaaggaataaagacttgaatgatatcatttgcccactacacctaacagacatttatagaacatgccacgcaacaatgaaagaatataagttcttctaaagtgcatattaacaattcccagtatatataacatcttaggtggataaactagtctcaataaatttaaaagagga

SEQ ID NO: 221974 - DNA, 448 bp, Homo sapiens
cagtagtgaagatccctggaagagggaggccatgaagagggatgcagatacctggcaagcccacctcccttctatgccacctgccagccttctctgacattcccaaaccagggaccaacaccgccaatcagggaagatttacacgcatttaattatagaaccagttcaagtctctggaggctggatgtccggccttcaccctggcacagtgggctgtgggctctgcggtccagttgctagtcaggagacgtcctggtggcccctgattcgtgttcacgttcacatcactgttcctgcggttctctacacattcaccttggtattagctctctttgcccctggtccagcatacctcttcagcttccaagtatgggtcaccttccttatgtaaatttcctcttgggactgtattttcttttaaataaaaattggccttgtccgagaactt

SEQ ID NO: 221975 - DNA, 672 bp, Homo sapiens
gagcactagcggaaagaaaggcggcacgtcagggcaaaagcagcttctgagggcgtctccaagcccagccctgcctccttggcagtgaggtatgcccgcaacctccactttgctcttagtactggggccaaagtatcctgggtgtaaaatggggatgatcctttccatgccacggggtcctgaggatcatacacaacagtgcccctaaagcgcctggcacagcacctgaccggagcacacgggcaacacacaggcaacaaacaggagctggaagagtttcctgtggctgccagaacaaacaccacaaaccagatgtggcggtggggggtcatgcacccgacatttattttctcaccgttctggaggccagaagtctgagatccaggtgccggcagggccacaccccctctgagggctcggggtaagaagcgtcctggcctcttccagctccctgtggctccaggatcctgggcttgtggctgcgtcgctcctgcctctgcctctgtcttcacgtggcctgtccccatgtatcttttcctctcctcctcaggacatttgtcattggatttagggcccacccagaatccaggaggggctcatcttcagatccttaatgacatctacaaagaccctttatctaaataggtcagattcacaggtcccggcggttag

SEQ ID NO: 221976 - DNA, 426 bp, Homo sapiens
ttttcctgtaaagacggtgttcgccttgttgcccaggtgggtcttgaactcctaggctcaagcggatccgccacctcggactcccaaagtgctaggattacaggggtgagccaccatgcctggccagctttgcttttgaagtacaatccaatcagatcactttgcaccaccatctttactaccaccctagttcaagctactatcatttgcagctagaattactgcaaaagctgaactatcttcctcctttgggagcatgagaagtaactattaaaaaaataagtcagactggccctgcacagaggctcatgcctgtaatctcagcactttgggaggccaggagttcaagaccagcctggccaacatggcgaaaccccatctctactaaaaatatacaaattagcctggtgtggtggcgcatgtctg

SEQ ID NO: 221977 - DNA, 511 bp, Homo sapiens
aattagaatgaggtacaaaacagatgagctaatggcaaaagactgatccaaaaaggttggccatggcatctaacatcaccttgtaacctgagttacaaatagaccttttctttcagaattgagatacgggagtgctgtgatcttttcacattgtcctattggggctggtgagaatatgttttattcagttttcatgaaactattaaaatgatccattatatgttcagcacattgtgttgcacataaagacttttttttctattgttctcgtgttccccaaggtcttttactgctagcctatgcttctgaatgtgtgagggatcaaatgagacttccgattatatggcaaatagcatcatcttgaattttgtgaaattatttctggataggattaaatccagtatctgacattatggtttagctcatcgcttcccaacctgtaagctctcttctcaatggccagtggatgctttgggaaataatttaaatctgcggtgaaataattggtcca

SEQ ID NO: 221978 - DNA, 677 bp, Homo sapiens
gctccagcctgggcaacagagcaagaccctgtcccaaaaaaaaataaaaaggaaacaacttactatctaccacatcaatgactgtaagaaccacctgagatattataaagcacttagaattgtatttggctcatattaaccaatcaatattagctacattactgttttgttgttgttgatatactatgctatataaactttgacaataccaatcatatgctgtgttgttcccaaatcaacttttgtgtaatgtaaaagattcataaaagtttaatattttacttttatatatgctcaataaatatctatagaatacatacatttttgaacaatgactcaccagtatgctttattaaaaggaattcgcttctaattttgtttcctcttttgggaaaagtaacaatgcttaccaactttcttcccctttttatgtcatgtgaaactatcatatgcaatgccatatggtaaacatgacaaatggtgcaaaacactgttttgactgaaactcatttgcctcctgctaaacatcaattcccagatttaaaaatattgttatttaaatgccaaccatttctaggtcacacctacatgaagtaagcaaaacataccatgatagttgaccaaactatttcatttcatacatctcttatggcaagaactataaggcataaaatgcc

SEQ ID NO: 221979 - DNA, 319 bp, Homo sapiens
agaaaaatggatttctgtcttttgtagtaaagtaattgggcaccactgcttggcaggagctggtgctgttgagctagctctagctgccacaggttgataggcaggtgataaggcagcttccaccagggtttgcacaggaggcctacctaatatgctgtctgccctaagggcctatgggaacacagttggattattatgttaatgcatgagcccgctgccctcttcctatcccagctgggttccctgttgttaggaactgctttgcactgacagtggagtaatatgcttcatgattgaaagggcaaaggggcttgaaagg

SEQ ID NO: 221980 - DNA, 278 bp, Homo sapiens
cgggcaggtggtgccgtcctcctcttttcaagcctaacgcccagtgcagccctggtagaaaccctctctggcagatgaggcactgggagatgagtgtccaagaatgagaagaaagaggaatcatcctaatgataaaaagtgctatgactggctgcctgcgatggctcacgcctattttcccagcgctctgggaggccgaggtgggcagatcgctggagcccaggagttcgagaccagcctgggcaacatggtgaaaccccatctctactaaaaagaca

SEQ ID NO: 221981 - DNA, 420 bp, Homo sapiens
tgagacggagttttgctgttattgcccaggctagagtgcaatggtgcgatcttggctcacagcaacctccacctcccagagtcaagcaattctcctgcctcagcctcctgagtagctgggattacaggcatgtgccaccatgcccagctaatttttgtatttttagtagagatgggttttttccatgttggtcaggctggtctcaaactcccggtctcaggtgatccatccacctcggcctcccaaagtgctgggattacaggcgtgagccactgtgcccggccaattatccctttttgtgtttttttggggggttgggggaagaacagagtctcactctgtcatctaggctggagtgcactggtatgatctcggctcactgcagcctccgcctcccaggttccagcgattctccggact

SEQ ID NO: 221982 - DNA, 529 bp, Homo sapiens
ctaagtgaatgaagccagagacaaaggccacatattgtatgattccatttatggactgtccagaatagacaaagccatagggacagaaagtagaatagtattttcccagagccaaggagtgagggaggataaggaacgactgctgttggatatgtgatgtctttttaggctgatgaaaatattctggcattagaaagtggtgatggtcactcaacctcgtgagtacactaaaaatcacttaactgtacattttaaaaggctgaattgtatgatgtgtgaattatatctccataaaaacaattaaatattctgaggagaaaaaaagtactactgtctcctgagagacactgtctgctgtcaggaagttagagttgctcagagccaaattccctgatacatgataaacagaattacataattatagtcctatcccagttctctcattttacacacaagtacactgatttgtccaaagtcccacagataatgagtggcataatcagattccaagtttcccaaactgtaatcc

SEQ ID NO: 221983 - DNA, 377 bp, Homo sapiens
cagccttaggaagatgccagtaaaaaatggaagctattaaaagcaaactgagttgatgaattttcctcaatttataatgtaaaattattcttggtgtagtgctgtctacatgatatcggattttccattattagaggatttaaaagccactttggactaaaggttatttacatttctaatttctcacattatatgatggggcataactttaaatagtggcctcccaaacacgtttttataaagggacaattgttagctttctgatgaatgtttcttttacatgtttatttttttcatgtgctgtattctgtttggctccaactagcagaaatacccagcatttggagagtcttctcatctgagcatccagctgttta

SEQ ID NO: 221984 - DNA, 112 bp, Homo sapiens
tgctggaactgcgtgtgctgctttctagaacagataatgaatcacagagctgctcagatggagaaatccaaaagtgcctctttgccttatctcccccttctgtcgtcttctc

SEQ ID NO: 221985 - DNA, 284 bp, Homo sapiens
tgaatttttgtagagacagggtttcaccatgttggccaggctagtctcgaactcctgacctcaggtgatctgcagaagcagcccctcttctgcctgctcctcctccagcaggcccaacgccaccttgtcaaatcctccctgtttgctcagcccatcaacgcttactcggggccctgggacgctgctccaccgagccgttagcctgtaggcctggcctcagcctcaacccaaccctgcccaagcacccggaaagaccccaagggagtcctcctggggattccaga

SEQ ID NO: 221986 - DNA, 446 bp, Homo sapiens
ggtgagtgcgagtgtctgaagggccagggcagcgccaccgaggccactagcagatactgtcacctgggcagggactggacatttgtggatcactctgacccttatgcctaaaccccaaatctcctgtcccctttgccagtcatggcctctcccacattggcctccactgctctctccagggagagagtttgactaattgataatggctttgctcttgaggctttaggagttcgagaccagtctgggcagcatagtgagatcccaattctacaaaagagaagacagaaaattagctgggcatgatggtgtgagcttgtagtcccagctacttagaagagcctaaagcaggagggttggctgaacctgggaggttgaggctgcagtgagctatgattggtgccactgcactacagcttgggagacagagcaagcaagacctggtctct

SEQ ID NO: 221987 - DNA, 206 bp, Homo sapiens
tgagacagtgtcttactcagttgggactacaagtgtgtgccaccatgcccggctatcttatctacctatcgacctgagacagggtctccccttctgttgcctgggctggagtgcaccggtgtgatctcggctccctatagcctccacctcttgggcccaagtgatcctccaacctcagtctcacgagtagctgggattacagctgc

SEQ ID NO: 221988 - DNA, 473 bp, Homo sapiens
agtaaaaggattttcctagcatgaaggtagcttccaccaatacaagaagtacagacattagggcatgtttggaaaagcagatagtccaattgtttggaaaccctcagtggggaaaaactgaagccatggtgtgtgctttgtgcacaagaaaatcagggataaagtgaaagttaagatcaaatacattagagcagctgagcattattagggtgaacttgacaagtcatttcaagtctccgtgtctcagtttttctatctggaaattggggaacatcatgtgataactcatgagattttaatgtttattaaatatgttattacttgtaaagtgcttaaaatagtacctcatatagcctcatatagtaggtactcactgtgcatgtgtgttgtgtttaaacaaatagtccgtaatttgaacatctgaagaatttcaagaataacaatctgtggaataaagttgagttttaaaatta

SEQ ID NO: 221989 - DNA, 294 bp, Homo sapiens
ctattgagaaagcactatagaaactttgctaggtattaacgttaaaaatcgtaaaacattacattttccatggcagaaaactgataaaatcattgagtagtcaatttctgaaatgtttcttaattttagaataatatgggtaaacagccaggtgcagtggctcacacctgtaatcccagtgactcaggaggctgaggtggaaggatcactcgaggccaggagtttaaggctgcagtgagctatgatggcacgatctcgtctcactgcatcttccgcctcatgagttcaagagat

SEQ ID NO: 221990 - DNA, 407 bp, Homo sapiens
gaggctgaggtgggtggattcattgagcccaggagtctgaagctgtagtgagttttgatcaggccactgcactccagactgggtgacagagggagaccctgtctcaaagaaaaaaaaagtacaaaataagtggaatagtacagtccatgccctgtggacaaggcttccttcattgaagacagtttttgaaattgatccatattgtgcgtatcagtacttcattcctttttattgttgagatgtattccattgtatgattataccccaatttgtttattcgttcacctgttggccttttgagttgttctggctattgtgaataaagctgctataaacattttatgtacaagtctgtgtgtgggcatatgttttcatttcttctgtataactaggggtggaattactgg

SEQ ID NO: 221991 - DNA, 1151 bp, Homo sapiens
gcaaataagatcagggaaagttaaatatagccaacctatgtatcgaactatgacaagttacaggtttaggcacatttaatgagattaatggagcataattttcacaattataatgtattctgaccagtaattgatgactgctaattgaaaaagttcactgtagagtttccctctaaagctgagaatcagcagaactatgatggtttagtgaacgtgggaattaacgagcactcagctgatcacaggagcctaggggtagtggaaagaaaagcaagagtaggtcatcattgccttatttcataatgcagaggcttctttaaattcacttgaagctctgtgcatttcattagtttctctgctctgttctctgcacaaatgcagacaggagaaaaataatattcaacatccctctgaggaccatagctgagtaaaaaagatgcttgtgctgccacaaacaggggtccacctggaactcaagcttgctagtaattctgagaggttcccctatccctgcctggcttggaggtaaagtgatgtctttgggctaccgttaaattcaaaccctgcagagagtcctcttttgctcactcaagcttatttcaaaacgagcctcacgcagagagcccagatcagtaggaaagactgacgctacattcaggcacggagttgctccctgccctgctgttactctgtatgtcttttgtcctgtcaaggctgagaaacatttcttgggagatatcccataaaattgtcagaaaacaggggagaggcaaaaattaaacaccaaagtcactaacttaaaagaaagcaaatgtaattaggggaaaagaaattttcaccttgtgtctgtgttaacaaaggtatcatccacttggaataacccagatatcatttttgtcccccaactactgtttacctttgcatgtctctcatctgtaataccactaggaattacacggcagtgagaagaggaaatgggtcagcctccggctttaaagtagttaagtgagcatttatgtagtacgattgtagcaaaagggaaagtaggcagcagagcaaaagggactcactctctgagtgagcaagtcaagtttttcattactttgaaaattgcatcaatctgcagggtgcccatgtaatttacttattgt

SEQ ID NO: 221992 - DNA, 495 bp, Homo sapiens
gactgtgtttcacaggaggcattttagtgttgttgttccccaatggctaggcagaggcagacaaagagaacattgtgtatcatcataatttgtcttcaatgacctttctttttgtgtcattcaccaccacctgttcctcaaaacaccaccatgtgaaccccaagcccaatggctcaggcttgccctctttccacccacgttccaggatggatttttccaggaacaggactaatgactcttaacttttcttctaccatctagagatggattataaggtagcaacccaagaaaatgggtttggacattcaaatacttgagtttaagtccagatgtgcaaacttgggcaaagccatttaacctcattcatcaacttgtcaaataggaaagataatacttacccgggatgaattccagttttggtgagcttgacattttcactatttgctggagccttctttaagcaaaagaataaaaatttatgatatgaattgggta

SEQ ID NO: 221993 - DNA, 727 bp, Homo sapiens
ccgttcctgataaaaatggcaaactgtgcctaaactgtgcagaccttatggtttatgctaaacacttgccttgcttctggaggcctggaattttggtacctgctaggtaaagtgtgtctacgttaccatccgcaataaaaaccctgggtactgagtccgtgatgaacatccttggtagacaacatttcacatgtgttgttacaaattgtaggtggggaactaagagtgtcctgtgtgactcaaatgggagaagactcctggtttccctggacttagcttcatgtgccttttccctttgctgcttttctttgtattctttcaccatagtaagtcatagatgtgaatatgactatatctgagccctgtgagtccttctagtgaacaaccttgtggttgtcttgggcacttccaacacaacttgtcttggtgatatttggccagcaaatgtcaacattaccaaagaaaagttggaggtggatggctttcacaataaaatttatttacagaactcctttaagtacaattttactcattattcatttgctcattcatttagttacaaaacttttgtcaaacacacaatatgttctggttactcccttagggactgaagggaatgagagagaaatacagagaggagaacatcagattcctctttacaaggggatcacagtttcaagacaccttctgatagggagataactaaacttcagtgggagagtgttca

SEQ ID NO: 221994 - DNA, 978 bp, Homo sapiens
gccattcgtaggcactgctggcctcatgctccagacagccctgggacaatgggccaccaagggaaatcaatgattgcgtgggcgcaggtgacctccagcctgcttcagggccacccttgttccccatgccaactccctccttcctatgggctcccaagaaatgggtggcagagaccagcctggtgatttacctcctgcctttccgtgacttcctcccagtcctgtgcatctcatgtttaattatgaggctgtggaaggtggtgatattaattatagggctgaggttgtgttacttggagaaagtcagtgcacatgtcatttgattttcctcaagaaggaaaactgtattttttccgatctcaaaaataattccagggaaataaatgtgtacaatcacactttggggtttaaaactaacgagtttcagttttaaaacatgttaaaaacctttctatttggagaaagctggaagaatccactttggggatctggcggttctcaggagctgtattacctcgggatggtctcactggttggtagcagcttttgtatgaggaggggcatggggtcccgacttaggcagagaaggctttgctgaagaggtgcaaagcccagcttagggctgggttttctacagaccaggaacaaaagcattgcttggcaagatttcttctctgctcagagaaaacacgcagattccaaagagtgagatggagagaatttgacatgtcttggtttgaaaataagtcaaaagaagtctaatattaacaatagcaataataataacaaccattaattgtgcctgcgttaggtaccaggccctattctaagtgttgtgagtgccctctgtcatttaatctccacggagtcctgaaggtgcttcccaggtttgtccccatcacacagatgaggcaatcgttctgttaagactgtccttgggtcattatgtcagcaatgaaatcggtgctgccattacta

SEQ ID NO: 221995 - DNA, 394 bp, Homo sapiens
gaggggaaaggggaaacattaccccaaaactgacagcaactgaaggaatgagaatctgcattcgccgtgggtctgagaggctcaccctgcttccaaccaggacagtggagaggggacctgaggtcagagacaccgtgacgggcgtcttggaagttaaaaaactgagggtgagttttgaaataaattcaacaggtcagtggttgaaataattgtatttggttacctaacagagttaactatcaaaaacaattcttaaaaattacatagtagcaaagaattataaatgaaataatgtgcaacattattacatttgtacatctcaaagaaaggggcaattttccaggaaaatgtggttttccaaaaattgtctcaaaaggaaacctgaacactttaa

SEQ ID NO: 221996 - DNA, 697 bp, Homo sapiens
atatgatggcacgaatgacacttgaaattcttagggaaggagaatggtttacagatttcagaaactgaattccaaccgaatggaattcaggaggcctgaatggtcatccgagcagtgctgtggtctctgtcctgcctacatttaccctgagttacggtctgaggtgaagatgtccaaactctgaccctggtctcctcctcctgttgcctctgcaagcccagctccttgacctgcctgcgcaaggtttctgggtctaggaatgctgctttcatgttactgtcctggttctcaagcctaggggctctggtctgcagaccctgactcactgggactgtggccaaatactcctgcccatctagattcttctctcccacaattctggaatctcccgcccacagtcatgtaagattttctggctgccaccgtattgccagatgctcacagacctatcaggtcacttgcaaggaccctgcttctggcctcctgccctaccctgctgcagtaggatgcacaaggaaggtcgcttggccctgagtgtcaccagcagtgctagtcagtctgaaaaagtgttttctggctgggcacggtggctcatgcctgtaatcccagcattttgggaggccaaggcaagtggatcacgaggtcaggagatcgggaccatcctggccaacatggtgaaaccccgtctctactaaaa

SEQ ID NO: 221997 - DNA, 538 bp, Homo sapiens
cagttggtacacaatggaatactattcatccttgaaaaagaaagaaattctgtcatttgcaacaacatggatggaattggacaacattatgatactaagtgaaataagtcaggcacagaaagacaaacacagcatgttcttacttatacgtggaatctacaaatagagaattcacaaaagcaagaagcagaatggtggttaccagaggctggaggatgggaatggggagatggggagatgatggtcaaaaggtacaaaggcacagttagacaagaggaataagtttttcttaatccactgcagtgtggtaaatatagttaataacattatattatacatttcaaaatcgctgaaagtacatttcgaatgctctcaccacaaaaaaataagtatttgatgtgatgggtatgttaattcacttgattaattattccacattttactcatgaatcataatttcactttgtaccccataaatatacactataatttgtcaatttacaatatgaaaagtaaataaaatagaaacaagtaagtg

SEQ ID NO: 221998 - DNA, 471 bp, Homo sapiens
acaactcaaattcggtttttcacatttcacaaaaattataaacaatattttgcctgttttaatggattagatttttaaatatgcacatatatagccccagagatattaaaggctgcagttatgttttagtaatgtcattttcaaagccagccagcagcacatttgacaggaggttttatgcaatggcttcatgctcattctaagtagagataagcctggaacattctcagtgaatctgaaagagacctcgccataggcactctcagaattattaaaatgctctccccatggtcttttgtgctgaacttcaatggcagtgtattatcctttcccttttttgttcttttcccaaatgaaaaattgactccatctttaaaacaccaccaaggtaaataacagcactatacacattaagcatgtaccttcagggcagaaatgctgttggcctcaggttctgcagtcccctaaatg

SEQ ID NO: 221999 - DNA, 479 bp, Homo sapiens
tggcacgagaaccctcagatgggtctttgcaatcagtggaagcccattaatcatgatgcttgccccagattttgaaaatttccagctctacctgccaatttgaaaattaccctgtggagtattggttgaatctacctttcatgttcaccatcttcatttatgtcgttcacatcctgaattgttaaaagaggtatcattgttaaatgttgctaggtgaacaaggaatgtacttcttttcatccgtaattgttgctatttcatgcattattatttaactcattgaatttttaatgtttacgaaataagttttagtgcaactgacttcctgacttaagatttatgtgtagggctggacacagtggctcacgcctgtaatcctagcactttgggaggccaaggcgggtggatcacttgaggtcaggagttcaagaccagcctggccaacatggtaaaacccggtctctactaaaaataccaaa

SEQ ID NO: 222000 - DNA, 648 bp, Homo sapiens
gcaggcggttgcagcctggaggtgatagttgcaactggggttctctgggagagggaagccagggatgggtaagtgcagggcccaggaggctttggttctcagaggccccttcccttgaggcagggccctcaggccccacaaggttatattcagataggatgacaacctgtgtacagggcttttttgggaaagcactattgcataaaactgtttctcaaaatccttgatagtaagaatcacctggacagttgttatgtacgtggaccagcatctatttccctaaaattctaattcatcaggtgttggttgtggcccaggtatttgtcatagtcattgtcctcctcctcctccttctcctcctacttctccttccccttcccctcctttctgcttccccttctctctccccttttctccttcctcttcttcttccttatccctcctcctcctcctgttcctccttctttcttcttctttccttccacgagattcttaccatcaggaaaatgatgagatcatgatctctttagataacagaactgtgagagggcaaggcgcactgaggtttgcactgggcttgatatttgtatggaatgaagtatcatacttcattcactgagccccagtttttctatttgtaaaatgata

SEQ ID NO: 222001 - DNA, 364 bp, Homo sapiens
tatttccagcctaaaatgtgcatgtggtgcagcttcaggggaggtgattgatcgaggccacgcccacctcccccccgcctgtttactccttggatgggatggtgcatatgtcttgcttcttccttaaaatgggcctctctcggcctccataccacagtccccgggctgggagaggggtcgtggtatagaggtggggtgggggccgaccagcggcgtttatggggaccagccgccaccaggaactgttgctaggcattttatgtatttcccagaggcaagagaacatagctgtgatgtggccaggagtgcgcctcaaaaccacgtgcaaataataaatgcggaagctcccgtttcagattttaaa

SEQ ID NO: 222002 - DNA, 379 bp, Homo sapiens
ccctcatggggcttatgatctctggaagcactgctttgcacagggaagtagcaccaggagggggtaaagaaagagggactttggagccccaagattggcaaaaactatagctaatgagagaggtgaactgtagagtctagataatggggaaggagaggtgccagagcaagaagggattctcacagggccctacgggtcagtcctgaattggctttactagaactcaggcccagcacaatggctcacatctgtaatcccagcgctttgggaggccgaggtgggtggatcacttgagatcaggagtttgagaccaacctggccaacctggagaaaccctgtctctactaaaaataaaaattagccgtcatggtggcacacg

SEQ ID NO: 222003 - DNA, 283 bp, Homo sapiens
aaacactgcacaagctgggactgagggatattctacataagtactggtccagatgcttcaaaatgtcaatgtcaagacaaaggcagaggaactgttccagtctgaaggagaatgaagaaacaggacaactgaatatgatgtgtgatctaggactggactctggattgaggggaaaaactgctataaagcatattatgaggatagttgctggaattcaaatacagcccatggattaggcagtagtactgtaccaaaattaagtttcctgaatttgatcattgaa

SEQ ID NO: 222004 - DNA, 902 bp, Homo sapiens
aggatcatctgtgaatcctacaatgatgtccttttagagttaagaaagtaaaactggtttatgccgaaattttgccctttaacaatcagcccatagtgtggtgttataatggaagtccattatatctagattgtttaaaatggaactatgcatttacacacatataaagtaaaactcgacaaattattctagccacagctttttcccaaataattattaacaaagcctgactctgtctcattgcctgtcttagtgaatgcagttttgtccctatccccacccaacaacaacaacaaaaatacttgaatgtagataggctttgattttagaatatattgataagtagattttacatataaaatattctgcatgggaagaaattcccaatgtaaacactgaacaaattccagctggccagtgctgtgataaggtttcggaggaatatgtacatctaccttgccctagatgaattttacacttagtttaggacaaaagattgctaagatgacagctagtggaccatatatgagaataataaaataaagggttaacttatattgcataaggtatgggttcatagaatgtaatggatcagatgtgaaggcagagttgattctccttgcttagagtaggactttgcacatgctggtgttcaaaaaacattcgtcgctaataaaaatactagtatcatggaggcccactcaagtcctttttggaattaaatagaaagtcaattagtgtcaaatatctcaccgtgtcttaataaggactagcttagccgggcgcggtggctcacgcctgtaatcccagcactttggaaggccgaggcgggtggatcacgaggtcaggagatcgaggccagtctggccaacatggtgaaaccccgtctctactaaaaatac

SEQ ID NO: 222005 - DNA, 818 bp, Homo sapiens
aggatcatctgtgaatcctacaatgatgtccttttagagttaagaaagtaaaactggtttatgccgaaattttgccctttaacaatcagcccatagtgtggtgttataatggaagtccattatatctagattgtttaaaatggaactatgcatttacacacatataaagtaaaactcgacaaattattctagccacagctttttcccaaataattattaacaaagcctgactctgtctcattgcctgtcttagtgaatgcagttttgtccctatccccacccaacaacaacaacaaaaatacttgaatgtagataggctttgattttagaatatattgataagtagattttacatataaaatattctgcatgggaagaaattcccaatgtaaacactgaacaaattccagctggccagtgctgtgataaggtttcggaggaatatgtacatctaccttgccctagatgaattttacacttagtttaggacaaaagattgctaagatgacagctagtggaccatatatgagaataataaaataaagggttaacttatattgcataaggtatgggttcatagaatgtaatggatcagatgtgaaggcagagttgattctccttgcttagagtaggactttgcacatgctggtgttcaaaaaacattcgtcgctaataaaaatactagtatcatggaggcccactcaagtcctttttggaattaaatagaaagtcaattagtgtcaaatatctcaccgtgcccggcccataaatatttcttagtttgtaaaaatgtaacttaaaaacctaaaatatcaaaa

SEQ ID NO: 222006 - DNA, 629 bp, Homo sapiens
tctaagctcaacacttaatggctttatgaccctaaacagttacttaacctttctcaacttaactttcaatatgtgtagtattgcctatcttagagggttaattgcatcacagggagattttcattgaaggttgtttccctaagtaacttggtagctgctttgaagtttcactaagaaatcaacttgcaaaaggcagataataggagaaaagacatatacatttatttaacgtatgtacatgggatcctttagaatgaagaccaaaagatacagggggaactcttaatttttatgcttaggttcaacaaagtatggacagctatgtagaaacatgattggacaaaaagtgtatgatctaatgaataggttgagtggggaaacccagcaagtcctgtctgtctagattcttcttggcctctctgagcacacagttcttccttctgggcatggggcaggaccctctctggaatggaagggtcttatgagctacagccaaacaaggtaggccagataatttctttatggctggttttgccacagaaagtcagagggaaagttaaagtaatatttttaggttttatggctggcttgggggaacatgggttctggtttccatgacctgccttgaa

SEQ ID NO: 222007 - DNA, 476 bp, Homo sapiens
gaggagactgcgcttgaacttgggtgggtggaggacttgggtaggtgaagatagaaaccaggtagaaaaagaaggaatgtgtgttagtatttgtcaccactgagagcggccacttcaatccaccccaagtgaggtctttgtagttttgtgtgctaaggggatgggggtccacttataccttgttcatggccagggatgtatctgaatagcggaaatgcctgcagaaaggctacgtggtttcttcgtaaacaaccatgccagtagaaggcaggggtaagagtaagacttactcttcactggacactctcttttgtccttttataattctgcaccaagaacatgcattacctttaaaaaatcagtacaatttaattttcagtaacacccacagcactcactcaaggtcaccctgaggacctcattttgtgaatatacagtgtgcatgatgctgaccaatgccatctagaccaaaaaaa

SEQ ID NO: 222008 - DNA, 263 bp, Homo sapiens
gcacgaggcactattgacattttgagtcagataattcttgttcttgggggctatcttcagctttgtaggatgtttaatagcatctgtggttcactggatgccagtagcacccttccttaagttgtgacaatcaaaaatgtctccagacattgtcaaatgtcccctgataggtaaaatccccaccactacctctagtgactccacccctgttgagaattaactgttctaggataagaatggaatgaaactataacatcaagaaa

SEQ ID NO: 222009 - DNA, 515 bp, Homo sapiens
ctcaacataacatagctaatatatgacaaacctatagctaacatgatattgaatagggaaaagttgaaaacttttaagatctggaataagatgaggatgcccacttttgccacttctattcaacatagtacttgaagtcctagccagagcaggtaggcaagagaaagaagtaaaagacatccaatgtgggaaggaaggagttaaattgtccccgtttgcagacaacatgatccaatcttatgtataggaaaccctaaagactcttaaaaaactgtcttaggctgataagtaacttctgcaaagtttcaagatacaaaatcaatgttcaaaaatcacaaccattactatacaccaacaatagacaagtagagagccaaatcatgagtgaactcccattcacaactgctataaaggaagtaaaatatctaggaatatttaacataatggttaacaagggaagtgaaggacctcttcaaggataactacaatccactgcttgaggtaatccgtgaggg

SEQ ID NO: 222010 - DNA, 712 bp, Homo sapiens
ctcaacataacatagctaatatatgacaaacctatagctaacatgatattgaatagggaaaagttgaaaacttttaagatctggaataagatgaggatgcccacttttgccacttctattcaacatagtacttgaagtcctagccagagcaggtaggcaagagaaagaagtaaaagacatccaatgtgggaaggaaggagttaaattgtccccgtttgcagacaacatgatccaatcttatgtataggaaaccctaaagactcttaaaaaactgttagaataaaatttagtaaagttccaggatataaaatcaacatacaaaaatcagtatcatttgtatattaatgcattaaaagcaaactatctgaaaaacaaatcaagaaaacaattccatttaaaatagctacacatacacagaatacctgagaatagatttaatcagggatgggaaagatctctacattgaaaacatataaaacattgatgaaataaattgaagaagatgcagataaatggaaagatattttgtactggtgaattggaagaattaatgttgattacatgtgtatactcctaaagtgatctataggcagttcaatccctgtcaaaatacccgtaacattctttacagaaatagaaaaaacaatcctaaaatttgtatggaatcacagaagaccctggatagccaaagtaatcttgaggcatcacacta

SEQ ID NO: 222011 - DNA, 826 bp, Homo sapiens
gtctcagacataacgagggggggtctcgctggactcgccgggaacccgtcccgttccgacacccccggaggcagctgtcattctgttgagactctcaagcagcaccagttcaagaggcccatgttgctaagaaccaaggcatcttgctagtgagcagctgaagcctcctatcaaagccatgtgaatgagccaccttagaagtggatcgtccaaccccagccaagcctcagctgacagtggtcctgactgacatcttaacttcaacttcagaagagactctgggccaaaaccacccagttaaaccacttcctaatttctgacccacagaaactgtgatataacaaatgtttgctgttttaagccactaattttgaggataatttgttatgcatcaatggataactgacacaatatcactttgcccatttataaattatttttaagtgatttataagagccttttatatgttaaagatattaattaataatcctttgtctgttataaaagtctaatctatttctgtttattgcctttattatagtaatacaaaaaagtgttatatatattcaaatatattattcatttccattttcattttgccttatgtgtcatatttagacatttttaacctactacaatattctcaataaatatttacctatattttcttttgttaactttttctttaaagtcccaacatttaaatcatctggaatttatttggggtttggtatgtgatgaaaaactaacttttctttttcttttttttgtgttttcaccaactttatagccagttgttaaggcataattctgcatgattaaaat

SEQ ID NO: 222012 - DNA, 3435 bp, Homo sapiens
aacattctttcttcctcttggcttatattagggataggggatgtggtttgttacaaaggatgagtattttgatagcttctcattccttgaactattctgcaggtttataacaaagctcagaaaatactaaaggttaaaggagaattgagagctgccaaggaaatgaaagatgaggcgggggagagagacagagaagtgagcagcctgaacagcaagctgttaagcctgcaacttgacatcaagaatctgcacgatgtctgcaagagacagaggaagaccttgcaggacaatcagctctgcatggaggaggcaatgaacagcagccacgacaagaagcaagcacaggcattagcattcgaggagtcagaggtggaatttgggtccagtaaacagtgtcatctgagacaactccagcaactgaagaaaaaattgctggtccttcaacaagaactggagtttcacacagaggagttgcagacttcttactattctctccgccagtatcagtccatcctagagaagcagacttccgacctggttcttctgcaccatcactgcaaactgaaagaagatgaggtgattctctatgaggaggaaatgggaaatcacaacgagaacacaggggagaagctccatttggcgcaggagcaactcgccttggccggggacaagatcgcctctctagagaggagcttaaacctctacagggataaataccagtcttccctgagcaacatcgagttactagaatgccaagtgaagatgttgcagggggaactcggcgggatcatgggtcaggagcctgagaacaagggtgatcattcaaaggtacggatatacacttctccttgcatgattcaagagcatcaggagactcagaaacgactgtctgaagtctggcaaaaggtctctcaacaggatgatctcattcaagaacttcgaaataagctggcctgcagtaacgctttggttctggagcgtgaaaaggctttgataaaactacaagccgattttgcttcctgtacagccacccacagataccctcctagctcctcagaagagtgtgaagacatcaaaaagatactgaagcacttgcaggagcagaaagacagccagtgcctgcatgtggaggagtaccagaacctggtgaaggatctgcgcgtggaactagaggccgtgtcggaacagaagagaaacatcatgaaggacatgatgaagctggagctggacctgcacggactgcgggaggagacatctgcccacattgagaggaaggataaggacatcaccatcctgcagtgccggctgcaggagctgcagctggagttcaccgagacccaaaagctcactttgaagaaagacaagttcctccaagagaaagatgagatgctgcaagagctggagaagaaactgacacaggttcagaacagcctcctgaaaaaggagaaggagctggagaagcagcagtgcatggccacagaacttgaaatgacagtcaaggaggctaagcaggacaagtccaaggaggcggagtgcaaggccctgcaggctgaggtccagaagctgaagaacagtctcgaagaggccaagcagcaggagaggctggctgctcagcaagcagcccagtgcaaagaagaggctgcactggcaggctgtcacctggaggacacccagaggaaactgcagaagggtctcctcctggacaagcagaaggcagacaccatccaggaactacagagagaacttcagatgctgcagaaggagtcctcgatggctgagaaggaacaaacctccaacagaaaacgggtggaggagctgtcattagaactctctgaagccctgaggaagcttgaaaattcagacaaggaaaagaggcagcttcagaagacagtggctgagcaggatatgaaaatgaatgacatgcttgatcgtatcaagcaccagcacagggagcaaggctccatcaaatgcaagttagaagaagatcttcaggaggccacaaagcttctggaggacaaacgggagcagttgaagaagagcaaagagcatgagaagctgatggagggagaacttgaagctttgcggcaggaatttaaaaagaaagacaagacgttgaaagagaattccagaaagttggaggaagaaaatgagaatctccgagcagagctacagtgttgttctacacaactggaatcctctctcaacaaatacaacaccagccagcaagtcatccaagacttgaataaagagatagcccttcagaaggagtccttaatgagcctgcaggcccagctggacaaagctctgcagaaggagaagcactatctccagactaccatcaccaaagaagcctatgatgcattatcccggaagtcagccgcctgccaggatgacctgacacaagccctcgagaagctcaatcacgtgacctcagagacaaagagcctgcagcaaagcttgacacagacccaagagaagaaagctcagctggaagaggaaatcattgcttatgaggaaaggatgaaaaagctcaatacggaattaagaaaactgcggggcttccaccaggagagtgagctggaggtgcacgcctttgacaagaagctagaggagatgagctgccaggtgctgcagtggcagaagcaacaccagaatgacctcaagatgctggcagccaaagaggagcagctcagggagttccaggaggagatggccgccttaaaagagaacctccttgaggacgataaggagccctgctgcctgccccagtggtctgtgcccaaagacacctgtaggctctaccgagggaatgatcagattatgaccaacttggagcaatgggcaaaacagcagaaggtcgccaatgagaaactaggaaaccagctccgagagcaggtgaactacattgccaagctgagtggcgaaaaggaccacctccacagtgtaatggtccacttgcagcaggaaaacaagaagctgaagaaggagatagaagagaagaagatgaaagccgagaacacaaggctatgcaccaaagccctaggcccgagcagaacggagtccacacagagggagaaagtgtgcggcaccttgggctggaaggggttgccccaggatatgggtcaaagaatggacctcaccaagtacatcgggatgccccactgcccgggttcctcatactgctagaatccacatctagccctgagcagcatttccacgggtgtttcttcagaggacagtgagttcccagccctccctctctcttgacctggatcagctcttacaggagtatatcacggtcccagcctattttgcaagacactaacttttgttgagttttgtccacttcctgccatggagtgagctttagaaccatactaccatctccaggcccaaactctgaaataaagacatgagcatgagcaaaaaaaaaaa

SEQ ID NO: 222013 - DNA, 333 bp, Homo sapiens
ccaaaaaagtaaatataaattttatagttagaaaataagaataagtctgggtgcagcggtttacatctgtcacatcagcactttgggagattaaggtgggagatcactgggatccaggagttcaagaccagccagggcaacatagcgagaccccccacccccatgtctccaagaaaataaaaatagctaggcatagtggcacatgcttgtagttctagctattcaatgactcaagaggcaggaggattgcttgtgttcaggagttcaaggctgcagtgagctacaatcatactactaaactccagcctgagtgacagagcaagaccgtgcctc

SEQ ID NO: 222014 - DNA, 649 bp, Homo sapiens
cttgggttgagtaagtgctgaccagaacaaggcacatatatgagaaataaggaagagctgaaacacttggcctccagtgcagtagggcccagaaagtggatctgtacatgaagttcctccagatacatcagcaataggggtttgaagacttttgctcattcatctgatgctccacatactgtcctttctctttctcttccaacacatgtcatgttcctccctaggatattcgttgttgggtgaatacctagcatcctctttttatgctttagggacaacccagtctttttttgtgaatttctttcccacatggtagggagacacaatgaggctgataatcagtttcttctgctgtctcttgagagcagtatgggcatatgacctaagctaggccgactgaactcttattctcccaccaccaccaccccagacaatgagtcttgagtagaatgatgcaaagacgggaaaacgtaggtgggggttcattcatatcaacatagtgaagcagtcctggtacgaccatagttcttgttactccatagctactccacacctgccctgtgtcctttccttttctgagctctgtctgataaagctgagtgttcttgtgcagtatatgtctatcttccttgggctcagtttgccattc

SEQ ID NO: 222015 - DNA, 455 bp, Homo sapiens
atattcttataacaaatataatacataggtataaataaaatttagaatatacagaccagcaaaaaaaaaaatgaaaaaaaaaaccttaaagttcttacaataataagttatacatgtcttataaaacagcataattgtgctgtctttcaagatgttcaaataaacattgtttctggatttcctcctcctccctccatcctttaaataattatttgtagtgagtagtatctgtcttgcctgacatggaaagcagatggagatgcgtaatgcttttgctaaatctctaaatgttctcatttttgaaaaacagtaaccaatggtaaatgaaagaagtattatcactgattcctctttctaatcagtggggttttctatttactctgaccacctatttcgttactcttactggatgccaaatcattacaatgtgatttggggaaataaaagacattata

SEQ ID NO: 222016 - DNA, 598 bp, Homo sapiens
agatcttaagtttaaaaaattattctcttttaatcacaattctttagttttatgctagatcttcttggactagaggtgcatttttaatagtctaataaggatctatatcactggcatgtagatttttgttctggcatgttatttttctgaggctatgttttcatttatccggttagtaggggaatcagttttcttaagtctaatcataatcaaaagagtatcacacaggattactttgcttaactggtcaaaatttgttcctcataaaataagaaagaaggaagaaattgtctttttttttttttttttttttttgctttaaaaaatcctttgtattttagttgattataattatgccaagctttaattttggccaccagagccatacaattattagattttgctaatgagttagaatgatatttctgtaatataaaggaaatggttaatttcatttatatcttttagtgttttatctattgaaatcgtcttctattagacattgctttttcctctatgaaaagatgtttccccatttatgtaagtatatgaaaatctttgtttttgctttatttaaatatacaacttcatcaaattg

SEQ ID NO: 222017 - DNA, 365 bp, Homo sapiens
accccccaccctcgcccccgccaaatcacagtggttttacagagtaaaagctcagttctcctttgtgagaagtccagtttagctaaaacatctgggcaaattgtagaccaagatctctgaggaggggagggaggaatggaagaattgactatcttggtcagaaaatgccacacatcattcatgcccacaccctgttggcccagatcaatcactgccaccaacctaactacctggaaggctgctgggaaatgtgggggagtcccaggaatatttgacaactcctattgtcactgccacacaaccctacttgggttttctaatttaaaagccagaaaatacatggctttaaagagatatgtaatcca

SEQ ID NO: 222018 - DNA, 405 bp, Homo sapiens
ggatccccaagcatgtgccgctcctggattgcttataaactacattcccatcagaatgtctagtgttctagacatagtattcccatcggaattcccagccccagagaataggcatctttttttctcattttgctggaggtgctctgttaaaatgccaacgggactggaagtgaaaccctattagacactctctattaatgataaattgccagaaatttcctaccctgcagcatctgtctgaaaagaaatgccaagtaaggttcaagtttaataactgggccaaggtgaagcacattagtcctgattccatgtgggctaaactgtaggatgcaaaaaggatgtcataagggagcaactctcggacgctgtgttgagaagcatcaaagtacttagtttttgaaaaaa

SEQ ID NO: 222019 - DNA, 625 bp, Homo sapiens
tgttcatacttttggctattataaataacactgctatgaacacatgtgtgccagtttttgtgtggatatatgttttcatttatcttgggtgcattgataagagtggaattgctgggtcctatagtagctccatgattactcttttgaagtactgccaaactggttcccaaagtggctgcaccaatacacattcccaccagcaatacatgaggggttccaatgtctctacattcttaccaacacatggtattatttgtgttttttgtacaaccatcctagtaagtgtaaaatgatatctcattgtggttttggtttgcgttttcctaatggctaatgattgagcatctttttatatatttattggccattcatatatcattcttggaggaatagctgtcatatttttgcccatttttaaattgatttatcttttcatcactatctattatgttctttcacttaatataatgttttcaaggttcacctatgttatacatgtgtcagaatttccttccgtttgtaatataagttttcacattatgaattcttgtattagttcttatattagaactgagttgtattctaattgagttcttatattaaaaagaatcgagttgtaagagtt

SEQ ID NO: 222020 - DNA, 856 bp, Homo sapiens
atattttctgcaaatatataggagaagagtagtaaggtgtttgtgaggcagaataatggtggattccaagtactatgatcattgatatcaatttttagaatgtattagatgcatctggagtcaataatttatctggagaagtttttatatcaaactgataggtaatattaaaaaccacttagcattttggaagagaaactttagtaacaaacactgactgttttgtgtacatttattttctcacatcagtgattaaatttctttttatgtagaaaacttaaggtgcttttgtttatttgtgtaggtgagtatattaaggctcaggttcagaaatgtttatgaggatttctgtaagtgttagagaaggaactaagttctggtctagggaatattattaccagagtttatcatgtggttgtgtttgaggaggagatctaccaactaatcagcagttctgagatgaatcgcatagggcctcatgcgtcccttttatgggagaaagttattttgctttccggtacaggatacagctgtgcttctcctactttgtatttgccatatacggatagatacaaaacctcatgactgatttttccctatttattttgagtggctctgtataccattttcatgtattacttcatttttctgtttttcagttatgttctctgttttcgtatatttttggaagctagttctaagtcatgttttgtaggaaataagcaatcttaaatacatgcataggggatttctttcttctgaggatccttaatttcttctatttttaagattcaaattgaatgattaatcagtaacagtttatgttttaaataaaagtctttaaaatgttaaatat

SEQ ID NO: 222021 - DNA, 506 bp, Homo sapiens
cgtccttcatcatacctacctccctgatctatttttgtcattaggttgatctaggttagcactgtatactatcttcataaaatcaattagtgtggtatgaaccttctgattggtattagatgagttcctctataaaccagtaatatttaaataagaaagaatgcagttaggaggcaattgtaatagccctggcaaaggacgatggagccttgaaccaaaatactggttgtagagatggaggaaaaatcaggcagtatttaaatgatagaattcgagacctgttgacagatttcagactgaaagagttaaaagtggctcttgggcttttgctagtacctttagggttgcctgggagtatagaattcattttcatatgttttgcttgtcatcagccaggggagctatatcctgtagacagccagaaataaagacatttattgagcgagatgggtagactaaagatatcttcgttgtaagtgggtatagatgaagtggccaaggagtgg

SEQ ID NO: 222022 - DNA, 437 bp, Homo sapiens
tcagggtctctctctgtcacccaggctggagtgcagtggcacaatcatggctcactgcagcctcgactttccgggctccagcaatcctccaacctcagcctcctgagtagctgggactacaggtgcctgctaccatgcccggctaagttttgtatttttggtagagatggggttttaccatgttgcccagagtggtctcaaactcttaagctcaagtgatccacccaccttggcctcccaaagtgctgggattacaggcatgagccaccgaacctggctattattatcttaaaaaaaaacaacagtttattataaatgttttaagcaatcaatacatcactaggtttaacaattactagcattcttctttgccaaagatcttaaaggacatcctagacttcgtggtcgacgcggccgcgaatttagtagtagtaggc

SEQ ID NO: 222023 - DNA, 401 bp, Homo sapiens
cctggtccaatagatgtttattattattattactactatcatgactggcacttgacaggggctcaaccattggttggggtagtttgctctctttattcttcatcccaggtaacccaggctatatattagactccagtgggtactcttaaaaaatatgcatgcgccaggtatggtggctcaatcaatacatcactaggtttaacaattactagcattcttctttgccaaagatcttaaaggacatcctagacttcgtggcaaactatataaggcaagtaacttcactgttaaatgctttagtggccatctgtgaaaacaagagggtttcttgcataaccatgatgccgtcatcacacagcaggctgatgtgaagattgagggagttaatagagggaaagccc

SEQ ID NO: 222024 - DNA, 453 bp, Homo sapiens
cctggtccaatagatgtttattattattattactactatcatgactggcacttgacaggggctcaaccattggttggggtagtttgctctctttattcttcatcccaggtaacccaggctatatattagactccagtgggtactcttaaaaaatatgcatgcgccaggtatggtggctctggctattattatcttaaaaaaaaacaacagtttattataaatgttttaagcaatcaatacatcactaggtttaacaattactagcattcttctttgccaaagatcttaaaggacatcctagacttcgtggcaaactatataaggcaagtaacttcactgttaaatgctttagtggccatctgtgaaaacaagagggtttcttgcataaccatgatgccgtcatcacacagcaggctgatgtgaagattgagggagttaatagagggaaagccc

SEQ ID NO: 222025 - DNA, 224 bp, Homo sapiens
ccctcttttcagagcaggataatccagcttcattttcgccttacattcttacgaggttagtataaataatttttttaaaacttggtatttattagataattttgagtaatcttaaattacaggctgactttgcatattgaggattggggtctatcctccatgtggggagaaaagaaactatacatttgaaattgtttccaataaataaagctgttttggcagta

SEQ ID NO: 222026 - DNA, 915 bp, Homo sapiens
ccctcttttcagagcaggataatccagcttcattttcgccttacattcttacgagattcctcacctattcctacctcttggccttcaatgtgtggcttctgcttgcacccgtgaccctgtgctatgactggcaggtcggcagtattcctctggtagagaccatatgggacatgcggaacttagccaccatctttctggcggttgtgatggccttattgagcctgcactgcttagcagcctttaagagactggagcacaaggaggttttagtcggcttgttgttcctggtgttcccgttcattccagccagcaacctcttcttcagggtgggttttgtggtggcggagagagtcctttacatgcctagcatgggctactgcatcctttttgtgcatggactgagcaagctctgcacttggctgaatcgatgtggggccaccaccctgattgtgtccactgtgttgctgctgttgcttttctcttggaaaactgtgaaacagaatgaaatttggctgtcaagagagtccctattcaggtctggagttcaaactctgccccacaatgccaaggttcactacaactatgccaatttcctgaaggaccaaggtcggaacaaggaagcgatctaccactacagaacagctctcaataataataaagcttgggattatctatgctggagattcagaaaaacactgacagatctgccatagacctccagagctctccgactgttcggttaccctggagaaggtttctaacattctaccttgtgtgatgggagtagaaagtccagagaccacccaacaagtcagcccttcctacacaaaaactcccaagaaatgcctcagctaataagccccgaaagagaaatagtgattctccctgaataaagtcaagatattgatgtgtaaa

SEQ ID NO: 222027 - DNA, 635 bp, Homo sapiens
ttacattgacaacaatatttttgctacattggctttataagaatttctctttagcatcctctggcaatggttaggctaaccattagtctgacttagtaataactaagcaatggttagtcagactccagagaaagttactaggatatattggacatcccagcagaaaacatttccttcagaaatgactttagggacatgtgtccttgcatcattgatctgattggaggagaccagggttcactgtgacaatggaaggaacaaggaattaatagctcaagagcatgactgctttcaagaaagtgggaccagtggcattgtagccaccataatcactatatttaagtaacttttcatgtgtatgcttgtttccccaagaaaatgagaaataaacattcaactagaccagtttacatattttaatacactaaatgccaatctttctaaaagtttagatctattaataaaatatgtatttcttgttaattttttcaaactggttatcaccacatttctgggtcataatcttctgtatgtgatcatcacacccattcttactgattatgacaccatgaccaaagaattatgatcatgtttcatttcattttgtttcaagaaagagacaggaaatgcagggg

SEQ ID NO: 222028 - DNA, 423 bp, Homo sapiens
  misc_feature (58)..(58): n is a, c, g, or t
  misc_feature (60)..(60): n is a, c, g, or t
  misc_feature (89)..(89): n is a, c, g, or t
ggggttggggggcccccggttaaaaaaacccccaaaaaacttttaaaaaccaaccctncncaatggttaggagggttacttcaacttgnccaattgtaaaggggggggttttccccaaattttagattgctacaaggagggagaaagaagaagatcaaatgttgtttaaaagtctttttttttctttttaaatattcttattccactgagttgtagctgtagattttggccgggagccagacaatcaagatttagtattttgaccagctgtgatctagtaatgtccctcagaggaaacattttgtagggagggaaagacacatatttgagactgtgaattgtactctgtcctcatactttacagtgtgggacctggttgtagacagataaaacaagtacaagtgaatctgaaagagaattagg

SEQ ID NO: 222029 - DNA, 498 bp, Homo sapiens
aagcaatcctccacggggaaggctggccgtgggaagctgtccctacccagtgcagactcgagtctggcttgagagccctggcccacctctggacagggtcctgatccaaggctggcgcttcatctcagggcaggggcaaggtggggggaccctgcctgtctgcctggaagacacccacatggcttccttcgattcgtcctgcagatctccctggcatcactttctgagacaccgtactcaaccccctccaacagggaaagcccccgcgctatgtcctgactcccccagctgcgcctggctcccccacctgtgcctggctcctccagagacacctgttccagcccagtgtgcggtgtgctcattgtgccatctccttgggtggagtgatggctccatgagggcaggcaggttgtctactctgttcactgtttaaagcagggccctgcccgaaggaggtgcgcaataccttccgggcaaataaatgaatgaatggatgaa

SEQ ID NO: 222030 - DNA, 303 bp, Homo sapiens
acaagagtgaaattccatcacacacacaaaaaaaactatgactacatgcaaaaacatgaatcttacaaaatgttaaaaagaaagaaaccaggctgggcgcggtggctcacgcctgtaatcccagcactttgggaggccgaggcgggcagatcacaaggtcaggagatcgagaccatcctggctaacatggtgaaaccccgcctctactaaaaatacaaaaaattagccaggcatggtggcgggcgcctgtagtcccagcaactcgggaggctgaggcaggagaatggagtgaacccgggaggt

SEQ ID NO: 222031 - DNA, 220 bp, Homo sapiens
ttacctgatgttttcctgccagaacaccatggactgttacttgccttgagttggaagcagtttgcacttacacctgtaaatttattcatcctttaaatttatgtgagggttttttgtacacaattctcgattctttaagacatgataacagactttggttttctactgttatgtgagaacatgaggccccagcaacacatcattgtgtaagaaaaaatga

SEQ ID NO: 222032 - DNA, 432 bp, Homo sapiens
ggtgtcaggattcagcctattttaatgcaggaagaaatgaaggtcctgaaaggttaaatgtctcattcatcttgtccccctagtgagcagcatggctgggactttaacatcgggttttccaaccccaaatcccaactcttttagttgtaccatgttgtttcttctcatacaaagtactgtggatgggcagaagcttctgtgagtcaatacaaagaactgctaggtctgagtactaataaaaagatgtaggttaagtcagtagacttgcgcccatctgaaggtggtctctagttttctgcctcagggctctatcatgatgctgttctgttcaacagaactaaggagaacaataggttcacgttcaaaaactctttctcacctaaacacacagatgggcagcttctaataaagttggagctttgtaggaatata

SEQ ID NO: 222033 - DNA, 605 bp, Homo sapiens
cttattaaatatatgatttgcaaatattttctcccattccataggttgccttttcactcagttcattgcttcctttcgtgcacataagttttaaagctggatgtagtctcatttgtctattttgcttttgttagctgtgcttttggtgtcatattcaagaaattattgtcaaatccaatgtcatgaagctttttccctatgttttctgctagttttgtagttcggggtcttatattttggtctttaattcatttaagttttatatacggtgtaagataagggtccagcttctttcttttgcatgtgaatattcagttttcccagtatcatttattaaagagactgtctttttcccatttagtggtgttggtatccttgttgaagtttgcttgaccatatgcaagggtttaaatctgggctgaccattctgtttcattgataccacactgttttgatgactgtagctttgtagttacttttgaaaccaggcagtgtgaattgcccaaattggttctttttcgaacttgttttggctattcaaggtcccccgagattccgtatcaacttaaaatggccagcctgggtgacagagtgagactccatca

SEQ ID NO: 222034 - DNA, 533 bp, Homo sapiens
  misc_feature (405)..(405): n is a, c, g, or t
tgaacactctattttacctattgatttatgtctgtctttacacaaatatcacattgtattgaatattatagtaatattttttgaaatcagggagtgtaagtcttccaattttgttctttttgaaaactattttaggctgggcatggtggctcacatctgtaatcccagcaccttgggaggccaaggcaggtggatcacctgaggtcaggagtacgagaccagcccaataaacatggtaaaaccccatttctactaaaaaaaaaaaaaaaaaaaaaaattttttcagtttcagccaatcctgccaggggggaatgcgggctccatgccagcagatttctagatggttcttgagaagctgcagacatcagtggttggtatgaacatctcctgatttaaaatctgtgnccacataataataatacaaagtcctgccaggagtttgctgcatgttgcaggtgatatgggaatgccttcttacagagagctccgagagggtaggttaccttaccaaagggccacaggtcagagatgcc

SEQ ID NO: 222035 - DNA, 541 bp, Homo sapiens
  misc_feature (233)..(233): n is a, c, g, or t
agaaagggaagaggaatacacacatttttagctgacggacttggccccagctttgcaggctaactgaaactcccaaggccttgagatttttgaaaactgccatatttcctctagttgaagactcattttatattttttcacatgttaacatttatgaaattgggatgtgtaatgtacgccctgtcaaaaaattttccagcagccatttagaggagtgacacgtccacgtggcntacctggcctgtggccacacctccttagccagcttcgtggaagtatctgttcatccattttgtcactttgttttgttattttcattggtggcacagcacactgttaacttagattcatgtccctaattgccactgaaagtgtctttcacaaagataactctgctttacagcattggagcaaaagtcaccatgcgtgcaaaagattgcctggcacatgccaggcattaggcatcgcccccactgcacagagtaaatgacacacttttcaaagcaaggggaaattggtatgactacttcatgcaccatta

SEQ ID NO: 222036 - DNA, 467 bp, Homo sapiens
aaaaagcagcccccacatcatttcttttctaacaaaaatcaacctgaaaaatcaagctgcaagcattgatacacaagctggaagcttgcataggtgaatactggcagccgtgccgataccaaagagatacctggaagccaggtacatccaacatggaggttttctcctcccttctctttgttgccaaatgtgcagatgtcatggtgctggccaggtggagatcccacctgtataataaaagattagggtgggatggccagcctaatcacgggctatgtaaatggcacacctggtccaaccaatcccatgggccctatgaaaatcagacactgcctttctaagcccctctataaagtcaactgcatctcaccccaaacctggaaacccactttggttcccttcctctgcatgaggaagctctgtcttctttctttcactttaattaaagttctgctcttaaacccact

SEQ ID NO: 222037 - DNA, 496 bp, Homo sapiens
tggttcgcattattcttaacagtttacttatttggtaaatctccccatatgtaaccaatcttctgcagctgccaccacctttcctcctggggctgccctcctcagctgttagtgctctagcatcctgtgccaccacccccatccccatatggatacctttctccctgagataccctgctctgggcttccacagcatccctcttcctacgtttttgtaaacgtaggaagcctaccagattggacctacctaatggctttgaattttcaggaaggagaaggcgaagagcctcggctactcttgaatgatgtaaaataagacttatcttccttccccatggtccttcattatttaaaaatagccattatgtcattcctaaacattctgttttccacctttaaaagctcctagttcctccatgtgtttacactaatgatgtttttcttgtaagcatctcaaagagtcttccaaacatattatatctttgtgacagatgaa

SEQ ID NO: 222038 - DNA, 443 bp, Homo sapiens
aagaggtctttatgtgctaggcttgagtatgtgaggtattaatgatttgctgtgtaacaaactacctcaaaatatagctgcttaaaacaacaaatatgtattatctcatacagtttctgaggctcaagagctctagctgggtggttctggctcagcatctttcatgaggttactgttagtggtggcaaatccacacaggtctgcagcaacctcaattcttgcctcctcagaagaaagaatttgactgaggggcataaggcaaaggtagagactgaggcaagttttagagcaggagtgaaagtttattaaaaatcaggctgggcgcagtgtttcatgcctgtaattccagcactttgggaggccaaggcgggcgtatcacctaaggtggggagttcaagaccagcctgaccaacatggagaaaccccgtctctactaaaaaaaa

SEQ ID NO: 222039 - DNA, 461 bp, Homo sapiens
  misc_feature (115)..(115): n is a, c, g, or t
ttttagggctgaataatactccactgtgtgtatctaccagattttctttaatacattaagttattgatggacacttaggtgggggcccctttttccccccccacaaaattctctntaaggcccttaaatttttttggggttttttacacaagtggtgcaaccaacatgggagtgcagataattacttcgatatactcatttcctatttttggggtatatacccaacagtgggattgctggatcatgtgatacctctattttcagtgtttagaggaacctccaaactgttctcaaccatggctgtaccagtagtacattaaaatgcaaatgcaattggtaaaagaacaaggcagcatgtagtacttgcacttaaaaatactaccagtttcgtaacaatttgcatttttttttgtccttggaagagtaaccacttaataaaacagatacataaaagtgcaata

SEQ ID NO: 222040 - DNA, 431 bp, Homo sapiens
tggccagccatataggcgcagaagtgtgctaccttcaacccacatatctgattgaagttgactggtccttgttttggccattctcactaatcaacaatgttgagggggtttctaaatgtgatacagtacaaagcataataataaattagaaagagtggtctggtcctaagaaccttgtcaagtaatgggcaaagcaaaacatgtggccacctaatggaaaaaccatctgtagaataaatttttgaaaattggctcaatgttcaacgtgtagttagtttagaggcaataaagaaaagtcaaggtcaatagccttttccatgacacacatcatctcttgggatatcactttgtcaagtatacaattcagtatttagtatattcacaaagttgtgtaactatcaccactacttaattgtcgacgcatgtgttta

SEQ ID NO: 222041 - DNA, 829 bp, Homo sapiens
tagcagcatagaattaccgtagtaaaatgctgccaattttttgttatttactgtatttcaaaatgaagaaaaaatgttttgaagcccaggcctaaatctttgcggttgctgatcaaataatctctgaccaaacaatagtattctgtcctattagtcactcactaattcattaccattttcaaacaagttctctaagtcttacttaaacttagtacttcttgaagaaaagataataaaaataggggtcaaaatatctccaaatatatttttttcctaaaatgcataagctggtaatagcaatcataacaacagattccatcactgtagctgcttagaaaagatgctcatatctcaatggattcttccaataatcctgtgaaagtaggcaaaattagaattactgccaacatttaatagccaagggtcagatatatgaaattatacacttaagatcatagttagtcagggaacatccagaaacagaacccagatatttagactcccagtttagtgctctttccaacaaaccagtcttttccttaatctttttacaatgatatacaattacttggatgaagattcttagattgagcaaaaacactagcatattattttacttaagatttaaaaaaacaacctcactattggcatcatgcaagttgtaaaaacttaaatgtgcaaattaaccattatttatttttaaatatattctgataacctcacttctagaaatatatgacataagctacctttccttagaaggaatcacttaactcatttacctgatttttcaacagattatcggatatttacaattgtacatgcaatt

SEQ ID NO: 222042 - DNA, 1914 bp, Homo sapiens
gttttgtgtggacataagttttcagttcatttgagtaaatacccaggagtgtgattactggatcttatggtaagatatgtttatgtttgtaacaagattgccaaactgtcttccaaagtggacatccagatgcataaaaatgaatctagatattttgcatttcctgtaccattttgtattctccactagcaatggatgagagttcctgttactccacattttcttcagcatttgttgttggtgttttggatttgggccattctaataggtgtgtagtggcatgcctttcttgttttaacttgaaattccctaatgacatgagtttgaacagtttttcatacgcttacttgccatctgtttatctttggtgtgaggtatctgttcaggtatttcacccattttataatcaggttgttcattttctttagttttaatggttcatcgtatatttttgataacagttctttatcaggtacatcttttgcaaatattttctccaaggctgttgcctgccttgttctcttgacattgtcttgcagagcaaaaaaaatctaggctgcagttacagatttggaagttaagagcatattggtgctattgggagccgtaaaactgcataagataaccaaaacagtatatgtaggtagaaaagagaagagtgtaaggtcttagctctggaggactggtgatatttaaagcttagggtgataaggaataggaatagagagtgagaacgaggggccaggaaatgtaggaaagctaacaaagtatgttattctaggaatgaaagagaaagtgtatcaaggaggatgtgattggctgtgtcaaatgttgctggaccagtcaaataatatgaagattgagaaatgatcattgggtgtagtgatgaggtcattggtgactttggataagagctgtttcagtggagtaatgggaggaaatgcctgttgggaatgagttcaagtaacaacagaggagagaaactgaagatagcagatgtagataagatttccaaggagttttgctgtcaaggaaagatgattgagatggaaactcgaagggagagagaaatagagattttaaaaaataataataaagttgggagaaagggcattgttggattcttattggcatcactcaccagagaaggaaaaatggatgatgattcaagacagtggaagagacagagagtgtcggtcagttgctagcctctaatatgatttgtttaaattagagtggactcagccctgcaactgctcatgtcccttcctgaccccttcccatcttgccgtatgttttgactaacagatggtacatttatgagaatgaaaagaggcccctaatccagacaggtagccaacactacctggattttaggactggattttagccttcacttgtcctaaactaggtgtctttgggtacagcaaagtaatcatactaccatagcttctctgcttagtctactccaagacaataggaaaagttatttactatcctgcaatagttaaatgtacactttgtcctatagttaaatgtacactttgtccgatggcaaatagcatgataagtgggaagagagcacatttaagaactaagaatttggtgtgggaatccaagctcttctatcaactggcagtaaaatatatttgaggagagtttaaggcgtatgagtcgtcttaccaacaagtaattatgagtttagattttatttgaactatctctcttgtttgtattttataaagtaatggtgtgttaagcgcagtgcaccaaaatgtaactaagacttagtagcacctaggactcagatcttggtttttcttacaacattcgcactgaaaggaaccctggctctttggaaaaatggctgattccaaggatgggattccttatgccaaaggaaggaaatgctta

SEQ ID NO: 222043 - DNA, 573 bp, Homo sapiens
gaaactgtataagcagctggagaagctgtggaccctccctgccctgctgttgtgcaggagtttggcatgctgtgtgtgcatggaaaaagccagccaggaaagctcctcctgaagtctgtgtgacgaagatgagagctaactaacttcttgtacattttccaggctgacgtaaaaagcgagatatgtgtcctgggtaagcctcctcgtagcccagtgatgtctaggagattctgcggctcacctgtcagagggctcagcggttcccacagggtagggtcagcatgcccccactttgtggcaggcatcctggccacctcccccgcccccagggctggctcttccttagttgtctttgctgtgaactggccttaaagtgaggctggagacaccctgaagatgaagcgaccacctggtgatgtgcttcccttttaggtgtgtgtgaggtttccaaactccacaaagacatggtcagattctctactctacaaataagagtgtcgtgtgttttgtggtctacatctgtctcatggttctacactaaatcactgctttctagtcaccgtttctcctgca

SEQ ID NO: 222044 - DNA, 289 bp, Homo sapiens
tttcgagcggccgcccgggcaggtacatgtgcacaacgtgcaggtttgttacatatgtatatgtgtgccatcacttcctaaatatcaccataatctgcctctttcctctttatctccgttactcttgccttagttcaatctgcattccccgaccagtaaactgctgaggtagagggcagggatgcttcaagttatcctataacgcacagaacagactttcacaacaaaacattatctggccaaaaataacgctgagattgatgaactccacactcaaatataaacacca

SEQ ID NO: 222045 - DNA, 450 bp, Homo sapiens
agggaggccaaggcgggtggatcacctgaggtcaggagttcgagaccagcctggtcaacatggtgaaaccctgtctctactaaaaatataaaaattagccgggtgtggtggcatatgcctgtagttccaggtttttgggaggctgaggcaggaaaattgcttgaacccaggaggcagaggttgcagtgagccgagagagatcatgccactgcactccagcctgggcaacagagcaagatgccatccatctcaaaaacaaaacaaaaccaaaaacattcctaccttttaccccttggagcttacattccagagataaataagaaataggagctgggcgcagtggctttccactatgatcccagcactttgggatgctgagctgggcggattgcttgagaccaggatttcaataccagccctggggaacatggtgaaacctcatctctacaa

SEQ ID NO: 222046 - DNA, 607 bp, Homo sapiens
gctcaggctttcccagccgctgttttcccctttgtacatcgggatccgcttcgcacacttagtttctgcctagcacatgctgggtgttgtgtccagatacactaattctttttccccttcttccccgccagtcactagagccggtctggaagggcactaacgcctgggtagtccttcaaacaaaaagcgttgtgtgtcttgcttactggccgttaatagaagtttccccttgagagtggctttggttaggaaaaaggtggcaaagggcccatccctgaactgattagttgagcctgggacctgatcagaattgaggggaggagtgttaccagaattttctctgtgccccgcacttgcataagtgcttatggctaggagccctgtgtagggcacacattaccttggggcgcccttcgcttctttctcctcttgctgccccttcccggaatctctcacctcatgacgtgactatggtcaagtcatcgtttctgggatggcctgacccctggggacacgccagcctccaggagcttatatgaggctggtttaccagagtagacagtgtaaggccctgtcctggaaggaggaacatgaatatgtcctgaag

SEQ ID NO: 222047 - DNA, 532 bp, Homo sapiens
tgcgatttctttccatgtatttatcttcgcacataacactttggatgtggaagttattaaaaaggaattttacatgagaaagcatgcttgatgaagaacatctatgaattctagcacttccataggaaagtaaactgttactcaagtactgttcgcatgtgaagtaccattggcagagagaacatgggagagaagaggcaaatccttactcccttaggctggagaagtggtggtgtgaacagccagaaatacccaatcaggcagacatttatccctgcgggctatttgttgggtgcacatgggttgaagactcaggttcagacaggatagaatccttgtttcccttaggtctttgatgcctgatatgctcaagatgctctgtgtttcacttcttcccatatgtgaacttcaagatctaggcttgaaattataaaaggtggtaagaggtctctgtgttcgctaccaatcccaagatataccctacaattcaactttgcaaaggaataaaatgggtaacaaattttaactcaca

SEQ ID NO: 222048 - DNA, 451 bp, Homo sapiens
atatttagaaacagaaacctgggtgctgggtgtgctcagtgggacgagggtgtcactgcctccagccctgtcagtgaagagagctgcgtaatgtgcgtgcagataataccctatgtgtgaacacatacttcagattatctctggatctgtccatccttatatcgatgcaaagctaaacatgagttcacactgatgtctctgattctcatctagtaccacagggttcagtctaaacttcctcttatttacaaataaccttcccctccaacacaagaagcctgcctcccatggtttgccatccgttgacttatctgttcaatcccagtgtatgtgaattgttaacttgtacccctgtgggaaatttaccaacaaaggaatgatattaatgtccttttgtctttagctttacaatttccactcaaaacatcatattctgaagttactcaggtca

SEQ ID NO: 222049 - DNA, 275 bp, Homo sapiens
atcccccccacccacacaccctgtgaactgcctgccagggaagccccttgccaagaaggaaggggccttgccgtgcttccactcatgctgacatttccccgcagggctggtcctgccattgggtgggggtgctcatcttgccctcggactgtggggagagagtggaggcagggcagccccccagtgcaaggtaaccacagaaacttccagctacccctccaaccttgtgaattgtaccttttaaaataaattatttgtatccatctttggcaaga

SEQ ID NO: 222050 - DNA, 218 bp, Homo sapiens
atcccccccacccacacaccctgtgaactgcctgccagggaagccccttgccaagaaggaaggggccttgccgtgcttccactcatgcggactgtggggagagagtggaggcagggcagccccccagtgcaaggtaaccacagaaacttccagctacccctccaaccttgtgaattgtaccttttaaaataaattatttgtatccatctttggcaaga

SEQ ID NO: 222051 - DNA, 675 bp, Homo sapiens
  misc_feature (138)..(138): n is a, c, g, or t
ttgcgatatagtaacaataatgtactaagcaactatgtgccaagcacttccaagttgttttcatctaatctttacaaaaactgtaagaaatatttatttccagattacccatgagaaaaatgaagctcagaggagggnaggaacctgtcgaatgtcaccgcttgcccaattgtcacttattaggtggaatctgaaccacactacctggctccaaatctagcctttcctcttaccacagatgatgcattcatttattcaacatattcataccaaagacgcatttgccaggtactttttgtttgttactcaaccgagttgtcttccaccagaaaaccgtgtattctaagactgtaacataaatgtctgacaggatgagagagaaggtagaaaataatagctaaaggaatattttagatggtgtgtacattcacaaatcttctcctaaataagcacagataattagttatcatctcttctgagcagtttctgataggggcatgcctgtattcctgcaactgtgggtgataaagcatgagtctgatttatttttctttttggtctaatgagactcatgcttgaatgtacttttaaaacaattctgaaaataactgatctcatattgtatactctatgatactttgagtctaaggtaaaacacttaattcaactgggaaa

SEQ ID NO: 222052 - DNA, 466 bp, Homo sapiens
gaccctagattcccttgttggctagaagactctggcttctcctgttggctaggagatcctatattcccttgctggctagataatcatagatttccttgacggctggatgaacctggcttcctctgtttgctagaaggtccttgattcccttgctggctagataaatgtagatttccttgttggctagatgaccctggcttcccttgatggctagacaaccctggcttcccctgttggctagaagatcctggcttctcctgttggccagaagttcctagatttccttgttggctagatgaccctggcttcccctgttggccagatgactctggcttcccttgatggctagataaacccagatgcccttgtaggctagaagatcctaaattccctttctgggttgatgaccctagattcccgtgttggctagatgatcctggcttcccctgttggctagatgacccca

SEQ ID NO: 222053 - DNA, 127 bp, Homo sapiens
ctttgtgcctattaatgcttttgccttaggttctattttatctgattaagattgctattcaattttctttgggtcaatatgtatttgcctcatttatttctttccaatcttttattttcaacttttc

SEQ ID NO: 222054 - DNA, 646 bp, Homo sapiens
cgaccccgctgaaatacagaatggcctgctgccttctcacagaaggtctactgttccaagcttatttttttttgagtgagaagaaaaggtcttttgccactgttttcagactgaaatttaaatttcagctgccttggatcctatataataaaagattgagacacagaaattgttctattagacttgaaatttcaattgcttttacttcccagtttgtagtagtgtttgaacctaaaatcctatgtgtgtttttagttaccttttcaagttaaactttcagaaactatctgcttaacttaaaaatttactcttgttaattgcccaaccacatcttacttcatgtgtcaaaatctgcctgatatttttaatttggaagtccacagtagtgggaagtcataggaactcccagtcagggtattcacagtaactactcacagtaataggaactcacagtcaagtctaatttttcattttaatttttccaatcccttctttacttctagtatactaattgaaaaaaaaaaacttgggttgcctttagtttcaatttataatttttattaggattttactgatactgtatctttttggtactggaggtctcagaaggactgacctggttctacttgtttgctcttgggattta

SEQ ID NO: 222055 - DNA, 808 bp, Homo sapiens
atggattgaacatcccaaaatctaaaatgctcctaaatccaaaatttttgagtactgactgaaaggaaatgctcattggagcgtttcagatttcagattttcagatgctcacctgggtgagtataatgcaaatattccaaaatttaaaaaaaaaaaaaaaaacagaaatctgaaacacttctgatcccaagcatttctagtaagtgatcactagaaatactcaaacctacctgtattgcagcatcctcatatttcagttttaggccgtatctgttgaccttccactaaagaagacaagaattgaactctcttttctcactctgtattcccagaacgaacatacacacacacacctgttcacccttttccaccaagtatagttacagttttggttaaatcaacactctaggttctctggtatttaaccagatttcttcatgatattcagaatataatgtattctgtcagtttcatcatattgaaaacattttgcccagagtcttctaatatatctcagtctggtctttttgtcctctacacctggaatacaaattttgttctgagattttcctttcttcattctgaggttatcctttgttgtactgtaaaattgtaagctttctctaagttgatttgtaacttaatgacctgactttttttggaagtaggcttaattctaaagttcatttcggataaataagatatgacaacaaaggtattatcataaattggggaaaaggattattcattgcggcactgtttatcataggaagagattggaaacagatcaaatttccatcagtaggag

SEQ ID NO: 222056 - DNA, 556 bp, Homo sapiens
tatgccatggggctatgtggactgaaaagtgatgaaccagagagagagctggaaagcaaaatgaactctctgacacagcaggaagggaaattaacctggttgatgctcaccttaagagtgagcaaacagaagcaagcaccaggcaaaattcccaagtactgctatcagaaactggaatttatgataatgaccctgacctttgtttcaggatgcaggaagggtctgaagtttattctaatccatgcctggaagaaaacaaaccaggcattgtttatgcttccctgaaccattctgtcattggactgaactcaagactggcaagaaatgtaaaagaagcaccaacagaatatgcatccatatgtgtgaggagttaagtctgtttctgactccaacagggaccactgaatgatcagcatgttgacatcattgtctgggctcaacaggatgtcaaataatatttctcaatttgagaatttttactttagaaatgttcatgttagtgcttgggtcttaagggtccataggataaatgattaaaatttctctcagaaactta

SEQ ID NO: 222057 - DNA, 340 bp, Homo sapiens
aagatgtgaaaattgaggaatgcttctatgctttttcatactatacatgtcatttcagaaactctgaaagtacatgcctctctctagccctttcactgccataaagatctcaacataaaatgagggtcaaggaaagtattctgttacagtgtcaatctgaaaactatcaaactcagtatttttggtctggttttgatatacataaatcaaatacatatttatacagatttaatataaccatatttacatatctcacattttttctttgaaagtaatgtttaaaattgtacacagaatgtgttaactagagaaatgttggaaaccactaaagtattgtcat

SEQ ID NO: 222058 - DNA, 316 bp, Homo sapiens
tgaattattcatggaataatgttggggcactgggggcttggtttggcaaaaacaaaaaagtaagggtatctactgaaatcttgggaaattacattttaaagatttgtaattaatttccagtataatgcttattctaaaattcatactggggctgggtgcagtggctcacgcctataatccgagcactttggggggccaagacatgtggattgcttgagctcaggagtttgcccaagctcagcctgggcaacatggcaaaaccccgtctctactaaaagtacaaaaattaggcatggtgacacgtgcctgtaatccc

SEQ ID NO: 222059 - DNA, 2023 bp, Homo sapiens
tgtgattgctgtttgactgggttgttcctgcaagaccctcctccaaggttctttctgtactattttgttttctttcctgtggtccatgatgagataagtcattctggctcagtgctgccactcacctgtcgttttccttaggacttgcatcttccaagacccatgaaataacccagctggagtcatgggaggagcccttcatgcctgcttgggaagttgtgacttcagccatactgagaggtagttggcaaggagccaaggctgaggcagctgctgagcagagtgcttctgtagaagtgcccagttcaaacgttcagcaacaccagaagcagcactgtggagagaaacccttaaaaagacaagagggcagggtcccagttttgaggagttgcagagtccacctatcagagaagtccttgcaaagcagggaagttgggaaggatcttctgaccagctcaggtgttctcaagcaccaggtgactcacacgggagagaagtcacataggagctccaaaagtagggaggcctttcatgctggaaaaaggcattacaaatgcagtgaatgtgggaaagcctttggtcagaaatatttacttgttcagcaccagagactgcacactggggaaaagccttatgaatgcagtgaatgtgggaagttatttagccataagtccaacctttttatacaccaaatagttcacactggagaaaggccttatgggtgtagtgactgtggaaaatcctttagccgtaatgctgacctcattcaacaccagagagttcacactggagaaaagccttttacatgcagtgaatgtggaaaagctttcaggcataattccacacttgttcagcatcacagaatccacactggagtaaggccttatgagtgcagtgaatgtggaaaattgtttagtttcaactccagcctcatgaaacatcagagagttcacactggagaaagaccttataagtgcagtgaatgtggaaaattctatagccacaagtccagccttatcaatcattggcgtgttcacactggagaaaggccttatgagtgcagtgaatgtgggaaattttttagccaaagctcaagcctcatgcaacatcgaaaagttcacactggagaaaaaccttttaagtgcaatgaatgtgggagattctttagtgagaattccagccttgttaaacatcagagggttcacactggagcaaagccttatgagtgcagggaatgtgggaaattttttcgccacagctccagtcttgttaaacatcgaaggattcacactggagaaatacaatgattgtgagaaatcctttagctggtgtttcaacctcattcaacaccagaaagttcacggtgtaaaaaagtcttgaaggttactaatggaaatccattagctatacctccaaactcattcaacactggacagttcacagagtggacaatgtagtgaatatggtaaaaggcctcagccaaaggcctaaccgtattcaacaccagaaagtttagactggagaaaggccttagactgtcgctgaatcaatatgacctgacttaaagcagaaacagccaggcgtggtggctgacacctgttattctcaccactttgggaggctgaagcgggcggatcacaaggtcaggacatcgaaaccatcctggttaacacaatgaaaccacatctctactaaaaatacaaaaatttactgggcatggtggtgggcgcctgtagtcccagctactcaggaggctgaggcagaagaatggcatgaacctaggaggcagagtttgcggtgagctgagatcacgccactgcactccagactgggtgacagagtgagactctgtctaaaaaaaaaaaaaaaaaaaattagcccggcgtggtggcaggcaactgtagtcccagctacttggggggctgaggcaggagatttgcttgaacccgggaggcggaggttgcattgagccgagatcacgccactgcactccagcttgggtgacagagtgagacttcgtctc

SEQ ID NO: 222060 - DNA, 2216 bp, Homo sapiens
agagaactcagcttgccggaagctggttgttcgctgcggcgaccagctccggaaagcgcggtggggacgcgctgtgttctcgcagctcagaggcgggtctgaggctcggtggcggcgcccagggtggcccgggccctttcctcggtcgttgtctcaccgccacaggctccgatggcggcggccacgctgagggaccccgctcagcagggctatgtgacctttgaggacgtggctgtctacttctcccaggaggaatggagattgcttgatgacgctcagaggctcctctaccgcaatgtgatgctggagaactttacacttctggcctctctgggacttgcatcttccaagacccatgaaataacccagctggagtcatgggaggagcccttcatgcctgcttgggaagttgtgacttcagccatactgagaggtagttggcaaggagccaaggctgaggcagctgctgagcagagtgcttctgtagaagtgcccagttcaaacgttcagcaacaccagaagcagcactgtggagagaaacccttaaaaagacaagagggcagggtcccagttttgaggagttgcagagtccacctatcagagaagtccttgcaaagcagggaagttgggaaggatcttctgaccagctcaggtgttctcaagcaccaggtgactcacacgggagagaagtcacataggagctccaaaagtagggaggcctttcatgctggaaaaaggcattacaaatgcagtgaatgtgggaaagcctttggtcagaaatatttacttgttcagcaccagagactgcacactggggaaaagccttatgaatgcagtgaatgtgggaagttatttagccataagtccaacctttttatacaccaaatagttcacactggagaaaggccttatgggtgtagtgactgtggaaaatcctttagccgtaatgctgacctcattcaacaccagagagttcacactggagaaaagccttttacatgcagtgaatgtggaaaagctttcaggcataattccacacttgttcagcatcacagaatccacactggagtaaggccttatgagtgcagtgaatgtggaaaattgtttagtttcaactccagcctcatgaaacatcagagagttcacactggagaaagaccttataagtgcagtgaatgtggaaaattctatagccacaagtccagccttatcaatcattggcgtgttcacactggagaaaggccttatgagtgcagtgaatgtgggaaattttttagccaaagctcaagcctcatgcaacatcgaaaagttcacactggagaaaaaccttttaagtgcaatgaatgtgggagattctttagtgagaattccagccttgttaaacatcagagggttcacactggagcaaagccttatgagtgcagggaatgtgggaaattttttcgccacagctccagtcttgttaaacatcgaaggattcacactggagaaatacaatgattgtgagaaatcctttagctggtgtttcaacctcattcaacaccagaaagttcacggtgtaaaaaagtcttgaaggttactaatggaaatccattagctatacctccaaactcattcaacactggacagttcacagagtggacaatgtagtgaatatggtaaaaggcctcagccaaaggcctaaccgtattcaacaccagaaagtttagactggagaaaggccttagactgtcgctgaatcaatatgacctgacttaaagcagaaacagccaggcgtggtggctgacacctgttattctcaccactttgggaggctgaagcgggcggatcacaaggtcaggacatcgaaaccatcctggttaacacaatgaaaccacatctctactaaaaatacaaaaatttactgggcatggtggtgggcgcctgtagtcccagctactcaggaggctgaggcagaagaatggcatgaacctaggaggcagagtttgcggtgagctgagatcacgccactgcactccagactgggtgacagagtgagactctgtctaaaaaaaaaaaaaaaaaaaattagcccggcgtggtggcaggcaactgtagtcccagctacttggggggctgaggcaggagatttgcttgaacccgggaggcggaggttgcattgagccgagatcacgccactgcactccagcttgggtgacagagtgagacttcgtctc

SEQ ID NO: 222061 - DNA, 377 bp, Homo sapiens
taaatacaaaatacagaaaacaacaaaatggaatttctagagttgaaagatctgaaatgaagtgaaattaaatgaagaatcactgaatgggtttaacagcaaattagacactacagaaaacaagatcagtgaaattgaagatatacaaaatccaaaatgttcaaatgaacatttcctttgagtatcctgtcagcaacccaaatatttcagattttggatttcggattttctgattagggatacacaactggtatgatgcatggtatgatgcaaacattccaaaatctaaagcctgaaagacatttggtcccaagcatgttggataagagatattcaacctgtaatacaaattatccaaactgtagtacagacagaaa

SEQ ID NO: 222062 - DNA, 684 bp, Homo sapiens
gatatttaaagcaattcagaagccaaaacaaacctagcgaaaacaaggaaattgtcataaagagacaatgaagggagaagaaaacttaaaaatattatcatggatattctcagaaagatcagagaatatactgtaatcagaaaataagtatagacactaaaagaaaaggaagctttaggttctaaaaatgtactcctgaaaaatggaactgatagaagaaataagaaactcaaaatgttttttgaatataaagaagaggaagctacccagaaagtagaaaaaaaaattacaaaatgaaaaacaaaagagaaaatacaaaagtagagacttagaccaggaggtcctactctgagcaactgaattttttagaaaaaggaaaagtatatatagcaaggaaactatcaaagaaatagcaaaagaaaatttcccggactttaggaaaatgattttcaagtttgaaaaggcctattgtgtttccaatatgctgaatttttcaaaaaacacccatactaatgtatagcaccataacatttcagaacatcaggggtaaaaatgaagatcctagactccagacagaagaaaacagataggctctatacaaaaaattgggagtcagagtggcccctaacattcagcaggggtcattgaagacagaaccacaagggcttcaaaattatggggcaa

SEQ ID NO: 222063 - DNA, 479 bp, Homo sapiens
gaaattcataatatacgtccaaggctcctcagcactaaacttactaaaaaacaactattgaaggaagagatggtaagcagtatgccaatttactctctataataggcaagctataaaagaaagatactggtttctccctgtcagtattttaaattctaactttcattttaaaatatatatttcctgtttgaaaacacccttttttggttcttttttttttttgttattatacttttaagttctggggtacatgtgcagaacatgcaggtttgttacataggtatacacatgccacggtggtttgctgcacccatcaacctgtcatctacattaggtatttctcctaatgctatccctcccctagcccccaactccccgacaggccccagtgtgtgatgttcccctccctgtgtccatgtgttctcattgttcaacttctacttacgagtgagaacatgtggtatttggttttctgttcc

SEQ ID NO: 222064 - DNA, 682 bp, Homo sapiens
gcagtggaatcttctattctgatgctgtagagaccagtgctattcaataaaacttttatgatgatggaaatgtttatgtcctggttattcctggaaaagccactagtcacacatggctattgagcacttgaaatgtggtttttgtaactaaggaactaaatcttaaattttatttgttttaattaatttaaacttaagtagttacatgtggcttgtagctctgattctgagagtttggcacatactcaacatactcaacttgtccacagtttttcttcatttgagctacattttaagcaaagaaactgaatgctgtaaatgatcaatgggttggtgaagccagttacagctaatgaaagctgcctcttagatggagtgagaattgaaggaaggctaaaacagtttccgttttctcccacaagaagaatatgccaattacattgaccttaaatgtttcacaatggaatattttaggatcttaaaacatggaaagctcaaatacagatgtgttcctctggtagcagccttcagaagccataggtgatgcgtggtagattttgtttctcctccatccctgacaaaattgactcttgattttgtgctattgcgttaggggtcacactgattcccaggcttatctccttgcttctgctaaattacaagacttctttcatgtatttca

SEQ ID NO: 222065 - DNA, 214 bp, Homo sapiens
gcccgcgccccagagccccccccccgccctcacttcgggacccgtggcggggaaggggtcatttctcctggcccctcttgaaaaacaaaaccaaaccaaacaacaacagcaacaaaaacttccaaatctgtagtattcttcagtaacccccacccttgagttcccttttagagatccaggaaaaaacgaaacgttaaatgtatcgtaacaggtt

SEQ ID NO: 222066 - DNA, 524 bp, Homo sapiens
aattttatagacagtgctgttggtgatatatctatgaggccatacaatgcagaaggtctaaatattttagtttaggggttaaaattcaatttgggaactgataaggttttactttgatgagagaacataatttattttaattaaagtctgctcattaagcaaatatattaaacatcagctgtgaatgaagcattgtactaggcactgctgacagaaaggtgaccaaaataaatcttacctttaaagatatagtttactattgataatgatttatacttctgttaatcatatagacaatcagagaatttcataaaacttattattgttctaattattgcacattaaatttagttggagttttaagtagaacgcctaaaagaaacaattttattggtgtattttaggacatctgttttctattgataaggcataagatcttgatgaatttgaagttgtctgtgttaaagtaatggaaatattagttcatggatggtggtcatttattaagacgtaaacacagcagt

SEQ ID NO: 222067 - DNA, 402 bp, Homo sapiens
aattcatgtgctgacgggggcagagggagggcatctcacggcgagatcagccttgatctgccaccggattacaggggcctcagaagcggctgattaataattctgcaggagcccttgagctggaaagctggcgctctgagtctaataatccccagtcgttgtaatacaaaggaaggacaggaattgaattcacagttctggattgtgaaattcaaaattcgaaagaaacagggatccacttcttcctgagtgtgtttgtcaacctagctgcctgcttgtttgtgttaaatggctactgtgctttttgaatctaaaatctgattatatttaattagtacaggcatctgggatttctaatacacaaagagttattaaagtaacaaatctttctaaaatatgttt

SEQ ID NO: 222068 - DNA, 506 bp, Homo sapiens
gaaccctgtgacatctagtatgatgaggaaactgtgaccaccaccactggcatcaggccataatcatacagtctgtggcactgccacatccatgccaggaattctaactcacagccttaaaattttttaatttaaaaaaattattaaaaattaaagggaaaaactacagttgatgtccttcaataggtgaatggataaataataactgtagtccatctgtacaatgaaatattattcagcataaaaaaatagttatcaagccacaaaaaggtacaaatgaggccaggcaccatggctcacacccacaatcccagcactgtgggaggtccaggtaggtgaatcacctgagctcaggagttcgagaccagcctggccaacatggcgaaaccccacctctactaaaaatacaaaaattagctgggcatagtgttggggacctgtaatcccagctattcgggaggttgaggcaggagaatcacttgaacccgggaggtggaggttgcagt

SEQ ID NO: 222069 - DNA, 466 bp, Homo sapiens
ctccatggcagcagcaattatgcaaattatcctggatctttacatttcagtaaaacctttcttccccctttacatacacaaaatagacagctaaggggctgtgatctgtcctaaagccttggagataaaacaggatgtcactcttttctcaaaatgacttctattacggaagcatgagctcccttaaatggaagggcaaagcaaatccctgccattgggctctgcagcctctgctataaatgtgccaggaagattaaaactaccgtaattagtttaatcaggttcatcctcaattcttgctttcattatgtagtaggaacttccctaatcagtactgcatttggctgattgaagagttcactttcatagctaggatatctgctggagtctgtattgtggtttgttttaatggtgtatatatggtgaatgtgaatgtttctcatttcattgttgatcttgctaatgg

SEQ ID NO: 222070 - DNA, 603 bp, Homo sapiens
gccgtgggtgaggaggctgggccaggctctgtagaggcatgtatggggcaagcggggtgggggcggggcggccctcccatcaggacagagcccctgtccttgtccttgtcacccctgctgtgcatttgctcttctgtgttggtgtgtgtgtcagctcactggctttgatgccctgactatgatgctccatggtggcagcaaccatctttctgctcactgtggggtccgggagcctcgaggggtgcctgatgtttagaggggccagaaaaagaacagtgcactaggaggctgacgctgtcacccacagcgatgaggaggaaggtggcatggcactgacctggccagtgcaggggatcttggcgtccttggcagggagccaccccccactgtcaggaacaccccgacaggaggccagacccatcccaaccgagtcctgggcagtgtgctctgttagggagtagtagatggcagggacattggagcccaggagtagctgatgcaggaaaggaatgttgggaaggcccggggtacactttggaaagttgggagactctgggaagtgggcccttgtgggaggcggtgggtgttcctgctgcggaggac

SEQ ID NO: 222071 - DNA, 370 bp, Homo sapiens
  misc_feature (315)..(315): n is a, c, g, or t
  misc_feature (323)..(323): n is a, c, g, or t
  misc_feature (328)..(328): n is a, c, g, or t
  misc_feature (333)..(333): n is a, c, g, or t
gctgatgacatgtttgctacatttgtccttagtttaacatacatatttcttatatctgataagtgcaaaggcagtgcgtattgacagattatgttggaaagataaaaaatttcaattgaagtgaaaatattgaatgttgcacatgaatctgaaaccaatggctcagttacagaaatgtatctgaagaacaatgagcaagatttaccacatgtgaaaagtgctgagtgaatgtaaccaacaacaataaaaatgaagaaaagcggccaggcacggtggctcacgataaaaacaactatttgtaccccttctgatttntatttatnaaggnaaggnaatttttctttaaaaagaatgagccccgacatgttcg

SEQ ID NO: 222072 - DNA, 514 bp, Homo sapiens
ctctactgttcttagtatatagtgtgggatggaattttaacatttcatctttttagaaccaaaatatttctattttgatactcagcccacattcagtttttcctcctttcccttcatttggttctttgtattagctctcccactagactactctgccaccccatcccaagtgcagggatttgcaaataacacatgctacttaaataaatgcttctatgtgatcagattagattattagattaacacatacagtgacataattaatacatccaaaggctaatctagtattggctaattttgtcaattgtggaacaccaaaagaattttaataaaactatatactttcttcccttttcatgaatttttccattttcatgtatatgtctgaaaaaacagatttctgttttcttgctttaccaagggctaaattggaaaatatatttgggattgtgaaatatttgtgtaataaatttcttgtgcttatacaaaagacaagattgttattactggtact

SEQ ID NO: 222073 - DNA, 567 bp, Homo sapiens
ctctactgttcttagtatatagtgtgggatggaattttaacatttcatctttttagaaccaaaatatttctattttgatactcagcccacattcagtttttcctcctttcccttcatttggttctttgtattagctctcccactagactaaaggtttctttgtgggtaaggaaaaactcttagtcatctttgtgtacatgaagctctgccaccccatcccaagtgcagggatttgcaaataacacatgctacttaaataaatgcttctatgtgatcagattagattattagattaacacatacagtgacataattaatacatccaaaggctaatctagtattggctaattttgtcaattgtggaacaccaaaagaattttaataaaactatatactttcttcccttttcatgaatttttccattttcatgtatatgtctgaaaaaacagatttctgttttcttgctttaccaagggctaaattggaaaatatatttgggattgtgaaatatttgtgtaataaatttcttgtgcttatacaaaagacaagattgttattactggtact

SEQ ID NO: 222074 - DNA, 382 bp, Homo sapiens
ttaaaaaattgattcttcttgctcctgacccacccatagtaacttgtttggtaaacaatgcattaaattattatataaaaagttaaggaagtataatatagagaaacttgcatttctgtaaaattattgaagtataccaagccataataatcaatcccttagaaaagcagattataaaactgtatatgcttgttatgaaaacacatgcatacacacacacacgttcgctttaatggaaaaagctttgggattatgcaataagaggttatcaacggttccctgtatggttggtgagatttcatctttttgcacaaatggattttctaattttcttcaatgaatatgcattacttatgaaattaaaaatccatttctaaaacca

SEQ ID NO: 222075 - DNA, 375 bp, Homo sapiens
tactcttgcttccagcaacctgacttcactattcccttttccattccatttttactgtagctttagacctaatgcttcctagttcttcctttggatttcccttaactctgattctgatttttctagctagcattgcatcctttcaagtttgaccccaccacagtaccctcctacctcaggcaccatcctggtaatgagaaaggtatgaggatatcctcgaagttggctgaaagtaataattaatttactttacatatttatttagtgcctgctgtgttctaagtgctgagtgttgagaatacaatgttaaacaagacacaaaccttgttcttcacaagtttatcacagggttagcaaatgttttctgtaaaaaaa

SEQ ID NO: 222076 - DNA, 198 bp, Homo sapiens
gtgagccactgcacccagccagtgggggagtattttccgatcctctgttggtggaatccatggatatggaacctgaggatatggaagggtgaccgtacaaaaggcctgatatcttcagggaacagtgagtctgtctgtacaactggaacactggatgtgtgcggtgggggcagtattggtacatgtggatgaatacat

SEQ ID NO: 222077 - DNA, 523 bp, Homo sapiens
caacacacaggaagtgtggtccactcgggaagctcattaggaactcagtccccaagagttaatgaaggctagtcctgtaagcaccttctggacagcatgtaccaaaatgccatactcccagaagaaactcgggcgttcagcataaaccacattgtataaaacaattcaggcccagtgtgagccacctaatcagttagggaattttgggaacactccccacatccaggcacccatagaatgtttcaggccaacaggcagtcttgcaagcaggcctctcagtggttagcagtctcaggcctgctgtagtaactctgttctgtacatggagacatcacagtttttgcagccacttcttattgattggcagtttcatccttttgaaagcatgaggtgtcctggctgagcgcagtggctcacatctataattccagcactgtgagaggctgaggtgggaggattttttgagcccaggagtttgagtcctgcctgggcaacagagtgagaccctgtctctacaggaaaa

SEQ ID NO: 222078 - DNA, 348 bp, Homo sapiens
accctgcatgaccctgttccccgggaggggcagcctggggagtgacaggcatgacctcgatggtgggccaggggcctcctcagaggagcaaagagaagcttggtggaagagaaagccgctagtattcagcgagaagatcactcaaatccttcaccagcatgctcagtgaagaatgcattaaaaaaattagactttttttcttcctggcaacaaaatcttgccaaaataagtaccaaaataagtgttccaatggttttatttggggaaagccaacgctttccccaaaaagactttttcttgtttctcatttggctgctacaaataaagctgcaatgaacatacatgtac

SEQ ID NO: 222079 - DNA, 403 bp, Homo sapiens
atcagccacacaggtggatctcctgcgctacgccaggtgggcgggaggaacggcagatccctggccggaggcctgaagcccaaaggtccccgccgccgggtgccggcctcattccagccccggcctcccgggcggaaccccctccccaccgggccctgggccccacccgccagacggtgcccgggtgccccgagacatatgctgcccgcaggccgcgcggcccgacggagtgctcactgccgaggcggttctcagcccatcaaaagcccaggctttcttcagccgtatgggccgcgaggtgaacaacaatgcccgggccccttcacttcaaaagcagcgatcaggggaaaggctcccccagagaatttttttttcccctcagcctttcattcctggtttgaaa

SEQ ID NO: 222080 - DNA, 375 bp, Homo sapiens
aatatattcacggtctgactacttctcattatttttaccaccatattagtcctagccaccctcactttccaccagggttataataatctcatgattagtctaactgctttcagacttaccctcttagtctgttctcatgtgagcagcccaaatgttccttttatgatggaagtcagatcgttacactctcctgcttgaaacttttcagtgtcttttcatcccactcagtaaaagccagggtcggccgggcccggtggctcctgcctgtaatcccagcactttgggaggtgggccttgtgaccttgatctcacgatgtcaagagattgagaccatcatggccaacatggtgaaacaccttctctactaaaaataca

SEQ ID NO: 222081 - DNA, 369 bp, Homo sapiens
ccagcactgatcttcccttagtggactaacctatgatcttgccctgcacctgctgtgtgctgggccctgttctgggtggtgcatgtacgtggtgatgaaccatgcactctccttccccagattctgtcccagggttttttcccaccagctgtcagtctgcctatcttcatttatatccttcctggaatccaatgtcacgatccccccacaaagcaatggacaccgctcaggtacttacatgtacccctgaagccacctgccaccaccaccccattccctcaaaataaagacaaaaacaaaaccagaatcctgaaccttacattttcttcgggaggccacagccttgggccttgtgaacagcacgccccc

SEQ ID NO: 222082 - DNA, 186 bp, Homo sapiens
caaaaaaggtctatagtagagtaatattgcaaacatagagaagtcaatgaattcaagaacttttgtcaggcacagtggctcatgcctgtaataatcctagcgctttgggagaccgaggtgggcggatcacctgaggtcaggagtttgagaccagcctggccatcatggtgaaaccccatctctact

SEQ ID NO: 222083 - DNA, 229 bp, Homo sapiens
gcacacacacacacaccccacacacaccaccaaaccccatcttgggtaggatcttcaagggaaaagccacagattacaccccctaccctccatacctaaaggcatagtattttcaaataaccctttgagttcaggatttgactccaggtaggagagaaacatgtggaaccgccacagaatgcaatagaggttgagtcacttgtatcctaataaaatgtgacttgttcag

SEQ ID NO: 222084 - DNA, 683 bp, Homo sapiens
gcatactattaaaattctggtgttaaattagaaacagcaagcaacataatctactgcttcatttttaatttttatgtctaaacttagtccagatacaaagttaaagagttgagataataatgcaagcatagaaattaaaaaaaaaaaaacaacctgaaattgactagcaaaagtctattttataacatttataacattaagcttcctaggagcattaattctttttaaacctggaatcattactttttagcgtacatttcaaatgctgaatttccctatcaaacagtattgtagaatggcggtactttaaattttctccttaggaggatgtatgcttttaaagaaatgatttaaaacatctatatttttaaaaagatggtataatatatacatacacactagctatcaaaatatagctaagatttgttcaacatctcattgagttaggccctgtggtaatcaccccacaaactttctaccacaaatttctctccatgccctttggctcttgtgatactggtattaagattccatgttacagataacagtcacaatatgatagccattaattattagctattaggttggtgcaaaagtgaatctgagcgagagattgcagggtggttgaaggattgactgggagattagagaaatggagggaagtgtttacgcctaatgtgtag

SEQ ID NO: 222085 - DNA, 557 bp, Homo sapiens
ctcaaagggtggggcagaaagtggggttaaatatggactcaatgtgataggcgtaaactcctccgcagttctctctaaccccagccacccagcccgcccccaggctccaggctgtccccaaacgcgcggggtgtggccgtgaaccctcctccccggccgcgccctgccccgcccttcacgacagctgccggggacagcccggagtgcccagagggtggctgcggcccttcccctcttgggtggggaccagagggcgctgagcggcagcggacacccccaaacactcgcgggagaggggtgctggctccctttgagcagcccgcccaaccctgcctccaccctcccaggctggacagggaaggtgctccctggggcttcagaccccccttctgactccccctgcaacgggacctcacgaaaggaagggtggagagaaggttcgggaagacgagggggctgggaggtttggaaagacagctccaggcccccgttcccacccccgccccaggctggtccgggaggggcagcctctccccgcccccaggtccgcgcggccg

SEQ ID NO: 222086 - DNA, 633 bp, Homo sapiens
ccctatcactcccaaatactgtcatgtgtattttctacacttgaagatattctcctacataacccaccatcaaagtcagggaattaatacattgatacatcactgccatctaatcctcctccattcacgttcctctagttgtcctgataatgtcctttaaaacaggtccctaacccccaggttggagacaggtacctatctgtctcctgttaggaaccaggacgcacagtgggaggttagtggtgggcgagcgagcattactgccttagctccacctcctgttagatcagtggcagcattagactttcatagaagcgtgaaccctgttgtgaactgtgcacttgagggacctaggttgtaccctccttatgagaatctgatgcctgatgatctgaggtggaacagtttcttcctgaaaccacctcccctgaccctgtctgtggaaaaattatcttccacgaaaccagtgcctgagcctaaaaggttggggaccactgctttaaaaggaggccactgcagttagttgctacattctttaatctcttttaagcgtggaacatttcttcaggtttgacttttgacacttgtgaaggtttcaggccagttactttgtaaaattccttgagtgtggat

SEQ ID NO: 222087 - DNA, 426 bp, Homo sapiens
agtagagtatgataaaaatttaaaaactggctctccaggaaaaaagagacatcctaatatgatgtatttgccaatataccatgggttttcttgggctgggatgaactttcagaagttttacagtgagcatttttttttttatgaatttaaattggttctagctaagcaattttggagtatctttgatgtacctgggtctctcattttaataaacataacagtggtatgttagtcagggttctccagagaaacagaaccaacagtacaacagtatatatacatacatacatatatatgtgtgtgcatgtgtgtgtgtgtatgcgtgtatatatatatatgctacatatatgaaaggggatttcttgtgggaatatatattatatataacaaaacatgacaaatatataacaaaatatatgtgctata

SEQ ID NO: 222088 - DNA, 343 bp, Homo sapiens
agcataggtaagtgccacttaccagctatggcattttagacaagtcacttagtggttttgcacctccacttgtacctgttaaatgggatagcaaccgtccctccattgtagaattgctaagggtaagatggactgagctactgcatatgaatggcctagggtgatagctgcatgttgtgggtacagtataagcattcatcatctgttactgtccccgaaaaatgtccctgcccccatcatcaggggaccttataaccgagcagctcgtgggttgattagcactgttgctcctttctagggtgagggatagaacagcacattgagattggaaaattctgtgtca

SEQ ID NO: 222089 - DNA, 358 bp, Homo sapiens
aatcataaatacaaagtggaaaggtaatttttccacctgtcccacatcttaagggatgaataaatataacttaaaaagttagtatacagaagaggggtgctaaaccttctattagcctgttacagcaactatcattcacttccccattttataagacttaactccacatttttaaaagaaaatggatgaaattttgactatgtaatttttaacgcaagataggaaacataattgacagagtgaagcttttatgtttatgacagaaataacctgtaataagtttgtcatttaacagagtattgaaagagcagtgtgctgtggtctctactgtggtccaaagaaaaactgagcagaatga

SEQ ID NO: 222090 - DNA, 479 bp, Homo sapiens
gctgctgtgcttaggtgtgtagtgatttttccatctgagaagactctcaggacattttccactctaaaattaatgagaatatggccaagggatatgtcactttttctgagtacatggtaatgggcttattagtgtccctgtttagactcaccttagagcagtttccataagctaagaaaaagaccttggggcaatgattaaataaactatcatatattcatatgatggaaaatcatacagcacctaaaagcattcaaagaattattaatgttgtgagaaaatgtttatgataaaatgctaagtgaaattagcaaaatgaacctttgctgtgtgtttcatattaatattcactgagaaatatgaatgattcttgtattttttctgtttttttctcttttacattttctaaaatttatatgtattgttttgccaattggagtaacattttctaaaaaataataaaaatttatgtatttatt

SEQ ID NO: 222091 - DNA, 592 bp, Homo sapiens
cacagtggttccttctgtgatccagtccaccatcatttgggcgttggttttccaccttcacatgtggtacctcatggtggcaaagtggctgccacacctccaagcactttgcctacattccaggcaggaaataggaaatgcactagatctcacccctggggtctgttgcgtgtttcactgtgattgtaaaatcttccccagaatgcttctcagaagacttcttacacctcattgtctagaatgggtccctggcagccaccatagtggctgggaagattaatggtttaacagcctctgtggttgaagaaggcaagggtgaaggggctggggacggttgttgaatgagccacactgaggtaagtccataatatgctttgcctcatctaagcctcccagctgtcctgggaggtggggccggtattctccccatcccattttattggaagacaattgagttaaatggcaaatctgtgacagagccagcaagcagcggaccttagattgacagtctttctccagagctcttcctcaccctgccactagagggcaggagatgcttagtgcacggcagagagaacagcatgcgcatttg

SEQ ID NO: 222092 - DNA, 256 bp, Homo sapiens
gtttcatactgaatctgatggttaggggcattttggtttgacttttaaggtttttttccctgcgttgttaatttatctgagtgtaaatgataacacttcttaatctgataatttacacaaagtttttcttttgccatgctagctaagaaaacaaaaaatggctcagtcttttttttttttttttttttttgagatggagtttctctctggttgcccaggctggagtgcaatggcacaatcttggctcactgcaacc

SEQ ID NO: 222093 - DNA, 539 bp, Homo sapiens
tgcaatgtttctagcccctgcaagtttgttcttttgtgacaacataaaactgcacttaaatgtattcataggagaatagtttatgatttatttttaataatattgtcactaatgggtaactcattctcatataatatgctctgctagataatgtataatagaaatcattgatttcttccattacttttgcattctcatgtgttcactgtgtacacccagttttgtctataatcatattatttaggttagcatatttcatttattatatacatgtgatcactccatgtacaaactctttagacaacaacattgcaaaaggttcaaatgtcccaaactctcatgccattcacttgcagtgatgcttgacaagccaacctaatcaatcattttgtttaataacttttctataggtttcttcctaaatataagggaagagcaatatacagggaaaaagtgaaggcacattaatttgcttaactattttgcttagggctggcactacatataatagtgtatatatttcattaagtagaataata

SEQ ID NO: 222094 - DNA, 368 bp, Homo sapiens
ggatgcagggcaccaggttcctaggctgcacacagcagggggttctggactcacaagagcatttttccttctaagcctcctggcctgtgatgggagggtctgctgtgagggtctctaacatgccctggagacatttgccccattgtcttggtgattaacatttggctcctcattacttatgcaaatttctacaacccagtctcctgagaaaatagatttttcttttctgttgcatcatcaggctacaaattttctgaacttttatgctctgcttcttctcgaatgctttgctgcttagaaatttcttctgtcagataccttaaatcatctctctcaagttcaaagttccacagatctctagggaactc

SEQ ID NO: 222095 - DNA, 418 bp, Homo sapiens
gagtgcaaaaataaaatccactcaagagtcacaaggcccgctgtgcataatcggggggggagaagggcctgggcgacagagcaagactccgtctcaaaaaataaattaattaattaaattaaataagtgggtgttttaagtgctcagcttccttggttctaccaccttctctccctgaccctccttccctttccccctgaccttggcctttattctagaacggatctgaagcaataggatataaaaaattcacaactgctaaaacagtgttccttctagtgtaattttcacccttagagacctgtctgtaataaacattatttgaaatgcctactatatgctaggcactatgcctcggccacgggttcagacgtgatcgagacagcctgccttctctgagtgtatggcctgggaaagg

SEQ ID NO: 222096 - DNA, 414 bp, Homo sapiens
aggtcttccctgggtcctgttctcatccttgggcttccagcaggcccatgtctccatttcctggggcccttcttacctatgtccgggtcccaactggtggctaattccatggccccctggccctgaggtgccccccctgcccctgttcctttttctttctttctttccttttttttttttttgagacggagtctcacgtctcactctttcacccaggccagagtgcagtggtgcgatcttggcttggctcactgcaacctccgcctcccaggctgaggcgggagcattgcttgagccctggaggttgaggctgcagtgagccgtgatcatgccactccactccaacttgcatgacaagagtgaggctctatctcaaaactaaacaaaacaacaacaacacatcaaaaactaaaa

SEQ ID NO: 222097 - DNA, 446 bp, Homo sapiens
cctgtgtataaaagagtttttatgaaagcagctagaagtagctggagaagtttattgttgagcctgatgcagaaatttggcctttaaaattattaaagcactgaaagtggtattgcaagataaatggaaagaaatggtaaaaataaaaacagtcattctctatttgaaaaggaaaatgaattgttttcttacacttattagtgattgtcactaaaccttattgtgttaggaggataagatttggaaaaaataggtcaggcacagtggaaaccccgcctctactaaaaatacaaaaattagccaggcacggtggtgcacgcctatggtcccagttacttgggaggctgaagcacgagaatcgcttgaaccctggaggtggaggttgcagtgagccgagattgcaccagcgcactccagcctgggtgataaagcaagactccgcctca

SEQ ID NO: 222098 - DNA, 614 bp, Homo sapiens
tatgtttgatatgtttagatacacaaagaccattgtgtttcaattgcctacagtattcagtatagtaacgtgctatacaggtttgtagcctagatgcaataggctacaccatacagcctaggtatgtagtaggctacactatttgggtgtgtgtaagtacactctgtggtaatcacacaatggtaaaatcgcctaatgatgcatttctcagaatgtgtccctgttgttaagtaacacattactgtagatgcataagtgaaatcttaagaacatactaagtcttaagtataagaaagttccagagtgatacatatactgtggtatgatttacataaagaatatgaacacttaaaaatggtgcatattgtatatggaatttatgtagatatcccatgacataaacatgtatatgatatatatgtgtatatgagatatgttcgttatatatatttctgtgaatatacatatatattatttttaaacttgccaggaaaaaaaatgtccctgaatagtcatcactctttggaagggaaaacaggcagtggtacaaaggcatcattcacctacatctataatagttcaaattttaaaataaaatatttaaagcaaatgtg

SEQ ID NO: 222099 - DNA, 660 bp, Homo sapiens
agctgagcacttcataggctgtttacaggtccttctccacaggaaaatacttcctccaggacaagaaccctgtcttggttccaaactttcccaattataagagtcacctttgcgcttgttaaacctgcttccaggtgcttctcttgaggtttcctgattcagcgagactggaggtgggacctgacgaggtggttggtttttagtgttctcaggagtgtggatgttttaataggtgttgggtcctcatgttaatcgacctgtgggtgtgtcacagtctttgtgtcacagatgttctgagaaaggaaacaatttgaggatgagtggaggggaatttgtggtgtagagaaggccacagttaatatgtggggtgaatttctgaagacctctcagttcaaaacttgaataactcaagactcatcctgacaaaagccagtggatgtttcttttgccaaataaaatatacccttggtgcaactggaaaatcttagcttataattaacttgacagcctttgaaattaagccattcttgataaatcttgggggaattaacaactttgtgcttaaaatgaattttactaatttttatgatgttgaagttcaaatttacacccaattaaaagatataaaatgtggtaaaaccacaacaaaaaaacaccaaa

SEQ ID NO: 222100 - DNA, 447 bp, Homo sapiens
gacagagcaagactctgtctcaaaaaaaaagggacttatttgctggtaaccaaatggaaactcaaacgataaagtaaaacacagtatataaattatttttaattgcttgactctggatttatgtttgtataaaagtctacctccagcttttcattcttcatttaaaaaatgtagattacttactatataactatctaattaaagtatggacattactgaaatctgaaaattttggttcaataattaggaatacttaggtgatatgctgtagaaagatggcgaggcgtggtggctcacacctataatcccagcactttggaaggccgaggcgggcagatcacttgaggtcaggagttcaagaccagcctggccaacatggtgaaacctcgtctctactaaaaatacaaaaattagccgggcatggtggtgggtacctgtaatcccagc

SEQ ID NO: 222101 - DNA, 356 bp, Homo sapiens
ggatgctatgggcatagataacataaacatgtagagaaagtaaaggtgacctagggcagaagccttaggaacaccaaagtttaagagtagctgaggcaggagaatcgcttgaacccgggaggcagaggttgcagtgagctgagatcgtgccactgcactccagcctgggcaacaagagtgagactccatctcaaaaaaaaaaaaaaaaaaaaaaaaagaaaggtaatataaaaccaatgttagaaaagcttcatcatctaaggtgagctgttcacaaacgctaaagcaagcaaaaggattttataaagatatcaagatcaaagactcattgtgtgggatcagtgatgtaacaaagt

SEQ ID NO: 222102 - DNA, 420 bp, Homo sapiens
ccagtagagggcactctgttccttagatataacttacattcagttccgttaaatcaccccttgaatgtttcttgaaattgattctccttggaagatgcatttaatgtcttcatcaacatctgttcacttatgtttaataacttttgtcaaggattattttaaaatcttggggtttttttgcttttatctttttgtggcgatgagtggcgagaattgggaaaatatattaattttacaaatactgataatacagactcatatttaaatgattgtcattgtagttaaaagtctaccaaattaaattttgctttttagtatttgtacagagtccattagtagacttctctctatgtaggtatattattcccatctaaagtagtccctttttaaaaagaatacaaaattaggacttttcagcct

SEQ ID NO: 222103 - DNA, 456 bp, Homo sapiens
ttcaccctcattcatgtgcctgacctgcctgtttcaccctcatcatcacgccagcaggattaagggaacctgattgctccgcagagccttgctggagacccagctgatcttcaggcctctctagggctcagtctccctgctgtaaaaaggacaagtaattcctgagtttttggaaggattagaaaccagagatgcaacgagtccagtgccatacctcatcgaatgtgcctattaaatagaagctggggccaaaggaatcagccaggaagtctatgtgccctcaccatgtccttccccacctaccatgctcagagagctgttctggacacccaggggagttataataacagctcatattcactgagtactcaccggcactgtcttaagcacttggatgtattaactcaatcctctcagcaacccagtgaagcctgcagtattattattcccatttca

SEQ ID NO: 222104 - DNA, 503 bp, Homo sapiens
cgactgctttaccagcagctctggggttatagcagactaatttatttggattgtagaacggaaaattaaattctcccatgagctcatcagacagagccatctgcagatattgggaactcaatgaaagaggcagctgcaagcaggagacagcaatagtttatgatgacagagaaaagaactagacgtgtgtgtgccagctttaaggtatggatattcaccagggagatttgtgaaagactcacattgaatgaatttttaaaaagtcagaagttttaaccagcaactgaggggtgatggggactaatgagagtcaggctatttatttattcaacaaacatttagtcaatgcccatcatgtacccagcattgtgctctacccaagagacataacggagtcccacccttcaagaagttcacaaacaaatgagcaagacaaatgcatacagtataacatgctaaaatactacgacactagacagatattcggggcactatggaagcac

SEQ ID NO: 222105 - DNA, 720 bp, Homo sapiens
ggggaggcattggaaagaactggcagaatattttattccatttgggttggggcagagttcattggtgggtgtttgatggttgggatgtgagaatagaatgagaatggtatcctttaaagttatttagtgtaaaacctgcataattgtacaaccatggggacaagggcaggggttaccgtagggcccacatgggcccagtgtaaatggtgtgattgcggcttgggagcagaggacggggctcaaagaaaaggcattcacttgcttatttagcaagcacttaccaactgcctactatgccagatacggaggcaaatctgagtaagacagttgccatcttcatgtgactttaagtctaatacagagagaccaacaagtctcctgttgatcatagcccacagaggtgctctgagagaaaaacgtgcaggatattacaagagcacagaggaccagccaacccagactaaaaatggaggaggtgatggctgagatgagtcttgaaagataagcagaggctgggcgtggtggctcacgcctatagtcccagcacttcgggaagccgaggcgggtggatcacctgagattaggagttcgagatcagcctggccaacatggtgaaacctcgtctctattaaaaatacaaaaattacactttgggaggccgaggcgggtggatcatgaggtcaggagatcaacactatcctggctaacacggtgaaaccc

SEQ ID NO: 222106 - DNA, 466 bp, Homo sapiens
ctcgtgaatatctcggctttctcactgtactgggttgaataatgtcctcctcagatacaggtccttctcagaatgtgagcttatttggaaagagggtctttgcagatgtaattagttaagatgaggttatactggagtagggtggatccaaaatgtccccagatcccaacacaaatggtgtccctgcaagaggagaagagacacaaaaagacacacaggagagaataccacgtgaaggcagaggagagattggagtgcagtgtctacaacccaaggaacaccaaggactgaacaagcaccagagactagaagagaggccattttctctcagagcctacagaaggaaagcagccccactgacacggtgattaggatctccagcctccagaactgggaccaagtaagttcctgttgttttcagccgcccagcttccagtaatttgttacagcagccctaggaagctaa

SEQ ID NO: 222107 - DNA, 362 bp, Homo sapiens
gttggccctgtgacacagtgctggccagggacatgtaagtacaagtccactggggagagctttctttccataatcaaaaatcaaaaccttatgggagatatttttaggccttcagccttcttcctgccaggaatatggaactgatgcctggaggttcatcatgagtatgaaaacaaattcgagggaatgcacagcagatggatagaaggactttgttttgtgatgtcattgatgacctgcagtcaaaccattcctggtctgcccagccccagactgctgattgcctaaaataaaatcctgtgtgtttaaattgttgttacctggtttttctgtgagtgtagccccacacatagtcttagcca

SEQ ID NO: 222108 - DNA, 424 bp, Homo sapiens
gaagtcaccagcttctgaaaggcaagcctctttctcactggacattaggccatctctagcaggaacctaaaacatatcaacatatgaagtataggttccttcatgtgtacccaggttcctaagagacctctaagactatctgacagtaattcaaagccagggacagcaacaggatttttttttttttttgagtcagggtctcaccctattgcccaggctggagtgcagtggcacaatcatggctcaccacagtctggacctccctggactcagctgatctgccaacctcagcatcccaaggaactggaaccacagacatacaccactacaccaggctaatttttctattttctgtagagacccgagtctcgccatgttgcccaggattgtctcacctgtgaaaagtaggtaccgagctcgatca

SEQ ID NO: 222109 - DNA, 493 bp, Homo sapiens
gaagtcaccagcttctgaaaggcaagcctctttctcactggacattaggccatctctagcaggaacctaaaacatatcaacatatgaagtataggttccttcatgtgtacccaggttcctaagagacctctaagactatctgacagtaattcaaagccagggacagcaacaggatttttttttttttttgagtcagggtctcaccctattgcccaggctggagtgcagtggcacaatcatggctcaccacagtctggacctccctggactcagctgatctgccaacctcagcatcccaaggaactggaaccacagacatacaccactacaccaggctaatttttctattttctgtagagacccgagtctcgccatgttgcccaggattgtctcaaactcctggcctaaagccatcctcccccactcggcccctcaaagtgctgggattacaggcatgagctaccatacctggccacaacaggaatttacaagc

SEQ ID NO: 222110 - DNA, 456 bp, Homo sapiens
ccatgctctcatgggcctttccagaaggagcagcctgagatcctgctcacttcataacagagcccaggagttgggctccctccaggcctcatcttcccagcacctcagaagtcagtagggccagccatgctggtgttctcccgctctcagccagggctcctcacatttgatgaaatctccagtcctgttaatgtgtctagaaagtcaacttgtgtattggaggcaggggtggagggagggatttgaaattacctggaattctttgtcttagtgcaatttgtctaaagttactgtattcttttctttccatccatcccctgcccccaagcccacaaatcctcaatttctaaaaactggaagcaaacacataataagccatccttctgtgtttgcaatctgcttgtcaaacttatggagccaaagaaatagtattaaaaataacgataataaacatgg

SEQ ID NO: 222111 - DNA, 237 bp, Homo sapiens
gtcctctatagccactccggccaggtcaagctgggggcaagtgaccttgagaccctaccctcaggcaagggaaggcccgtagtgtcccccagcagggcagatgttccggatgggaagatagcgaccccaggccacgctgcgcccctctgagccggacttaaggcagcatcaaggatccgctgctttccgtgctccggccctctggcgccccctgcaggcggctgggggaaggtcagg

SEQ ID NO: 222112 - DNA, 420 bp, Homo sapiens
ttgccctccccattgcccagggccacccccctctggcaggggcaggaccctccaccaccccttccttccaccccctgtggagcagagccccatcctcccagcagaggaaagtgcaccccagtgcctgctctctgctgcctctttctggggtccttgttcctgtgtgcagcccctggacaccctctcctgactccagcagatgccagccctgggtccagcctggtgcctgtccccgtctcccggtggggagggctgctatggcttccagggtccccaggactttgggcaacggtggcgggggctgctggaggggcctggcctgcgcctgccgagtggggtgggggaaagagggcaggccccagccagtgtgggggcctctgagagccgagtgtgtgggggcctctgagagccgagtgtgtg

SEQ ID NO: 222113 - DNA, 396 bp, Homo sapiens
gtttcagggatttaagaaaatgtcttttcagtcattagctgcccaataaactgagcatagattttggtggccacacatgataaagaattcagacttcataaacttaatttaagaaagtcatgaaacaaacaatagaagcagcaacaacagcaagaatgaatagaagaaacaacaataaaccctgaagagtcaggaattatcagatttctagagttaccagtgacatcattttaaatgtccacctttaacaagaaattataaggcatgcaaaaaaacccaagaaagtatggtccatacacaggggagaaaaagcagtcaatagaaagtgtccctgaagaaggccagatgttatattcactaaacaaaggccttaaatcagcaattttaactatatcc

SEQ ID NO: 222114 - DNA, 282 bp, Homo sapiens
ctccccccacttctatacttagagaggtggagaaaacaggagaagggataactacgacttttgtcctcaaataccaggaaaactagtaaaacacacagtatctcattttatgcattcatttgctgaaaatatttccaaagtttagaaaaatgatttttggatgtactatataataaataaaaatgcactcagaatgctagagtgtctaccaacttaaaagaacaatattatttgtttgactgtgattatccttaggaaaaaataagccctgatttaacttat

SEQ ID NO: 222115 - DNA, 253 bp, Homo sapiens
tttggggagtatagcaagaggctgagtgggaaggaggtttctggggcctctgttgtcctggaaggctgagatttgctctacatgtgatatacatgtgtgtgcatgtctgtgtctatgtgagtgcctgtgcatgcatgtacatgtgtctttgtgtctctacatgtatgcagtgtctctgtgtgtctgtgtatacgtgtgtgtttgtatatctgtacatgtacacactggcttatgtctatttgcatgccatgtg

SEQ ID NO: 222116 - DNA, 551 bp, Homo sapiens
atgggactcataatgccaggcttcactgaatttttgtaggaatctcacgagacaagacataaagagcccttggagtttggatcatagtaagcactaaatgtatgcttcctgctcctgttaccattgtaaccaggcaacatttttgttttcttaactattgcaacagtatttgacttggaacaatagccatcgggaatagaaggttagatcctgaggacatggacggacgtacatccacaataatcttagcataaaagaaaagagagatagttaagcttctctgcacttgaaaacaagaggatgggagtattgggagaaacagaaagcagaagagaaaaaggggaaggagagaggcaccgaggagctgttgtgaagctggggattttataggatgagggaagggtatctattcgctaaggatgggatagtggagaaacattttacaaataaagatgagtcaagttaaatttgaaattatttttgtttcaacatgaactgcacttctgtctcctcatgccaccaaaagttttaataaatacattatactcaca

SEQ ID NO: 222117 - DNA, 561 bp, Homo sapiens
atggaacttgggacctatttagtctgttttatatttagaagtttgagtttgccctattggtcagtggttttcaaactctgtttgaagcctgtcatataatcaataatttgtctggtctttgtcctgggttcctggcacaaataggagtctctttattattcatgagcctttgcgaacactcttcagtttgtgctaatgaggtgattcatggtggaacctagatagcttcaggatggatgctgatcattccagaaagatcaactatgtgattaaagagttgaggctttgaaccatatgatagcagcccagcctcctgaccgtcaggaagtggagggggattggaaatggatctcactcatgtggccaaaaccccaaaaaactctggatgccaaagctcagtggaacttcctggttgatgaacacctcaacacaccagaatgcagagtggcagagagtgtagaatctctacatttggaaccctccaagatgtcaccctatgcgtctctacatttggctgttcctgcctagtaccctttataataaagctgttattgtaaatat

SEQ ID NO: 222118 - DNA, 524 bp, Homo sapiens
agtcacaggcaagagacatgactcccttggagactctctagaaggtgctctttgcctcttttaacctctggtggctgccagtattctttgactattcttagatcagtttaatcttgaaggccagcatcttccaatctctttctgcttcatcttcacattgccttcttctctgcctgtgtctaatctccctatgggcttctcttagaaaaacacatgtgtttacatttaggagggtccacctgaatagtctaggataatctctgcatctcacgatcctcaatttaattgtatttgcagatttccccacccttttctatataaagtaaccttcagagattaggatgtagttatcttttgggaggccatttttaaaaatattttttaaaggaggcagcagatcaatattataattcaagaatctgatctaaatatgcattcaataatgaagaacatttgagtatggactagaaaagcttctccaaaaaactttcaaatatatcatctcaaattacctaaagaataaa

SEQ ID NO: 222119 - DNA, 313 bp, Homo sapiens
tagagggaatcaacaaacacccacactgagatgtcgcatatattggaattatctggcaagtattttaaagcagccatcataaaaatgttttcacaagcagttatgaatgtgcttggagcaaatgaaaaaatagaaattctcagcaaaaaaaaaatgtaaagaagaatcacgtgaaaattttagaattgaaaatacaataacaaaatttttaaaaaaacataatgaatggactcaatagcaggagaggccagaggcaagaatctatgaacttaaagatataacaatagaaattactcaatttgagcaacagaga

SEQ ID NO: 222120 - DNA, 1621 bp, Homo sapiens
actttttaaagcctctggaaatggtccaaaggacattgagcaaatgaagaagcatctattcaaaaatacctacaagaattggataagaaaagcaagagtctgtgatatttgaaccaagaccactgcctccctttcctctcccagttaatgagccagaaattttacttcagatcttgccttcaagagctccagctcctggggggagggaaggctttcctccttggaggaggaggacgtcatcatttctcatcctgacctactgccagttgcagcggctcagttccagctgagtgctctcaagaggtgggggctctcttgtaaagtactgttgggaacactggggccccaatgcccaggaggctgtggttccataccacacgaggcaagctgagaagaccacaggagagtgctaagctccttaagtgggggtgtcactcaaagaaaaacatgccattcttccactccctgttccagagcttgggcttagtgattttgccagtgtggcctaaggagttcataaaactgatagctcctaatttcttgctgaaggaattgacttcatttgcaacagaagatggagaagtccgtgtgccttaagggctctctcaaaaacagtggagaaaaaaggaatgaaaaaaatgaacagagcagagcctcagagaaatgtgggacaccattagtgcaccaaagtccatggaacaggagtaccaggagaacagagagaaagcaaaaatatattcagtgaaataatggctggaaacaccccatatttattgaaagacattaacctacatatccagggaactcaatgaactcaaagtaaatgcaaagaaatccacaaatagacatagcatgttaaaatactgaagtcaaagataaggagaagatcttgagaggagcaagacaaactcctcatcacttacaggaaatgctagtaaggttaacaactgacttctgagcagaaacagtagaggtcagaaagcagtgggataatatattcagagtgctcaaaaatctcaaccaataatcctatatccagcaaaactgtcctttaaaaatgaaaatgaaataattcccaggtaaacaaaaacagagaatttgttgctagcaaacccaccttataagaagtactaaaagaagttattcagcctgaaagcaggtgatctctggcagtaatttgaatccacattggtgagagtggggaaagaaacactggtaaagttaattattatggaattataaaagacagcataaagttctcatttttttcctgttaactaatttaaaaagcagttctgtaaatattgtgtatatattaggcctatgtaatatttaaatgtaatattctgtaatatgtatttgcttatagcacaaaggagcaaaactgtattgggctaaaaaaatgactgcagatagtaaagtaattattataacagttaattaattggtgtattacagtaatagatacaacagatagaatactactacagaaggaaggagaggggaatagagctataaagggataacatttctgtatctcactgaaattaagctaggaaaaatctgaagctgattcttataagttaagatgtatatggtaagccttagagcaaccactaaa

SEQ ID NO: 222121 - DNA, 821 bp, Homo sapiens
tggtgctcagtaaatctacttttattatgacaacaagacttgatctttcaaatcctttatctcattgaccacactgatgttgtccctgttttatcaatgaagtaacaggcttggagatagtgagacttgtctcaggtcacatggccagttcaggggcatagccaggcttatccatgctctgactcccactccagtgctgtctgcatctggaatgcagacccccaacagtggcccagccccgcagtggttccagggaccgtgggagaccttgtggctgagggtcgagcctgtggttctttcattccccctccccatacttgaccttcagcctccgcactgaggcgcctttttcacagggcaagcatgggcagctaagaggagtgggtggcagcacatggcacatcagatggtcagaaaacaatgccaggtgctgctgagctggaagagccagagtggccaataggcttttgtcaaaattttttaaaaagtgaaactcagaggaacattttcctccccagaagaaaaggtgtgcagcccacctggtaggtaggtccaggcatggacccagcaacagaggcaagtggaggacctgccctccctggtgactctgggtgagcctcagctggtgggttgcagagctgccctggccccagaagactcaaggctgccttaagactctgctccaaaacaccatggagtctgtgctccactggctcagggaatgctggggcccttccacctccctgagctttaccctggggatggtgatacaagtcttctctgttcccaggccctccagacctccttggatgaggagcaga

SEQ ID NO: 222122 - DNA, 602 bp, Homo sapiens
tgattcacttttgaagatgggagtgagtctgagttctcagttcttagagcttgaaaaaggttgagaacacaagcgcgaatggttataaatgatcacttctgaataaatgaagcttgtttgaaaagctaaagtaaaattatcttcaaataaatgagtttcatttttagctgtctgaaaatagttattaaagaagataaaataaatttgaaatttgtacatcttactgcttctttctatagtcgtaaaagtactaattttaagtagtattcccagacttgattaggaagtagtctgaaaatcactagcctagaggacttgtctatgatgaatttgttgtgccagaagtgtcttttattgtcggtttttttagtctcaaaaatggtaatgggtatttggatattttgcttttgtgtaaatggtgggataagatgtataaagagattttattgcctgaagccttaatatttgtagtttggggcttggggtaaaaagctaaccagggctgattgtgattagctgtttagaatgctcatacgttctgtttttatttatttatataagtcctgtgactaaacatggcatgtaaatatactgtttttaaa

SEQ ID NO: 222123 - DNA, 451 bp, Homo sapiens
aacttggtaagttataggcaccaatcagaacacatgatgtcaacactaaaggagacagaggatgactgtcctggcataagcagagggtcattaaacaatgggtccccatgtcaatctcacagcctcccaacaatctgagggcctttgaatcctctagcagacatggaagtgtgggaggaggacaaggctaattaagggtgagtaataagaacccaagcctttttgtagccacctttgaaaggcagatgcagaatgccccagcaatgaaaattcaaaacaaaaggtccagcccaccttcttcccttaagcccttgtcaaagattaaacagcataccccaaagccacagacaagtcataatatgcccatattttatctgggtcgtattgtgtgcagcataattaatgtttaaaaagcatttctgcaataaaatgtctccatgataaatggaaa

SEQ ID NO: 222124 - DNA, 503 bp, Homo sapiens
gtcaaccagaacatgactggacatacttttgcttatgcagcagctgctgtagtcattctgttactaaaatccctgactctgtgtctctaatatttttaacttcaatatctaggtatattttctacgttaatatggttacaacttacggaatcattgtgtcatttacctgctgatttaaataatttagttatcctaattgaccagttcattactacggtctttggaatgaagttttatagtgtagatttagtttagagcattcccattaatattaaataccgcctacactcctcttcctgtgtctttgagcatagcacagcaaaagagttgtgcaggcattttcgtgggcacagggagagtaggcatttacctcttatatgatcaagtgtaccattatggcctagttttctgataatgataattttctacctccctctgaacctgcttaatgattttaaacagcctcattcaactgatttaataaacatttatttctgtgtgta

SEQ ID NO: 222125 - DNA, 420 bp, Homo sapiens
cagcctggccaacatggtgaaacccagtctgtactaaaaatacaaaaattagctgggcatagtggcatgcgcctgtaatcccagctgctccagaggctgaggcaggagaatcacttgaacctgggaggtagagggtgcagtgagccgaaactccaacctgcgtaacaaagtgagactccgtctcaaaaataaataaataaataaaataaaaaataaagttggaggaaaaattatttgaaaactggcaaatgaaagccttatgaagctacaaaacctgcttctgtgtgtatgtttatatgtatcatgtgtatgtgattttgtaactgagtgccctatttttaatttttttttcctcctgcagccctctgtattaactttttagtaatgaaataaaaatcttgactttctttccaccaagca

SEQ ID NO: 222126 - DNA, 1014 bp, Homo sapiens
gtaagtgaaggaagaggaggtggttccacggtggcagcagagcaggaagggaaggccagagagggcacactcaaatggctttgctgtcacctgggcaaagacacacaggtgagacctccacctgttggcgggagccaagcttaacagctccgtctgggaactctcatacctgagaccaggaatctatgtgtaaaccctttccagtggcagaatctggcagaaatggagccgataagtgtctgtcttcctgctagactgctgttcttgaaggtagcactgcctcctggtctcctcagtgtccccagggctcagcacagggaaggcaatggaggtaaagttgtgttaaactgaaatggagagaaagacagtaattgggcttctgtgccacacagtggttatagaaagcaagcagaccctcaccagccttgtaggggtaagaagaaaaataggtcatatgggtagaatccgtgtgttgtgtgttctacataagcacatacttacttttgcctgcctagatgcagacacaggtttcttatacttcaaaatttgtggtacctttttgtagactattgcatatcgattcttaactattccaagtagcagcattaaatatgttcttgatgacattaaagagttaattttcatggtcgggtagttcattcttgtctctgtcagcctgggctgctatagtggaaaaccatagactaggggacttcaataacagaaatttatctctcacagttctggacggctgggaagtccaaggcaagggacagcatggttgggttctggtgagacccctctgcctggtttgcaatggctgtcttcttgctgtgttctcacatggtagagcacagagatcatctttctggtgttactacattctaaggataataatcccattcatgagggctcaaccctcatgatctaatacctcgcaaagtcctcacctccaaataccatcacactggggattaggcctcaacattttgagatttgtggggacacaaacat

SEQ ID NO: 222127 - DNA, 352 bp, Homo sapiens
atggagcaggttataggaagagtacacctgaggataaaaagtacagtcatgtgttgcttgatgacggggatgcattctgagaaatggtaatttcggcattgtgtgacatcataggatatacttacacaaacctagatggtttactcttttgctctgatctgtacagcatatcactgtactgaatactgtaggcagttgtaacataatggtaaatgtttgtatatttaaatgtagaaaaagtacagtcaaaatacaatacaaaggatttaaaaatggtacaccatggaggttgcagtgagccgagctgagatcgcaccactccactccagcctgggtgacagagtgagagtca

SEQ ID NO: 222128 - DNA, 459 bp, Homo sapiens
aaggtatcaaaataataccataattattaaaatgcattaatacaccaatatatttcactgtaatgtggaatgtttacatgcatcagttaggtgtgggttgtatttactaaccatgtatggttagctatgttgctaatatctattgcacagggttggcgtacccaagcggtttagtaaggttatccttctcttccccaatatgctgcccccagtaaaataaaaaacccacgctaagcttcatcaggttacttcacacgccactgaccaaccaactcactactcagaattcatacacttcccttttttccagaggaagattctacacagtctcagttagttggtaaattggtaatggataaggattgagaagtctgagtttgggggagaatgaaacctttcccctcctgagaacagaattgggatggtgggcggggggaagggagggacaaaaaaaaaaaa

SEQ ID NO: 222129 - DNA, 411 bp, Homo sapiens
ggctggcccacaaagtgagaccctgtctgtattaaaacttttaaaaaagtttattaaaaaaagaaacttcctagaaccatcaaggaatttcagtcctttttgaaagtaagtataattaaaaatatgaaaaggaggcaagaggtgtttctgatctgttctgatcaatgttgattcatccagtaatcagaaaaaaaagtacaaattctgatgcttctagtttcatatctagactaattaatgtattgtaaatttatttatttgagacggagtgttgctctgtcacccatgctggagtgcagtggcacgatcttggctcactgcaacctctgcctctcgggttcaagcaattctctgcctcagcctcccgagtagctgggattacaggcgcccgtcaccatgcctggctaattt

SEQ ID NO: 222130 - DNA, 434 bp, Homo sapiens
agcattgtaatgttttatttatgtggaatcattgaaagattacgatttaaatgccagatttttctaaaaatgcatactgccttcatttatttgctttttgttctctcagtcacttaatgaacctcaactatagatcttctttactagatctggctgatttttagttgctctttgtcattcttgtcaatcctatagatgaaacgactgatttttcccactttgttcttcatatgtctctctggcaggccccttccatccttaagtgactgctaatctgccaggtaacaagatgtgatgattgccttcaaatatgagtctccttttaggcattaaatcctgtcaacttcaaactctgggtttcagtaaatgttcccaagtcttttgccagggctgggatcagtgactgtccctgagtgcaaaatttaatggaatgc

SEQ ID NO: 222131 - DNA, 374 bp, Homo sapiens
atatttttgttggctgcttgtatgtcttctttttagaagtgtgcattcacgttctttgcccattttttaaagggttacctgtttgtgctcattgaattgtttaatttcctgatagattctggatattagacctttgttggatgcattgtttgcaaatatttactctcattctttaggatgtctgtttactctgttgatagtttcttttgctgtgcagaagctctttagtttaactaggtcccactggccaatttttgttattgttgcttttgagcataattctttcccaaggccaatgtccagaatggtgttttctagattttcttctaagattcttatagtttgaggttttacatttaagatctcaattgatc

SEQ ID NO: 222132 - DNA, 548 bp, Homo sapiens
agcctatcctttatttgcttcaaggaaaagatttcagctcagagtcccattaaagcagaaaaaacacacaataatcatttaactacatgacagacagcactgtaagtaaatggcaaagtaaatgggcctctgtcatcacatattcagccatctgcctcctgagaaacaagggtgcttaccttcttattatcttcttgtttcaaatggggtaccttgatataatataaactaaattccaaaacagggcaaaaataagaaaatatttgtcttaaagagacagctcagaactatatattttaaaataacggaatttagattttatacaaaatgtgtggaaaaatgacaaattatagtcactaaacataaatttcattaaagacattatcaaatatcatagatgcaaataaaaacaacaataaaaacttatggttagagtagtattaaaaatataaggctgaaaccagattacatgagttgagcgagtcgggagcagaggaccagcttgctggctggtactggaataccacagaggctccaccactcattag

SEQ ID NO: 222133 - DNA, 370 bp, Homo sapiens
agttcaagttttatttcttgcttctagaacggtagtgagcggtcttcagcctgagacccaaccctaggtaagtagctgaattggggttttgtcttggctaaagtttaacaaccagctggtcttaatttctccttaccattagagcactcagtaatcatataagttgtgtgatcattcattttgcttaactgtttgtttctgtttttattgctgtttcagtctttttcccattgggtttgacctactctatctgacttgatcaaatccaaaggaaatttccaaattatggggaatgaggcctctgaagtggctaaattcccaccctcccacacacacaaacgtggtatggtgggggaaaaaacggccagca

SEQ ID NO: 222134 - DNA, 367 bp, Homo sapiens
gcacgaggtgtgtcaggggttgagggagcaaatgatcctttctacaatcagggttgctgaagggaaaggcagtaaggcagatggataagagagcaactggaattttaggaatatatatttacatagttttgtacagttcagtaataatccagataaattgcttaggccagatggttggtttatcaagccatgcagtgtgcctttttgtatgcaaatgaaatgtctacatatcaagagagccttgggcagaatccaaaatggagcagccaatttgccctaaaaggtgataaatttaggacccagagaggagaatactggaggttgacaatattgtttcctaatatgtcctagtgatttaattttaata

SEQ ID NO: 222135 - DNA, 513 bp, Homo sapiens
caacaacttcagaaactgaaagaggaggaaagaaataaattccagccagccgaaaagatctcagaaatccactatggggacaccttattgaacacatcatccatatgcctcaagaggattacatcagctggctgcagagccggatcaacatacccattgggccctacagcgccctgaggtaggctgggcctgggttgaccagctgtctcagtggaggagtgtttgcctatatcatgttcctgtatcctgcctgtgttcctgcctcctgactaccctcatggatgctctttatggatgaccctttacagtagggtcatctggagactgacttccagcaacatttttagagggggatggccccggtggccctcccctcaattccacaccccagacccaacctaccagtctctgttcttcaatgatccagcctgactctacctacttcctcttcagattccttcaccctatttaccttcctcaaatactggagaataaaattgaactgaatgtttg

SEQ ID NO: 222136 - DNA, 623 bp, Homo sapiens
aagctggaaaggggtcctcttcaccaaaggaccaccccaatctgatgctccaagattatgaatgcccaaatggtattcctggggccaccagtctcagtcacaaatcttccaggatcttgaggggagggagagaaggtggagtctacttttcagagcaaattctgagattgccactgtgtctgcctcacagtttgtgcgagaacacatcatccatatgcctcaagaggattacatcagctggctgcagagccggatcaacatacccattgggccctacagcgccctgaggtaggctgggcctgggttgaccagctgtctcagtggaggagtgtttgcctatatcatgttcctgtatcctgcctgtgttcctgcctcctgactaccctcatggatgctctttatggatgaccctttacagtagggtcatctggagactgacttccagcaacatttttagagggggatggccccggtggccctcccctcaattccacaccccagacccaacctaccagtctctgttcttcaatgatccagcctgactctacctacttcctcttcagattccttcaccctatttaccttcctcaaatactggagaataaaattgaactgaatgtttg

SEQ ID NO: 222137 - DNA, 423 bp, Homo sapiens
aatagtaaaatagttgggaatgaggttgagcaagaaaagaataaaggaataaaagtatacaatgccaaggaaaggccaatagaaactattctttttgctttgcttctcttagtgtttttttccagtgtgactctgtagataatggcaaagagaaatgcagggtcattttttccattttcaagtaaaacttattttgcacaatagacccactgaggcttgcactcattcatgtctacgactcccatctctccagtctcaacaaaagtgaaggtggccattgtgtcctttcattgttctgtgactttgctgcccctttcttgctttttaaaataagttccttagaagtatggaatggcgggaacgcatgccctttgtttcagcaattcagtcaaaatttcccaacttgccttcaatgttagtaaa

SEQ ID NO: 222138 - DNA, 496 bp, Homo sapiens
atactataacccagttctctgatttctctttttcttacatttatcttatgtgtttttgtttacatttatcatatgacatataaaatacaaagcataacaaagattttaaagttaaaaaattggcacatacaaatataaaatgaccaaatgtcaatgattttattcaactcttaaataatgaaagaaaatcagtaaggtattaagactgatttagaggaacagggataaatataatcagtaaaaagaattctgagataaatatgtgaacagatataaacatgtttgaaatgctaaagggcaacaatattcaaggctgtcttttccgtcagagagaaatcaagcacatccaattgcatcaattgtatcttatcccttcacattgttacacatgggaattctttgactcaaaaaataatctttgcaatgatatcagttttctaataagttaacctctacctctacaaatttcaaaaatagcctattcagtgaaaaattg

SEQ ID NO: 222139 - DNA, 481 bp, Homo sapiens
tataaactctcactttagattattggtatcataagagtacaaccactgtattttgtctttaaatgcataaggaaacataatctcaggaagcaggagtaataaacattgaagaaacagtaacatggagtttcatagaaatataaatacattaggagccataagagcttgaattgttcaacttttctttgaataactacaaatgtgtgccaaactccagtatctttgccttagacacaaatttcatcctggctttaaaaattagtattagtaatacgttattttttccataaagaactttgagtttggagtaaagcaagaacaactgctattatttgcctgctaaaattatattgtgaataattttgtagacttatccaacaatgtgctgtcctgcattttgtgtaactctaggtactgcagcttgtaatccacctactgttacaaataatctcaggaagtgaattactgtgtttctttgctg

SEQ ID NO: 222140 - DNA, 510 bp, Homo sapiens
tgaggtacagctacgggaggtacagcttttaaaaagagtaatccggccaggcaccatggctcacgcctgtagtcccagctacttgggaggctgaggcaggagaatggtgtgaacctgggaggcggagcttacaatgagccaaaattgcatcactgcactccagcctgggcaacagagcaagactctgtctcaaaaaaacaaaacaaaacaaaaaaacaaaagtcatagaggtttgttgaagggccctacagaagggaaattggagacttcttacaaaagagtagtggaagatttgtcttggggcttatactgtatagggaagaaagaaacctggtggagattggagattcaaggtcatggtttagtatatttctaaccttttcgtctgtagccaccttagtaagaaacacattttacattgtgacccagtaataaatgtatgtataactgagatagaaggttcataacacctttcttgtttgcagtccatgctgggattcctatttctta

SEQ ID NO: 222141 - DNA, 292 bp, Homo sapiens
aggcaaggaagaagccactcagtattctaaagcaatgggacatggagggatagaccttagcttgctaagggtcaccagcccacatggttgtggaattttctgtagctgagctcaataggctcacaaaggcagttgattagattaagatcatagaggtttgtggctgggtgcggcggctcatacctgtaatcccagcactttgggaggctgaggcaggcagatcacaagaccagggatcgagaccatcctggctaacacagtgaaaccccatctctactaaaaatacaaaaaa

SEQ ID NO: 222142 - DNA, 400 bp, Homo sapiens
tattcagtaaagtaatcctaagaaatgagcactataattattattttttatattcatgaaacatgtagtcatggaaacgaagcttcgtgcagttgaaaaacttgcccagggccaggcacagtgtctcaagcttgtaatcccagcactttgggaagccagggcaggtggatcacttgagcccaggacttccagaccagcctggccaacatggcaaaaccccgtctctactaaaaatacaagaattagccgggcgtggttgtgcatacctgtaatcccagctactcgggaggctgaggcatgagaatcatttgaacctgggaggcagaggttgcagtgagccgagatcgtgccactgcactccagcctaggtgacagagcgagactctatctatctccaaaa

SEQ ID NO: 222143 - DNA, 471 bp, Homo sapiens
tagaaaatcttgagaaacatagatacgttgtcatgatgaggattttttgaaaagtacagtcatgccctgcataatgacattttggttaatgacagaacacatatacaatggtggttccataagattataatactgtactttactgtatcttttctatttagttatgtttagatacacaaatacttaccattgtgttataaatgcctgcagtattcagtaccgtaacatacagtaccggtttgtggcttagaaggaataggttataccctcaagagtaggtgtgtagtaggctataccatctatgtttgtgtacactctatgatgtttgcacaatgacaaaattgccaaaggatgtatttctcaaaaagtgtctctgtccttaagtgacacctgaatgtatatgacccttaaagtataggaaattctaaaaataaaatcctgattgggcaatcttcatccaaccaaatgaga

SEQ ID NO: 222144 - DNA, 441 bp, Homo sapiens
tacataattaatgacaactaaacttcacatgatccttattattaatagagaaaacaggatgaaagctattttaactacctcagaaaattattaattaaaaaatttttttctaaggtaaagtctgaaatatttgaatgtaggatactgcagacaaatactcaaattttcaatagcaaattttcaaactggcaaaaatgtcatcagcatcttaatctacctacttctaccaacttctcaaaggagttagggagttaaaaactgggttcacgattctactttatttataccatgccttgcacaagggccaatagaaacagaatgactaatgacaaaatatttgggcttttggctgctataattgatgcttctgaacaatcatgctgagacaataaataaaatgagagtgacaagttcttcagcacatttctgcttcacagaagt

SEQ ID NO: 222145 - DNA, 112 bp, Homo sapiens
tgcagtgagctatgatcacgccaacgcacttcagcctcggcaacagagtgggatcttgtgtctaaaaaataaaaacgaaaaataaatgcacacatgcacttactcatctgta

SEQ ID NO: 222146 - DNA, 788 bp, Homo sapiens
aagataaaaagaggaagctccgctaaacatttttgttgctgctgctaattaccacaagctatgctttttattaattaatggctctacttgcctccaaatcctactgaagaactttgcgagacaacaggcacttcattcttctgtagctgcagacatgctgctctgtggtttggtgcatggggtacctgtaaattatcagcaccgagaatacgctagctctggaaaccaaggtagagaaaaaaatacatctggaagtctggttatgtgtaacttgaacttgctcaaagccttcagctgacactgatgctttttaaaaacatggcagtgataaattatttcatcactttgctcaaatacattaatgcaaaacattacaaaactagttttcttgactcagcttccagggtctaagaaagcattttattggggggttgtgatgccagagcataagggatgttaaaggtgacacttaaaaaggaaggtgtcgatcttggttctggtctggtggtgcctgagagcagggactccttgaaggtgcaagatgaattacactcctcccaggtgtcaggcaggggagagaagcaccctccatttagaaatatggaggattagccaggcacccgccatcatgaccagctaatttttgtatttttgtagagacagggtttcactatgttggccagactggtcttgaactcctgaccttaggtgatctgtctgcctcggcctccccaagtgctgggatcacaggcgtgagccaccatgcccaccctatgattcttaagagt

SEQ ID NO: 222147 - DNA, 499 bp, Homo sapiens
aagtcattaaatataagcaactgtatttacattctactatgagtatgacagaactctccaatagcaaaaccatgcatgttggaggctaacattctatatcctcgattcctggtatgtgaacagaaatagagcggtgtctcattcaacttagtgtttaaaaaaatattttttaaaaaatagagtagtggtaagaacagggtgtcagatgtaatttaaaattgctttgtttcacatctgaaataatataaatgtgttttatatgtctgtttattaccttttgttataggttttgtgtgtgttatgaaaatggactcgtgtcctttggggtggggtggaactttaatatctgtattctgtaatattacatgaaaactaatgctaacttttattcttccagtatgtgccatatctttatgtttaaaatatctcagaaagagcttaatcacttttttctggctttattttagttttgaagtattgctgtatttgctgtatagca

SEQ ID NO: 222148 - DNA, 363 bp, Homo sapiens
taaatattaaatacatttgttatgcttttctcttttttcctttgctacaggagtgttggccatgaccctcatggtgggtgaggaaaggtatcacagctttccacccctacaatcccaagtgtttaaagagtacctggtaaaagaaaaaatacacgacaaatacttaattttggaaaacatcactgtaaatttttgatcagatatgtgtttctgaaaaatctgtctgctgccagcatgttagtgggcttccgacttatcatcatgagtgaacatttatgttccaagatacatgtgggtgcagctattattactgtgaagagaagtgtgatgtgcctctctttctgtactcaccatattgacaat

SEQ ID NO: 222149 - DNA, 646 bp, Homo sapiens
tggtcactggtgctcccacactcaaactgggcttccagtcgcagctctgctgggagctagcttgttgaccttgggctggtaacttgcctctgccagcttcagcccctcgtccgggagcctcgcattggcctctcgaggttaccgcagcgatcgcatgcgacagtagatgcacggcgcccggcgggccggcacagtcgctgctcggaaatgacgccggtggtgattctcctctctgctgggtggctggtttggctgtccacactgaactcagcagagatgtttgtgcagcgatgacaaattgaggcgctgcccctgggagcttcttgaaaagggcttatttttaggccctttgcctcatgcactccctcgccactcctcgccggccaccccaggcctctcagggccctgcgcatctaggaacatgcctgcccctgccagcctgcaccacctctctcgcgctctcggtcacctctcgggttctcctctgatgtcacagcttcaccatagcaacgctcagctgcgcccccccccgcccccgcccccaccctacaatgtgaggattcggtgcaagaaagcgcagggagctggcggcttcccagcccgagagattgcatttgtatgccagagctgttcatgatggagcgga

SEQ ID NO: 222150 - DNA, 256 bp, Homo sapiens
gagcagacagattgtcctttgctaaggtcaggcagtcccagagctttctgagaggctgtttctgcacttaactcttttaggggacaggcccagagatgaacttggattcaggatgccgtggcctgttagctgaatgccagccgttgtcattactcaaagagaatctaagagcttttaacttctatgagcaaaaccagctaggtccacagagggatggtaaaggaggaaagtaacacagaaataaatataacaaacc

SEQ ID NO: 222151 - DNA, 818 bp, Homo sapiens
cagcagcatagatattacgtgggctttggcttaagaagacagaagggcaaagccacaggtggtaaagtcatgattgttgaaaggttctatatgataaagtgttaaatttcctcaaagtcataggattatggaactctcttcttcatgcttacctgcactttccaagttttatctgaacaatgaacatctagtaggtaaatcactaatgaagcttccttggtgctagggccacacttgagtgcgactgaatagtagatcctggggaaaagtatagtagaaccagagaatagaatgtcttacgtcagagtatattgaggtttccagcaacctaagcttgaatcagagtcccagcctctgtgagttggtctcaaggcccatggtccgtgctcgcttccagctccagcttcccgcttgggagaggccttggtttccatgagctgagcctctagattttggagaagattttctatggacaacacagacccaataacaaaagtactatgggaggaggctagatctgacttctaaacctgttcagttaccagagagatcagtaactccctaactcataaagggagggatggttaagcgaactagaaatatttagactgaagacttagaagtgggcaactatcttcagaatggtagagggtaaacacctgggagagccgtaggggacagcccaaggatacccctccgtgaagttagagggaggcaagtttcttggtttaggaagattattccaacgaccagagatgcccatctgtgagtagactgcctcctgacaccgtcccaccttcaccagaagctggatctca

SEQ ID NO: 222152 - DNA, 709 bp, Homo sapiens
ctgtcacaaattagtttttatcattcccatgagtttctttatattacacatttgtctatatctgtaaataatagtattgtttcaacattttgtattctatacatatgtgtgtatatatatgtgtatatatatatatgtatatatatatttttttgagacggagtttggctttgtagcccaggctggagtgcagtggcgtgatctcggctcacggcagcctcctcctcctgggttcaagcgattctcctgcctcagcctcccgagtagctgggactacaggtgcgcaccactgggcccagctaatttttgtatttttaatagagacggggtttcaccatgttggccaggctgttctcgaattcctgacctcttgatccgcctgcctcggcctcctaaagtgctgggattacacttgtgagccaccgtgcctggcctttgtattccatatttaaaaaaattcagcattatggtgaagggtatgtccatgttgaattgcgtggccgttgaacattcatttttggtattccattgtatccctaatatatgtatccattctgttgttaatgaacaattatgttgtttactttttacttttgctattatacgaagtgataatttagagatttttgttctgttgaagcacttcatatgtatttaactgcttgtagtgaaaactctacttttctctttcagccatcatttctaccca

SEQ ID NO: 222153 - DNA, 501 bp, Homo sapiens
ccctccacctccagcccagctcctgctcagcgcggagctgctttggagaacttgctgctggcgcccaacagctgggtgaattctgcttacagtgttttccaaagaggcctgtaggacatctgggtcttccatggtggtgggggttttggcctcaacaacaaggctctggtggcagaaatgatagcaacccagtgaaaagagagggacaaaagggtcaaaggagtcagtgcaaaagcactgtctgggaaagcgaatcaacccagattgtcccctcgggaaacatggcatgtgcttggtgtgacagctgattctccccttaatcactgccatgaaaacaaaataaccataagaacaatggcagattagacaagggaaattaaggaacccaaatactgacaggacgcatttttgaagatacagcagactcctgggtccttgtgacaaccttcccacaccaattctcagaccaccttctacccgaacctgcacggtgtcaaaatg

SEQ ID NO: 222154 - DNA, 763 bp, Homo sapiens
aggcggttgcacttgtttttgtatcacttatgaaacctagtatagtgctttgtattatagtaatcattcattagatattatgtgaatgatttgaattatatttcatagtagctcaaagttagtcttgatggataaatgaatgtaatacaaccatatacattattagtaaggaacttaataatatcatgaagtatctttaaccaaagtaataattaaaaagtaggagtaaaccatagtaagttcaaatttagaatttgatagataatggagattactttttaggcctaaatattgaaggatagatgtttatgaaactttgaggttcaaattatttgtagaaatgtttatttaatattatattcaagatattaaaatgacaacaatgggaaaatgtataagagatttgttaaacacatcctgaaagcatggaaataaccatatatcttagcctaatgcatgaaatagtatagcaaatataagcaggatgttttcatttttattttaaaattgtgtttgtcactggatagggataataaatttattctatttattttttgctgttaaacatatactttaataaactaaacacatttgtttctgcagtggatggaaatatgtttgtcacaggtaaaattgtcacttgggtaaattttatctcaagcaactcctttttagttttaatactttctatgttgcccaaatcaagtcttatttccatgaatcactgttttatgtaataattttcttggtgaggtcaatttac

SEQ ID NO: 222155 - DNA, 300 bp, Homo sapiens
cctgcctcagcctcccaaagtgctgggattacaggtgtgagccaccgcacctgggctcttctttttagtagaacactttttccatctccaggattccagcaccatcctaaatatctgtaggtcctgtaagactacagatatacactgaaaatctctttcctggattctctaggtgctgtggcctgtaattcatctgggtcaagagacaagtttaattcaatttagacacaaataaaggttctccttagaggggagtggccacattggaagacaatttggcaacacactgatgtcactgaa

SEQ ID NO: 222156 - DNA, 473 bp, Homo sapiens
tagcaaccttgcagtcttaaaattactagttgtaggaactttcttgtttagattcctgggtgttttcctatgtgtaggcagtcatgtcatctgtgtatagaggcagtttttttccctccttttgaatgctctttatttctttttcttgccttattgcactagtttggactttcaggatgttgttaattaggaatggtgagcaggcatacttaccttactcttaatactgggtaaaagctgtctttcaccagtaagtggttttttttttggttgatgccttttatcaggttaaggaagttcccttgtatttctattttgccatttgttagattgaggaagttcccttttatcttagtttactgagagatggttgtttttaatcatgaatgaaagttgaatttttgtcagtgcttttttttgtgtgtgtatgactgggattatatgggttttcttcttaatctgttgatatggtg

SEQ ID NO: 222157 - DNA, 521 bp, Homo sapiens
ttccttattctctaggtgtttcccatacctaatgctaaacctggattatggccttctgttctctcatactaagttagtcaagctccctttattcaagtaattcctgaaatcttatccctccaaagttttccccaatgaattagaagtaacaaatttgtaaatttggtgacaacacttctgcatttactaggatagtggtgatttcaaatatcctgcctttgtttttactatacacctccatttacttgtcagggcacatgtcctgattattggttagaccatatatatccccaccaagtctcaaaatgccatgccatcattttcccttgtccatactcctcctacaactacctcactacatgtaaagaacttaattgacatttgtcctactttatgtatgtcatttggatctgggacagaaaaatatatgatacataagacatctggggagaaggggccatactaggatggggtgagaaggaatggggaggagagactgaaagcttagcagtaacccactt

SEQ ID NO: 222158 - DNA, 567 bp, Homo sapiens
caaatatatatacacacacacgtatcagtatagaaaaatgtgtacttttaaaattcagttgtcttaatctgaagctatttgagtcatattctctggattttttaaagcatcctacaatctgtatatataattaggggaagttgtaataattgcaggagttataaaagcgaaatttaggtggtgggtaagtgtatctacattttggcataaatcactacttttagaggatttatatgtcagactgataagtttcttaccatggtgaaatgacaagaataccactcaggcattggctgagacataattttgacagccagcaagcttgcagtgttgctgagtgcacagatttccacttcctgccaagattaaaattggcaaaaaccaaaaaggatattagggattgtcactttaagaagaaataacatgttaatgttctgcatttgcttaagaaatgtaagagtgatctcttgaactgtagtctgttgaaacttacaagtttgcaatcaatagaagagtttgattaatatgagcatcaaaaattaaaataagtagaggctctctgacact

SEQ ID NO: 222159 - DNA, 529 bp, Homo sapiens
gcatccaagcttaaatgggtggggggaaatacaactgaaaatatagggctgatgcacatagaggatattgtgtggatacagactcaattgtaagaatgtctagaatttattctgaggttcctgagaaaattgatcaatttatctcaagctatgctatgattacatttccaccactcttttagagattttaatttaattaaatgcaaatgttatacaattctccagtgtttattgttgtatttaattcccatatttgccaacaatatctttaatttctaatttttaaatgaaaatactgaaacagggagactgttcacattgaacatcaaatttggctaatactgatttggaaatatggttagatcctgattaaaatatttttcaacattacaatgaaaagaattaagcatatctatatgaaatcctgtaagtctttcttaaaaatgaatttctatctactcaagccagtgtcattttggaatttctgtcactatcagctgatcttcttgattcttttgttttattaagc

SEQ ID NO: 222160 - DNA, 226 bp, Homo sapiens
gccacttgttcttaacaactgtaaacctgcacaatgcctaagggcataaggctacttgatgatggcaaaggcaacaatgtgggtgatgcctgctctgcaagattaaattccatgggtttcagagagtaccgtaggcatatgaccaagagccactggcgaccattcattatgccagtaacctgactctagcctaggctcccctccctgacatcaaggcatgtcaaag

SEQ ID NO: 222161 - DNA, 403 bp, Homo sapiens
cacccaatagtgaaacagacaacgtggtgcaaaaagaggctaacggtctcactcctgggatttctgggactggctgcatagtctgtgcctacctcacttcctttcagtcttggagtctcttagcctctacaattagtctgttagtacaggcaaagaccagttgctgcttgtctgagtccattttatgtttgttttgttttgtttttgtttgtttgtttgtttgtttgtttttgacagtgtcttgttctgtcacccatactggagtgcagtggtgcaatctcagctcactgcatcctccacctcccaggttcaagctattcttctgcctcagcctcccgagtagctgggactataggcacgcaccaccatgcccggctaatttttttgtatttttagtagagac

SEQ ID NO: 222162 - DNA, 339 bp, Homo sapiens
tgtagtcccagctacttggggggctgaggcaggagaatggcgtgaacctgggaggcggagcttgcagagagccgaggtcgtgccactgcactccaggctgggcgacagagcgagactctgtctcaataaaaaaaaataaaagaggctgtctctgagcattcactgagcagctgggctgcggtcaagaaaccagcctcgacagaggaaagcacgttcacatgtgagtgcacagggtcgggggaacatgcatcacaggcaagcagccttcacctgtcttctaacagacgtagacagtaagtgaatgaaactatatttgataaggggctttctaccaaagag

SEQ ID NO: 222163 - DNA, 249 bp, Homo sapiens
gttatccttcccagaggcatctactgttccagtcataaaaaccacatatttgaaagtaattttgaaccattacttaaaacttttaaagatatattaaactcaatgaattttttaaaattacaaatgccccaaagtgaatttattaaaatttgtgctgaccaattgttttctatctagtataatgtcaaagatgcctctatgctatttggctttaattgtttaaacaaagttttgctttttttttttttt

SEQ ID NO: 222164 - DNA, 577 bp, Homo sapiens
ccagaaggtaaaaatgacatctgacctgattgggaagaattgtaattcttatatgtgcaaaaacagatgagagaggatttgcactttcagataagtgtaaccaatctaaatgtattgcattatatacaaaccacactacaccagatgacaagagatgagaaattcagaggcagctccagcattacaagttgtgtgaagatgggcatgcactatgccttcaaaccttggtctttatgttcataaatagctataaatataccttccttaacatctcatagctctcatggtaatcatgtgatgtcaaatatgagaaaatttttaataatctgtaaagtattgttaggtactcttaggtattatgaaaaattgtgcccactgttcagatctttatatctccctgtgtacctaactattggaatcatatgtcaaaatgaaaggcctcttcatttatgtataaagatattgtatcatccaaatattcaagttcatgtacactgtccataacatagtatatgcaagaataatatatatcaaaaatctgaaaaaaatcataatcgtgctatctatttaacattag

SEQ ID NO: 222165 - DNA, 1609 bp, Homo sapiens
ctaccttaatttgataatttcctcacaattaccagatttcattttttaaaacagaggagctatttatcttttcagtgtgataagtattctattatagaacattgtttgcctttgttcggaggtgcagagaagaaaacagtgattcatttggcaattctgacaaaatccaaagatgtatacaattacttcattcatttagaaaatattataggaactataatattctggacactatattaaatagtaaagaaagatcaatagacacaacctctgccctcaagaacttatagcctgtggagatacatcaatgaagccttcaaaaatttcaaaacagaaagcttaatctttagaaataaatagaatgtgtcttaaatattatgctgggtgggagaaagaagtaggaattataaagtttaacaaaattgttttattgacatgattctgtaatttggcaactcacattcaggtctcttactgctaaccacagcatctagcagcagtcctgaaatactgacacatttcaagacaattttttactaactctaccatttgaaagatcaataaacactaaggtgttcttgtgatgtctcttattcaaaagtcatattccatcccagtgtagttcccaaacattttcaagtcacatttctaaatctttaatcttccataacatatctggaatgaaaacaagcaaaaagtggtttccgacagccattgataaaaactggtgttgaaggataaggaattatttgtggagatggtaagattacacctcagaagagagtacatgaagacacggtaaaattacaagagaataacattagaaacaaacctcagcaaaataacttggctctatgatagggcttgagttagaagtcaaagattatacatactctaggaaagccccaagtttgattctgatacaagaagggtagaaagtggagatgggagcaaataatgtctgttataatgacagattacctaggaaatattggcctaaaactacttttaaattctaacttttagactgacacatcctttagagttaccactgtgaaaaacgaaactcttcaataaatgatcaacatattttgcaaatatattttgaagcataaggaactccataattttaaaatattaaccaatctggtcaagactacctaatagtctttttacagtattactgtttattttagaaactatttttcctcatcgtcaattatatgagaagtcaccatgaaagcaaaaaggaaatctacttttaattgaatggtgactgtaagccttttaggttacatgtacctaaatactatgcaataacaggaatttatcatttattttccttccttccaataccactttcctcaaaatatgcttctgcacaagatttccccatattgctacctagaaatctaacaatgaagggaaatattatacttaaacagaagaatgtcagaaaagaatactgatcatgagagaagtataaaaagtaagtctgatttgggggtcacgatgaaaacatttgtatttaaaaaaaggaaaatatttgcattaaaagccactttaaagcagactttaggcaaattaaacatgttgcatcctatgtcac

SEQ ID NO: 222166 - DNA, 310 bp, Homo sapiens
gtagaatgagttggggagaattcccttctccttgattttttggaatagtttcaggaggattggtattaatttttctttgtgtgtttggtagaattctgctgtgaagccgtctagttgtgagctttttgttgttgttattggaagtttggttgggagtttgttttgttttttttggttttggggctttttgtttgtttgtttttactaattaagtcttgctactcattatttgttgttcaggcgttgtacttctttctagttcaatcttgataggttgagcatttccaggaatttatcaatttcctctcgg

SEQ ID NO: 222167 - DNA, 287 bp, Homo sapiens
tggcccaccacccacagcttgaatctcaggctccaacagttgcctgacccccagattctgatgacagcctacctacttgttcttcaggccctcaccagactcactgcccagacacaccacacaggagaacatgaaagggtgaatgaatctttcatcatttgatgaccaagttggcattcttttacattccagccaccagaggaaggtgtattttaacacaattgccctcacatcctccttaacaggatttacataagtttattaacacatatgtttctacaaaatca

SEQ ID NO: 222168 - DNA, 609 bp, Homo sapiens
tgaatagaaggttatacagaagcattagatttttcttccagtattgtctgactggaagaaaattttgtagtgatatggatattaggtaagaaagcaaatatattaagctatttatgttaattttgatttcctgactacttgcatttaatttagctagccctgcttagtttcacccatctgcacatgtatgtatgttctgttacatgaaatagaagtagaaaaaacagaaagaaacttctccctgtaagtagcaggatgtgaagggccagaaatgcagcttaggcaataagtgaaaaagcatatctaaaaaatatagtttggagtctctaaccttttctaacccagtggtggctgttagcattgacactgtggctactttctggaaaacaaagtacattgattaaagatgattttggtaatgaagaaagttgtattcgaaccaattatttatgaatcgtggaaaaagcgctcaaagtttttatttggtcttaattgtgccttcatgatctgtttaccattgtcttatgaaaagattctttttttgcactttatatgtgtgtgtttgcatatctttttaggaattaaagattattctgaataaactcaata

SEQ ID NO: 222169 - DNA, 255 bp, Homo sapiens
tcttgggggtcattttgaatctctgtttcttctgtggtcacgttcatttggaatttacttattcaacccacaaccaatagacatttccagccctttgttagtataaacagaacttctctttgactttcacagcgtttttgttctggaggtgctatccttgattgctaagacacccacgacattgctcttggaattggagtagggtggatgaaatagtattcaaagatgggggtggtgcaaatgttctgtatttca

SEQ ID NO: 222170 - DNA, 268 bp, Homo sapiens
cacccctccatctcccgcctcgccgccggctgcccctcaacccccggcggcgtctgggtcggtcctcaggcgccggcagagcagggctaggggccccgcggcggcggattcctccagacacgctccagccgggactcctcctcaggggggtggagggggcggcggggagcgtgtgaggcgaggggcaggcaaaccgatcgttcccacccggccggagaagagcgggcgggcccgggtccggggggcaggatcccgagaagcggcggga

SEQ ID NO: 222171 - DNA, 662 bp, Homo sapiens
caacggcagttgctggggctaacagaactggctgttgggagagagaggcgaggcaacgccgcccggccctgccattccattttactgcttaactcaacctggagtgtcaggacctattctcctgcattctcgctgcactatacgggggagccaagtcactctgtactcactggacagccaggctgggtggaatagggttctagagtggagcaggggctctgccctttatggcgactttctaaaagattagcatcagtgtcttttgacagtatagcatctggggtgggacgcggagaggaggctttgcttgctaaacggcttctttctccgccggtgatctggatttgtttcctcggccccctccccccgctcctttctttctcccctcccgcctttagcaaagtgacacaggcgacacctgctcgcttgtgtgcgatgttggaactcgcacctcctcggtggtgacggtgccagggcactgctaccagggggacatcggcgggtttcccttccttccagcccacgatgcctagaagggcagcgggtgggctgcgtggggctctgcccgcagcacttcgaggcgggattgaggggctgaagctggccaggagttgctgctaagtggattcgagtggaaggcgccaagtctccgcgagggcacc

SEQ ID NO: 222172 - DNA, 311 bp, Homo sapiens
aggagctcatggcccgtgggggcgagtggcagacttccagcaggaaaccacacagacattacttagtcacagccaggagaagggctcagagtgaaagggctctgtgcccatgacatccttagagagaccagggaaggacctgtaaggcttgaagaatgtgcagatttggagacccacaggtctgggacctggcagaagcatgttactgcccccattttagagatttggggctgagattcaagtaccctaggttatataatgcagttgtcaagtgacagagctaaaacttcatccaggattcaatttttttt

SEQ ID NO: 222173 - DNA, 396 bp, Homo sapiens
gagtcgcagctacaaggagctggtgctgatctcaggtgatctttctgcccagggctcctgctcagccagaagtagcccaggccagcatcacacggagacttctctctgcaaacatggtgcaccctgtaggcgcgcgggtgggttcctcgtgttggagaactcgtctttaaagcccttgtgttggagaacagcatggcctggcggtgggtgtgtggctcagcagttcctgcttctggctaactcacagcagagtgaccccctcacgtcccagcactctcatgcttcaaagagctccactgtcttcccctggaaacttctagaaggtctctcatccttcccacttagaaaactcttccttgctgtgattcacattcctgtggcattgttttcttccgt

SEQ ID NO: 222174 - DNA, 577 bp, Homo sapiens
attgttcttatctacagtgtactgctgcttctataatggctattttaaaataatatggcataggaaaaaattatcagaagacctaaattttgagtaccgattccaccctttgctatatatgtgaccttaggtacatgacctaaaacctctgagctcagtatctaaatctgcaaagtggggataataatccttctctggctaccttctagtttatgattataattaatgaactatatgatttacagttttaattgtcaagtgtgaaacgtgttatttagtagtattgatggaatctagaagatggaacatcaaatattactttttaattttttttttttttctttgagatggagtcttgctctgttgcccaggctggagtgcagtggcacgatctcggctcactgcaacctccgcctcccggattcaagcgattctcctgcctcagtctcctcctgagcagctgggattacaggcacacacaaccacacctggctaatttttgcatttttagtggagatggagtttcaccgtgttggtcaggctggtctcgaactcctgatctcaaatgatccacccg

SEQ ID NO: 222175 - DNA, 349 bp, Homo sapiens
taggctcagcctggcacttgaaccccgtgccctccgccccccgcccctcccagtggcgtctccgcttctcacttcagaggcagagctgtcatcgtgggcactgggaagtagcctgcagtgtcagcacagaccggcgctcaccaacgacacggcacggaggctttctagggagcagtccccccaggacagcaatacgttcaggcgacagcgacacagggcagcaacagcggttccctcctggcaggcagccagacgcacacacgcacgcagaccacaccatccagaaagttcacctgcgacctgagacgcagctctttgagggagatcagaagatcagatggtatttgag

SEQ ID NO: 222176 - DNA, 677 bp, Homo sapiens
tttaagcaagaaagggaaaatgtgacaaataaacaagatataaaatcataaccccaaaattaggtaaactggagtaacaaagttatttccacaaaaatttaattgctgtaattctcacaaagtggttaaaatattctaactgatatggagtcatttatttagaaactgggacttgagatttagcatgtttgcttctgtgttaagtaatgacgtttgaataatgaacaaggaaatgctaacaatcctaaatcttcacagttttctttcctatacctttctcgttgcattctagttgaccactgaaaaacacacatactatctgactgcagattctcccaatatattggaagagtggattaaagtgttacagaatgttcttcgagtacaagctgccaacccactttccctgcagcctgagggcaaacccaccatgaagggattgctcactaaggtaaaacatggatattccaagagagtctggtgtacactaataggaaagacattatattattttcggagtcaagaagataagtttcctttaggtcagatcaaactctgggaggctaaagtggaagaggttgacagatcttgtgattcagatgaagattatgaagccagtggacgaagtctgttatccacacattatactatcgttatccatcccaaagaccaaggtc

SEQ ID NO: 222177 - DNA, 677 bp, Homo sapiens
aaaattgagggtaagtatctgccatcctatatcacagtttgaagcacattatggaagaaaagtaaactcagagagacccatgaaactctgagctcctagcttgcaagtatgggcttaaattactgctctacacaagtacacctggggctgggaatcctcttggaagttcacatggttgttgacagaattcacttccttgcagctgtagaattcatggggactgtgtctttaaggccagcaggaggtgacacttcattttcttttaaaggactcacctgattaaactaggtctgcctagtataatcttttaattaactggaagccttctgattagtaaccgattatggaaacgctatcctattttatttacaagtcctgcccacacttaagggaagagtacagaggatgtgtacaccaggagatggtgaatcttataattctacataacacaatatctgacacatatttccaagagaaaagccaccacacattaataaatgataaattatttggaatttcaatctttcccactttcatatatttattgcaaggactatttccaccaaaagtaacccagctcaagatgtgattagtccatcttcactttcagctgctctgcctcttctaggtgtacctattatctgtctatggaccacaggcaatatccaaagttattt

SEQ ID NO: 222178 - DNA, 540 bp, Homo sapiens
gcgccactgcactccagcctgagcaacagagtgagatcctatctcgggcaggggggaaagaaagaaagaaaaaaacaattagccagttgttgtggcatgcactatagttttagccacctgagagactgaagtgggaaaatctcttgagccgaggagtttgaggctgaaatgccaccacacttcagcctgggcaacagagtaagaccttgcctcttaaaaaaaaaaaagaatcacgtaagattcttgtttaaaatgtaaaacaggcttctagatcctgccctcagaggttgtgattaagtaagtctagaatgaagtccagaaatctggatttttaacaagctctgcagtgaactatgattccgccactgcactccaacctggatgacaaagcaagaccctatctcaaaaaaaaaaaaaaaaaaaggggatggcgggcccaaatttggagggggaagggttttttggttttttttcttaaagggctttgggcattatttccatggggggttctttaaaggtttttaaccacgggtcccgggc

SEQ ID NO: 222179 - DNA, 361 bp, Homo sapiens
atagaagattttaatgtatgtcacagcatataaagttgtgatgggaagtgggaaaaaaaagaggaagagaggcaattatcagaaaataaaattttgtatcaattttgccagaagtgagatttgctttcatcctctttacatgatgtaggtttatgtttaagaaaacatatttaggctaaagttgaggacagaaagagggtatgtttgtatttaagttttaccttaaaaaagagataaagatggacaggtggggtggctcatgcctgtaatcccagcactttgggaggccaaggtgggcagatcacctgaggtcgggagttcgagaccagcctgaccaacatggagaaaccccatctctact

SEQ ID NO: 222180 - DNA, 591 bp, Homo sapiens
gagcttttgaaggttcagccctgtgctggcagttcctgccttgagtctgttcgtctgccccaggtctcttgggttcacttcccagaccgggcctggaagtatgctagagtgctcactcttgtacatttgtacactctgctggctcttcctgctgacatgggaagaccctttccccagtgttgagtcagagctttcagagcccttcccaacttcctgcctggcctggcttttatacatgcagcccagcctgttgcattggaaaacacaaaggacatggtctacctcactccagacctgagagaggaaaggaggcctccagacccatgtctagcctgccatttggatatgaccaggacagcatgtagagaaatttaaaagcagtagggtgctgtaaacttctaattttagtgtcaaacgtatgagataatcagtgttgtgatttcagatgaaggtgccatagtaagacaacatcatcttggtggacagatctgatcctaaaaaaacactttattttcttttttttgagatggagtctgggcaagagagtgagatgccatttcaaaaaaaaaataataataaaataaataaata

SEQ ID NO: 222181 - DNA, 160 bp, Homo sapiens
ccagcaacaggtggcacactccatgcaaccgacaccaaggtgcctctgctgctatcattctcttctgcggccatcattctctttccagaatgttcttctcctgccacttcatctggctgagtcctgctcatcctccaagcttcagctcataagccacctc

SEQ ID NO: 222182 - DNA, 239 bp, Homo sapiens
ttgtgggggaccatgctgtggaagcagcatcttggggaagggatgtctgggagttctcaggaagaaagtatcagggaacaaaaccaagaacagtgtttaccttagatttccaagttacaagtgtgttgtgttctaaaacttgatgaggtggtaattggcattccagatgcttttctcagatactaatctatgctagatgagtaaatggagtcttccctctaggacagaatatgcgagat

SEQ ID NO: 222183 - DNA, 508 bp, Homo sapiens
gtcctaatgtttttcaaaaatctttggagataatgttaactgcctatcaagagtcatttttctctgacataactatgtaaaagcactttgaaaagcataaggcactatacaagggtaagatagtatatttttaaaagtactgaactgtaacccaattccatatgtttttgtgatttctgtcatgtattttgaaacaaaaacatacatagctaccaagtatgtttattataaaattattcccatagttcataattcattcttagaatgaagagttattatactgaagtgtaatggctatttactccttacttatttataccctgtcttatttttaaaagttttaaggtactttagagattaatgtatcaagaaaaataggtgctcaaatgttttctgtcttgtccacagaggggcactgttggattatttagaaatcaaaaaacatgtaacatttatttctttgttcatggttagaaatatttgcttttaaagtatttctggtgctaaa

SEQ ID NO: 222184 - DNA, 430 bp, Homo sapiens
tgaagatactaaacaggaatgaaaggggctggtctcacatgtatcacagcctaccatttccagagacacagctctcaggttccaaagggactagttgacatcaattgcaagatggttttctagatcccacagcctttctcaacaacagtttacaagagaattagccatacaaaaaattatttgagtgactgttttttcaattttctgaagggttgtgcataactagtactattctaattgcacaggagagaaattaactcataacattaatgccttagggtaggtgttgacaaactaagaacatagctgcccacccgtttttgtaaaattttttttgtatttttatttgtttatttattttattttgagtggagtctcgctcttttgcccactgtactccagcctgggcaacacagcgagactctgtcta

SEQ ID NO: 222185 - DNA, 539 bp, Homo sapiens
agtattcattgattggataaacttagtattgttaagatgtctctactccccaagttgatgtacagattcaacacaattcctaaaaaaaaaatcccaattggcttctttgtacaaattgacaagctgctcctaaaatgtatacagaattgcaaggggcccagaatagccaaaactaacaaaattggaggactcatagttttcagtttcaaaacttgctgtaaaactacagtaaccaagatagtgtggtactggctatagctcattagaatcgaattaagggtctagaaataagccaggcatgatggcttatgcctgtatcccaaagtgctatgattacagacgtgagccaccgtgcctggcctggaattatctggactttcaaagaagatggcattattataagaagagaagattattgccgaaaagatggattgcctcactttccactttttatgtaacagtagttaaaaaacagctttttttttacttgaattacaaaaaagtttaaataaaacttgtatttatgatacgaaactcaa

SEQ ID NO: 222186 - DNA, 577 bp, Homo sapiens
  misc_feature (57)..(57): n is a, c, g, or t
tcattttcctgatattatgggatggactatacttttacaaatgaatttatcttgtanactcaccgtcatccagtttgtctcaaagccactcaatgttttgtatgttcatttaatctttggagtcagggaaacatagaaaccatgtcagcatgtttaccactttcactcactgtcacctttcttcagttgtcacatcagatttccccttaagaatagtagtcatctttggagaatgccagtttgtgtcatgttggttcttttagaaacaaaaaacaactaaatgcatccaagttaataatggaaaagtttatttactcgatacaatgtaatattataaatctagcaggtaatttagtcccaaagtgctatgattacagacgtgagccaccgtgcctggcctggaattatctggactttcaaagaagatggcattattataagaagagaagattattgccgaaaagatggattgcctcactttccactttttatgtaacagtagttaaaaaacagctttttttttacttgaattacaaaaaagtttaaataaaacttgtatttatgatacgaaactcaa

SEQ ID NO: 222187 - DNA, 380 bp, Homo sapiens
caagattgcaccattgtactccaggcctggccaacaagagcgaaactcccatctcaaaaaaaaaaagccgggtgtggtggcccacacctgtaatcccagcactttgggaggtcaggctggtctcgaactcctgaccttgtgatctgcccacctcagcctcccaaagtgctatgattacagacgtgagccaccgtgcctggcctggaattatctggactttcaaagaagatggcattattataagaagagaagattattgccgaaaagatggattgcctcactttccactttttatgtaacagtagttaaaaaacagctttttttttacttgaattacaaaaaagtttaaataaaacttgtatttatgatacgaaactcaa

SEQ ID NO: 222188 - DNA, 351 bp, Homo sapiens
cttaagagtgtttagccgggcaaggtggctcacacatgttatcccagcactttgggaggctgaggcgggtggatcacctgagtcaggctggtctcgaactcctgaccttgtgatctgcccacctcagcctcccaaagtgctatgattacagacgtgagccaccgtgcctggcctggaattatctggactttcaaagaagatggcattattataagaagagaagattattgccgaaaagatggattgcctcactttccactttttatgtaacagtagttaaaaaacagctttttttttacttgaattacaaaaaagtttaaataaaacttgtatttatgatacgaaactcaa

SEQ ID NO: 222189 - DNA, 454 bp, Homo sapiens
tgagacagagtctcactctgtcacccaggctggaatccagtggcactatctcagctcactgcaacctccgcctcccaggttcaagcaattctcctgcctcagcctcctgagtagctgggattacaggcacacgccaccacacgcagctaatttttgtatttttagtagagatggggtttcaccatgttgttcaggctggtctcgaactcctgaccttgtgatctgcccacctcagcctcccaaagtgctatgattacagacgtgagccaccgtgcctggcctggaattatctggactttcaaagaagatggcattattataagaagagaagattattgccgaaaagatggattgcctcactttccactttttatgtaacagtagttaaaaaacagctttttttttacttgaattacaaaaaagtttaaataaaacttgtatttatgatacgaaa

SEQ ID NO: 222190 - DNA, 457 bp, Homo sapiens
aaggctctgggtacaattcagttgtcattcataataaaagctcttaagaaggaacaggaaaaacactacctagatatagtaaagactgcactcaacatgtttttactaagcatccattatatgcccagtaatattccagcagttaacagacaaaacatttagagccatctcattttttaaaaaagaaggagttgaatgtttagtttgtcagatggtaataagcgctttgaaataagaaataaagcagggaataggaggttgccaagagctgggatgtaggaattgtcagggaaggactcattggtaaggtgatatttgagtagagaactgtaggagagcaagtcaacaaagcaggcaaaaattccagccatcatgtatcctacggtctcatggtgggggagggggcaatacaaaaaacatgataaaaacatatagcatattagaaggttatagtgga

SEQ ID NO: 222191 - DNA, 497 bp, Homo sapiens
gccgctgagaccctccgggtctcgtttccagctgactccaccagcctcaggcctgccagcctcacctccaaaccgtgtggccctttcagctgagcaggcaggtggcactcagacctccaggctcagctcacgcactggctcttccgggggcctgagtctccagcttgtcatcacatctttctagattctagatttgtccgcctgccatcctctcagcctggggtcaatagtgtattaactatgatttcttattttctgcattcctgatgactggcaatgtggcctcacagactggagagactgcccctcccagtgggtgacatccttagagattgcgaaaggctggagcgtatctttcacaggcaaacccaccaattccaggcccagacccccaacttcccctcatcaaactctcacacaccaaggcaatatttccctgccctaaatcatcccagaccagggaccaggcaactagagaccacctctgtagttcaaag

SEQ ID NO: 222192 - DNA, 459 bp, Homo sapiens
acagaccttcggagacaggccctgccccaacagccctgcaagggccaggacaccgaggggccgagccagggcgctgctctcagggaagccaccattcccggtttatcccagaccctgggggcccctggggaagccactggggctcaggtcctggcccctccccactcggaggcctcacctgggagggggctccagaggccctgcagggtcccaggcaggaaggcctggggtccaccatcaggccacccctaccaagtaaagggacacggtccactcggtgcattgctggttcagcccctggggagtagcaggtccatggccttgagcctccacagaccatcctcccggaggggaccacaccacatcatgtcacatcaagcatgtcacgtggtgccgcctcctgccataccacaccatcaaccccttcctgagcaagggcctgcacttccaagggtcctg

SEQ ID NO: 222193 - DNA, 506 bp, Homo sapiens
ggaatcctgctgggcagcatatctctggctgtccagatatgtgtttctactcagactggcactctcctgtagcatggggatgttagattaaggaaggtggttaaggggaaaggaatgaatgaactgtggtgtgaaattttctccaagggagcccatcagacagcagacagctgttgcacattgcattttccagaaactttgctcaggcatttgatctgatcttcatacaaatcccagtgggacaaatatttgtatcagtcatcccttatacacatggaaacctagacccagctaggttaagaaatttgctaggagtcacccctgctgcttggttggtgctactctaaaacactactgggatcttaggaatttcttttcagagttgcagtatagctaatggattgtatattgatctataccagtgctattcaatagaaatataatgtgaatcatatatgtaacttaagttttctagtacactcattaaaaaaggtaaaacgaaacag

SEQ ID NO: 222194 - DNA, 569 bp, Homo sapiens
tatctcttagttctggtaaatacatcgtccataaaagtcagaagactagagattatctgtcctatttgtttgcttttacacatccagaaataacaccccaattttattagtttggaccacatgaaatgtcaatttttatcagtcaaaaatggttgaatatcacaatttcatgtgattccaccctgacgtcagaaaactcttaataaatggaacagtaatcctcaactagaagtatacatcagaataaccttgggaacttttgaaaaaatactcaggccactacctactgaatctaatttctctaaagttaaagccctagcatgtctgtcccctcaaaattcccccaagtgattttgatatgattaagaactactgtctagccgagcacattggctcacgcctgtaatcccggcattttgggaggccgaggcgggcagatcacgaggtcaggagatcaagaccatcctggctaatacggtgaaaccctgtctctactaaaaaaaaaaaaatacaaaaaattagctgggcatggtggcgggtgcctgtagtcccagctactcgggaggctg

SEQ ID NO: 222195 - DNA, 401 bp, Homo sapiens
cgtgttttttgaaggctctgacataactgctttatcagaagaaacattttgacagtgtcttgttggagataaacatccctaattgacatgtgatgactacttcttattccattcatctaagagtcattgaaattttgttttctttgtttgtttagcttcaaggtctttggtagtcacatgttagggatgactgaaataattccaaaggagtgatgttggaatagtccctctaagggaaagaaatgcatttgaacgaatgtgatataaaaccacataatcaaatagaaatttcatgtacttacaaaaatttagtttgtaaaattaccttcatttctttgacattaaatgcttatattagcaataaagatgttgacactttctcataaaaaatttaaaaaaat

SEQ ID NO: 222196 - DNA, 438 bp, Homo sapiens
aatgttaattatatttacaattgtttaaaaatttatgtttgtattctgacaaggtggtatgtgtacataacaaaaagttcaggatgtactaaagagtgaaaaataagtgtcctttctgttcacctagatttaatctccccaggacaaccactgttaactgtgtgtaactattctgagccttgccctgtgttttttgttttgtttttgcttacagtatatcttggggacgaatccaaatcagtacatataattttgcttcatgatttttaataactgaattgatgggcttttatgttgtttttggtcttttattgctgcattgtgaagttggtcctgcttatctacttagaaaatttagattacaggtgtgagccacagtgctcggcctcttttgctttttttaaaaaacaaaaccctctggaaaaccaaaaaaaaaaa

SEQ ID NO: 222197 - DNA, 2653 bp, Homo sapiens
cacctgttccacagctaagtacagccctaggtttggtgtgtattctccatgcatttagagaatcacatgacacagactgctgctataatgtcattttcccattcttcctttactaataaaatttttgagttttacctggacgtctggctgctcagcttaagactacttctcagcctctcttatagttaattgtggccatatgactaagttttaaacttcccaattggccctttaaagaagcagggtatgcactctccttgacattcccctttcttgctggctgggaggccaatgggagcttcagtagtgacctggcatctcaagagatggaagtgatgtgttgaggaaggagaagttggcctgccagtcttgaactgctctcctttgacctgttatttaagagtaaaataaaatactgacttgcttaagctactgtcttttgaagtctattatagcaattagtttgctttaaatatgtaatttatattaatggccttataccatccttattttgcaactaacttttcatttaatattatatgcaagacatttctattcctgtaagtatagctctgcctgcacagaattgttggattaatgatgtagattttaaatgtcagtggatgtagcagaattgcttgcatcaattcaccctccataaaaggacccatttctccaaacccttgccaacagtaagtggtatcaatatcgataggttgttttgttttgttttaaccagtctcgtgattgaaagtaccttgttttcacttgaatttccctgattacgtacaaaatcaaacatttccatgtttattggccatttgtagatctctaccgtacattgcctattagtgttatgttggcctagttttcctgtgggttgtttatcttttaggattgctcccctaaacaaaaacaaaaaggcagttattccaatgatcaacaaatattcttttctccaccagtttaaaatgtcagctttcaactcatcacatgctaagttgtctatttctgtcctgtggatccaggtgttggttctaccaaccacactcctcacgctgtcatttggtgctttgcattgtgttttgccattcatgggcaagttccttttcctttctccccctcttcagtgtcttatacttgggtgttttctgttccagctgaatcaagaattagtttattaaattccagtaaaattgtggtgttcttttgactaggattgcatttgtttacacattaatttgagaataatagacctctttataattaatataatgtttctgattagtgttatgataggcctcattttattaaagtcttttatattcttggatgaaattttaataactttcttcataaatgtcttgcacatttcataataggcttattcctaggtgttttatagatttttagttttggttgtgagtcttttaacttacataaaaatatggagaattagcatattcacatatctattttgtgatgtttatcatacggaagttttaaaatatagtaaattcagtctttccatttttttttgtttatttaagaaccattccctagctagggtcatgaatacattcttatgaattattaatcccatatggatagctagtttccctagcacctttaaaaaatagtttattattttcctcctgatgtataaggccacctttaccaatttacatataatgtacggaaatgtttcttggctctgcattctgttaaattggtccatttatctaactttgcttagtaacccactgtttttatcattgtggtatcataattgattatcacaaatggtagaatgattgtcctcaaagtcttttctggtatatattgatataattgtatagcttttcttggtgtagtaaagtacacagttaaattttctaacattgaaatatcttttagattttcacttccagaatggcaatgtgaagggccctgtggacccactgtcctaggaattagctataactagtgaaaattgtaacaaaaaataaacaccttcctctcatacagagagacacaaacacttaatgccactggaaattgtcctaaaagcatgtagaataaagtaacgcttattcaagaaaatccaaatcttggtaagaacagtgagtcagacatttcagccacaacacactcactccctccctcccatttcagtgggtgcagccaagaaaacagagctccgtctccctcagctccctgtccagaggtatggtacctcacagggaggggcaagatgccagcatttcttatcccctccagcttcaagtggcaagagctaaattcatgaagttaaaaactataataaggaaaaaatgcactaaaggggttcaatagtagatttgaactggcagaagaaattgtcagccaactggcagatagaataagagagatatgctttccaaagaacagagagaaaaaaaatgaaaaatgagcaaaacctcagagaaatgtgaagcaccattatgtgcaccattaagtatgcatgtaatgggagtacaagaagagcagaagaaaaaggaaatatttaaagatacaatgactgaaaactctccaaattgattgaaaaacatctaggaagcttagtgaacttccagcatgataaatgcagagggattcacagacacatcatagt

SEQ ID NO: 222198 - DNA, 276 bp, Homo sapiens
cctcacttggttgggtttaaatgaccactccccgccctagctgtgcctttgagtgtgtggcaagggattgcagacgggagactgcttgtcaattcagggaagtcagcctctttctgccacttaattcgcccatcagtagagatccgactttcccacggttcactgtcacccccattgcacaggtggggaatccaaggcacagaggcgtctgggccagagtcccgggactatccactcattccggggttgtagggcagcatgtgtcaggagcttggg

SEQ ID NO: 222199 - DNA, 576 bp, Homo sapiens
gcacgagaaaaaaaaaaaaaaggaaaaattctgaaacaaccatgtaagaataaatgcatccaaatgaacgttgttcatctcagaagagtcacctttggaggtgatgcacttagttcaaactttgctgcctttgagcacaacattttagggaaataattttttggaagtgttgtcaaagtctgaaatacattcttgtagaatgtggaaaatctcatacttgaaattttttgataagcaagacaaaatgtcacgtttagtaatactgttttttgtttaagatgaggtttttctgctggacatgggggctcacacttgtagtcccagcagtttgggaggccagggcaggtagattgcttgagcccaggagctcgagacaaacctgggcaacatagtgataccctgcctctacaaaaaaaattgcaaaaattagctggatgtggtggttgatgcctgtagtcccaactactcaggaggctgaggtgggagaatcacttgagcccgggaggttgatgctgcagcaagctgagatcaagccactgcactccagcctggacaatggagagagaccctgtcgga

SEQ ID NO: 222200 - DNA, 301 bp, Homo sapiens
gctacaaagagatagcacctccaggattttctcaagtgttaatagttgttttgggatcagatttaaggaaatatttagttttctggtttattcactgtaagtctagtacagttggcctttgaacaacataggtttgaattttgagggtccagcaaaggatggtttgataattttagaaagatgtttgggttaaaaaatgtccagataacagaagaattaacttctcaccaagagctggcagagaagttccagatgccattgagaaaatcattgaggagaagaggtatctgcctgaacaggt

SEQ ID NO: 222201 - DNA, 315 bp, Homo sapiens
taaagctggagaatgcgctagaattggaaaatcattttgcaaacatagtaaaagatcagtgcaggtaagaaacatcaatgcatgctaatttaacgggacactttcataggcaagagatttgcatggtctgaaagtctacatatactggttataagttccaggtagggggatatacagagaagttggacaccttgaccaagtgatcaaaatttaccactatcaatgagggggcagatggatatcaagtcattatgggcaaaaacacataaactgattctaaatatgaggaaatatcaaactgagttgttttctgtt

SEQ ID NO: 222202 - DNA, 479 bp, Homo sapiens
aactttcctagttattcctaagactgtgtttgacctaaagagcattttgatctagaagacaccttaaattggagggtctagtgaaaacctgcatgctgtgaagcagagagctgagtctctgagagattcagtgatatcaccaatgccctggactggttggtggcacagacatgcttaccactaactccagcctcccaagaaccacaatccatagttccttaactccactccatgctgactcttggacttaaactcttaatttcttttggtgttattatttcttcccttctctccttttcatgccttaaaggtggtgccacaatcatctgaactgacatatattagcccactaactatggccttgtagtttttgccaaataaagcattagttatgtaactctactctgttttctgggagtatagagttttaaacagaaaattttaaagaaattggaaatttctttaagaaaaaaaaagag

SEQ ID NO: 222203 - DNA, 389 bp, Homo sapiens
cacaggggaaaaggtagacacaagttgacactggagaagtaggaggggatagagcaagaagaacttgacagaccgaggagtctggattgcttccaggacaataatctaaactgcagagtggtatgaagcaagaaagggatatccggttgtaactgttcatattaagaggggtgcacaggggtatatgagctttctcttccaaggagcctttgagtcctcatctctgctgttacagtacagacccagaatttcttatgtaggagagtaaatacatttatgaaataataatggaattcattttatgctagggccatatttctaactaccttccaatgtagcaggagatagcaagacttaaggatatcttagtctgactcttttaaaaaaga

SEQ ID NO: 222204 - DNA, 558 bp, Homo sapiens
aatttcccaatttgttctgcctcgagtctaagacaccatgtcatggatttgaacaatgttgatggtggagactcagacaaatggggctggagaaacctaacctggctcatgaactgtccaaacgatgagacaagttgccctgacagggcagttgtttggaattcaaggtacattaggagaaaaggagggctagataaggaaagcaatataaataagctaatgaaaagggataaatataactaaaaataaataaaaactctgggcttcacattttccacctttcgtcttttagtcatctgctaatgaaggagcttaaggacaagaggttttatgaagttgaagcacaactttaggttgctcaatgtaacacaatccctagcttctatctttatcaatgaagaaagaataagaaaataagaataaccaataccctgtattcccttagaataaaatcacaagaaacacagtcttttgttttccagaaaagattattcttgttagagccatgaaaaatgaaggaaaaaaacatcaaatacaaccacatgttccaacctttaa

SEQ ID NO: 222205 - DNA, 360 bp, Homo sapiens
gtttttctgtattttgctaaaaagttactccaaagatgataccttctatttggacctttcccaccctttatatacctatctaggaggtagtaacccaaccattaatctctccatgcaaaatacatgtattgactaaaaattatgtgctaggtactgtaatgtttcctacccattattttacttaattctcacaattactctgtgaggtattcacaggtgaagaaagagaaagtttaagtagcatgcctagtgagtggtaaaacttggattttagtatgaatctgtctgacttcccaacctgcactgtttttttttttgttttgttttgttttttttgagacagtcaccctctgttgccca

SEQ ID NO: 222206 - DNA, 723 bp, Homo sapiens
aaagactttggattgtacttatttttttccctaaaaattccgaatggctaaactatttgaaattagactattcttaattttcaatggctggttattgtttttgcttgattctagtatattatcatcattcttatctacctttttatttttcttgaaaaagcctttgttgaccaatcacatttttatgatttctttcccatattattttttgagttaaacttaaaaacaatccaagcaatatcagtgttaaactgtcctctctcatgggccaactggatgaagcaggaagtctccaggtaactttccaatgttgatatgaggaatgagtcactaaagggaaatctctggatttcatccttttcggagaatctagagtcactaactcctgcctggttcttatttctaaattaaagtttaaaaatacaccacaattgactgagtagccagaatgtctcagacactatgatgagtgctatggtagtcactttttagtcattgtgggcaattcaaagattaccaaaacatattgtttgttttccattgacttatcatataccaggaaaaataaatttataccaaataactaagaaaacctgtaagactacggattggctcaataaacactcacttcaacacattctcccttggctttccatgctatacaggctacaaggcaaatacagcactccagttcctagccacttttgtaggtagaggtggcca

SEQ ID NO: 222207 - DNA, 631 bp, Homo sapiens
atctttctcttaaaggacacagctgtttgctcatgctcttcagtgcttgagaacagttatgtcatatattttgttccattttgtagattttatttgccagtagagaaagtctatataagttgttctgtcatgcccatatctacttttgcattgcttccaaaatgatctgaatgaaacaaaaatctatgatatcattgctcactttaacacttactattgtcatccattgcctatataatgacattcaaactcctaaatatgagactcaagatcccttaatttataacttttctggaatcactttccatactcttttcctgtagtctctgcctgttcaaccctaatggttttcaatgtaatgtgcatgaggatcatatagtaacatacgtttaaaatgaatatttccctttctactttactctcatttaaattggtacatctagggtattctaggaatctaaatttttaacaaacaacctaggaattttgatgtaaacaatctaggtctacatattgtggattactgttcaagcgtggcaactcaaattatggtcacatgatcagtagcatccaccccaactaaaagatttcagaaatgctgctctcatttcctttccagccctattcaacc

SEQ ID NO: 222208 - DNA, 553 bp, Homo sapiens
ggactcagttcaccctgcctgggtgaatattatttttccctcaagatcacaggcctctgagggcagctgctgtgacttcgcatggctttgagctcagaatacatgtgggcacgtgctcctcagtctacagggaaatcacaactatatcatactgcaagtccaaaagaaccagcccaagatttctgcaagggtgccaccaaagtcaatgaggattagctatttacatgcccagtgacaagggacacccttgtttattcttcacgtgactggcctttggctaatttcatccagttacttaacttgagttcttgagtgaactctgctgagcctttccctctgttcctgctgcagtgcgcaataaacgtttggtctttgcccctccaaagctcttcgggaaggtactgtgccatccttgtgtgtatctgagtattttccaacatccaaaacagtctgtcttgcagcttgggttatataatgtatttgaaaacttacttcttgtttctgcttcccaaaaagttacccccaaataaatactgcctaacagttactggag

SEQ ID NO: 222209 - DNA, 445 bp, Homo sapiens
ctcatcgagagcagaaccccatagcctcagggattgcctggaggtgtgtttttcaatgccctcctcctttgaaagagcagtggcctgccccacttctaaaagccctggggctccggtaagccgacagggctttacaggacacctgcaaagagaaacaggagcaaacccgaggcagagaccatgtgactacgcgtggccctggcctatcccacagcagttggtgttaacgtgtgtcaccggaggcatacggggcgacggcgaaacaaagggtgttgtccaggcgtgtgccggtggaaggggaaaacaggtgacatttccatcaatgccaaggaaaatcgaaaacacctgggacccgaggggtgtggggggggcctgtgactgacccaagccacgttttcgaatgcctaccggaggagcaaagaggtttctgcaaaattcgccccaa

SEQ ID NO: 222210 - DNA, 450 bp, Homo sapiens
gcctgcttttggtgtcagatttaaaacatcacgtgcctaattcaaggtcatgaagattttcacctatgtttacttctaagagactaatagtttaagctcattaatttagatctttgacctactttgaatttttgtatatggtataaggtaatgagctagcttcattcttttgcctgtgaccttccagttttcccaggaccatttgtcgaagagactgtcatttccactctgttggctttgacatccttgttgaaaatcaattgactggccgggcacggtggctcatgccttattcatttattacacttttcagctctagaacttttctttggctcttttcaataatttctatctctttattgatattattttatttatacattgttttcctgatttccttaagttatttgttcatggtctcctttagttcagtgaacattttgaagatgg

SEQ ID NO: 222211 - DNA, 248 bp, Homo sapiens
aattttagaaccttttccagaaaaattttgaagaaagcatgtccgatcattctaaacaaatgccacacttgtggagtgggtttcttttctacaatccatattttgtaacactaagtattttccttcttcgtcccgcacctctatgtattagcactatcagatagagttcattccatgcctgtgatattgtaagcagaataaatgtctaaagtaggtgtaaatagtaaattctatggcttacagtttta

SEQ ID NO: 222212 - DNA, 449 bp, Homo sapiens
gctatttaacatttttactcatttttcctattcaggtttttcacagagctgtaatcacactttgtatagatagttttcacttaaggttgtgtcttaagcattgttacccatcatggcaaagtagttaatgacatgtgcctgtggggtcagactaccaatgttcaaattccagtgtttccaccctgtgtgaaccacacacattattcattccctctctgccatttctccatctgtatttggagataagaatagtcttaccttacaagattattatgagaattaagtgaattaatagatgaaaagattaaaatagtgcctgatatatagtaagtattcaaaaatgttccataatagtaattttattacatattatttaaaactttccgaacatagtttctaattgctgcatcttatgtatttctcaattttagatactttaattttttcca

SEQ ID NO: 222213 - DNA, 799 bp, Homo sapiens
gaaacaaaatggacatttgggctaacaatgaaaggaaggaaagaaggaaggaaagaaggaaggaaggaagggccaggcacggtggctcatgcctgtaatcccagcactttgggaggccgaggcagacggattgcctgaggtcaggagttcgagacccgcctgaccaacatggtgaaaccctgtctctactaaaaatacaaaaattagcagggcgtggtggcgtgtgccagtattcccagctacccaggaggctgaggcaggagaattgcttgaagcgggaggcagaggttgcagtgagccgagattgcatcactgcactccagcctgggcgacagagcaagactccatcacaaaaaaaaaaaaaagaaaaaaagagaaaaaaaagaaaagaagaaatggctaaaacaccacaaccaagaagaatgacaatgaattgctaattagggtcccttccaaatattggtaaggatgggatgtatctgttaacttggttaagattctatagcttgagtttggttacttcaggaaagcatggaatgaatcccagctttggttatgaaatctgagatctgtgaaattccagcactttatccagcatagtgaaagcaacattcttccccaaggaaaccaaagcccatccttgatccccacaggctcaaccatgccctaattagagtgtctgttaatcattttcccttgtttcccaggctggtgggcggagagacccacatttgggatggtgggggaaagacaccagtttctccatgtgtctgttcattatggcgctctgtggtttgag

SEQ ID NO: 222214 - DNA, 300 bp, Homo sapiens
cttcagaggagagatcccgacagcaaggagctgacacaattgtgcctggaaatgacagggagccgggggatgtgtattcacaagatgtgcaggggggttctccctatgacagctgggaattgtgcagctcatggactgaatttgttcaacaatgtacctgttctaactggtgccaccaacatgccccaatactgctttcttagaaattgatttcaaggagcaggtgttttattattgcgcttgtcattagtattattttattttcgatgtcattacaacaaatgttgaaaatcaaactga

SEQ ID NO: 222215 - DNA, 358 bp, Homo sapiens
cagaatgaagctgcatttccccctctttaatttatccctaaagttaagtgtctgacttaatgaacaatcacaaatctgtgacttctgagtactgtccctgtgggtaataataccatatgactcgattttcagatactacaaataacttagaaaaattcagtcagactgaatagcatccttaaacactgcatttacaatgcctagaaattagtaagtagtctatcatgtgcttttaatagtcaaaagaaaaatgacaaagaaatatcaattggaaagttttgaaatgcccacagtttgacagcttgactgaaggtttggtttcaaccaaaatgcttaacaactttttgacctttccctc

SEQ ID NO: 222216 - DNA, 411 bp, Homo sapiens
tacattagtggctgcccgggatccaagataaaccattttcccatgcctggtgagagactgtagcacagacgcttgatgttttattgccatgttattagaaccagcctcctaatttgcactggaaaatttgagagggtaaacatatgggcatatgtcttcatgtgtgccaaactcacactgtgggcgcgcatgcggtacacacacacgttccttttgttacctctttgaactctgaatgagattttgtgagtgtgcacctggggtagaccccttagtattaggtacaaaccccacagcagcccgcctgggttttctccctcacctgagcatctgagcccagggagaataagcaggtaagtgccagccccttcctgccgaggcgtgcaaactcgcctgcaacccctactccat

SEQ ID NO: 222217 - DNA, 388 bp, Homo sapiens
ttaatgaccttttgcccatctgactgatgactcaatgaagagaaagggtctttccaggggctttgtgaggaatgcagcaagccctatctgggccatgcccagggccaacagggcaagcacagatctaggaggcaaattcagggctcttgcccaatctcagcctccctgaccacagaaggaggaaatgagacccttcaatagccggagttcctttggagccccttcagcccagtgtcagtgtcgggttaggggcatctccaacgtcaagattctctagaagaagtctggactaggggccagggaagtggggtttctgtagggcaggcccagctctgtaactcactgaatgacctggaggggagtcatattgtcaacagaacggaccagg

SEQ ID NO: 222218 - DNA, 358 bp, Homo sapiens
ggagtccaactgagcctcatctgccctttgaacacacactctttctcctctgggagtctctgaagtgggtgatatcctctgcttataatacgcttccccttaaacctctactctcttcctagctagcttcgactctgtcacttgtccgctttggcatcacctcctcatggaagacttctttgactccccagattctcaggagcatggcaggtgaggtgctcctcccatgaatggatggagattagggagtgtgtgttattcatgcttaattcaccagtgcttagctgagtacctggcataaaatactgtggtggccaaagtaataacccccacccccaccaattgctcatgtcctatg

SEQ ID NO: 222219 - DNA, 518 bp, Homo sapiens
gacactttccagaagagcggaactaccaattcacctatcggggacattcattgtattcctttaaggcagtcgaagtttgggttctagaccatgttctacattctattagtaaactagctaggtttgggagtctatttgcaggactagcataaatttcgtttcattagatccaggcttattcgtccagcctacagccaattctttcaactaactcattagatagactgtgcagttttgagttgtaaaagttgtcagaattagaatggagtcaccagtgttaagaaagaaccctgacaaatagagctggggaaggctatgaagaatgggttctcacgcttgtatgctggataactatcccaaaagactgcaaagaccacagccttgcacaaaagccatcacaaccttacacataaaaaaaaatacttctacaaggacatctgcccaacaattgcctgtccaacctcagactagcatcacacttattgttgatctttgtagccaaggataattatctcaaa

SEQ ID NO: 222220 - DNA, 341 bp, Homo sapiens
cttagcagtcaacccaatcaacccagtcattgcttgttggtggtgagtcttaagaggcttaagttgtaggcctaagaccactggcaccctacaggcagagttgggatgaggacccaggtgcattgtaaaaggttccctaaaccgtttctctttctgtgaataaatgaccttggtttaatgtttagctctgactcatctgaaatctaaagtgaaatgtcaatattaacagccaccatatagggtatggcaaagagattcctgacacgtgaactgcacctggtttgggaaggtgtgatgcattcttaaaacagcatatccttcgttgattgggttgacgtcag

SEQ ID NO: 222221 - DNA, 332 bp, Homo sapiens
aagaaaagaggaaaatttatagcactaatgtccacatcaaaaagctagaaagggccagtcatggtggctcatgcctgtaattccagcactttgggaggctggggtaggcagatcacttgagaccaggtgttcaggaccagctctgggtgacagagtgaaactctcccacaagaaaaaaaaaaaaattagaaagatctgaagttaacagcctaacatcttgattaaaagaacaagaaaaccaagtgaaaacaaacctgaaagctagcagaaaacaagaaatagccaagatcagagtagagctgaaggagatagagacactgagaactcttcca

SEQ ID NO: 222222 - DNA, 310 bp, Homo sapiens
tgcccgtctacccatatgcaagaagcagcccctttgccgaaaccgccccctccctggctggccagtaaagaaacagtccaaagccacacggtcatctgctgcgtggctaccagggagcgtcgtcctggctgtgaagcttccagacagtcactgtctgctgtgtgtggttagaaggacttggacatccgtgttgtgtgcgcacaagactgtcctcgggggatgggccagagggcccaggtttgcctcggtgccataagtatcatttccatttcaggaaggaggttctgtggacccgttgagtgtcaccacc

SEQ ID NO: 222223 - DNA, 507 bp, Homo sapiens
atgtccagactgtttctttagatgagtgtaatttccaatgtgaaaccccacaattcggcttcaagaggtacaggacagtttttgaattccacagaaaaaattttgcattgcaacaaacttgaccatcctatttgtggtagtagaaatgtaaattcattcccctcagagatacctgcaaaaatgaaatgtgaaatattctgcttgcattttaaagactggttattgcattctagaatagatggaaaagacattagtgagggccaatatagaaatatgagttttcccaaaagacttttatgtatatatatgacatggcaggaaaattgggtcactagtggtttttacttcttcgttcatttggcaaacatatgaatagactgatgtgtgccaaacactgttccgagttctgggaactgaggaaagaaacaagctatctgttttcatggagctcgtattttacttggaggatggagaggctgacaataaacttgtacaaataaatacaaa

SEQ ID NO: 222224 - DNA, 455 bp, Homo sapiens
agagtataaaagcaaggactatttcaaattttctgacttgggtaactgctgtattgtggtgggacatcattaggattgcccacaaatagctcctaaaaggacatgaatagaaaactcatagggcttggtagcagaagtatagatcaagaaggattgctcaagtgctggcacagtaagaatgtcaaggcctcggccggaagcggtggctcaagcctgtaatcccagcactttgggaggccgaggcaggcggatcacgaggtcaggagatcgagaccatcctggctaacacagtgaaaccccgtctctactaaaaatacaacaaaaaaattagccgggcgtggtggcgggcacctgtagtcccagctactcaggaggctgaggcaggagaatggcatgaacccgggaggcagagcttgcagtgagccgagatcatgccactgcactccagtctgggc

SEQ ID NO: 222225 - DNA, 256 bp, Homo sapiens
tcttgtgacctcagactggtcacgtcctctcctgcgccctgggctttctcatctataaatcaggaaattggttcaagtgatgcccaggtctccttgcagctctgacacctccgggggatgggcagaggatgggcaggaccaggacggaaaggcaagcaccaggacccaaggaggtgaggtgtcacgggcatcagaggtcacgggcatcagaggtcacagggaggagagcaggtccacaggccagtgtcgggagagc

SEQ ID NO: 222226 - DNA, 595 bp, Homo sapiens
ggaggctgaggcacgagaatcgctggaactcaggaggcggaggttgcagtgagctaagatcacaccactgcactccagcctgggcaacagagtgagactctgtgtcaaaaataaaataaaataaaataaaatatatgggagggcctggcatggtggctcagcactttggggagcagggggcagggtagaaggaggatcatttgagcccaggagttcaaaaccagcctgggtaatacagtgagaccccatctctacaaaaaataaataaataacaataaagtataagggaacatgtgcatagattatttcatatggccgggcgtgatggctcacgcctataatcccagcactttgggaggctgaggtgggcggatcacctgaggtcaggagttcaagaccagcctagtcaacatggtgaaacccgtttctactaaaaataaaaaaattagtcagggtgtggtggctcacacctgtaatcccagcactttaggaggccaagatgggtggatcacctgaggtcaggagtttaagaccagcctggccaacacagtgaaaacccatctctactaaagtataaaaatcagccgtgcatggt

SEQ ID NO: 222227 - DNA, 429 bp, Homo sapiens
ttgaaactttcttttgaatcttacagttaccattgtgtgtttcctataggcccttctccagattctccaagttgttcccaagaaccttttcactggggcccagaattgactcacagtatccatcccaattcccctttctcttaaaaaggagaagctggaaaactcaagtactaaatttcccagcctctcttgcacagatagtgaccatgtgaaccagttctggcaaggagctgcaggcagaggtccccggggagggctttgggtctctgaccctggagatgtagcagccatctctccaagcatgctaagactggcagagcagcattgtaggactgatttcttaaggggatctttgatcagctacacagccctgaaatgtctatctctgcacttgtcatgtgaaaaaataaaaaaataaaataacctgca

SEQ ID NO: 222228 - DNA, 278 bp, Homo sapiens
atggcatcatttattatattcgcatgttccagttataacttttttcaacagaatccgatcaacactcacattttgcacctggcttttgtgtctctttagtctcttttaatctaaaacagtctttttttcattacattgatcttttcgcacaattcaggagtttcttgtagaatgtcccctatgcgttccctcctggtgtcatttactctttcctttattaccgtatttcctgttacttgaaagataaggctggagcctgattaaacatttttggcctg

SEQ ID NO: 222229 - DNA, 363 bp, Homo sapiens
gacacggctaccatgccatccacagtgttgccatccacagtgttgccatcactcctgcccacagcaggagctggctggagcatgaggtggattctgtgctggagcctcaccctctgcctgatggcgcagacggccttgggtgccttgcacaccaagaggcctcaagtggtcaccaaatatggaaccctgcaaggaaaacagatgcatgtggggaagacacccatccaagtctttttaggagtccccttctccagacctcctctaggtatcctcaggtttgcacctccagaacccccggagccctggaaaggaatcagagatgctaccacctacccgcctgggtaagagtcagaggcctgtcca

SEQ ID NO: 222230 - DNA, 293 bp, Homo sapiens
tactggtaacgcagcaggcactctgaagaaaaggaaggcaagactatttctatagtgataagacacagacacatttgtaaccttcagttctcaagttaggtcttaagcaaactaatctctctaatgtctattatacaaatatacttccttaaaattctaaagaaacaccacatacccaacattagctgctttaaagacttaagtcaaagtagtcattttcttgctagtacaaacatattttgtaattctaaaaaggcaactaagttatttgaaagacagagggtctagatttg

SEQ ID NO: 222231 - DNA, 378 bp, Homo sapiens
gtatgagttatttaaaataaagatggcagaagtgaacagaaaaatgaccatataacgctgtttttattaagccttgctccttttcagcttgcctcttataactgatatgtaggttaaaaagagagctatagactttgggaggccgaggagggtagatcacttgaggccaggagtttgagactagcctggccaacatggtgaaaccttgtctctactaaacatacaaaaattagctgggcctggtggtatgcacctgtaatcccagctactcaggaagctaaggcacgagaatcacttgaacccagcaagcagaggttgcagtgagccaagattgtgccactgcactccagcgtgggtgacagggagagacttcatctc

SEQ ID NO: 222232 - DNA, 953 bp, Homo sapiens
tttttattggttgaattttatttttattttttgtattataaaggcttaacatttttcttacagtgcagaatttccttcagagtttagtgcatgatttcttgcctgagaagggtcatgcttccccactcatagtgagttttcgtatctcttcctaagaaaaatgaaagtcaagcctcaggagggatggtcgagattaaaaattgccaaggtgagagtgtcaattagtgtgctctttctggaaagccatttggcagtatctcattagagcctggaaacgcagtttgcacttttgacattgtaattccatttctagcaatcagtgggtcctaaggaagtaatccacactcggagcatcgtgcaccacagtagtgagggcagcattgcgtggaggtggaggattaggcacatcgtcagtgtccagcagaagacaaaggagtgagttaacaggacggtccatatgctggaattgcatgtcactatccatcaaaaattgtatatgtgacagatgtaataacatgttgcagcagctacaacagcagaaggcagtattacgtacatggatcgtctcaacgttggctgaaaacaggccctcggaagatgagaattagaaggaactgtgtcccacctgcggtcatatttccccaaggacattttccccacttctctcctttcccattggttccagttttcctaggatgaacgtgtattgatttcatatttaacaaattaaagcaaaagttaaacttccagtgtttttgtaacctacagaatgaatagtcaatgtttaaagaataggacaaatttacagaaaaggatggaatgcaatttaagatgtaaaaaaatgggcttcttctccctcatatacacaaagtgttcaaaacactctgttatactttatattttgaacataaggaaataaagtaaaataattttaaagagtctttaaagtagaa

SEQ ID NO: 222233 - DNA, 660 bp, Homo sapiens
ggggagctggagaaaaggactgaagatcatgagggacatcttttgacccaaacaagttgctttaggtcagtgattctcccaacgtggttgggaccagcagtattggcatccgcatcagctgggaacttgctagaaatgtaagctctcaggcctaccccagacctactgaatcagctctgggtgtggcatcaggcaaacttgtttttttgtttgtttgtttttgagacagtctcactctgttgcccaggccaaagtgcaatggcatgaacacagctcactgcagcctcgaccttctgggctcaggtgatcctcccacctcagcctccagagcagctgtaaccataggcacacgccaccaagtgtgggtaatcttttggtatttttagtagagatggggttttgccatgttgcccaggctggtctcgaactcctaggttcaagtgatctacccacctcagcttcccaaagtgttgggattacaggtgtgagccactgcacccagcccaaacttgttttaacaagccttctagtggttcttatccactttcaagtttgagaaccactgctcttggctctccctctcggactgaaggggaatgtcaagagaaggaagaattatgagggatgcagcaagcagcctcatccaaagaaaaaaagaaa

SEQ ID NO: 222234 - DNA, 1271 bp, Homo sapiens
ctcagaaagtgctgggattacaggtgtgagtcaccacacccagccatatcatgctgttttaaaatattgaaatactagtattattattggtataaaacagttatttcaatttttaaaacaaaacatttttaaattaaaaacttctaaaacctatatttttaatgtctttaagtatatgtagagcgttacatgcttcattaatagtttaatgctgacagatgcacttttgagcaactatgaaataagtgcaaaagacaatggcaacagtatctcactcttaagacttttaggatgtacactgatatttttaatattatgtgaaaaagacactaaaatgctggtattagcatttttgctgcagtattgtaattactgtcaattgtaagtggcaaagccagtgtccaaatttaggtactggaaacggcaaaggcctgtggcctccaagccagtggtacccaaagtagtccatctgccgattgttcttgttctgtgatgagataaaggtcagtcattgcacagcttccttgatcaaaaaagtctcgcatgaaaacgtcaaccgaatctaacagtatgctgaggagtgcaaattgacaacaatgtctgtgaactagcactggtccacagatcacattttgagtagcactgctctaagcagcagtgcctcttggatacttagtttaattaaaacaaaacttgcctatgctaacactttattgccaaaataaaggaaataattgtggtctgcataatttatgaatgacatccctttacctttttgatgccacctaattggtacttagtgcaatgctaatcacattatacaagtttaatatatgtttgtttggtcaggactaaattgtaacacaagtattttatattagtggtgtgaacactttgaaagtctaatgctatctgtacgtaattttagttaggtgagaaggaatttaagataaatgttaaaatagtaattataatggttggtcactctcagggaagatgttatcagctctgatcatcctaactcagggattaacgatttaggctatagctgtagctataaaaacaagagcacagtagaatgctgtgcagccacctggaacaaatctatatgaaaagacctctgagataagtaggaaaaaagggagacagtagtctatatagaatacatatgcagctgtttgcatgcatatgcatacatttttttctggaagaatatttaagaaattgataattttgtgttgggaagcaggacaggtagattggggtatatg

SEQ ID NO: 222235 - DNA, 354 bp, Homo sapiens
ctagtgatcaagctagtggccaatgatttaatctctcgcaccttcacagtggaacctacataaaaacccctaaatgttgggatttagggaacctcccggttggtgaacacatggaggcgctcgcaaggtggggcgcctggagagggcatggaggctccacccaccccaccccgcaatcgcctgccctgtgcatgtcttcatttggctgttcctgcattgtatttcttatcctacactcataacagaaagtggttctgggagctgatatagcaaatcatcgaacctgagaaggggagttgtgggaactcccaatttatattcggttggtgagaagtgtaggaggctcggacgtgt

SEQ ID NO: 222236 - DNA, 487 bp, Homo sapiens
gatgatacagcttggtctaatgtggttctaaggaggctctgccggcgagtcttaggggttccggcgggcagccgcgtgaacctggagcttggggtctgcagtgctgggaggccgaggcctggcatgttggggacaggtcttgggagctgactgggggcctggcgtggtggcggcagcccgcagtccctgcctggcccttgtctgggaggccgcggttctctgcggcctctcgccggtgtcgcccttggccactgggctgcgaggaagccggcgaggagtgggtgtgcgccccgcccggctctaccggcgagggatgcagtggccgccagcgtggccgtgcggctgggtcactcccttcccgcttccagggcctttttctgcctccttttcaggacgtgacccgcacattatgagggacccgtaggggctcttgacacagaggggtcaccctatgtgtgaacaggttacgaggttgggggcttggctt

SEQ ID NO: 222237 - DNA, 375 bp, Homo sapiens
ggagggaagagtgaaagtgaaaaatggagaggaaacactgctacccgcccaatgcctggagccaaatgcaagcctgggccaggcttgggggaggaatcaagaggaagcttaaacttaaaatgaaatagaaagtttagactcctacatgggattggacattttaaatgctgaacagagcctatttttatagctagaagttacaggacacatttttggtcaactgagaatgatccaaaaatcatgtgaattttgtgatccagaaagtcacagaacatgccctagattttatcccaggggcagggaggagtgacctgcagagcaagtttgaattggtaaatagaaaacaagaataaaatagtttgctgtttacattca

SEQ ID NO: 222238 - DNA, 417 bp, Homo sapiens
gtatcaatgggagccacagattctgcccaactagcatcccgtacccaaaactgttttttgctttttgtttgttgctgttattttaatgaaacgccaaggaaataggagggctgtttagccatgaatggtaaagaggcaattctgttgctcaccagttgtttccagttctctctgcttccaggcacatagtagggctgtgcttcctggatcccttgtgactggctgtggccacatggctggttgtggccaacgagtcataagcagaagtgatgtgagcacatccaggctgagccccccagagctctctttccctctggcacagcaactggcaacaaccaagtgaagtgaccatgagggaccaagctccccactgaccggcaatggacacacagcaggaggaggaaatactgtgtcatg

SEQ ID NO: 222239 - DNA, 558 bp, Homo sapiens
cactgatcagccagtcttgagaaggacagaatccagtcaaaaccagagaatgacgtcgcaggaactaatgggacagcctcttggggccgccaccattgggatgaatcagcttcaactattttcagttcttgtgtcactccacttcaagcctcaaattccagcgagagtctggctgacatcatttggatcccctgtctagcccttggcctggggataggggatgaaggggatggggctctgtgatggacagttccaccaagattgcattccagaaagaaacacagaagggcactaaccaaaaggtttcatgggtgctgggcagacagatacaagatgtctgctacagtggctttaacacatccgtgatcggaggagcaagatttatcctattggaaacattcaaaaagatgcactatagaggcaattcctaaagaaacagtccaaaatgctcagagcactgtttctcaaaaggatcactttttttagttaacaaaggatcagtgtgaagttgtatcaaaaggatcacttttaatttaaaaaataaaaatgtttaaaaga

SEQ ID NO: 222240 - DNA, 964 bp, Homo sapiens
ggaaaatgcagctgcatccccgaggggactgacgggggcctccaccctcctcggtggcaacccaggtggtccccagtttcctagccagcagctgtggccaacctctgcgcgaagcaacgggccacgctgcaggaccacgaagccaggcagccgcgtcgactcctgcagggtgttctctccggagtgactcccgagctttcccgcttcccaggccccttagatatcgcctgcgcttcaaattcggagattgacggcgtctccggaatgcgtcgcagtcctgcgagttctccgccagggggagagccgcgcgggcttgggcctgagcgaagacagccgggctgcagccctccaggggaactgccgagtcccgccggggacagcggagagcctgcggattgtgaagccgaggaaggctcggcttggttttcctacccgctcctcagttctggttgatcggaacttaagagtgtctttgagcctagcacaggccatccgccctagatatggctcctaactcgagaggccaccctttgcggcagggaccaggtggcaagtgctgtgcattaatgaaaagctgtgggctagacaggccccgggaggcctgggctctggcgccagccccacctgtaattggcaatgcaatagctaaatcattccccctcttagaaacacagatttttccataataatgttataatgcacaaagccttgtagtttgcaaagccctctccgcacatgtattctccagtaaaatgaagataagcgctggttatccagatcccttgggaaatggatcttttaccacaccgtgtttccatattattttaagcacgtctctagagaagtctgggggtgtagcctaaagcattctgaaagtcttgttttagctttaaaattcatatgaattttgcattgtactttgtaatttttttttgctttaataaaacaatagctaccttctcaa

SEQ ID NO: 222241 - DNA, 439 bp, Homo sapiens
cctgtgtcttctcataagagcactaatctcattcagaaaggatcgactcttatgctgtcatctaatcctaattacttttcagagatgtcaacttctaatactatattgggggtaggttattaatatgtgatttttttggagtgatgcaaatattcatgccgtaacacccccccaaccatactctatagagcatcttggctattcttagtcattgtgttatatttcagtttttagaagtagtttttccttaattttagtgaaaaaaacaaactgccttgtaaatttcatggactaaaatataactgtagtcatatttcagaaacgttacatcatagtgctatttaatctccttttaaggacacatgacattttttcatttatttcattttatattgatgtttttcagtgtagactttttgcataataatcattttatatc

SEQ ID NO: 222242 - DNA, 599 bp, Homo sapiens
agagagagattagttttctaaacccatcgcaaagtgaagggatagctgattgtcatcccatttttgagacctcagtcatccttctgcgtgcatcaccacaactaagaggaaggaaagagcactggatgtggagtgaggagacatggattctgtcactaccctctctgcagaacccaatagtatgtcattgaaacaaaacaatacaaaaccctgtctacaaaagaagactcataagtcaacaataactcgggtttcataaaggaagaaagtcttagaggaggaaaatcaacccattcaaatacaggagcatctgcttaacacaagacggaacgaaccccgctgccagaccggtggtgtgggcaggcgaatgtgtgcgtgtgcataggaacaagcctatatatggatgagacattagtggcaacgagaggagagccaccacgattgacaaagccacaactattacgatttgaaatatcccccgcaggcactgacttttggtgccagaatctccccggatttattttcaggcaagtgactcacaacctggtctccataagtaattccattaaaatgagtcgccggttccactaacccgactt

SEQ ID NO: 222243 - DNA, 696 bp, Homo sapiens
tccaacatgctccaccacttcttccctagagtagggcctgtgctgtgcctggccgcccagaaacgaaaagctacaacctggccctttgggcccaagctgctagggagtacatcagagttacagatcttggctctgtggtaaacctacctccaattctaccacatggagcaaatctatagctcaaaacccaggtgccacaataggttcatcagatgctgagcctagaaccccagacccacagctgccctgagcacctgcacctggaacccagagccactgtacctgcctataggccatatcatacttgacagccgagaagtatcttcatggctaagtaacttcattgtggggcaaatgaaaataggaggactccaaaaaagcccttgccattaacaacctatgccattactgctacaaacttttacaacctaggccactgaggaaaacaaagttactgccaacattaaatactgttgataaagctgaacaaagactataccatttcacttatctggaaacagagttactacacccttctcaactagcacactaaggaccaagtgcaggtgaaagcctctatgaaagtgactgtagaaaaatgggaagacgccattgtttcaccagatgcacagacatcaatgcagggacaatagaaacatgaaaaggcaaggaaatgtgtcaccatgaaaggaacac

SEQ ID NO: 222244 - DNA, 616 bp, Homo sapiens
tccaacatgctccaccacttcttccctagagtagggcctgtgctgtgcctggccgcccagaaacgaaaagctacaacctggccctttgggcccaagctgctagggagtacatcagagttacagatcttggctctgtggtaaacctacctccaattctaccacatggagcaaatctatagctcaaaacccagagccactgtacctgcctataggccatatcatacttgacagccgagaagtatcttcatggctaagtaacttcattgtggggcaaatgaaaataggaggactccaaaaaagcccttgccattaacaacctatgccattactgctacaaacttttacaacctaggccactgaggaaaacaaagttactgccaacattaaatactgttgataaagctgaacaaagactataccatttcacttatctggaaacagagttactacacccttctcaactagcacactaaggaccaagtgcaggtgaaagcctctatgaaagtgactgtagaaaaatgggaagacgccattgtttcaccagatgcacagacatcaatgcagggacaatagaaacatgaaaaggcaaggaaatgtgtcaccatgaaaggaacac

SEQ ID NO: 222245 - DNA, 351 bp, Homo sapiens
cctgcattaccacaagcaggattactagtttaaagtgtggacacatttggaattttgaaagctattggcaaattgacttccactgggcccataccagtttattcttctgctagcaattgtttgagaatgcctgcattcccatagtcttgctcaatgagtgcatgattaaacttttggatgtctccattctgaatttttagtttcatttcttttactaagagtgtgacaagtacctcttcatatgtttatgtgccacttgtgtttctttctttctttttttttttttttttgataactgtttatccattggccactttccccaccattggaccgatgatttaaattggccta

SEQ ID NO: 222246 - DNA, 610 bp, Homo sapiens
tcctgcggtcttattcaccacaataacctcagtgcttggaacactgcacgtagtaggtgctcaaaaaacacattttgaacaaatgaataaaccaatttaagcagcaggaaaatctgttaaatgggaaataagcgacattttctcttttatttcatggtgaggtcttggctgatttagccaaatttctaaggactaaccgaaaaaataaaactgaaacacatcatttggccaattcgtttcagtgaaactcctttcttctgaatttgtgatcaagcccgccataaagaagagacatgatggcactgtaaatctgataaatttctgatgagatacatggcagtttaatgcaacttggtgacatgacccttatgctcttaccactgctgggtcctcattcatgcgatgagactgtagcccaaactctaagtaggttctgacaaagatggaaagcttggagtactaagaactgctccagtgatactccagttcttttcccattctttcctcctttttactgatgcaagataaaatgggaagtacagcaggacaaggagtgcgattcgtgctcagagtagctgtattatgggttctcacctggctgaaactccta

SEQ ID NO: 222247 - DNA, 406 bp, Homo sapiens
ttcccacaaggtactgcggccccagggtgtccagaggaatgagtggccaagaccttttgttggtccctattctcctcttcctcctttactaattgaactccaaatttaagctggacccacctaaatactacatttctagcttcccttgcacgtaggaccacattctagccaacgggacgtgagtggagttgaagtgttccactggtgaacgactcccttaaaaggaatgggcatgcatgccccttgacagctgggatgcagatgtgatggtgggagcgggagcagccactttggttccagacatggaaactgcaggtgatggtgacagagccaccctaccagccctgggccactgacttctggctgtttgtgaaagagaaataaacttctatcttatttaaactac

SEQ ID NO: 222248 - DNA, 522 bp, Homo sapiens
ggaaggggaacttcacactctggggactgttgtgggatgcggggaggggggagggatagcattaggagatatacctaatgctaaatgacgagttaatgggtgcagcacaccagcatggcacatgtatacatatgtaactaacctgcacattgtgcacatgtaccctaaaacttaaagtataataataataaaataaaatttaagaaaaaaaatttaaaaaaaaaaagattgtaaactacgaaagagagtgacaagtatagttggaagaggcataaatggtgcccacatgtggccagaagaagtatgaggcctgcttcacaatatctttaaagttctacccactccccacaccctcagtgattctggaatttgttttaattttaaccatgtttacggtagtaatgtatatagacagtcccttctccttttaatttgaagtacctggataccataacatgactagagtgtggcagaagcccaaacaggaatttatttttcaattgcctggtctctgtgaaccta

SEQ ID NO: 222249 - DNA, 458 bp, Homo sapiens
atatagttgttacatatatatatgctttgaaagtgattatcatggacactgtagttgcaatcccaacatttattccactcttcccacattgtgcatagtacacctaagaaattgaggtgaaattaacctcacctttatctccaaagttagtccagttaagataacccaatcccaacctacgttgttcccctggccacaagatgttgttcagggttgagcaaattggcaccaattacaggactttagccccaaaattgtgggctgtggctcctttctctcccttgataaatgagaaagcatgtggttcttgttactgagggcagtcatcttgtaaccaagaaaataaaaaagctggaaccctgatcaaataagcaaagatttataactttgtatataagaagaaggacataaacagtaaactgtgaaggttttaaataaacacttttctgcctccttcc

SEQ ID NO: 222250 - DNA, 366 bp, Homo sapiens
ttattttctacttattgaaagagctctttcagaccgagacatcaatttttccatatatcactctcgggcatagatagatacaaaggaaaatacaagtgaaatacattgagcaaagtgttctaaaagtttttcagagtccaagcactctgagtcactttttgactcagatgttagtgcctattttcttcaaacagagtcatccactgtgccaccaaaagcgctggtgatgtagcatttcctaaggaaaaaaatccataaaaatactaagagccattggttctggactttgaagacagcttggcaatgaagtcgaggtagccagcctttgactcttctgggaattttgcctaactcctcaattcacca

SEQ ID NO: 222251 - DNA, 483 bp, Homo sapiens
gtcaatctatgtgccccagcagccaacttacatagcactgtgtgcaggcttgtaaatagaccttccagttctgctataatcaataccttattgtccataactcaatttggagaaggtttagctgtctaccaactcttgtggagagtttctgtgaagttttgttttgggttgcaagaatctggaaaacagatgcagatttttttgaggaagattttgaaatttctacttataaggtacccaaaatgggatccaaactcttgaatttggttgatcttctgaaatacatacctgtgttttaagatttgcttgagcaaacctttaaccatggaaattttaaccaatgatttccaggttgaaacaattccagttttgtcatttaaataccacagatgaatctgttttagcacagagtacaaatatcttttttccttttgagcatttggaatagtgtgttttggtaataaaacatagctctgcatatta

SEQ ID NO: 222252 - DNA, 310 bp, Homo sapiens
tattattttaatttgcattaataaaaaatggcttgagttaagtcataggtggagttgcaaacttgtttgccttaggcaaatgtagaaaaatatgttctttatttcctgcttacacctgattaagcaaaatcaggtacaagtaggaaatacatttaactgattagactcgttcaatggaaaatttcacttatatattgagcctaatatatcaaaaaagggcaaaatatgagaacaatttggcttaattaaaaaaaaggagacctaatgaaattgcttttgataaagaagaaggtagagaaaaaaaaaacaa

SEQ ID NO: 222253 - DNA, 558 bp, Homo sapiens
atcccccctccatttaaggcatttgtttagccacaatcaatgctgccttttatcacataccatgtaataacctttaaaaaataaacctatttactaaagcacagcatacatatagaaaaatagaaaattcacaagtttacagtttagtgcattatgataagaggataccaccataaatgaatcaccagaaccagggaataccgcatcaccagcatccctggagctcccatcctaccctgccaccatgcccttccttcttccctaaaagtcaatgctctcttaatttctaacaccatgggtttatttcatgtatattttcatccttctgcatgtaaaatcatgcactatgtattcttttgtgtctaacttattttgctcagctttatgtttgtgacaatcatccatgttgctgtatgtaactgcagtttgtttattgtcattgctatatagtattctgcaaatatataaatcaacatttatttattttactgttgaagaacatttatactgtttctagttcgaggctattatgaataaagctgttgtaaacattccaat

SEQ ID NO: 222254 - DNA, 221 bp, Homo sapiens
tcactcatcaccccaccccttcctaggcaagcccatatctactcctctctcctcctctgtcttccctgcctgttactccctccctactccccatgtggcctccttatgcctccatttcttttttttagttctctctctccttgcctaggaaggggtggggtgatgagtgaagagaagtctaaaggagccaaaaggggtggagagagataaggaggagggct

SEQ ID NO: 222255 - DNA, 354 bp, Homo sapiens
atccctttaatttccgtggccaatcccttcacccgtccccaccccgaaaccattaaaaccttctgttatttcacatcacccccgactaacacttcagaggcttggagatcctctaatgtgttccacgtgtccccaaagccatctaaattcagccctgggcctgcattcttggtgtgagaaaactgaactcatcttcaaaggcccagcctccccttaagattttctgcccacaccccccatgccctttcctttttcaaggcactcggctccctgccccgaccatcagtggctgtgggctgctcagagagactcaggccattcccgcttggttttcttccagtgaaagatgaccag

SEQ ID NO: 222256 - DNA, 374 bp, Homo sapiens
gcaatagggttcatactttctccatggcagagtatgaggggaaggagagagagttctagagagatactttcctgcatttcgagactcaagaaatagcctcctgatttactaaataaaaacaggaaaggagttttgtgtggtctgctctttctcctggaacttgaaagacttagtagtcatgaggtggctatccctggtgttttcctaattttgaatctaggacctattatgagattgagttttatttttactactttgctaatcagagctcaagggtaagtttttcaaaatcttcatcagctggcaaacacagaggcaaagtgtggacatagttgtgtttatattcattgaaaaataaaaatttggtgcttttc

SEQ ID NO: 222257 - DNA, 425 bp, Homo sapiens
gactcagcatgctaaatgcaaaaataaattttacttaaatgaaaatttaaaattttagaagaaaaatgtaggagtatgtatatgtaaataatgggatggggagatcttttactatgataggatacctagaaggtgtatagttgtcctcagtatccagtggtagggggattggttccaagacccccaaggataccaaaatttgaggacgctcaagtcccttatacaaactgtgtgttatttgtatctaaccttcacatagactctaacatactttaagtcatcactagattacttataacatctaatacagtataaatgctctgtaaatagttgtactgtattttttaatttgtattttttattatattgcttgagcccaggggtttgggtccatactgggccacgtagcaaaatcctgtcaatta

SEQ ID NO: 222258 - DNA, 483 bp, Homo sapiens
agtacccacctttttccaatttagctactggcatttgtatacattaatgtccatacctcctaccgcccactccaccccaccatttattcattggtttcacaactatttattgagggtgtattataggctctcaatgaataaaatagactcctgcccttgggagcttatattcaaaaggataataccttctttgaaggcgggacgctgtcttagtcaccattattcccacggcccatagcacagtgctttctttgcctaacatgctctataaaaatatgcaaatcttgagacaagtcacaaagcagaattttgtggaaccaaaaataaatgtgctcatctcttttattctttaaatggctcatacagactaattggaatggagatgcgtatttaactcaatgccttcctctaaaacatactcaaggtccatttatttccaagatggcattttgacctgtgacaactaaagccccatattgcaaa

SEQ ID NO: 222259 - DNA, 368 bp, Homo sapiens
aatttgaaggactcacactgtaatcaagaccatgtggtcctggcatatggatagacacgcagaccagtggaatagaattgggagtccagaaataaaccctcacatttatgatcaactgactttcaacaaaagtactaagacaattcataagggaagaacagtcttttccacaaatggtactaggatctacatgcaaaagaatgaatttcaatccctacctcaagccatacataaaaatgaattccaaatggatcataggccaaaatgtaagagctaaaactgtgaaagtcttacaagaaagcataggagtaagtcttcatgaccttgggtgaggcaaagctttctcagatatgtcacagaaagtacaa

SEQ ID NO: 222260 - DNA, 277 bp, Homo sapiens
agaaacaaatgtgaatcctctgtggagaaagataacatcatcaacattttcaaattactttgaaaaccaattgtgtgaaaataaggttttggctgggcgcggtggctcacgcttgtaatcccagcactttggtgggccgaggcaggcggatcacgaggtcaggagatcgagaccatcctggctaacacagtgaaaccccgtctctactaaaaatacaaaaaattagccgggcgcagtagtgggcgcctgtagtcccagctactcgggaggctgaggc

SEQ ID NO: 222261 - DNA, 469 bp, Homo sapiens
aatgatcatcaactactccttcttaagggatcagcatgttttcattaacctcctaccctgtgccagactgtgtttatgagcttaagaaaccaccccttactgggctgcttctgtgcttaaaggcaggaaaagtcttcaaatgtaaaaacaaagaaatgagtaaaatgctagacagtgggggtttgctatttttatagtggcaggaaaaacctcatacccctcccagtttctactttgtgagtggcaaccaattttgcctataaatgagtgatctttgatacatccccagtattttatgtttatacaattgccttatgtatgcaccaagtggataaaaataaaatgaagttttagtgtgttttaggcaattatcttctgattaacgtaaaaaaacactggggaatggtgtatgttgtattgctatttacatatattaataaatgaataaaaacattcataaattacctaa

SEQ ID NO: 222262 - DNA, 409 bp, Homo sapiens
aacaatatttttataaaattacagtacagttatagcacattcatctctactaatctgtatgctggcttagaagaggaaaatcctacactcttctaaattttcaccgagtttcctttcttaataatccaatacaaaatgtttgctcattatttttaataggaagtttgtgaaaggcacctaagtatactgaaagaggtcctctatctctcaagaataagttgctattttgtctcagtagcaaagatttaacaaagaaaaagatattttctactgtcacaatcatccaaggacatactaactaaatccttcccttggcatctagcaaaagaggtcagggtctgtgaataaggcaaggaaatttaggagtgggaggagtaaatcagaaaacaaaaccaaaaccaaaaaaaaa

SEQ ID NO: 222263 - DNA, 254 bp, Homo sapiens
tgggataggcataggttatatgcaaatactatgccattttatataaaggacttgagcatccatggagtttagtatcctccaggttgcctggaactaatccctcatagatactgagggacagctatatatagaaaatcctaaggactccacccaaaactgctagaattcataaacccaataaagttgcagggtacaaaatcaacctacacaaaccagtagcattttgttttacactaacaacaaactgtctgaaa

SEQ ID NO: 222264 - DNA, 2316 bp, Homo sapiens
tccctaattggcccagatcctaataaacacacacacacacacacacacacacacacacacacacgttttgttgtttgttttgttttgttttgatcttttgggacctacccaaatccaaggtctccccatccccttttcacttcactctgccttttcatccaggccagtgacttggaatcatgcatgacatattcactacttgatcttgtgaacactggaaagactgtctttattctttcatgaagataattggagagtctattctctgtgctctaggggatacctattttgtttgcctttcttttgaatgagaaagaggcatgtctgagggtgatatttattcctgctgttttgttttggggaccaggtagggaggctgttgaagaaagccaagaaaacccagagaaggcaaaactctaattccacaatatgccaaatactcataaagagcaagatttcatgctccaaagctgccactgtgtatcaacaagcagtgcacttcatgccaaaacaaagttttttttccaaagcacattggcaaggactagatttagagagcccacaacagaagtgtgcatgccctccacttcaaccaaaggcagaatagcatttggccatgttattaaaaatacactgttcataattgaggtgatgtgaacattctgctcccctcctccagaaaggactgggcatttctggagttccaccattactagatgtcataatttaggacaagaaaataaagttagtaataggaagcaataaaatttcatttagcatctgctatagactgtggatgacattaggcattttcaaatatcatcaccatctgaagattaagaaatctggccaggtgcagtggctcaagcttgtattaccagcactttaggaggtcaaggcaggaagatccctggagctcaggagttcaagagcagcctgggcaacatggcaaaaccccatctctacaaaaaattagctgggcactgtggtactcacccatagtcccagctattcaggaggctaaggtaagaaaatcacctgagcccaagaggtcaaggcttcagtgagccatgattgcaccactgtactccagcctgggcaacagagtgagaccctgtctcaaaaagaaaaagaaagaaaaaggaatgagaaatctgaggcttgcccactagcccacaaccacatagcaaggtctgaaacctgaaccaacatctggttcacctaatgccctggctctttgtacttgtttatatttaacatagagtggacagggcatcagaggactctgcaagatcatgaggagaatatttgaaggaatatttagtctgatagagagaagtcttgatgaaacaagatagctgtttccaaatatttgaactatttactctttgtacgaagcagcaaacttacaattaaaaagtctataggacagactgggaccaaagcctgaaaattcagtcaagaaggaacactctaatacgacagaaggaaaaaaatactctctaatagtgaaggggctgccttacaagatgaattccctatcacagcacacattctagaaaagaccaggcactacttggaagaaatatcagataagtgaggtgctcatctagctgctactactttcccttcaagccttagggtctaagaccagcataagcttggagaggttcaacttctgacatgcagattgctgcagaagacaaattaagacattaaaaccaaatgccaggtagttagaaaaaacaaagttctgcatgagaacaaatctgcatgaccatcccctcctgacttaaaaaataataattaaataaagttctagacacatttgggctcccttggaaaaaaatgccatacaattgcattaacacaactgttgctattaggaatatttacctaataataataatatgtagaacaatcaaaatagggaggaaatagccagaaagtcattcttgcagatggtcacatgtctagggaggcagaaataagaaatgtttaacaagcagtcttctttaagttatgacaaatgatgctctgactttataaaaccccctggccaaggatctgaagtccatccccataggtggaaacaggaatgatagaatcataaaatgttacaatggagaacctctaattcagtcatgtctttccacagatggggagatagaagctcagatagcttagtggatttgctcaatgacgcacagttcattcattgcagagttggggccacaaccttcctcagacctagccttacgatccaggatctcttcctacagcaatgcaccaaattcatttttctagaattgaact

SEQ ID NO: 222265 - DNA, 472 bp, Homo sapiens
agtaattctaggaattcagtgcatttggcctgcaaatttatctctcactatttttcttcaaatccatccagtgcatctttgttttaagcctaataaaattaagccttaataaaattattcaggcaggagtgacccagacaaagaaagatgggcttggttggggtggcaagacagaactgtaaattcatggaaaaaaccttttgataggataaagatgggaaagtcatgaagaagattgtgaccattcaggttcccctgtgagcgaaatgccaaattgaagaagaaaagaaaaagaaggaggtggagaaggaggaagaagagacagggaggaagaagaggaagagtaaataaggagaaggagggagaataagaagagaagaaacagaagagggagatgaggaagcaggaggagaaggaggaaaagaggaagacggagaaggaggagggacaggacgaggagaaaggagggcag

SEQ ID NO: 222266 - DNA, 774 bp, Homo sapiens
ttatggaattaacgttcttaaatgtgaggatggtaacgtaattatataggagaatgtccttgttcttaggaattacatgtataagtatttaggagtaaagtgttaggatgactgcaacttcccccgcaaacccacgcttttttgagatggaacttatacacagtagagggtacaaatctgaagtatatcgctcagagtttttacatgtgtaactaccatgtagattaagatgtaggacatttcctgatgctttagagggttctcctgtgcccctcccaattcactaaaaataaccactatttcatttctatctctgtcagttacttggaaacttaacttcaaatggtgtgatggaaatcaacatgcagagaaagagaaaagcaaatacgaaaagataatcttagaatctaagaaaatttcgatgttaattgtaccatttgttcagattttctgtctgaaattttttgtaatagagttggaaaaattgaaaacatagaaaaaaagaaatgtagaaagttcaaaagaaacagttatctctaggaaaaaagagtgaacatactgatactcatttgaggatgtagcaagataacactttaagtaaaatttcagtatgtcaagttagttacagcaaattacataggaaatgtttaaatgtcacatagaaattcaaatatttatttaaaaaactcagtgaataaggtaaagctagattaaacccagccaaagaatgaattagtgaactctggaaagtgaagaaagagagttatagaaaat

SEQ ID NO: 222267 - DNA, 1356 bp, Homo sapiens
  misc_feature (2)..(3): n is a, c, g, or t
gnnctagagagtcattctcctttctgtaatttgcattctgcactaaacacttctctgatatagccattttagtcattattctggagacatttcccataaatactatctgctaaccacatacctccgatatctatggcagtgatttttttttttttgagatggagtctcgctctgtcaccaggctggagtggagtggcacaatctcagctcactgcaacctccgtcacctgggttcaagcaattctcctgcctcagcctcccaagtacctgggactacaggtgcacaccaccacgtccagctaatttttgtatttttagtagagacggggtttcaccatgttggccaggatggtctcgatctcttgacctcatgatcctccccccatcagcctcccaaagtgctaggattacaggcatgagccaccttgcccagccatgatttttagtctcttcgatcatggactcctttggaaacctgccttagaaaaatgctcagatatacatatattcatatgcaatttcaggagagtgactcagtgagtgactgtgtctagcaaaagaactgtaatccaggtagattaaatcacagttacactatgcctgctaaggaaagaggaaatagcaccaagcacttgcattcccatgcggcctgacgttgacagttttatgcgtattctctaagttcaacctctgcctcatctatactactagtaatatgtatgcatcctgcattgctgtaatgttaatattactgtgcacttttttcctgtttgtactaactctgtaattttttcctgtttttacttactctgtaatttatcctgtaggaactgtacttaagaattgagaggggttttagttttaactaatgccgttgggattattagtggtatttatcctaaccttcagactctacctctcagcccatttgctttatttcttttctttttttctttttcttttttttttttttttttttttgagacagagccttgctctgtcacccaggctggagtgcaatagcacgatcttggctcaccacaacttctgtcttccaagttcaagcaattcttttgcctcagcctcccgagtagctggggctacaggcacgcaccaccacgcctggctaatttttgtattttcagtagagacagggtttcatcatgttggccaggtgggtcttgaactcctgacctcaagcgatccacctgcctcggcctcccaaagtgctgggattacagatgggagccactgtgcccagcctatttctaaataagaatttacttgggttctattaatagtttttaaaattaacaaaagcaacaacaaatccaacctaaatgtttgacttttacc

SEQ ID NO: 222268 - DNA, 1025 bp, Homo sapiens
tcctgatgaggaaacaggcagatgtttctcctgctgttacttctgaacagaaactatttagaaattccagttagttggttagaatctaaaccagattttttcagtgcatgtaagttggctgtttggatgactgtgaaccacatattcctaagagagactgttttatgatggtgtctttaaatgacagattgagaggccacccccataatgatacacttaaatccacctaaacaaatgtggaatgagacaatgaaagcaccaggtgctactggtttaaagtaatgtaaagcagtaatcacctaagcaggatgattagtttcaatgctagcagatgcaaagcccatattatgacaaatgatattttaactaccttgaagtctcagtccccaatgtggtctgagtttctcagtaatcccactgctaactttttgatggctctcctttcttgaacctctttattcacatgtccagacacacatgatactatttacatgttttgctgagggtttaaaagtgcttagtaagccgctgacccaaaaaagatgagctgtttctcaaaacaataagcagtgtggtctttctacccttagctctgtcctatcttagcattgcagagaacagaaaaaatgcctgtttactaatagtatgttaccaaaaaaaaaaagttcagcatggtggaaggtgacattcttttcacagccattggaaacatacactttagagcaagtcgggagaattttattcgttgtacttctgcagacaggtctggaatgggtttatcagactcactaaaggaggaatggggtgagcacctctctgtaagacatactaaagggtctgttttacaatgcgagtcccttcctctagactgtacagttgacagaaaattggccataaagaacaaacttttttccccagtggccgctatcagaagtacatttccattggaaaattcacttcatagttgaaaagttttgctgaatgttcagtgaggctccccgatatccgggatcctctcgaccgcc

SEQ ID NO: 222269 - DNA, 552 bp, Homo sapiens
ggacttttaaaaatatatatggataaaagtgggaaaaggagatcaaaagtagctgagagcaagaaaataaatgaacaaagtataaattgaattgtggaaattcacatacaaggggctagagttaaaagggacctcagtagccacagggactatctaattcatctctggaccatgagggcctgccacagcgcctagcatatcgtaagtactcaataaatgcttgtggaaaggatggatggatgggtggatggatggatggatggatggatggatggatggatagaaatgcaacttcaagatctggttctacagtattacatatgaagcaactgagactcagataaaattcagtgagttgctgaagactattcactcattgagcctcacattctgatgctatatatatcaggtgctatgcagatgattagggaagggcaggactgagattaaactgacaccccctacatcctaatccaggctttttccactgtatggcgatgcctcccaaaagaattatcacagcgacttaataaaggagggagaaagttagct

SEQ ID NO: 222270 - DNA, 3677 bp, Homo sapiens
gaggcctccctctagctggcctcaggacccagatgggggacaggcggagtgtcagtatcaaggaaagatgtccctgggaggaagggctgagtcttgacttcttaaagaggcactgcccagctaaacacttgggggtctgatgagtctccaggtcggactccctccccgccattgtgtcactgccaggggcacagataagcatcccccccgccccagtttggggaattttccaacacctcatggggagaaaaacaaggaaaaaccaacaagtgcaggtggagattattccatggtgctgctgacaacagtgggagggagacagtgcagctgacggggacctcaccctccaccagccttgaggacagggtgggtgggagctgacagtaatgttcgcctggatccaaatcaaagcctggaacgaccaagtaaccggcctgctgggtctgaaccacagccctctggccgcctttggccccactgagcccccgtgtcacagtgtcactgaagcgccttcccttgacgggtctgtgtttccaaatgaaaggtgtcagcaggaaagttcctggtgccttcagagtcgaccggttcaaggccagctcacgaatccactgtggagacttgcattggtgaggtctgtatgcacttaggaggcacgctgggctgtgaggcctgggagagctctcctgaaaggggactccgcagctccctctgtgtctgctgtcttagccctggacggggccaccttctagttctcgtatctgggtgggtcacacgggccagaatctggatgtctgtggccgatgcaaaaccaatagtggctgggaaacacactggctctgatttctgcttccctctggcattaccatggaaccgagacaccgtaggggcatgacaccaccctagccgaggcctgcccactcaggatggggttcattttcagaagcaaataagtggttcatttcagcagcctcttggaaatccgcagtttagacagctcggcacgctgggcgatgggatggccccgggaggcgcccggcacctgtcctcactggcgctccaaggtgtctgatggcacttccaccccaccatgtgcaggacatgcctagccacttcccattcattcatttaccgacaatgaaattgtatccaactccttcaataattcgaagcacggcctagctgatctggtatttgcactactcttaatgcgaacttccaaaagaaccgttccgctaacctagaaatgccacttcctaatacacacatttgcctgagacagaaaggcctgcttttaaagaaataccagagagggaagaggtttcccgggaacagccacacacgcaaataacccattgatggaaatttggggtttgtaaattagagggttctggagaggcaccgccggggcaccacctccacaagtgaggtgcgggtgacctgggcccccctgactgccagcatggactgggctgctcctgcacaggtaaaaacatgccctgaacagcagtctcagaacgtccacgctgaaagagtcacgctgccaatctgccgggcagtcagacagccctcttggcatttgctcagggaagtggaatcattcaaaccagaggaagcagctgtgccctcttctaagttagcacaaatagtcaagatccagtgaacccagaaaccaccagctgatcggctgagcccccgaatgccgtgaacatggagagacgtcatcttgagtccccagaggagagctggttatggatgattttagacaatgatacgacccaaggggacaaacaaaaacaattaagggtcctgtcttcactcaacccatcccttcagagtggctgaagtacactatctgatcatttcctctggaaaaaaactggggtatttgcagtgggaaaagtgattttaaacagaaaacaggccgggcacaggggctcatgcctgtaatcccaacactttgggagcctgaggcagaaggatcatttgagcccagagttcaaagaccagactgggtagtaaagtgagaccttgtctctatcagaacattttaaaattagccagatgtggtggtgcgcgcctgaggtcccagctacgtgggaggctgaggtgggacgattgcttgagcccaggaggtcaaggctgcagtgaagctgtgactgcaccactgcattctagcctgggcaacagagcgagactcatctccaaatatgtaaaaaccaaaaacttagggaaaaaaaaaaaaacagaaaacaacagggctgcatccaggcctgggtggaatttgctttcccaccaggagatgagggtgataaaatggctggcgctattttaaaactgaagttaacaattgttctggaactaccagaaatgctaagccaaatgataccttgaaaccttgggtgttttttttttttatgcttttcgaaaaaacgagccctttgcgggttggggtcacaggaaatagaattatgaatttcagaaagagaacagtcatttcttcaagctgccgttcaccccacttacctaactcttccctacccaagacagagtacctgagtcatgtgtgaagagttctgttttttttaaatcagcgtttaatatttttccaccagaaaataaatgaagggctattcaagaaactctagataaagcaggttttgtttctggcttttattaacaatgtcaccattttgtatagacccccagtgcgcatctagggtcaacaaaatcaaactcactgccgttgtaaaatatttataggtcaccaagagccagaaacaggtcagggtcttgggcgatttaaataagccacatgggccagtcacgtgtaaccccagtacttcaaggtgggaggatcgcttgaggccaggagttccagaccagcccaggcaacacagcaagaccctacctctacaaaaaaaaaaaattaaacattagccttgcgtggtgttgcacgcctgtcgtcccagctactcaggaggccaagacaggaggatcgcttgagcccaggaattcgaggttacaagtgagctctgatcgcgccaatgcagaccaggctgggcaacacagcgagaccctgtcactaaaataaataaattgacaaataagccataggatagctgtgcacggtagagattatcaagacggctcagaaacaaatcgggtgctttctgtgcattgacatggcagggctgtgttcaaagagccatcccaggagtcgaagcatctataaataacacatctcacacctaatgatgaaggaactaacaagcccaaaggaagaaagcgagggcatcacacatagtgaaaccaattctgggaagacaacacctgaagctttcagagaacaagattttcatgtatcaaggaagctgctaaaaactccttgaagcgacggcatgttacaatctggaatattttttcacacagagaaaaacaaagccaggctttcgaaatcccgagatttgcttccgaaaaggcacttaactttgctcaacagttttttggagctctttttgttttggctttcagagtggctgttctagactggatttcttttttcattggagctggtaactgaaatttaaaagctttaaaaaaaaaaaacttcaaattgctcttccctggcgcgatctgcctgaagtccttcaatttgcacttgtggcacaaaatgcatg

SEQ ID NO: 222271 - DNA, 493 bp, Homo sapiens
accgggactgtgtgccacgagccctaattggaggacgtccatcagatcgcgccagggcagacacactttgtaattttgtttcttacagcttctaaagtgtcagataccagctcccatgcatagagaaatccagtctaggacaacacctgaagctttcagagaacaagattttcatgtatcaaggaagctgctaaaaactccttgaagcgacggcatgttacaatctggaatattttttcacacagagaaaaacaaagccaggctttcgaaatcccgagatttgcttccgaaaaggcacttaactttgctcaacagttttttggagctctttttgttttggctttcagagtggctgttctagactggatttcttttttcattggagctggtaactgaaatttaaaagctttaaaaaaaaaaaacttcaaattgctcttccctggcgcgatctgcctgaagtccttcaatttgcacttgtggcacaaaatgcatg

SEQ ID NO: 222272 - DNA, 393 bp, Homo sapiens
ctgagggcgaggctgggggcggggacccacatggagagaggcaggggaaggtgcccagtggcgcgtgtcaggtccaaggacggcgctcgggtgcagccacctgccagagaccagggtcaggcagcaggtgtgggggtggagagcactcactagaccccaggtgccaacatgccaggcctggtcactgaggagggggcagtcctcatgcacacagggctcagtcagaggtggccggtcttccaaggagcacgctgcggtatggagcaaagaacccctttcaccccggcaagtaacgctccgcttccggacgccaacgccacaactgacagaacactgcaaggacaaggctgtcagcagaagctcggccttgcccccaggagccacgccagttcg

SEQ ID NO: 222273 - DNA, 451 bp, Homo sapiens
taaataaataaataaataaataaatggagggagggaaggaaggaaaggaaggaaggaaggaagcaaggaagcaagcaagcaagcagaaaacaaggaaagaaagaaagtctttaagttcccaagaatgagtccatttttaaatagtggaattccaggccccatgctaggttggtagggagatattttgcatcaggagtgctcatccaacatcctcaattgctgaataaaccacagccctctgaaaccagccctggacactggagctggccgtccttcatccagggttgtcctgggctgggctctccgagtcccagaataacagcgggcttgcttaactaaatgaggaaacagcctccagcatgatattatgaagccatggcaaatcagtttatcaaggaattccacatgaaacaggaaagctcacatctattgctaagtgaaaaacaaaaaa

SEQ ID NO: 222274 - DNA, 534 bp, Homo sapiens
acaagtagaagtattgaccctcaaggtcattttagtattgatttcattatgagataatcacattattttctctttatccattgagaataaatagcatgcaatctgtcacagtcactggtttggctaacttgacttccatgcccagccttattttctcttgcctgcctctaacctagagagtggaaaacctaaatatgcaagtttccagccaaccctgaaaccatagtggccacgtgactatttttgtttttttgcaaatgtgatctaaacataagtttacagggaagtttctagaaaagcttttgcttttttgagaaaaggggacaaatttggctgatgttttatcttcttttgtaatgcctgccttggttatggatgtgacacctaaagttagggaaaccttgaggctgaggttggaggatcacttctggccaggagtttgaggctacagtgagctacgatcaggccactgcaccccagcttgggcaacaaaataagactccgtctctaaaaaaagtttaagaaaggaaaaaa

SEQ ID NO: 222275 - DNA, 348 bp, Homo sapiens
tccttagcccgtagcctcgtcaccacaatctgcctggtctccacatggccctctctgtgtgtctcttgttgggataggcgcattggatttagggctcaccctcatccggaacaatctcatctcgagcctgaacttaggacagctgccaagaccctgtttccagacaaggcctcactggaaggctccagatggccatgaactgcggggacactcttgaagccagcacgccctcccctttctcaggcttccccccacagcctgggcatggccgtctcaaaagctgtcagtttctctttttgggcttgtgggtcctggtggagcggttgacaccgcccaggaagcactttg

SEQ ID NO: 222276 - DNA, 324 bp, Homo sapiens
cagtaactggcattttggttcactttgcattttactcatctgctgatttaatgagtgttctgtgtattgagcaatagcaggagttctacttaactatcactaaacataaagaagaaaaataccatatgaggtgtctagttttttttattttctttttaatttacaggggagtcatctgttaacttgcgtaattgaggaatagagcagtccagttaataagaaagcttagttattagaaagttgccatctcttctgagtccccttttcaaaggattagaatgtgataaaatacacttaacactaaaactcataatttaatctttg

SEQ ID NO: 222277 - DNA, 334 bp, Homo sapiens
ctgtacccactcccagccagtatttctcagttgtgcatctgcagtgccttctttagtattcctgtagatccacacagccaatatttgtttgccttcacctgaagagaatggcaatctacatgatatacgtggactgtaatgcctcaaaggtgcgtggaaagtcccacttatttttctgaaatattaaagtgtgatttagaggactcaatttttccctgaggctctatgcttatccaataagtggatggcattctctttgggtcagacacactctcttcctctcaggaatatatttcatatttactcaaactataagccagtaagagacaaagtg

SEQ ID NO: 222278 - DNA, 451 bp, Homo sapiens
gcacgagaaaactgctaaactctactgacagaaatcaaagaaaatataaataaatggagagatatcccatgtttatggatgggaggattctctattaagatgtcagtttttctcaacttgatgtgtacattgaacacaatctccatcaaaatccaagcaagttattttatgtatattgacagactgattctattgtttatgtggagtggcaaaagacccaaaatagccaacacaatgctgaagaaaaagaggactggcactaaccaacttcgaaacttgctgtaaagctacagtaatgaagacattgtggtattggtgaaagaatagacaaataaataaatggaacaaaacagccccaaaatagatctactattggcaaaggcaattcaatggagaaaggatagtcctttcaacaaagggtgctgtaacaactggacatcacatacaaaaa

SEQ ID NO: 222279 - DNA, 345 bp, Homo sapiens
  misc_feature (308)..(308): n is a, c, g, or t
  misc_feature (310)..(310): n is a, c, g, or t
ccaggtttagagtcgtggctttggaaaaagcaaagggaggaatttaatttcacttaatgttcaggactctgtgatcctgtaatgtggttgttactgatctatagttggcaaagcttataaatgtgtgaggtctctttccagaatttacaaataagtgatttatatttcgccatttgggacaaaaatgttaacatctctttgaacacagtcaaattgatacatctttagtctttgatcttttcatttcaaggaaataagtgatactattctttgagcttataaaacttcacagtattacccaattcatngnccaaagactgccacttcgttgatttagagtgtatt

SEQ ID NO: 222280 - DNA, 440 bp, Homo sapiens
ttctccatggtaaagttagtttttcctcttttgtgattaataaatgttgtctgatgtggtactttgagattgtgtaaactccagtttctcctctacttttacccactactttgaacatccattaatacttctttcttggattgattttacagtcatggttgccaaatggtaatttttctaactttattaccccttctacatttattagtaggcattctattgtaagcaagaagcttttctcctcctatttatttttttcattcatttatttatatcaatgtctactcatgggttcctagtcagtgggttataattcattgctatcattatttattatgatgctcttattatcccaggtttggctttttaagcaggcttctgtgtccttgtgtcatatcatttaagtgttgtttgaggactttctcaccttctagcacaag

SEQ ID NO: 222281 - DNA, 473 bp, Homo sapiens
agttgaatgcagttcattgagtgtactcccttgaagggaaatccaacacaccatattgatactccatagctagaaaaatagcaagtagttttctatgactcagtatgaacccagatacatagttggatcaaaactttggcttttcccagttgtcagtaaggggaaagtcacttatgctatctaaaccttgttttcttctcaggaaaatggacaaaatgccattaactttgaagtgccattgtcaaaaaaaaaaaaaaattaagaagaggagctgagtctaacctcagcagacgatgtttttagtcctaattctgcattgaatcagttctgtgaccttggccaagtatttcatcttttcacgatctagtttcctgagctataaattggtcataataataattcctaccttacaaaattgatttgggattaaatgaaataaagcatataaaattcaagatctggtctgataaata

SEQ ID NO: 222282 - DNA, 592 bp, Homo sapiens
ggtttattttatgttcatctgcaattttttgcatgctttgcttgctaaatatgttatttgttcgtactaagctgagctgtcaccatgctaatgacttctaacttgctgtattttctttatgaagggaactgtatctggacatttcagtttgtaatattagactcatttagactctgccacatattcctacaaccagttaaaaagtgaaaaatctgtataataactgcttcctaagtaagtaatgtcagctagttgggatgattttaagcactgagttgagtttgtcagtttatgaaaattcaggaagccagctgggtaaaatgagaagagtacttatctaagaatttgaaagcactgggttttcttcctgtcccatcatttcccggcctttgtgtgatcttgggtgggtgttttagcttctccatgccaccttccttttatgtaaaatgagcataatgaacttgtcatgataccttcacgaggttatcaagatcattaagaccgaaaaggaatgaaaatatatgttaacatcttcataaatttcaggtgcttaaataaacttcagtggtattaaatcagtaatcatgtaaga

SEQ ID NO: 222283 - DNA, 406 bp, Homo sapiens
cagaagaatggcgtgaacccgagaggtggagcttgcagtgagccaagatcgcgccactgcactccaacctgggcgacagagccagactacgtctcaaaaaaaagaaaaaaagaaagaaaacatatcaatgatatagtgttacgttttcttaacagataaatgcaattattctaacatgaacaagaaaaactgaaagattcacatcaagggatgcaatcattagtaataagcatgaacccataaattagataaacatgccatttaccagccaagtcatcagtaaaaaatattttattagtaatagaatcaggtgactgaaatgttgtaagcaactatccagcatgtttgtcaaactctccatatagctattacacagtatctttgcttatagctttttcctaagata

SEQ ID NO: 222284 - DNA, 685 bp, Homo sapiens
gtaaagccccatagaacctatgttttttcaagaaactcacaatacctagaaaataatgatacagttctcctttctccaagtcatttcttggtgagggattctactgcccatatcttgttccagagcagtagtaagagggaggaaataggttataaatatatatgtgtaatttttctttctcctcttctatataaatctctcacacacatatatccacacatcccactaagtatttcacaacaggaaggcagctgtgaaatgacagtctttgtagtcattcagcaggcctcattgttgagtatttgtggtagcagtatttaaaactactgttaagttacttagagtaggaattgacacagagtgcattagaaccatacaggaaagaattgaaggcagttggaattggtttgaaagagatgacagtataagcaaaactgtgtgtgtcaacagtttgagaattatacatagcaaagtgtatgagaaggaagggtgtatgtcagaagaaaatgtgtgaatatatgtcaatgcatgtgatagaaccagtgcagaagagaagtaaaaagaattatgcatggtaggaaatcagaaatgaatagaagaaaataaaaactatttgacaccataattactttgaagaacagattgctctcataagcctacttaatggaaagaactaatgacccac

SEQ ID NO: 222285 - DNA, 508 bp, Homo sapiens
gtgcaaccatcaccacaacctaattccagatcatttcatcacctcagaaagaagctccttcatttgttacaaaagtagtttttttaaaaaaagaaaaaggccaggcgtggtggctcacgtctgtaattccagaactttgggaggctgagacaggtggattgcttgaggtcaggagtttgaggccagcctgggcaacatggtgaaactctgtctctactaaaaatccaaaaattaggcggacgctgtggctcacgcctgtaatcccagaactttgggaggccgaggtgggtggatcacctgaggtcgggagtttgaggccagcctgggcaacatgatgaaaccctgtctctactaaaaatacaaaaacttagctgggcatggtggcacatgcctgtgatcccagctactcaggagactgaggtgggagaatcacatgagcccaggagatcaaggcagagagctgatatcacacctctacagccagggagaatgagtgagaccctgtctc

SEQ ID NO: 222286 - DNA, 311 bp, Homo sapiens
gtgatccataaatatttatctctgttcctttaattaatatcctatagatgcccaaggtactggataaaaattaaagtaaaagcatgcataatctcagtgataacaacggttaacaaagtgcaatatcttttagaacatacacatatgtatacacacattcatacatgcacgctctcacgcacagacacacactcaaaatttggattgtaccataaagctaccctgtaacctgttttgttgtttgttttttcccttctcagttaatgtacagtggccactgccactcactgctgcttccttcggtgaatgag

SEQ ID NO: 222287 - DNA, 316 bp, Homo sapiens
acaatcctgcaggttggacttacctgggttccaaaccagggctgtttactacccacggggacctgagattacaggctctttctgggtatcagctttctttccagcaaaacagagatcatcgtatctacctcttggagaaagacttcaaagtccctggcatcagatgatttcttcattgacagggatccaccttactgttcaatggaatgacatgcaagatacaggctactctcgctaaaaagttgttagccagtatccaaacgtgaatgtgccaaaacttataaatgtattttgtataaattaaaacagattcaag

SEQ ID NO: 222288 - DNA, 425 bp, Homo sapiens
aagttaactcaacatttgaggttcctatatcctttaatcccatcccatgtgtatctttacaataaaacttcctgctagaggtatcctgagggaatctttgtttcttgcatctgaagagaataacactaaacttattgcatatgatttgggggttggatccaatgatagcacagagggacaggaaatgtgatttattgaccataaaagctttaatttaaaattgctggccagcgaaatccagactctgggaaatgttataggccaaatgatctgtttcttcaacaaataaattacaaaactgaggggaaaaaaaggaacctattaaaaagacattatctatcaatcactgtgtgtgtacagttttgagctcctgatttaaataaacaaattgtaaaataaaagatcttttgaaacaaaaaaaagtt

SEQ ID NO: 222289 - DNA, 272 bp, Homo sapiens
gccaatgaagagtcccctcacattgtggcctcgctcaaagttaagaagtcgctgtagtgttgcccttgaagaatctgcttcaaattgacacttcagaactccccagaaacttgtcttctgggccaatgtgtaaagctgtttatgaagaaatgtcaagccagaggggctctactacaaatttggcaaaggacaatttcaggagaagctcttggccgctgggttctcctggccaccatgaacttcaggaagtgggtgccatagcagcagcctga

SEQ ID NO: 222290 - DNA, 705 bp, Homo sapiens
gggggagtttgaatgtttttcctataatgattaatgttaggcctgttggggaaaactgcacactgcaaaatcccaaagatttttcaacaacctctgattgcttttggaatcgcaaagcaacattttcaggagacagttttgacatggcacattttggagtccctaaacagggagctaattatacatctacttagcattaaggatatctctgaatctctgagtgcctgaaaatgttccagtgaaagtcatatatttattcctggcttttatcccaaatgaaaaacttcctagactttcctcctttttcctttggaatatatattgaatttattttctagattttctccaatagaggaggtacaaaaataaatatttgtactcagcatttatgtcctgttatagcttctgattactttggttatcttagcagttgatttaaattgtcacagtaaactaagctattcttggtaatatcttcccagcataacaaagtttatttgccactaatgtaaacttttgaggggggggttgttttgttttgctttgtttttgagacagggtctctgtcacccaggctggagtgcagtggtgtgatcatggctcactacagcctcaacctcctgagctcaagccaccctccaacctcagcctcccaagtaactgggactataggcacgagctaattttttttttatttttgtagat

SEQ ID NO: 222291 - DNA, 303 bp, Homo sapiens
atcgttcttattttatggcgtttgcatttgtcagtcagcagactctatagatttctagttctgtactggaggctcaggtgaacaggacaccacgcctccagccaacctcatctgggaacagcctcgaagccaggtggaggagcctgcagcaaaatgccgggttaggtggccccaggggtgtatggccatgtacaacccatggggccgtcttcccactgggcagtgcagcgggactgcgtgtctggggcttctagggctcgctggctctctgtcaatgcttcacaaataaaaggtctttggtta

SEQ ID NO: 222292 - DNA, 451 bp, Homo sapiens
ttattaaaatcagtaagtctttagtcaagctaactaagaaagagatgatacaaattactaatgtcagaaatgaaataaaggatatcaccacagattttatggacactaaaaggataatgaaggaatattatgaacaattctatgcccacaaacttgaaaacctagatgaaataggccaattccttgaaaggtaccatctgccaaaactcatatgagaagaaatatacaatctgaataattctatatctattaaggaaatcaaatcaataattaataagcctccaaaacaaaaagcaccagcacagataggttcactggtttctgctaaacatttaagaaagaaatgataccaattctctacaatatcttccagaaaatagaagcagagtgaatacttcctaactcattctaccaacccagttttaccttaataccaaaccaaagacattac

SEQ ID NO: 222293 - DNA, 500 bp, Homo sapiens
gtggatgtatatgtgcatatatatatatacagagattgtgtgtgtgtgtgtttatttgtatgatagaatgagggagacaaaaagaaactgagtagagctgttctaattctgtagtagcggtagaaaaaatactaaaaaaaatagtttttttttcattttaccttctcattatagaaaatgtggaacatattcaaaaagagataaaatagtataatgaatcccgggtactatatacccacattcaaaactatcaactgaccaatcaggtttcctttgtaacccttacctcaggatactttgaagcaaattctgtcacatcatttttcttcaaaagtattatagactttttaagaaaactaaaatattagattgaaaataattaacaaaactccttaatatcaccaaatatctgatctgtatttaaatgtccttgatggtcttataaagttattttacattttgttcaaacctctcccctaataaaatacatgtattgcaac

SEQ ID NO: 222294 - DNA, 275 bp, Homo sapiens
agtatgcagccattaaaaatcaagttataaatgacaggaaaatgatcactccattttagtttagaaagcaaattatataagtgtgtgtagtttgacatcttttgtttaaagtgtatagatgatacgttagctatctgtataggtacacaaacataaggacagtttctgtaacatgtatcactgaaaaatggaatgacaagcggatcacgaggtcaggagatcgagaccatcctggctaaaacggtgaaaccccgtctctactaaaaatacaaaaa

SEQ ID NO: 222295 - DNA, 384 bp, Homo sapiens
tccttttaaaatttttattcatgtattatgtgtacatgttaaatagtactgagtgccccaacccttggaattcatctacagataactgcttttaattgtttgctactagctgggcacggtggctcatgcctgtaatcccagcactttgggagactgaggcaggtggatcatgaagtcaggagttcaagaccagcctagccaagatggtgaaaccccacgtctactaaaaatacaaaaattagcatgatggcaggcagctataatcccagctactcaggaggctgaggcaggagaattgcttgaacccagggagcacaggttgcagtgagccgaaattgcgccactgcactccagcctgggtgacagagtgagactccatctcaa

SEQ ID NO: 222296 - DNA, 539 bp, Homo sapiens
gatgtcattcattccaagtcaagtcagatgcacaattccagatcctggctgagtcaagtgatgaccttagttgtgtgcatatagtatggtctcatactgaatcaaggcatcttgtctagtatttacaagcatcaggagaggaaggtagttatcttcaaagttacttaccagaagcacaatgatatgtaataggaaattatatacattcctcttaaagaaacattaccaagctggtgctagaactattacgcctttgctcatgcaacaaaggtttattgtgtgtacaatatatgccaggcactgtgctgggcactgggactacccttataagcagaacaaatatggtccccatactcaaggattagtaaaatttactacaaatcttatcttaaattaatcattgtcataaacaagcacaaatatatttacagttaaaccttacatctctgcattgcaattctctctctctaaaataaatagtttctgtctgtatttagtagttcataagagtagttataagacagtaacctctgaggaaa

SEQ ID NO: 222297 - DNA, 94 bp, Homo sapiens
cacccggacctagtaatcacttctttattatacattactaaagtatcagactatgatggactggaatttttttaaaaatttatcttttggctgg

SEQ ID NO: 222298 - DNA, 543 bp, Homo sapiens
agagggctcacacctgctggatatcctcacccacctgggcaggtaactcgccgggcctctctctcctgcctcagctcttcccctcgatccacacgggagatcacgtcggatttggacccaggcagccctgcccctggggaaagatacaagagttggctgtgggtgccagaatcacagggaggtctacagggaaggtgcacgcactgagcgcctaatgattggacgtacaaatggccaacgccaagacttatttgttgtgtgcttagcacactgcagagaggctgagccaacttatttgttgagtgcttaggacactgcagagaggctgagctctgacaaagctgtttaaggctccgcgtctgtgctgttcgagttaactgcactgtgacagtataagaaacatcgtcttctgtgtttcgaagacttactaaagaaaaaaacagtaaaatctctcaatcatttgttaattgattattatttcagtgtgtcaagatgataagattttagatagcttgaggtgaataaaatgtattattaaaatta

SEQ ID NO: 222299 - DNA, 674 bp, Homo sapiens
  misc_feature (626)..(626): n is a, c, g, or t
  misc_feature (632)..(632): n is a, c, g, or t
  misc_feature (653)..(653): n is a, c, g, or t
cctacttatttattcaaattcaggacacctcctaatttcacagataagaaaatgaaaacataggatgattagggaactttttcaaggtctcctagctagcaaatgcagagttgaactttgtgtccaggtccttaactcacacacttgcaaaccacaccgtaatgctattgccccatgtttctgcagatgagattgcaacagggtcttaagtaaggcatttttagcatacaacgagatatcaattaatttattaattagttaaaacagacaaagggattgtttagaaaaattgaaatgacgtagaatgaaaagtagggagacaagaacataaaggactttgaataacatgctaaggggtatcaattttattacagtagaggaaagtcattaaagttcctagagtaaaatcatgtgaatgtgaaagaaatgttttcagatcattctgacctggatgaacagagtaaactaggtgggaaccaacagcaggggtagggagtaacaggataatagtatattgtattagttccaacaagggtccatttcagtatctaaagtaaggggacagtagtgagaataaaattttggaaaatattcaagagacattatgaaagaaatagaaaaacttnaacacngtggggaatatcccttttgangaaattgtcaacattgctcga

SEQ ID NO: 222300 - DNA, 727 bp, Homo sapiens
taaggaggagacaggaagaagcctcacatccatctctgctaggaatttgggaatttggggttagagtttgtaagggtaatggagttgactgattggtgggagagtgctggtgaaatcgtggtacaaggagatgaagaaactacattctcatgctcatcccattcctctgtggggggtcttcaaactggttgaactcaactgtttcaccggaactcgtggtctgaaaaacatcttaagcgatccttaaacaaaagccttatgattctaatgtcagagatcctgtctacaggaacaacagggatgcaaatcaattcttagtctgatgtctgaaatcctatctataggaacaatagagatgcaaatgtcagtatctagtgccttgtgactattagcaacaaggaagtaggccgaagtgcagcctgattaatgcttaattataactatatttctgtccagaacctgcatgcaatttttgtgaaccctgttggggcggtttcatgtgtgtggtgataggataagcacatgaccctggttttccaggaagtcttcatttcaaacatgtatgaatcaaaccctgctaaacctgtatttcaacacatgaatcaagtcaatgcccataacagtataactatctgtaaatcacaaaagtatgagaactatcctgttggggcaactgctcttgagcagactaagttacttttcgcctgtggctacatatgcagtccgt

SEQ ID NO: 222301 - DNA, 441 bp, Homo sapiens
cttttctccctagtgggaagaaaatcgactataatgtagtgtttgccagattgtcataaatcccagattgtgtctgtaaaatgacttgctggatgatagttctaaaacttgacagtgatactccggaagtttacttaaaatttgaagttcacttaaaatgcataaagtgctttcagattttgtgccagagaacagtcattaccatattcatgaaatatctttttgtttttatttcacttccaagtgctgaatgttaattcgtgtcatgctttatgccttagtcacatataatagctttttaaaatatgatttcaatcggactccctcatgtgaactgtatacagagttcaaatatacttctggaaattcaaccacatttccattttttaataaccaccagtgagtgtattaaaggcagaagcttttagctgaaaaaaaaaa

SEQ ID NO: 222302 - DNA, 423 bp, Homo sapiens
gtggggcgtggtggctcacacctgtaatcccagcgctttgggaggccgaggcaggcggatcacctgaggtcaggagtttgagaccagccgggccaacatgatgaaacttcatctctattaaaaatacaaaaattagctgggcgtggtggcaggtgcctgtaatcccagctactccggaggctgaggcaggagaataatttgaacctgggaggtgttcactacaagagcataggcaaaacagaagcactgtcgaatcatgcattgtccaggtccctttgagagtctgttatacagcagtcctcctctttgccctttcgttttctgtggttacagttacctgcagcctgaaaatattaaatggaaaactccagaaataaacaattcatcagttttaaaccacatgccatcttgagtagcgtgata

SEQ ID NO: 222303 - DNA, 310 bp, Homo sapiens
caatatagcagttgccatttattaaaaaatgattaaaaatagcgaggtgtatggccaggcacggtggctaacacttgtaatcccagcactttgggaggctgagacgggcagatcatctgaagtcaggatttcaagaccagcctggccaaagtggcgaaaccctgtctctactaaaaatacaaaaattatctgggtgtggtggtccacacctataatcccagctactcgggaggctgaggcagcagaatcacttgaacctgggaggtggagtttgcagttggccgagatcacgccattgcactccagccta

SEQ ID NO: 222304 - DNA, 318 bp, Homo sapiens
acgtgtggcagaaaaactgggaggttgagggtgtcccattggtaggcccagagctgtggttccagctgggagaggtcaccccggcccttctgcccctgccagcatcccctcctctttctctctcccagtctttctgcctgggaaagcagcagacattcccagggctgtccagtgagtggtgttcagtgggcatcagctccaaggaatccaggggggtctctgcattggggtttctctattgtgccttcagaaacccgatggaggcaatgtatccacacatattctacttccactttaaaaacctacgcaaagccatgg

SEQ ID NO: 222305 - DNA, 707 bp, Homo sapiens
atagataggcacagatttaccaaagaagtatacaaatgttccaaacataaataaaatttatttaaatataaataaaatttataattagaaattaaaaatctgaaacatctaaaatcgtgtggtagatttaaaaatctatcacacaggaaccattttcaaatacttattttaaaatactagatcttccaattattaacgcaaaccaaacactaaaaaaaaaaaaaacccttacaatgcaaatttcaaagcataagaaaatataactccataattggaataagccttatttattttaattatggcatgatttaagtaaaaccaaatgaaacaagttccaataaaaactgtgatttcagctcatgagagtatcaaagacttgagaatatttgagggtaaatgtactttgtcttaagtaccagaacatttgttcccacatatactaataacaaatatacagttaaatgcctttaattctatttataactggtcattctggaagaacccaaagggaacgaaagggaaaatatccaaacttttaaaaaaaaaaaaaagcctctatgcctttcttcagcagactttaaatattttccagatcttcaagtcaagagtaaatgactgttggaatttacaatgagtcatctgttttaattttgccttgaaatgactacatcatttattttgaactgaaagatcctaacactatacca

SEQ ID NO: 222306 - DNA, 484 bp, Homo sapiens
aaattataaggacttaacatttatggcattggacagaataatacatattatggaagtgtaactactaacgaacaatttcctgagataattattgaactcgacagttggtttaacaccacagaggcccccttaaaagcatctaggtcagaatcacaaggcaagtcaatataaatgtgtttctttgacgtcactagtattacttacagtcagttgattgattaggtgcattgtttaggaaatgtgaaatatttgatgtattctgagacttaaagattgaaatgtgagctagcgattagttctttactatgactctgctcagactcagggtgtattttctatgaaatagtattttgtaaaacctactcaggatcgttttgtagtctattataagcgtgatgattgggtgttcatatgcatatgtgagatgtgccaccctcaaatcttgttatgacgtcatcagcacgttactcttctgatacgaaaa

SEQ ID NO: 222307 - DNA, 560 bp, Homo sapiens
cctgttattccctccacctgtgctggggatgtcagggaaaattctgtagatgcctctccgagtcttcttgagccttgattttcacattgatcgcgtcttccttgttttctgtgtttgtacctcatctccaccctggactacgagctccttgacttcaggagctaaggctgagtcctctcctcctcaaagcacagctcagcacaggctgggcccagagcacacttaagtgtgtttgcagaaggaactgaaatttgggagggcacaagtctcgccgggagtattttcctcttctgaatacccttttctgaactcatagcgtcctctccaggtcacacagtctagatttagccccaaatcccaaaactaccttccaataggactaccaaaatctgagcctaggagacttcacattgattttaaggtaaaagttgaaaatgtcaacttcatagtaaagtaaaagtagggtatattaatgtaatctcaattaaaggcatagtttgtttttttctaaaaggaaaaattattatgaaggagacattatcaggaaattttaaaaaata

SEQ ID NO: 222308 - DNA, 992 bp, Homo sapiens
gctgtctttcagtaaagactagtatagttggcacctttgtgcagcccaaggaggtctggaaggagggttgcataaccttcccatgggtggaaaaggaggaggaggcagagtctgaactagtgagatgacccaaactggttactgagacttggtcaggtaggtgtggagagctgacccgtggcagaggagtttgttccctttcacagggcagcgcaagtgtttctttcaatagctccacctcggtatctgtctccaggcaatggacagtcctaagcgggaggagctcaggccctgtcgtgctgaacccctgtcagtctcattagagatggcaccatgttcaagaggccaagaagagacccagagccagcacacgtgacatggggttttactgcaggggagagtccagtggtggcaggctggacaagataactgcatggcccagcagttaaagagccctaaggttcaggatctttcactggcaacatcccattccaatgccctgtagctaatgtgatattcctaattttgtatgatttttctaaagaggacccccaaaattgtataaggcttagaacccacaaaaacgatctatccatgggtcagggacacacacactctgagccttctgccttgtatggttgctagggtgctaaaactcacatttgattctcccttgggaataggcattgcctgtgtatgccccttctgtagctagacctgcattccctaagaggacacctaaccctttccgtgagggggaagcgaggcccagcgaggaactgctgtccaggcatcttcctgaccaccagatgccatcctcagggtagaaagggccccgtttgtgcaggaagggagggcaggcactcagacctccagcagcttgctttgtggtttctcagagggaggccctacagaggagaccgggtgggagggagccccgtgtgaggcttcacctggcttcagaatttccccagtggaaaattctcctgaaa

SEQ ID NO: 222309 - DNA, 422 bp, Homo sapiens
tattgcctcagtgttaccacaaatgaggtcagttccacattccagaaggaatcctgctctcgcggccaaacagatagaatgataaagagcattctttgcaaaatcagctgaggctctccctgcctaagacaaatctattctccaacagctgggagagagacaaatacatgcaacctttattgtttaccctgctaaaagggaggccccttgtgtggtcatgaggatggccatttaccaaaagggctgggatttagagttctggcttatctttacctaaatcagtagttgaagactaaaacaaattgtatccacaaatagcaatggaaaattcccaggaagattaagttaggcagataaacagctttgaaggaatacttacgaaattttattttatattgtagtggttgttctctaagctgagc

SEQ ID NO: 222310 - DNA, 1632 bp, Homo sapiens
tttaagaaggcatgcactagactgggtgagtttgctgtctgtacatcggcgccctccgatctggggtgcgcgccccagcttgggacaccgggcgctcattctaggacttcaggctggaggcacattaaggctgccccctcgctttgcagactggccccagagatgctaagtgacttgctaatggtgcccccgccagttaactgctcggacctgcatttttcattcgagaaaacggaaacccagaagattaagatctttgaatgctacctagcagaaggagaacttctgtttataactacagcttgggaattccctgcagggtttctccattctctgggtaagaaaaatagtcccaaaagcatcctgaggacagctcagagaaggtcctagtgaaagagtacctttcttgcttcttgtatcccttcaggaaaaagtgtttggaaagttctgtgccaagaagttcctccctatgtccttgctgtttaggtaattttctttgttctgttgatttgtcggggggcgggggggagaaaaaaacgaccactaatagtaaaagcagtaactgctagggctttagagcttccagcgccctctaggtacatcattctcttagtttccaccctagaacaggggctggcacatagtaggtactcagtaaaccgaatgaacgaatggatggatgaatgaatgaattagtgaatatataaataaactgtaggaggaaagaattacccccattcattttatggacaggggaaacaaaggctaagagactagaattcaaactctggcctgattccattgacattaatattttagacactggaagacaaagggctcggcaattttagtgagagtttggactgcatctgccttggacccagccaaggacgttaaacatgacaggcagacccattaagaaaacctaccctctaaagtgaccataaataaggtgccgccatttcgtggtggtggagtccacagatcttttctaagaggaacagtgagaagaggaagtggaccatggcgatggggaggggcagagatcttggaagtcaccatggttttcagttgaaaggatttgcctagcttccccaaggagcacaacaaataacttctaggtttcttttacatatttttaggcttttgataatctttattgtggaggccatgcctaaactaagaaaatgcaatactctccatggacctaatgaaatgagataatgcacaagagagagcctcccacaatgcctggtacatagtaagtgttctgtagtgtttaataagcgctataattattaatattatttacctagtttttctaccagccctctcaataactaaaatatgagaataattgttatgcctaaatgtatgagttaagacactcttgctccctcccttttcccccttttaaaaactcatataaggcactaaaggcctgaaatgttagtgttgagttgtactagaaaagtgccttagaagtttagcaagggacagggctatttttgcctctagtttcttgtttactacatcacagagaaacactaaatttaaaatccattacagatagattctgatttactcacttggaaaaccaatttaaaaaccaataaaaaacagtacagatag

SEQ ID NO: 222311 - DNA, 668 bp, Homo sapiens
tttaagaaggcatgcactagactgggtgagtttgctgtctgtacatcggcgccctccgatctggggtgcgcgccccagcttgggacaccgggcgctcattctaggacttcaggctggaggcacattaaggctgccccctcgctttgcagactggccccagagatgctaagtgacttgctaatggtgcccccgccagttaactgctcggacctgcatttttcattcgagaaaacggaaacccagaagattaagatctttgaatgctacctagcagaaggagaacttctgtttataactacagcttgggaattccctgcagggtttctccattctctgggtaagaaaaatagtcccaaaagcatcctgaggacagctcagagaaggtcctagtgaaagagtacctttcttgcttcttgtatcccttcaggaaaaagtgtttggaaagttctgtgccaagaagttcctccctatgtccttgctgtttaggtttccccttggtcctgccgattcgccgccgcccgtctcgctagatctctctccccctcttcgccttccgcctctccgccccccctcccgaccttctaccgctctctccccccctcattctcttcgctcccccctctacccttcctctctacctccccccgcctccctccctctctcccccc

SEQ ID NO: 222312 - DNA, 473 bp, Homo sapiens
ctgatgtttttactcaccatcttgccacccaacagcattcacttgggagcttattagaattgcagaatcctcagccccaccctgacctactacattagaatctgcattttaccaagaggtccaagtggtttacattcacgtggaagtttgcaaagcactggtctacaacggtggtccatggagcaaagcttgagtagtaaagctgtagcacagtagttctcaaacttgattgctcattagaatcatacagggagctctgtaagcttctcatctccagccttcaccgtcagagattctatttgttagagtggcacctggacatggatagctttaaaagcttccccggtgattctgatgcgcagcctaggttctcaacaccttgctactcccaggtgtgggcctcagactaacagacatcacctggacctggttagaaatgtgtctctcagataccaccctggacctgctcgagc

SEQ ID NO: 222313 - DNA, 446 bp, Homo sapiens
ggaccttaacaaaacattcactttttttcaatcaaagagctgcccaggattagtactagaaaccaagcagatcagctagttattactagctgtcttgggagagacttcctttccatatgaaagagaaggagcttagaagcagtccacctgggtctgagtcctgggcctgtctctctacctggctatgctgagacttacttaacctcttgctctctgttgatttaaaccataaaaagaaagcactatttcccaagaattgtgttaggattgtgagggcactcaggaaagttccaggaacacagcctgacatatagtgagtgcttaaaaattaattaaatctgtctttaagagcagtcgagagggaagcagttatcataagtctgtccaaatttggggaatagagaaggtggtaaccagattcttcagaacgaaacttaatgtaacat

SEQ ID NO: 222314 - DNA, 373 bp, Homo sapiens
gtcaacgataagtactcagcaaaaaaatttaacacatgaaaatagcaccttattagcatagctgataatgctttaaatttcactcagtgagtatttgccctggaaagaatatgaacttagaggcataacgtgaagtttcctgaactggtctcagttcctgcctccctatatttgattttcactttatgtattaactttagaatctcatccttggataagaaaaaaatgccactgcagatttcaaaaaagaatagctagagattttgactcaaccatattagcatttccaccacaacactaaattaatacaatacacataaacaggatcaatgttcttgcttttagcaataagtaaacaggtacctgaaagata

SEQ ID NO: 222315 - DNA, 293 bp, Homo sapiens
cccaagcccaactctgcagttccctgttctgtacctcagtttccctctgtgggactggggtgaggaggcaggggagacaggccaactggcacccagaggaacagctgtgtcctgctgctccctcagcaaagctctgacccaaacggtgcccctggggcacaagagggtgagtgctgggcagcaggaacagggtagggctagaggaacctggtcactggctgggtaacaggctctggggcgccccacaaaatgtctctaagctgctgcactgggcttccacacaagcacggtcc

SEQ ID NO: 222316 - DNA, 348 bp, Homo sapiens
atagtctggctctggaacccctgatcttaagcacatactctatatgtacaagcatagaaaaatgaattgcaatttttgaatgtagtacaaagctgctgagattggtattggatgcaaatgccaggaagctagcataagacttcagaggacaaaacaaaaaaagaaaagtttccaatcatcagtcaaatatgagaatgaataagaaacaaagagacagacaaaaaccagactgaagtgtgaaggatatgtttcatgtgaatcatttcaaattatgtctggggcagaaatttcctgcattccaaagggaaagcattagagaaatcatcgtgcactgtaagtctttaagtg

SEQ ID NO: 222317 - DNA, 374 bp, Homo sapiens
gctccatagaagagtgggcttcgtgcctggcttgttcagggatcctttttctgcaattctcttagcttcgccctccttctcatttcaatactgtctttatattggttttcctcatggtggcaaaatgattgcagcagtttctggcatcataccctcccctcccatctggcttaaagggcacattccgttcaggcttggaaatgatctgctggaggtttacactgtgttcagggttgtccccgtggctccccatgccctggccttcgaagttaaagcagctgagaggcttgctttctattccttctccctcctagggggagaggttgccttgttgattactccagtgaggatgattaacagcttaaaaaaaaaaa

SEQ ID NO: 222318 - DNA, 477 bp, Homo sapiens
ctctgctgtggaagtcttgcatgtgggtttttttctggggggaggggaacagcatggactaccatggaaataccagaggtagcttttagtcattctatttagaggcaggttgagcaagttcaccttctcttcccagtccctcatgtttgttcaggcttgaaagaggtcagacccaggtgtttgaaaaaatggcaggtcctgacctatggaaaagagaaactaggtctgcagcccctggaatgctctgcaccaccaacatccctcactctgcatttggttcacacactggggagaagggcagaacagccacctcagaccctcctacccatgggaggatgcatcccaggtggcaggtgctggcactgttggttgtggcctgggtatcatcacaccgtcacacacagctcaccagaactccagaactcccaggcacaggtcactgtttgctggcttccccttgcctgagtactggaggga

SEQ ID NO: 222319 - DNA, 626 bp, Homo sapiens
cagagaactttcagaaaggcaccatcggtcttgagctggaagcccgccttttaggttttgaagagagaagaggtggaggaggatgtgtgctccatgaagacgtgttcacagactctaacttgctatggagtggccagagggctcgacgaagatgccaactgccttcagatgtctccagctcctatcacggctgtgtgaagctataggctgtggtaaagaccaaccaggggagaacaagcaaaggccatttattcagaggctgctgtatcaggggagtcagccacccatacatgtcttatggaaagctgcttctgccccaaccctgttttagctagtcttcagtttaatctgatatccggtaccacctcctaccccatttctacccatcttaggttcattggctgggacgcctgtgacaaaagacagattaacaagagaaaggtacacaaatttatttaatatgtgttatgtgacacaggagccttcaaaaggaaatgaagttctgaagaaacagctaaacctgaatggtttttgtcgtagatttgagaagaatgaagcattgtgggaaaatatgacaaagtaaagaaaaagaatgagagaaatgtaataaatcggggaatcttaga

SEQ ID NO: 222320 - DNA, 670 bp, Homo sapiens
  misc_feature (323)..(323): n is a, c, g, or t
  misc_feature (330)..(330): n is a, c, g, or t
  misc_feature (338)..(338): n is a, c, g, or t
  misc_feature (340)..(340): n is a, c, g, or t
  misc_feature (346)..(346): n is a, c, g, or t
  misc_feature (359)..(359): n is a, c, g, or t
cagagaactttcagaaaggcaccatcggtcttgagctggaagcccgccttttaggttttgaagagagaagaggtggaggaggatgtgtgctccatgaagacgtgttcacagactctaacttgctatggagtggccagagggctcgacgaagatgccaactgccttcagatgtctccagctcctatcacggctgtgtgaagctataggctgtggtaaagaccaaccaggggagaacaagcaaaggccatttattcagaggctgctgtatcaggggagtcagccacccatacatgtcttttttggggggggaaaaaaaaaagggncttgggnctttttcntngccccncccccccccaacnaacccccctgttttagctagtcttcagtttaatctgatatccggtaccacctcctaccccatttctacccatcttaggttcattggctgggacgcctgtgacaaaagacagattaacaagagaaaggtacacaaatttatttaatatgtgttatgtgacacaggagccttcaaaaggaaatgaagttctgaagaaacagctaaacctgaatggtttttgtcgtagatttgagaagaatgaagcattgtgggaaaatatgacaaagtaaagaaaaagaatgagagaaatgtaataaatcggggaatcttaga

SEQ ID NO: 222321 - DNA, 426 bp, Homo sapiens
gaaggcttttgatatcatattaaatacatttgccttaatcacaaagttgtagaggaacactgtaaagattttaagcagagaaattaatattttagaggatagctggtggtaatggatcagatctagcactcaggtgaatttagttttgcttggagtgtttgtagttgtcagtgtctcacaggagacacggatataagggttggttcaaaaatcggtaggtctgcattgctgcgaggagtctatcagctggggcctcttaagtagctggcccatttggaagaagtatgtgcctcatttccctgtggagctcacttcctttagtgcaaatgcctgggacctgtaggaagtcaacctggtgagaaattaggcttcattttaagtagtggtggtgggaacaaagagaaggagagggattgaaagatactg

SEQ ID NO: 222322 - DNA, 333 bp, Homo sapiens
tttattttcattcttaaatttttattgatataggtctttaaagttaggaatttttctctggttactactttaaatatatcccattgttttatcattatttttcagaaattctctatttttgatttgtatttcaccctttcattaaatagttgtttaacagaaagctttttagcttacagaaaaaaaaagattaaaaaaattttgtttagaaatttctagctttattgcattgtgttcagaaagtgtttatatttttgctttatgaaacttatttttaaaattttatgaatttgactgttgtgtgacctaataaatgatcagtttttttggaca

SEQ ID NO: 222323 - DNA, 459 bp, Homo sapiens
ggatctaggcagctgggccctgctcagattgtggcactgccagctctctggggcagctctgcagtttggagctgcttctgaagccatctgcacccacctgcctgctccccttgaagtcaccatatacctgtaaacatgtagatgccacaagttgcaggggcagctagttcagctgctcactggctggtgaacctcttctctattgaaatgtccataaccaatagctgtggagcctctttttgaggccacgtggtgatggggtactcactgcctctgtggacaggtgcccctggaggcaagggctgcctagttcctacagtccccactaagggcccagcacctaggagctgaccttgggcagggacaaccctgggaatgtctgctaaacaaaggagtagatgaacaggccagttgttggtcttagaatattttcattaagaattatttcccggccaggcg

SEQ ID NO: 222324 - DNA, 916 bp, Homo sapiens
aaaatacaaaacgttagccaggcgtggtggtgcacgcatgtaatcccaactactcgggaggctgaggcacgagaatcgcttgaacctgggaggcggaggttgcagtgagccgagattgcaccactgcactccagcctgggtgacagagtgagacactgactcacagaaaaaaaaaaaaatctcactctgacatcccaccagaggtcttgccagcctacaggtccatttcccttcttggtcttacgtctcagggtctaagagacaggtaaataaatcattaaaaaatgatgtatctgatagttcaggggccacagtaagataatttttcaggctgagcatggtggctcatgcctgtaatccagcattttggaaggccaagatgaggatcacttgaggccaggagtttgagaccagcctgggcaacatggcaagacccccatctctatgaaaaatagagataaaaagaagaaataaaaaagtgtgtccctttcccactgagcaaaagcatcctcctgaggaccccaggtgtgttttgagtgtcaattctggccgggtgctgtggtgtggccatgatcgacaacacagtccttgtccacaaggaagttaaaatcttaaggaaagcgagactgttgtggtccagctgaacatgcctgtgcattgagacctaaagctcatagagatgctcactctaggggaccatcacagtttggcccctgccaccctccaacatcaccaaaaccactgttgttgcaattggggaacactctgacaactgttggacagataccacatgccaagacccagaagagacaaatgcatgtttttagctatgttgtgtattctcaaagagcttacaacctgatcaggagacgagaagtattccaagtagtaaatggtcattggaaatacaaagcaa

SEQ ID NO: 222325 - DNA, 1351 bp, Homo sapiens
ttgtggcatccttatatggataatgcccaatgatgcctgcaccctgtaacagtttaggaaggcctgaagtcgcacactgggtcctggctgctgtaactggagacccccagaagatcccctgcaagcagccaccagcctgctgtcaagccaataataaaagctcagcacaaacagagatgaagaaactcacattgagaagagttaagaaacttgctcaaattcataaaatcaagaggagaggtggatgtaattaaaaccaagcctttgacaaatcaaggaaacttttcatgtcgtcactgctacctcatccgtggccacaaaatctcagtcaagatctagggttgatgcaaactggagtcattcccagtatccacaacacttctcttgtgtcttctgggaagctaagatttcatcccttgagtttcattgctgcctgaatctattgcatcttacttgagagcctcatttattccatgctacaagatccatgcaagattccaggatcaccaagatcactccaggaaatgaagagatcaagagagctgccatggacaagtctctgcctctctgcttcagcttctagttccctcataatataggacaattccttgtacaaaacgggtgctccataaatatttgttgaatgaacttcttttctagatggtgacgtgatggcaaccttaaaacctcatgccattcttcctcatcattctctgggttaaagaaaggcctaaacttttccagcaattgacagagccttggtgtgtcatattgcctcattgtgcctcagttgtcccatcactcccacttgggagaggatatgaatgaatggatcttagttttaaagagctgaaggtggaattcagttgcctgattgctagcatagatagtacctctatgtatgtgccatttctttttttttttttttgattgtttagttcatttatttgtgtaaccaattttgattaaaagctgaacactgtgctggaagctgaggcttcactggtgtagggatgccatttctgccccctaagaatcacaagggctagagcattgcaggaggtccttacagcaacaattaccatgaactaagcctttgcttagtgcaggcactgtgttaagagggaagttagtaatgttcttcccattttagaattttgtaactataaaaatataatgcaggcttaagaaagagcagtttaaaatgacataaataaacctttgttttagggaaagtttgcatatgtttgtgcttctgtgttatactaagaatcctgagcaattcccacttcagtataaaattctagtggtgtgagggcaaaaggtgaaaaagagttttaaaaaggtaaaa

SEQ ID NO: 222326 - DNA, 466 bp, Homo sapiens
ctcccatttcttcctgagtttgtcctacatggaaatcgctcaccattaacctcacttttaaaactataccttttcttctgggcttatacaataaatctcacaagactttcatcagctattccaaacctccctcatccccactttgtcctcaactgtaaagccctggagaccatgacatgcaatttggaactgtgacatactctctcaatcgattcaccaaatcagctgtgtctcctaaaccagtgggtaggctctctgagttcaggcactgggcttctggtataccccctgggcccaggtatacccccttgaccacactgggtagggagcagacactcattcacaggtaccgactactcagacggaacaaagataaggtgaggaacttggaccaggctggctgacagtctaaaaagatccttcccattcatgcagaagcaaccctctcccaatataattttttcac

SEQ ID NO: 222327 - DNA, 488 bp, Homo sapiens
atcagtgaaccttctctactctgatgagacgcaggtccaagaaagtaattattgtttgcatctatgagttagcaaccatcagattgcatccctgaaaagcatgctaaccaggaaggcaaaaccttactaaaaacctttataaggacagtaatacatgaacaaagcaatacaagagcactgtacatctgcatacattaggaagtgaaatacgtaaactgcataaaacaaattcaattcatgttgaggcataacagaagcaacctggttgtatcaggatgtctgttccagctcataaagttcttaccagagacaactacgaaatctgtcagtgcctataagggtcatagcaaagaacagaatttgggaaagagagagtattccaaagtactgtgaattcctctcctgtaccacaagtcacttcccccaccactacacattaaacaactacctacattttctactaactaaatccttgccctaagttttcc

SEQ ID NO: 222328 - DNA, 576 bp, Homo sapiens
catatgtaactaacctgcacattgtgcacatgtaccctaaaacttaaagtataataataataaaattaaaaaataaaaaataaaaaaataaaataaaataaaaaagaatctactttagacattatgttaagcaaagtaagccagattcagaaagataaatactgcattatctcacttatatgtggaatctgaaagttgaactcatagaagtagagagtagaatagttgttacctagggctggagtggaggcggggtgtggctggggagatggaggagatggtggtcaaaagatacaaagtttcagttagacagaaggaagagatatctatttaagagatctaatgcacaacatggggactgtagttaataacaacatattgtattcctgagaatcactaagagaatagattttaagtgttcttaccacaaaaataagtatgtgaggtgatgcatatgttaattagctcaatatagccattccacagtatatacatatttcaaaacattgtattatacatgataaatataatttttgtcatttaaataaataaatacattttaacatgaaaaaaaaa

SEQ ID NO: 222329 - DNA, 468 bp, Homo sapiens
tcccttcctagacctaagggccacctctgaaaaagtgtccaggagagatctcagctgctcatagcaactggcacccttgttctgataaggcaggcagggtaaccacggttctggcacgtgatctggagatgacatggcatctcctgctcagaaccaggctggtggccctcttgctcacaaagtccacgcccccaaatgccctgtgcctggagaactgggactcatgccttccgctgagactagacacagtgaaatgtcttcagaagacaccattcactgacgatttgttgttactttttagatcagtctattttacaatagaacagaggaaggggagggggaatagttgaggttcctggaagaaataattgtggatattgacagggcaccattgtgaataagagagcggggactgtcacagtccccattccttccagagagccttttgattgcaaagtctggaaaaga

SEQ ID NO: 222330 - DNA, 300 bp, Homo sapiens
aagtaatgagaagtttccttttagaaggaaaaaataaacccactagtatgtctttgagtattcactccacaaagacctatctatagagaaataaaaactatcagaaaatgggttgaatttgctcctatttggttttgttttagtgaaacctatacgttagggaaagttgatttgcagtattgcaatcttaaatttcacatcaaggaacccaatataagaaatagtttctggtaactgagaacagtgtcagtgggattcatccaaaaatgtttgtccctgatgtacttattttccatctgg

SEQ ID NO: 222331 - DNA, 426 bp, Homo sapiens
aaaggccatattggatcctgaatccagaagggtgcaaggttgctataaaggacatttttggaaaatctgacaattcgaatatgcaccatatattcgacaatagaattctatcaaagttttgtttcctaaaattgaaaatcaagactggtcacggtggctcacacctgcaatcccagtgctttgggaggccgagatgggtggatcatctgaggtcaggagatcgagactatcctggctaacatggtgaaacctcgtctctactaaaaatacaaaaaattagccgggcgtggtggcgggtgcctgtagacccagctattcaggaggctggggcaggagaatggcatgaacctgggaggtggagcttgcagtgagctgagatcacgccactgtactccagcctgggcgacagaacgagactctgtccca

SEQ ID NO: 222332 - DNA, 429 bp, Homo sapiens
atcctctaataagcactttttatgtttaaaactttgctaaatgagggctgggcccacatgagagaacagatccatacacactttgaaaaactttgttcacttttaggaaatataattttgaaaaatcatttacatacaagaggtccactgaggcattgcttttaatggcaaaatattgcaatgtacttgaatgtccttcacattagattggtaagataaattttagtatgtgcatgtactggaatattatatagccagtaaacaaattgacaatgaagctctatttgtaccagtaaagaatggtcttgaagagacattgtaaaatgaaaaaaaaaaaaccaagttgtaaagcaatgtagattatcttatcagcatggaaaaaatgcaattattatatggaagcatgcaaatatatctctggaaagatta

SEQ ID NO: 222333 - DNA, 481 bp, Homo sapiens
ggactcaataggttgcaagtgacggtgaccaattcaaaccagttaaggaaggaaggggctcaaaatagcagtcctgaaagggccctggggcagctggacatgggtaggcatccttccttggcctctgtgtgcaagcttcaccctcaaccagctgcttctgtgaacttgagatccaagcttcggagcctcacttctcattgattcaccctagaaaagaggtgatgatcactctccttctggttccaagtttaaaatcccagggatgggatctggttgactcaaccaggtagggacccacccacacagctagagtggggtcaggagcactgcccgaaagaagggaagcagttatcacaagagggagtacagagggcctcccattgccttgggatgaagtccttgcctgctcccaacagtctccacattacctcgttcctgcccgtctaccttctgggtcaggcttcagctaagacgccattcc

SEQ ID NO: 222334 - DNA, 142 bp, Homo sapiens
catttaaaaatttgtatagcaatttgatagaatgactgctgaatttaataataaatatgtgactatatccatatgcctttctcttattaatttccttttgccagcaatagattttcattgattatataatacagttgataca

SEQ ID NO: 222335 - DNA, 381 bp, Homo sapiens
ttttccgtagccataaaagagatacatctcattgctggaacttgtctctattaaaaacaaaacaaaacaaaaaccttataacaaacagcatggctggatgcagtggttcacacctataatcccagtactttgggaggccgaggcgggtggatcacctgaggtcaggagttcaagaccagcctggccaacatggtgaaaccctgtctctactttttagacaaatacaaaaaattttagccggtcgtggtggtgcatgcctgtaatcccaactacttgggaggctgaggcaggagaattgcttgaacccggtaggtggaggttacagtgagccaagatcgtgccactgcactccagcctgggcgacagagccacactccatct

SEQ ID NO: 222336 - DNA, 435 bp, Homo sapiens
ggcttataatacaaggttaggtctcttggaagcctaagaagattatccaaaaaggctgttttcagttgggttagagtgtaaatagcatacaagtgcttcatgaaccccagttcaaattcaaaggtattcttagaaggttttcattaaataaaggcaggaaaataaattaagaccaagaaaatgatttcaacagaggggtgaagggggagctcctattcttccttcttactgaagtgcttcatccaaacagcctcctttacttccatggtcccttaaaaccactttgctaggagtcgacttatgtggagcaaaggcaatactaatggagggtgtggctcctctgtggccactaagtggaaaatataaccctcttgccagctacctcatgtggcaagtgtgtgtgtgtgagtaaatctgtgtctctattgggggggg

SEQ ID NO: 222337 - DNA, 220 bp, Homo sapiens
gtagtgacagggtctgcctatgttgccagactggtctcaagctcctgggctcaagcaatcctctctccttgccctcccatgctcactcttttaagaccgtagaatcattaatatctcatgggactagatcagggaaactcactgtgggaaatgcttacttaaattctgccctagttatctaatgtacttattaatagtaaatcccttctgtcgtcttctc

SEQ ID NO: 222338 - DNA, 428 bp, Homo sapiens
aagaaggctggagtggctctattaatatcaaagtagatatcaagaggacataaccactcatgtggagataaaaacttcatgcagtcatccttgggattatattgttgctgctgggggcagctgaggaaaaaagggaattgtattggtttgctagggctgctataacaaaataccacagactagatgggttaaataaagagatgtgtctcacagttctggaggctggacgtccaaggtcaagatgtgggaaggctggcttgctcggaagcctctccttggcttgcagatgtctgccctcttcctgccgcttcacgtggtctttcctctgttcctgcacacccctgggtttctcctctgggtgtccacattttctctgggtgtccacatttctcctcttatgatgccagtcagattgggtgacagtccac

SEQ ID NO: 222339 - DNA, 292 bp, Homo sapiens
ccttcagtaaaaggaagacagggagaaaggaaagaaggaagagcaggccacaaaccagaaaacaaataacaagatgacagtaataaattcttatcaataataacattgaatgtaactggactaaactctccaatcagaagacatagagtggctgaactgatttaaaaaaaaaaaaagaaaaaaaacccaagacctagaatatgtcacctacaagaaacacattttacctataaaaacatacatagactggctataaagtgatggaaaaagatataccatgccagtgaaaacc

SEQ ID NO: 222340 - DNA, 439 bp, Homo sapiens
taaagtaaatttgagacattatgtcatttcataactccatatgcatttaaaaagtaaggacattttcttatacaactatatgccatcatcatctctaacaaaatcattaacaaattattgataccatctaacagccagtctatgttcaaatttccctggtaaatttggcttcttaaccttatcatcacataaaaaggggttcttcctgttttttaaaaaagctataaagtatttttttaatctcaccagaggctttgatggcagaatttttttttctacctgttaatttggcaagagagtttcctttatgcaggagcacagattattaatcttgggtctgaattctagctgtgtttctgcttctaatttacgtatccttaggggactcattcaaccctcctcagcttcccacctgcatcctccttcggcctaataactg

SEQ ID NO: 222341 - DNA, 381 bp, Homo sapiens
aacaggatacctgaagttcagaatggaggggctgcatctggtgagaacctccttgcaacatcatctgatgacagaaggacacacttaagagctcaattcacgcttataataagccaactctcttgataactaacccactcctacagtaacgacattaacccatttatgagggcagaacccttaagacctaatcatctcttgataggccccacctcccatcttcgttgctttagggattaggtttctaatacatgaacttcaggaacacgttcctacccataacagttaaatgatatttttgttgttctttttgattttgttgctcttgtctaaattattattataataaaatctgggttgatttatagtcccatagttaat

SEQ ID NO: 222342 - DNA, 810 bp, Homo sapiens
  misc_feature (806)..(806): n is a, c, g, or t
tgtgatctcttagcagaatagatttattatttgattgcttgcagaatattaaaacacagactacagaaccttgccccacaatcaaaatttctgattctctatgtctagaatggggaccaagaatttgcatttctagtaaattgtcaggtgatgctgatgttactgatttggagaccattactttgaagagcagtgctttaaccttttttagaccgtggacctatttttttttttttttgagacggagtctcgctttgctgccctggctcttggctcactgcaagctctgcctcctgggttcacaccattctcctgcctcagcctcctgagtagctgggactacaggcacccaccaccacacccggctaattttttgttcttgttttttagtggagatggggtttcaccatgttagccaggatggtctccatctcctgacctcgtgatctgcccgcttcggcctcccggagtgctgggattacaggcgtgagccaccgcacctggccaaccgtggacctctttgaggatatgatgacagctacataccttcccctcaaaaaagatagtactcacaattctacctgtaatttcagagagttaatggaacccttgatgcctaaagacctcagaagaaaatgtagtgttaggtaggaaggaaatgagacattcatagatgagcacaatttgataaccgataataagtattcagtagttgataagcaatagaaaacattttctaaaattctgttttagtttttgtttttaatttttagaacctaaaaggagcccttaccagattcttttangttt

SEQ ID NO: 222343 - DNA, 715 bp, Homo sapiens
  misc_feature (39)..(39): n is a, c, g, or t
tcgaatcgagctctgtacccagcagcatagatattaccngaaagagaaatggcagatgagctccagcatagctaatgtatttttagtactgggaaaatatacaagaaattttattcacagagtccaaattatatttaatggattatggaaactcaacaattaaaaccaaataaaaatttctcacttagatcattagaaagttatccttgaaaatgttagttaaatgggctgccctgggcaaacagggcacaaaatccaaggcattatgatagaaagcattgtgacctttagctttaaatttagttattttcaaatttatttaacaagtatttactagtaataatatgcattatacgaagaataaatgcatttgttgagcatttctatgtgaaaagtaccatgccagatcctagaggctggaagagtgagaacacaaagttgaatcagacattagcattaccttcaaaaaagaacataacgaagagggagatacataggaaggcctggacaaaaaagagggacaagaggaacgatgctgagtggggtcaggttccaaataggccacagtgttgaggctggctactgttcctaacactgctccagggacagatcagggagtcttcccaggtctggttggcatattctaagggacactctgacctttacaaacacatgctgctgttttgctgtttgctcctcacacattctcatgtta

SEQ ID NO: 222344 - DNA, 367 bp, Homo sapiens
ccctctggacactccttccctcccaggtacttagctcatctttaaacaccttatctttccccacccaccttataaccacctagaccctgtatagacctgggtgtaactccagccagcctggtcactgacctgtgaggtggccttggacctgttactcctcctctcagcaaggtagtgcagtataaattggtggggaaaagctagaaatattttcattaaaaaaatcctcctggctgtggctcacgcctgtaatcctagcactttgggagctctttgggtgggtcacttgaggctaggagttcgagaccagcctgggccaacatggcaaaaccccatctttactaaaaaaatgcaaaaattagctggg

SEQ ID NO: 222345 - DNA, 295 bp, Homo sapiens
gaatgaatattgatttaatacaagtgtatagcaaaacttttgtgagaaaaggtgtaagagagctgaccctcattgcccatcatgagaaattaatcactaataccacaagtcgttgcatctcaagattgctgtaaaaacatagaattcagagccccagagttagtgctgaggggatggaaaggagcttctcgaaggagtcggctggagtattggaagggtggatggggcaccgctgtgttttgttgtatctttttgcacttaatgactattgattaaaatagttctttgattaaaa

SEQ ID NO: 222346 - DNA, 611 bp, Homo sapiens
atgaggctaggtacgaggcatgggtgttgctcagataccatcctctcagcactagggcctttgttacccagagaagaagaagtaaaggccctagtgctcagataccatcctctcagctcctgccttacagcccggctcatgggcctcctgagtgacccagaattaggtccagcagcagctgatggcttctctctgctcatgtctgactgcactgatgtgctgactcgtgctggccatgctgaagtgcggatcatgttccgccagcggttcttcacagataatgtgcctgctttggtccagggcttccatgctgctccccaagatgtgaagccaaactacttgaagggtctttctcatgtacttaacaggctgcccaagcctgtactcttgccagagctgcccacgcttctttccttgctgctggaggccctgtcctgccctgactgtgtggtgcagctctccaccctcagctgccttcagcctcttctactgggaagcaccacctgtattggtggcgctccctcatagagcgcattgattccctggcacgccttgaggtgatgtcagtgaaatccccgcaggctcctctgtgggtgtctcatggcaccatc

SEQ ID NO: 222347 - DNA, 822 bp, Homo sapiens
atgaggctaggtacgaggcatgggtgttgctcagataccatcctctcagcactagggcctttgttacccagagaagaagaagtaaaggccctagtgctcagataccatcctctcagctcctgccttacagcccggctcatgggcctcctgagtgacccagaattaggtccagcagcagctgatggcttctctctgctcatgtctgactgcactgatgtgctgactcgtgctggccatgctgaagtgcggatcatgttccgccagcggttcttcacagataatgtgcctgctttggtccagggcttccatgctgctccccaagatgtgaagccaaactacttgaagggtctttctcatgtacttaacaggctgcccaagcctgtactcttgccagagctgcccacgcttctttccttgctgctggaggccctgtcctgccctgactgtgtggtgcagctctccaccctcagctgccttcagcctcttctactgggaagcaccccaagtcatgagtcttcacgtggacaccctcgtcaccaagtttctgaacctcagctctagcccttccatggctgtccggatcgccgcactgcagtgcatgcatgctctcactcgcctgcccacccctgtgagctgctgccgtacaaaccacaggtgattcgggccttagccaaacccctggatgacaagaagagactggtgcgcaaggaagcagtgtcagccagaggggagtggaaccagtgggagccatgaagatgagcctcagcctgcctagatgtccggaatctacctggataaatgtggcatttcccaagaggaccg

SEQ ID NO: 222348 - DNA, 410 bp, Homo sapiens
aatgggccaaatggagagtagatgccatctaatcagctccagctgatggctgccatatgaaaataaagatctagtgttgccagaattttgggcaagagttgtcagaaatccacactttatgtggattttcccatttaaaaaaattgaatcagttcaaattttaactcagagcatgcgggccaactcagagttaaagcatatccgagtttgagacttggattgagatgctcaaccaaagctcctcaattagacagccaggctatattctttccactgttctgaagtccagtgctatgctgggtataggtgacataaagatgaataagtgttcaaactatccccagagaactaggataaacttgaactcaagcaaactggtgtgtgataaatgctttaaaaggaatgtggaa

SEQ ID NO: 222349 - DNA, 408 bp, Homo sapiens
gacaagggcctaatcttttgcccaggctgtagtgcagcagtgaaattatagcttactgtaaccttgaagtcttgggctgaattaatcctgctgcctcagcatcccaagtagctaggactacaggtgcgcgtaaccatgatgggctagttgttattgttgttgttattattattattattgtaaagacagggtctctctgtgttgcccaggctggtcttgaacttctagtctcaagtgatccccttgccttggctttctaaaatgctggaattgtaggtatgagccaccatgcccagcctgtgaatattattgatttatttttgctttcattttactcttctccattttatatacattaaaatatctttactgactttgatatattatttagaaatatatttaaatgta

SEQ ID NO: 222350 - DNA, 540 bp, Homo sapiens
aaagttttaaatctcatccctgcctgagaggttagcttcctacatataagctccttttgtattggacttgtaattgctcattcagtgttagtattgccctgtagagtgtaagctccttgagggccaagaatgcttctgcctcttccattgttgcttccccagtaccttctgtatatttcataaccaaataatgaaaaagatacattccatttaaagggcattgactttgggttaaatgattgttatattgttttaggattatctatgatacactttgacatctcacacacacacatgaacttttctttttacaatgcaaaagtttaaacaatagcttaaatttagactgcaagaatattataatctcaatatggtatttggtactagagatagatttcttttataaaatcttaaaaacaggacgttctcttccttttgaacctttatcccagaggtgaaaatatccaatatgttgttttctgcatatattgaagtagtagtttcactttaataaagatggattaaaagttaaaagcattc

SEQ ID NO: 222351 - DNA, 230 bp, Homo sapiens
gctggagtgcagcggtatgaacaagctcactgcagccttgaactcctgggcacaagcaatcctccagcctccctcagcctccggaggaactgggactacaggtgtgcaccaccacaccctaaagccaagttttaaaccactaacttgtccctttcacttcttcccgagatgacccctccagtttcagccacgtttaaccaaagccatagctctcatactgtgcatcagca

SEQ ID NO: 222352 - DNA, 765 bp, Homo sapiens
agtttttgacagcgtttaatgtaatcatgattcaataacactttcttcccgagcaccgtgaccccatttgtcaatgtgcttcgcttttcatttcctctagttcagaagtgctgtgcttgtatttcaaactaaaatgtgcttgccttatattgctgtctttgtcaaaaatacaaatatctgccctgaggccatttctacttcaaagatgcaatatggtgcttggtacaatttgggaaatttcttttttttttctttctttgtttaaaatttacaaatccattcaacaacacatataatgatctgatttccttttttttttttttaagaccatgagagaatgatgcagagattttaatcattagctcattcttttggtttaaaaccataattggtctagagaatttatatttcataaattgttcaatcctatattaaaattcaagatgcttttatttatcatcttgaattgtacgaattaaacccatgcctttttctcttgttttctcctcttgatccatgtaagcaaccccagcccctgaccttcctgaagtctggtcttgtctcctgggcctccagcctcactcctgccctcacacaggcacacatacaattcagggattatgacatattatgcacgaaaacctttttgaggaaagataccaatgtgaagttgtgaatatggactcctgttagaggaggagggcttcctcattaatccgggtgtgctcgcttttctatcgtgtggaggacttccccaaatagttc

SEQ ID NO: 222353 - DNA, 504 bp, Homo sapiens
gtcttggcctgggggcacacgctgctgccctcttgagtcagaacaagggcgttgagtgtctgctcccactcccatgcacacccgcaccctgacagcacaagttccactccatctctgctggttcactcagcctgccctcattccgtgttcctgactcttctccagccacgagacacctgccccatcaccctcagtctgtctgctcatttgctcaggcctagcacacaagttccagtagtattaacagataccacggagcaaagcagggccactaactagaggtccacatgtgttcatagttcttttctaggtagaatttacgtatagtgggaggcataaatctaacagtctgtgagttctaacaaatgaatcaccaggcgcagtggcttgcacctgtaatcacagcacgttgggaggctgagacaggaggatagctgagcctgcgagttcaagaccagctcgggcaacatagtgagacgtctgtctctacagttaaaaaaaaaa

SEQ ID NO: 222354 - DNA, 522 bp, Homo sapiens
cgggtggatcacgaggtcaggagatccagaccatccttgctaacacggtaaaaccccgtctctactaaaaatacaaaatttagccgggcatggtggcacgcgcctgtaatcccagctactaaggaggctgaggcaggagaatcgcttgaacctgggtgacagagcgagactccatctcagggaaaaaaaaaaaaaagaaatgcaatttcttggttctcacgccagacctaggaattgataactctggaggtgtggcccagcaatctatgttttaacaaacacaggtaattcttatttactctggagctcaagagaggtggagacagggagccaggaaacatctattaattgaaacacttggaaagcctcccctgtccctcacacaggtgcctgaaatagcactcaggccccacctggtaggtaggaattctgctttcaagtcccaggtcttatgatcttggacaagtctctccttcagtgactaatgcaatgactctttgacagtgtgctgtggaccaggtt

SEQ ID NO: 222355 - DNA, 460 bp, Homo sapiens
atcccaaaaggaaacatcatgtgtcaccatgcctggctaattttttttctattttttatagagacaggttctcactgcattgcctaggctggccctgaactcctgggctcaagtgatcctgtcacctcagcctcccaaagtgttgggattacaggcgtgagccaccatgcctggccaatggtaggatatttagaagcatccttggccgctacttactagaagccagtagctccacccctcaagttatgacaactaaaaatgcctctagacattgccaaatatccttgggggcccaaattgccccccagttgaaaacaattatgttatcctaaagtagctcactcagtttgcgagtttttgtggaacactgtaaagctcagcctgacctctttgtgccacccagcaagttcccagaggcctgcctcgctctttccctggtacacgcctgcaggaggtacct

SEQ ID NO: 222356 - DNA, 527 bp, Homo sapiens
gcagtggcatggtcttggcttactgcagctttcacctcccgggttcaggtgatcctcctgcctcagcctcccaagtagctgggactacaggcacacgccaccacgcccagctaattttttaaattttttgtagagacgggattttgccctgttggccaggctgggagcacttagaattttatcatgattatgtttcaggtatatttataagtgtgggcggcaaaccacccaggtgccaaggcaagagaccgaggacacgagctgttccaatataataaaatataaaataagaatagttataccagatatagatcttagatatgattatatatgaatatcattaatcattagtttgtagcaattactctttattccaatatcataataatcctcactctataatcataacctaggaaaaaccaggccatacagagataggagctgaggggacatagtgagaagtgaccagaagacaagagtgcgagccttctgttatgcccagacagggccaccaaagggctccttgg

SEQ ID NO: 222357 - DNA, 399 bp, Homo sapiens
tataccacatctggaactcaaaatgctatcaggtttgagaagactctggagtaagaggtccaggctatgatactagccatctgacacaaaccagccactccagtgttgctagtaatgcccatgatggataacaatgctgtgtggaatttctggcatggcacagtaggaaagctaaagtgcaaatctttcaatggtatagccagtaaatctaaatggggtagatccatgccttctacagtaggaaatttctcagtgcttataaatagatactatcatgctccttagccctattagagactgagtagatgacaatgggacactgtgttaggttgttcttgcactgctagaagtataaataaaagaaatacctgagactgggtaatttataaagaaaagagg

SEQ ID NO: 222358 - DNA, 362 bp, Homo sapiens
tggctggaaacgggaaccttcagcgatcaagcgtcaaggactgccctccaaagtctccttcccagttctgctgtctgcctactcagtgcctttcccccgaacactcatgttatataagtctccttagtgtttttccagagacactctatcctagatcttctgtattttttgttgctgctttctaacctactttgttttggagatcatttatatcacttcattaagagcactatcttttataatgattgcatagtagtccattgtataaacaaaccattgtttatttaacatttcccagttggtggacattacagacatgctgcagtgagtgatgctgttcctgtgttattttatacatggtt

SEQ ID NO: 222359 - DNA, 132 bp, Homo sapiens
tacacctgcctctcccccaaccctcatcccctattcccatcaggtactgagtaagggaatgggaggagatagttgaaggagttcaggttgtggctacagagtaggaaagtaccattagaccagtgaagggtc

SEQ ID NO: 222360 - DNA, 347 bp, Homo sapiens
ggagtgatgggaggaagttgaagatggttgtatgttggcaaaggccagtttactgaagctctgtgacaataggcagggtctattgtctgtgacaataggcaaaggagctatgatggcagccagtaggaagcaccttggttgggcatacaaagctatgctgcaagtggcatggccaggcagggaccgcgggagaggacagcaggcaggtgggtgctcagatcagactggccatgttccatgggcaaaactgccttgctctgtccaggtccaacagtcaacaaagaccaaatccacctagaagatcatggtaagccttggagagcaggcatccctggcagtgctccact

SEQ ID NO: 222361 - DNA, 517 bp, Homo sapiens
tttgatgactgcagacatggagaagtagaactagttctaggcaagggctgtttatcctgcttgtctgaggagtgagctgtggggaacctgttaagtggttgtaatgaaagctgagggtgaggagaatgcagtggggaggggcttgaactttacctgcagtgcttctactggcgattgttatgtattttgtttttaagttttaatttatttgagagtgtggatatacttttttaattgaaatataattcacttaacttaaaaggtactgttttaggccaggcacagtggctcatgtgcctgtaatcccagcactttgggaggccaaagcaggaggattgcttgaacccaggagtttaagaccggcctggacaacatagggagaccttgtctctactgaaaaagaaaaagaaaaaaattagctgggcatggtggtgtgtacctgtagtcccacctacttggtaggctgaggtgggaggctcgcttgagcccaggagttcaaggctgcaatgacctacgg

SEQ ID NO: 222362 - DNA, 399 bp, Homo sapiens
ccaagacggaacagtcaggaccgcaggcaaccctgagaagtggagtccagagtcctaaaaacctacaggaaatacggatgtgaccacgaggaccgcgcgccccgcccaccgcgcgagcctgggacacctctgggagtggccacctggcctaggagtacgcaagcgcagatcagacaaatgctggggcccccgacctgaggctaagggtggagtcgctgcgttctcagcgccagtaggaggcgagtctgggtggaacctgactcgggtaaaagaaaagggttaggtaaatggactcaggtcctataggagtgacttaagtcccaccacattcttcaatacattatgttcttcacctttggacacgaatacatatgattaaaaattttatttaaaaacatc

SEQ ID NO: 222363 - DNA, 772 bp, Homo sapiens
ccacgaccccatctgggaggtgtacccaacagctcattgagaacgggccatgatgacaatggcggtgttgtggaatagaaaggcgggaaaggtggggaaaagattgagaaatcggatggttgccgtgtctgtgtagaaagacgtagatatgggagtcttttcattttgttctgtactaagaaaaattcttctgccttgggatcctgttgatctgtgaccttacccccaagattgcaccactgcactccagcctgggcgacagagtgagactcggtctcaaaaaaaaaaaggatacattctgagaaatgcattgttgggcaatttcatcattatggagtgtactgacacaaacctagatggtatagctgactgaacacttaggctacatggtataacctgttgctcctaaactacaaagctatacagtatgttactgtactgaatacagttggaacactgtagggaccagccctacaaggtctgtgggtttttctccctgtgtgcagagactagaggtggtagaaataaagacacaagacaaagagataaaagacacctgggcccgggtgagccactaccaccaagacacagagactgatagtggccccgaatgccaggctgcactgttatttattggatacaagacaaggggggcagggtaaggagtgtgagccatctccaatgataggtaaggtcacgtgggtcacgtgtccactggacagggggcccttccctgtttggcagctgaagcggagagagagagaagacagct

SEQ ID NO: 222364 - DNA, 435 bp, Homo sapiens
acgtgaaggggtatgttaaattccttgaaagcttgtttttagtactcttctccaacagcatccaattagctctatttagccaccataatctataggatgtctctttctaaaaacccctttctactctcagagaaatgcccctgatttctggatccaaaaatgtcaacactgagttgctgtgaagaggaagtaggacaggtcagggagggcttctgatcatcagatgttctggttgcttcagtcctgattcctccttccttcaccttttatacatgctctatttaccaggcagcacttaactgaggcagctgcctcagctggaaagaataaaattgggcaggaacaagcctctatcaggccctgattttagatgttctgggccaaaatctgaaatgcaagtaggagcttttaacctaacaggggaaggatatatgt

SEQ ID NO: 222365 - DNA, 358 bp, Homo sapiens
ggtgtaaagtgcattgaacctatttgggccagttgcgtatgaccctgtttggactattgtagtcaatgcagggaaagctggtggggaagagccacaagcagaacaccctggtttttttggaagtcctcagcatggtctgggtggagctgttgaggcaagcactgagactgcctctcattccaacatctgctgttgagaaaggaagagaatgttcagcagtgagaaacctggccgaggccagccatcagactcctagagagaccccttgggaacctcttcagaggacgatttgctagaaggccagtgatagccagttgattggaaggtgacctttactaaatctcctagatgacagaga

SEQ ID NO: 222366 - DNA, 485 bp, Homo sapiens
gctattattgccactttacttgtattttgttcttattttgagtggctagggtaaagatcttttaactgatttaaaggatgtttagtttttattttatcagccctagttccaatgataggaattcaaaatgtaaaacttagactgtctagatgacttgattatagttgaaggagaaattttaaagcgagcttgaagaatggtgccaaagtgcattttattttctgcagactccgaagaaaggagtgtatcctctgaggggaagttccagactggcaggtctattttggcttcaggtatgcttttctagttattgaagtgataaggtttttttttttttttcctgtctctccattctcccttttcctccttctttataaaaccagattaatattatctattatatgctttagaaataatattaaagaatggagcttaaattgaaacttcaagagctgattgattggatcggcttgccatttttggag

SEQ ID NO: 222367 - DNA, 380 bp, Homo sapiens
cagtggattttggatttttcaagtacatagtaagaaaacatttagagttcttcaatcaagggactaacagtaacagcctcctttttccaaagcgtagttccagcagcagtgtggaggacagggtaaagagctgacaataaaggaggctgggcacagtggctcacgcctgtcatcccaacactttgggaggcagaggcaggtggatcacttgaggtcagggagaccagcctggcccacagggcaaaaccccgtctctactaaaaatacaaaaattagccaggcatggtggtgcacgcctgtaatcccagctacttgggaggctgaggcaggagcatcgcttgaactcgggaggcagaggttgcagtgagccgagatagcgc

SEQ ID NO: 222368 - DNA, 390 bp, Homo sapiens
  misc_feature (294)..(294): n is a, c, g, or t
acggttatggtgagttatgatcatgccactgtactacagcctggacaatagagtgagactctctctaaaacaaaatttggaataaaaactaaatgttttaatgcggtctgagtaataatgtgtttacagaataaaaaagaacatcaagtaggcctgtatttgtttatcatctaactttttatgtaattattccataatgcaaaatagtaaattcttaagtactggtgtaggaccatgctacaggtaatctaaagacataatccactgaatatttattaattgattttgttttanaatctttttatatttatatactaaggttgatagataatgttgatttttttgtgatttcacaacactatcagcaaaaaaaaaagcattgtcattcag

SEQ ID NO: 222369 - DNA, 317 bp, Homo sapiens
gaatttgactattgtagatatcttttataactgtgctgggagggaaagcttttcctctgccatctcaggtccagtagtgtgtgggagctgcaaatgagcaaattaacagattaacagggggaaaaaggtaaccaaacaatggacagattaacaggagaaaagacaagatttctttacatgtgtgtggggcagcatttaaatgagaagctccctgaagaactagagatagggatttatacaccaactttataggggaaagggtgaagggagaaagggtttccatgggaaagataaatggtcttttaggagaataaatg

SEQ ID NO: 222370 - DNA, 277 bp, Homo sapiens
tgtaggctgaaggtggcccttgagttgctagtttgcaaacccaggcttaaactacagcagcggttgaagagaacaaggaggctcagattacagcaatgtgaaggcaacagaatcagcactactctataaaggactgactgtggcaagtgagggagaaagagcgatcaagaataactccgtgaaaaactaatgactctatattaaaataatatatggcttttaggtattttcaaacttgacaaaagtgttttggcaattaaaaatgaaatgaaagagc

SEQ ID NO: 222371 - DNA, 550 bp, Homo sapiens
tggccaagcatacagaaaggcgtggaagtggccacacagtgtaggaacatatgcatcatatcttcatgcaactttgcctggcccacaaagttcctgccaggaaggcaaaatgactggtgacacaaaaaggtcaaggcttgccagatgcaagatgctgaaattcatgtagtgccatagctcatttctgtgtggggttcaaattcctgttcactttctgtgctccatgcttccacttaagcgcattgacaaatacgaagctttcagaaactacactctgcatcagcagggctacgtgttcactgggcaacgtcagcgcccaggcagcctgagcacccgtcttgtctccagatgagtcccagaaggccctctctgcacaaccggacaccctccattgggggttttatatacaacattaagattacatatattgggagaaatacctgtacaaccatgaaaaaggttttagtgatgtaagaatataatctgaattaaaaaagcaggacacaagtgtcatacatgacatgatcccaattatacaaatacgtaaata

SEQ ID NO: 222372 - DNA, 691 bp, Homo sapiens
gagccaccatgtctggcctatttttaatggtcaaataggtatggaaagaaccttagaatgatttttctagattacacattaaggtctatttactttccaatagttgataggagttttatatacacaaggctctgaatcagaaatggagagttgagtggccataataacatattgttatttgttgttgatgacacagtcatcaagggaaacaatgcagtaatgccataaagttgtcatatcctttgattcacgaatacatttgcaggtgtctttcataaagaaaacctcccaaatgaaaaaaggcttttgggataaagtgactttcacattacttataccagaataaaagaagcaatgagcaacagggccgagccaaccttcatcgagtgctagctgtgagctccttcctgtgcttggcactcatttaatcctcataagaatgctgggtgctggtgattatgagctcacggtacacacgggaagacaaggctctaagaggtcacaaactgtatgtgaataattcagaatccaaattcaagcaaacaaaaacaaaagccacgcttttccctttacacagaagatcatacaacctttaaaagaactatgcagatactgagaaaggctcaggagaacaaggaacaagaaactctgttagacttgtaggcactggacatgattctcctactctact

SEQ ID NO: 222373 - DNA, 409 bp, Homo sapiens
  misc_feature (373)..(373): n is a, c, g, or t
  misc_feature (379)..(379): n is a, c, g, or t
  misc_feature (391)..(391): n is a, c, g, or t
  misc_feature (396)..(398): n is a, c, g, or t
gctgcagaatcatgtgattttttttttttcccccaccaagaatccacttctaaagtgtcttctgaagcattttaatgtactgatgatatgagtttattttggtaatgattaattctcttagctccaggaaattttgtatctctggtttcagtagaatgtagacaggttccattttcttgcatgagctaaagataaagagttcccataaaatgaagcctttgggttttgagaacttttaagttaaagggttaagttttagaataattgaaaataagtattccaaaaaaatcatttaaaaaatttcttctcctaatacatttaatcagtttttttgttttgttttgagatggagtctcgctctgcactccagccngcgtcncagagttgtttntgttnnnttttgtttaaa

SEQ ID NO: 222374 - DNA, 245 bp, Homo sapiens
acagctattttaagatctttatatacatatatacatgtaataaattctattctttactataaacatacatgtcagaaattattagtgttatcatccttgtcctcctcattccactttgcagatgaaaatactgaagctgagagagactaggtaacttacctagtatgtacctacatagtgaagccagatttgagccggacctcctgactccagagtccgagcaatctcaccaattctgcccacaa

SEQ ID NO: 222375 - DNA, 555 bp, Homo sapiens
tcctaagtgcccatcgaacaatgcgtggataaagaaaatgtggcatcaaacaatgagtagataaagaaaaaatggtatatatacaccatagaatactactcatccataaaaaaaagaacaaaataacgtctttggcggaaacttgaatggagctgaaggccattattccaagtgaagtaactcaggaatagaaaactaaataccatatgttctcacttataagtggaagcaaagctgtggatacgcaaaggcatacagtgcaatataatggactatgggaactcagaaaggggaggaagaaaaaacgacaaactgggtgcaatgtacaatactcaggtgatgggtacactaaaatctcagacttcaccaccatacaattcatccatgtaaccaaaagccatttgtactccaaaagttattgaaataaaaagatgaaaaacaaaagtaaaatgtgcagaaataaaataaagaaaatattggttgatgccaacaaacacaaaacaaaaacacaataaaacaacaacaaattcacacgtcttgggaagccaacgacag

SEQ ID NO: 222376 - DNA, 656 bp, Homo sapiens
ggcctttctttaaaaacagaggacttgagtatattacccagtggtacttctagtgggatttgtaccacatttacatttgattacaacaggcagatgcttatggtttttaacggggggaagatatatttttcatgcgagtgttctcagtggttagaatagggagtaagtaacttgagcacttttagcctccttgaaatgctagggagaagaggaattaagttaatgtcattaatctctgttgaaaacgtttggacctctttattgaggattctttacaaggcatggatggaatacctatggatttccccatagcttatatacttttattctcattgttactacattagccacacacaacaatatttaattaatgttttcattaggcctcatacaagagggtacctttttctagtatgtgagttgcaatttttttttttttttaaatagagactggggtctcactgtgttgagcagcctggtctcaaacacctggcctcaagctatcctcctgcctcggcctcccaaagtgctaggattacacatgtgagccactgtgcccagcccgaccttttgttttgctggaaaacattcctgtcttttcttatgccattcctcctatatcacaaaacaaaaacagtcttcttctttttcccttg

SEQ ID NO: 222377 - DNA, 127 bp, Homo sapiens
atatatttcagttaccctggtttagttaagtaatactagtcccccagcaacattgcatatgttaactgtaagtgcatgaagtactgctagctctttagtccacatatcactatataacataaataac

SEQ ID NO: 222378 - DNA, 475 bp, Homo sapiens
agcaccttccttcccctggcgatccccactagctccgtctagtgacctgggccaagcgggcgctggaaggggggcggggtaaatgcggccggcgcagaggtggggagcaggtgggaaaggtggaggcgggctcgcctctggagacctacccctgctcccattgtcctccgcctgccagcttcacagacaggcctgaacgcgcagagagttccttggagtgccctgattttgtccccgagagggcccccaacctccgcatcctcttagtggctgtcctggcaggtgcgcgtcctgcggggagttgcgccccgggggctatcgccgagcgggagctgcctcctggaaccctgcccaccgcgaactgggtgcctactccccatttctgcctttcagtgaagaaagtgaagacacaggcagaaagagatcttggcagaaattggtgaactagggtggacttcgagaggaggtgaaacga

SEQ ID NO: 222379 - DNA, 247 bp, Homo sapiens
ccgggcacgcagcctgtccccacccatgggagtcccctggggtgtgcaggctgtcaatgaaatgtcattctgcgactgccacacttcagggcttcttctgacaaacagatggtgacttctgacatcctttgcatggtgtttttgcccgccctggggaaaccagcatttgtttccctctgctctgactcgtcacagagttccttccccctgactttgagaagtaaataaaaaatgctttccttacaaa

SEQ ID NO: 222380 - DNA, 461 bp, Homo sapiens
taaaaaatgaatattaatttttaaaaagacaagaaaaaagtgagtgacctcaatttttaaattaagtggcttgagaaacatagtaatcaaatgaaatgtatatctcccagtctagattctgatttgaacaaatcaatgtaaaaattaagaggaaataatattttaaagtgaaagaaaaggagtacagtttagtttttatgtatatataattttgaaattacacatgtaactgtgtaatgcagatacattgatgattaatacccaaaaatctataaatgttatcatatttcgattgcattataaatgtatttttcatttaagatattttgaatattaatcatcaatgcattcatgagaaacatgattactgtattttacaataatgtgttaggtacaattaggaacatcttaactaaaatttttgcacctatgtttatacaaaataatgtggatctgttgtc

SEQ ID NO: 222381 - DNA, 260 bp, Homo sapiens
gcacgagcacaactcacagtgctttgcagagagacatctggccacagcagcaaatgtagagctaatctacactactgtgctccacttacatcttgactctcttgaagcacggggagccttgtcatggagcactccttctcctttgtgcaccgcttattacagactgactgttggagaagcttatagtcctaaaagaaaacttgagacaaaggagaggacagctacatgaaataaaatgagaggaaagagacgtaaaaatg

SEQ ID NO: 222382 - DNA, 431 bp, Homo sapiens
tgcccctacccctgccccaggtccatggaaaaattgttttccacgaaaccggtacccggtgccaaaaaggttgaggaccgctgacctagtgggcttgtatctgggaagccagaaacataaatgagtctaagaaatatctcttcagctttgaacctagataacgttggaaaaatagtaagctcttcaaagttaaggacttatctataatttgcccatgtggctagcagttgctagtgaaaaatgaattttaatttatagcaaaaaccttattaagagttaatatctttgattgtggctgtccaaaaaatctgaagtagtcataatctgaatttaatcatttatttctccaacaaatatttatagtgtatatactgtggtttttaaacctgatttgtgcataaaaaattcctataaagctttttaaaaatata

SEQ ID NO: 222383 - DNA, 518 bp, Homo sapiens
gacgacgtcagcgcccgccgcatccccgggtgccccccagccgcgggggaccgcgacggctccgtgaccgtcacgtgccggaggccgcggctgctcgcggccagaccttcgcatcgagggacgtgagggacatttgtcctagagggcccaagataagaacgagaggaagaaccgggaggcaactctccgtcatcctctagccccccgcatcctaggaaacgtatggaaaacaatggaaggttaagtgtgtgcacagtgatctggccctgcaggagtgtgccgaccaggtgatatttcctggggcctggtgataaggatttggaaggttacagcacagagacgtgaacgtaaaaaggaaacagaggcagcaagcaaatgaggaaaccgatactctgttctgagaataaagccattttaccgctagacgtcatactctgtagacgttatagtgctggatgtctttggtactattacaagaaattagatatctctatctttaaatatcacttaaggaaatt

SEQ ID NO: 222384 - DNA, 553 bp, Homo sapiens
catattgtaatgccaagtttccattctttccagaacatgctgtagagcctctttctaaagattgcttaagaaatactatgttttaattttatacattggactccagagttcccaatgattatttataactgaattttcaatataccaaaaagaaaaggtatctgaatctcttcacctgctaaccaattggagagaaagagcgagtcaagtacagatcccttttcctaaagtttcattatttcttttaaagatagcctgagataatttatttttatttttaattttttaagactctttaaaatacatttttaaaattcttctttgttggagattatttcattaccacagatattttcacaaatataatactgcatttctggagggcagggatactgtatgagtaatacaacaggcagaaaacctgggatatattatgtaatcaatcattgttggattgagtttaattaaatctacaatatttttggtaaaattatgtttatgtataatagaatctattattttccaatagcaaggtaattatgaaaacatttct

SEQ ID NO: 222385 - DNA, 940 bp, Homo sapiens
  misc_feature (36)..(36): n is a, c, g, or t
  misc_feature (97)..(98): n is a, c, g, or t
gctcgacgtgagattttgcaaatttgaaccataggntatatttgtaagattgttctctcagttattaagagtttgaaattggggttgaactgtgtcnnaagctatggtttatgtgtatgtttagtttatgtagttgctgtgtgcataacatttggcaggggaaaatgtttttactttcaaacaaactgacaagaaattgttccatcttgaatttgtgtaagaacgtttcagaactaaaacaaacttaccaaaactaggtcttgtccattaaatgagataatgcgtgtaatgtgtctagcaagtacttggaaattattattgttaagactgtcttatagtctaacttatcaactacaatgatgcctcttctgaatttcctaatttcttgcctttatcttttttttttttaattatactttaagttctgagatacatgtgcggaatgtgcaggtttgttacataggtatacatgtgccatggtgatttgctgcacccatcaacctgtcatctaggttttaagccccacatgcattaggtatttgtcttaatgctctcttgccttttatcttttttatgatgaggattatatatatacacacacacacacaatgcctcctgtatgctcagtatcacttttagccaataaaattgagattctggccaggcacagttgctcacacctgtaatctcagcattttaggaggccaaggcaggtggattgcttgagctcaggagtttgacactagcctgggcaacatggcaaaaccctgtctctacaaaaaattaactaggcatggtggtgtgtgcctgtagtcccagctacttgggaggctgaggtgggaagatggcttgagcctgggaggcggaggttgcagtgagtcgagccgagatcacacaccactgcactccagcctgggcaacagagccagaccctgtctca

SEQ ID NO: 222386 - DNA, 102 bp, Homo sapiens
ataccttgtgtatcttgtgtatgtccagtgtctccctgctgccccagtatcttcacttcactttttgaatcaagctacaattaaggttcacactatgtgttt

SEQ ID NO: 222387 - DNA, 523 bp, Homo sapiens
acttttaaaaggcaaatgagtttcaagctactagaaatactgtatctagataaaggacaaaatggatctactggaatgtatatactgattagtccaaataggaagaaccatatctagagttccgggattaccacatttaagaaaacacagtatcaaatctgagattatccagagaaggacaaagaggatggaaataaattgagaaagagtttctaacatgaggaatggttgagagtaatctcaataattctgtagcctgaagataagaaaacttaggggaaaggtatgtatttaattaggattaagtttgtgactattaaggcaaaatgaactgtagctcaatgtaataaagaactttccagcatttagaaataatgaaaggggtgtgttaaaatataatgaggaccaagcatggtggcttatgcctgtaattgcagcactttgggagaccaaggcagaaggaccacttgaggccaggagttcaaaaccagtttaggcaacatagtgagaccatgcatccagt

SEQ ID NO: 222388 - DNA, 481 bp, Homo sapiens
tgatcttactgcctggcttcttcctgatgtcagtgcccacttgatctcatagcaaagttgggactgagcctaggcaccatgagtgacagcaggaggcagactgattcctgggcaaaagggggtgggtccccagtgatccccatcttcaggaccggggaaagcctgaaggctggggactaggttgcctgtctgtcccatggaccgaagtgggaacttgtggtgcctcttctgggcccacccatggctgctcacagaccaattaacttgcactttctccctagtgaggcccattaaaactatgggttcagccatagctgagcagatgacaatatgaccagctgcagagaggaactaccttctcagtggagagcttctgagacctgcagagacatcgggacaacaagctgcagagaggagcaacccactctaaggcctcttttcagctaggagctgagcagacatcaggacaaccagctgcaga

SEQ ID NO: 222389 - DNA, 436 bp, Homo sapiens
aacatcatgtttaaatgtattcactatattgtgcagagaaaagaccagaataaaactaaaagtgacagagacaggaacaagatttggagattatacacatttgcctatggttcgtagagtaaatgtcaacgaatactgtgcttagtagcatgaatgcacacgggaatcccccaggagcaacttgttaaaatgcaggtgctgattcctcaggactggggtgggtccaaagcctgcatttccaacaggctcccagacaatgtcttgctgctggtccatggaccacactttgagggcaagaatatacataactgatggttcagatctttctatttctagcataaatgagaaacttctgagttaaatgtaataaacattcatttaactgacacaactcccaataagagtcgacgcggccgcgaatttagtagtagtaggc

SEQ ID NO: 222390 - DNA, 445 bp, Homo sapiens
ctgtaaattctaggatcagtttgttatgttccatgaaaacactgttgttatttttattggaattactttggatttataggttaatctgagaattcacagttttgaaaaatttactcctttcatctgtacacatgtctctctgttcatttagggcttttaatgtccttcagtaatgttttacagttttctcctgagtagtctcttacattttttattagtttatgtctaagtaagttagtttttctttctactatgaatgtgacttttttgttacatttcctcattgactattgtgtgtaggaatgccattggtctttatgttgattcttatatctagcaaccttgttgaactcccttacctagttataatggtttgtccaaagatctgttggaattatattagtggcaaataagaatagttgtttcttcctttccaatctttgta

SEQ ID NO: 222391 - DNA, 438 bp, Homo sapiens
ttaggaatttgatccttcctgccaggtggctcccattttctgggatggctggaagccaattctcccaaaggagggaaggcatccgagtctagaggaagcttgcagggatttccaggaaaaagtggcaggagagaggatcctcagaagggtctggggcagagcaggctcaaaccagacccaagaggccccgaggacagtttgtttggtggctctgggcccccgctcagtgacagtgtggacgtttgtctctcgtaaggagtgagaataaacagaggacagaaatgcagaaagaacattcccgctgcatgcctgggaggatgggtcctgactaccagccccaggtctcccgaagatgtgatgcttgagtgagctttgtttagagaccttttttttttttttttttagtttttaaataaaaatattcatttttatcttaca

SEQ ID NO: 222392 - DNA, 505 bp, Homo sapiens
gaggaacatgaacttgtgttggtagaaatcccattgattgattgagtgatttattgtcttctgataaatatttaattgttcacaaggccagtccagaaacctggagactaatctgtctcttttgattagcaggacagttgtcgaaactcattctgtctttgtaataagcattcgtgattaatttaccaggactgataggatcctgtcactgtgacccctaactgagcaaacaagtcctttctcaaacctgaatgagaacagcctgggtgtttacactcaagactatttattggcaacataatttagcagtgaaagttttctttacaatccttctatcccgtgatagcctcttttcttctctgtgggattccctggtgttcaagaaagtgctctttcaggaagtcaagggacattctctagacttttaactttatttatgtcctatcttaaaccttcccagccctaagttagtaccctgctagtgattagttcaagaatgtgataa

SEQ ID NO: 222393 - DNA, 352 bp, Homo sapiens
ccccaaccctctgggatggaaaagaagaaaatggagagtgtggggcagacgccggccgagccgagggcaggtcagcacagcctcatgtccggcagagggtgtccaggttcttggcatcatgaacaaagaattggacaaaatgcacaaagcaacggaagaaggaagcagcaaaggcagagacgtgtggaacatgaacgcgcactccacagtgcagtgggagccgggctgagcacagggggtcgggagccctgttacagaactgcctggggtctaaatatgctccagaggtttccactggttacttggtatatgccctatgtaaacggagaggttatttcctgttgtagctgat

SEQ ID NO: 222394 - DNA, 419 bp, Homo sapiens
gtacactgtaggatgtttaatagcatccctggcctctacctgctagatgttagtagcacccccttcacccatccatgacaaccaaagacgtctccagattttgccaaacgtccctggggtagaaccttgccccactaactcagacaaagagcaaaatatgccgtgggcatctgtagcataacaccagagacatgtatttgaggacacacatggtggctgatgtcagggcatcttccattcagccgtctcagccaagggacactcatttagttcttccccaaggatggagcagatgggctgccccttgtggcagatgccagtctaggaagaaacaagacggtattactcaaaccatttcatcctccattcgatcacagtagcactgcccaacaagactttgtcttttaaaatgtagttta

SEQ ID NO: 222395 - DNA, 415 bp, Homo sapiens
tctgtgatataaggtctccgtacaagcagttatcatgctctgtcagtctttctatgcaattttatcatgtagattgttttgggaaacatgaaaattaagatttaatttgtcctaggaattggatccaaaatgtaatggaattggttccttaatgcagtgcatagttgtagagtatagtgtaaattaaatcaacttgtgcttcaataatctctttattagttttcaaatattgatttaaataatgatattaaattgtgtatagttgaaaagatggcattgctttcactgcaatagatgaatgtcatgaaaatgttcttctcttgtaatggaatcagatgtagaacatgataaagaacagttctcttcacacctcataatttctgacatagtaagttatgttgaggaaaataggcac

SEQ ID NO: 222396 - DNA, 465 bp, Homo sapiens
ggagcctccatgctgaacatgcctggtccccaggtagccttttcctattggcatagctgccagcattcatccatgcaagcttccagtttgcttatctatgtttgcagctcaacttttcaggccactctttgttagaaaagaaatgattcgggggctgctttttattaaaagggtaaccttgctgaggactctcttaccctcactaactgcctaatttctttctagctcctgtatcaaaagggtccccatccacctgcacaggcatgagagggaagtcccctgtgtataaaccctttaaggaaagtaactttgaaatgaccaagccacttcatgtttcttgatcttgctatccccaggcttttctgcccatccatctgcttggttcttcaaagcaccttttctattttatagataagatgctgcctgattcacaaatcgataataaaagccaactggacctttaaa

SEQ ID NO: 222397 - DNA, 796 bp, Homo sapiens
gggtcttccgtgatccacagaaagcgataaactacggataatccctaacagacactgcagctcatacagccttggagcctagaggagagatgacacgcccagagagaactgtgacataaggcagagagtgctcctccagaaagaaacaaaatactgtggggctaaaagaaagatcaccacagctgagggaaggcttccaggaggcggttccataccctctacggaaccagcagggcttcgccacagccagccaagactgggatggcctttagacagcatcaagccccagccctgtaatacgatgggaaacaaatgtccagagaggggaagtgacgtacccaaggccacacagtgagctggggctagaacccaggtttcctattcccttgctctctctccttccatgtcaaaggaggtgttgaaactaggggatggcagcacagtgcagtggaaagaccaggcacatccccaaataaactatatattcctatgtgtacatatatgcgagaaaggtctggaaacagatgcaccaaaatggtaacagtggttccctctagggagggcctgggatcatggcagtgggaggtagtccagggaaactttcactttgtagcatgtggacatttcataactgtgtattcacagcatgtgattaagagaccagtcgcaggggttagttttcacccagccctgtgtgacctttagtcagtacggactgcagagggcaggcttggtcagacctccctgggaattgttctggactccccatcaagaggctcccggatgggcatgggct

SEQ ID NO: 222398 - DNA, 429 bp, Homo sapiens
aaggcagttccctcaaaaatgagccttgtatcacattgttgctcagagggctcagacagtcataacacaaaatcttccctgctcaggttatgtttatggctttctgaggaaaaaaaaaaaacaacaaaatctgaaaaggcaacctctttagaagtaaaataattagcattttatttgaagaagacatattattacacctagtttttctaacttacctttttgaaccacttagagaactcacagtaatacagtttttttttctccctgtaaattacacggtagactaaatgtggtctatcactcttggcaaaagactaagggcagatcaaaatttttgttcgatgaagaaatagaaatactcattttctttttacacatctgaaatctgagttttaaattataataaatcattgacaaaaatctaaaaat

SEQ ID NO: 222399 - DNA, 520 bp, Homo sapiens
tgccttatggtacaaaggctttttccccacaattcagttatcttaaacttaaggtatgagattgatgtataacaattttctgatgcaagctatattatgcattttagaaataatttatacctacattcaactgctgatcatatgggaaaaatttataaaagtacattctatttgaactacttgtctaatatatcagaatattgtttatctgggaagtatccaaacaacagaggtgttctaagagcactttaaaaaaaggtcgttcgaaaacatcactttattcttataatcgaacatgatttgctctaaatcataatgtgaggtaatgaggtgatatgctgggctgtgagtgtctgttgggattgtcacagaggcacagtccccagcttggagatgtggtggtacaaatggtattggataatggctgatctaagagtgttgtttacaactaattgatcacaactcattacagatttctttgttccttcttcactcccactgctttacttgactagcctta

SEQ ID NO: 222400 - DNA, 250 bp, Homo sapiens
tgtaatcccagcactttgggaggccaaggcagttggatcacttgaggtcaggagtttgagaccagcctggccaacatggtaaaaccccgtctcttccaaaaaatacaaaaattagccgggtgtgttggtgcacgcctgtgtgttggtgcatgcccagctactcaggaggctgaagcacaagaattgcttgaacctgagaagtagaggttgtagtgagatgagattgcactgctgtactccagcctgggcg

SEQ ID NO: 222401 - DNA, 495 bp, Homo sapiens
caatcataagctcctaagcagaaagaaaagaattttgatcgattaaaaggaccttcataaactggaatcttcccaaggtacaaattacactgttcattctgagaacccaggatttgacctaaaaatgttttctttgcatgttcagccatcactgaaccagtaagagcaggacatcctcttatcctgtctgatttccgattgttattcaccagactatactgcgtcctttcctctttcacttcatcacacctattgatgttaacatattttttcttctggattttaagtatgtgtttattaccgtattatttaatctaccccctaattaccgaaatctgtgtaaaactattcatgtcccaattatgttataacatatgtagtctatggacatgatatagttgggatactgttctcctccaaatctcaggttgaaattttgtaaccacatcagagcaatctggttcaattatcatgtaataaagttgtgagttgttt

SEQ ID NO: 222402 - DNA, 603 bp, Homo sapiens
agaataatatttttgttccttttacttttccttattctctggtaaaagttctgtaactgaaaaagtagacccagaataatctagtgatcttaataatgcttaagatttcttcagtgctgtgggcatctgaagcagctgtgggtgatgctctgtcatcccctgtaaaatgcaactttcttagttttattttcctccctcttttttgcagaatgcttatatgtaaacatggtgatacaactgtctactttaaaataatacccttccccattacaccttgctttggggctatttgttagcataggaatcgggttgctagaccaccactactgccccgccacgaccactgggtcaattctgtcatagcatcacgtagagaatttataatgggcaggatgggttgctttccagaacagtcctccttggggtttttattagatccttcaaaatttgaaagtcaatttattctatatgaagatcttaatcacaagtaatgcttaaaaaaatcaaattcatgaatgaaagaaaaaggaattcgaatattttcactgtaggatgattgtatttaaaagttgaagttgattatactaaatacagattgtcaat

SEQ ID NO: 222403 - DNA, 479 bp, Homo sapiens
cactttgttgagatataattcacatataaaatttctgaagtgattgaatatacttacaatatgaggagcagacaatgtaggtgtcctgcccatacctcctatccgacacctttaccatttttgtggacaatggctcctgataaaggctttctactcccagctgctagaaccctgcagtgattaaccaatgactgaagtttacagggtgaggtggagtataactattccagctcccttctctgctgactggaacaacactgtcctccactgtttccagagcttctctgtggaaccaagccataggttcacctccatgggacttcactaatattgcagcctgacttgtcttccttccctttccggtcccattttccatttcctaactgtttttccggaacactttctagttaatcactgtcatgaaagacccttgtctctgggcatgcttgtggggagtccaacctactacgacacatggc

SEQ ID NO: 222404 - DNA, 407 bp, Homo sapiens
cacactgcgtgtcctcatttctgagatactgttcatggtaacacacaccattgatttagtaacagcttttctaggaataaaagacacattgcttgcataatgcgtattaattttgaaaatgctaatgagaaaatatgttatgatttttaatgtgattgcttccccacccccacctgactcccaagtgagcttcctgggggctaggactgcacccttatttgtttttgcaacccaggatttcccccacagagctccaagatgtcaggaaactttgcagaacaaagttttgcaatcattggtgggttgtggcatcaatttagcgaatacactgctggcatttaagaaataaaataggaaagacggactagacagattagaacagaaagatcagagtagactagaacaca

SEQ ID NO: 222405 - DNA, 357 bp, Homo sapiens
gagacgaagtctcacactgtcacccaggctggagtgcaatggcatgatctctgctccctgcaacctccgcctcccaggttcaagcgattctcctgcctcagcctcccgagtagctgggattacaggcgcgtggcaccatgcctggctaatttttgtatttttagtagagatggggtttcactatgttggccaggctggtcgaaactcctgacctcatgatccgcccgcctcggcctcccaaagtgctgggattacaggcgtgagccaccgtgcccggcccaggttttatatttttatcactaaaatctgaataattttctgagagcctgcagcacataatgacattaacgcaaactg

SEQ ID NO: 222406 - DNA, 337 bp, Homo sapiens
ctgtgctttgcgtactggtggctgcctgcaccctctcccagtgtcccagaagtgggctcctgctttctggtgtatggcgctggaggcctacttataaaggatcccactgccttggtgccagtcttggccaggacccacactgggacagtcagcaggagcttgagcggggtaggggccggctgggagtcactccagcactaaaaactcaccaggcgggaatgttactcctttctcatgccggaggaaagcctttgattgtgggtcccgaagaaaaacgacttctcgggtagaaagttggtgatgtagccttcaattaaaatgaggatatctcttacat

SEQ ID NO: 222407 - DNA, 440 bp, Homo sapiens
tgttgctgttagatttcactgtctactgcccctgagtttcaaggggagggtctacaatctctacaacctcagtgcttttcacaataccgggtacatggctgaatgaacaaatgacttccctgctaaagaaaaaaactggctgggcgcagtggcttacacatgtaatcccagcactttgggaggccgaggtggacagatcacaaggtcaggagatcgagaccgtcctggccaatgtggtgaaaccctgtctctactaaaaatacaaaaattagccaggcgtgagccaccacaacaggcgaaaaacactctaataataacaggcccattatcatttaatcataattacaccaacatggttaaaagaaaacttaatagccttaagggtttatcctacaactctagttcaagagttatctgaagatttacattggggatgggaa

SEQ ID NO: 222408 - DNA, 881 bp, Homo sapiens
cgcagagcctgtgaccacactaccaccgggcccgggggacgacgccctccaccagccgccgctgtcgtccaccatggtggtgctccgaggaccccgccgctgccgccactgcccacgccgatgccactacccgctccgggcccctggcaaacccactgcttttcccctcctcccagcgcccgcgctgcccgccctgggcccgctgtcgccggtgcgacggtaccaccatcccagctgtgaggctgccatcaacacccacatcagcctggagctccacgcatcctatgtgtacctgtccatggccttctacttcgaccaggacgacgcggccctggagcactttgaccgctacttcctgcgccagtcgcaggagaaaagggagcacgcccaggagctgatgagcctgcagaacctgcgcggtggccgcatctgccttcatgacatcaggaagccagagggccaaggctgggagagcgggctcaaggccatggagtgcaccttccacctggagaagaacatcaaccagagcctcctggagctgcaccagctggccagggagaacggcgacccccagctctgcgacttcctggagaacgacttcctgaaccagcaggccaagaccatcaaagagctgggtggctacctgagcaacctgcacaagatgggggccccggaagcaggcctggcagagtacctctttaacaagctcaccctgggccgcagccagaaacacaccagagcccagacaggccccacagccacggggtgccttcccctgctcgcgccaccaggcgggacgtccatgttcccttttcagaacattctcttcatttttctcctctcagttttaccgttgttggcaataaagttatctgttctca

SEQ ID NO: 222409 - DNA, 366 bp, Homo sapiens
tattacttagtcctagccaagaggaaacacctttttcattttgataagagcaaagtataaaaagatagatatatctcatttaagtttataagtgcagtgaccagaaattgaactctctctatgtatttttttctaatagtttctaatttctttcttaagaaagaggcaaaatcatgtcctgaaagtgaggagaggtggtaggttaggatattttagcagagtgagatttatttgaaatactttctctggagaatgtgagaaaaagggggtgggaatcaaaggattgctgggcagtattttgaatagggttgagatttcacaacatatgtttgtaagagaaacaattataagcttgcataatttttc

SEQ ID NO: 222410 - DNA, 307 bp, Homo sapiens
gcagttagctttgcttcgcttccctaagtgcgttcccccaggggcccggcagtgtgctaggggcaccctgcttcgtaagtgaggcagacagcccgtgataaatgccaaagtagaagcccctccgaaaaattaaggagccgattgggcgggactaaccctaagggagggcaggggaagcgaccgtcacctccgggcgccggggactcggaacgccgggtcggagctcggcaggcggagaagacggggtctcaccacgttgtccaggagatcgagaccatcctgggtaacacggtgaaaccctgtctct

SEQ ID NO: 222411 - DNA, 556 bp, Homo sapiens
tccacttgattatattgcagccacacaatggacccaacccagccaaggccaggtcccacactctgtggacattcctaggaagatcaccttggagcctgtcagtccccctggcagggcctgccttgctcccagtccactgccccgtcctcaccaactcaccagtcacgcagccgtgccccgccaccatcacagtctggcggtaaaccacccacagccacacttccggtcagccggttccgcaggcagccgtattacggtggagagcgctgctcagcaagtcggaagcccaggtttcagaccccaccgttcgttagtgggtggcattctgagtggaaactgtttcaaattttattttcttcccttgaaaaaaatgaaataacagcacctaccaacagagatgtcctcagcgtcgagtgaatatatttgaaaacgctatgtaaagtacaagatgctataaaacttaaggttttgttttttcagtcgtccagaagtaaagatgtagaattcctattattggaatctaggctctcaataataatttgttaaataatcgtgt

SEQ ID NO: 222412 - DNA, 256 bp, Homo sapiens
cctttaatgataggggtttccctgcattggtttgacctgttgcctttttgatgtgctctgtttgttttcatgtgttgtcttgtctcccctgctaaactgggagctgccaggggtctgggtcttatctccttcctccatggtaccccacacaggccaggatgtggtttggtacccagcaatcagagattggcactccctcatacaggggaaagcaacctggtctagcaaattgaaaataaagatgataaaactctga

SEQ ID NO: 222413 - DNA, 494 bp, Homo sapiens
ttattatgatggaatgttccatatataaatgttggtgatctttacagagctgtataagtttttagaacccatcaaaatatactaaaaatttgtctactttgcataaagtatacctctatacagctaacttgtaaaataataaaagtgagtttagggtccccaatatgttatgagacccagcagattctcaatttactaaatggcttattgacatcactagattattcattccctttcttcccatatggctgtgaccttggaaagtcagttctttaatatgtctcagtctcctcattaccataataatggtaattacctacaatcctttctgaaagaattgtctcagttcatctgtgtctgttccttaatacgtggcacagaataagtgagcagtaggtaataattattaccattatatattttaccagtattattaaaaatcaaagacctgtgttccttaaaagagcctcaagaaagattataactcataaaac

SEQ ID NO: 222414 - DNA, 404 bp, Homo sapiens
cactctttgtgatttttaaaaataattgaagtgttaactaattgcctctaagggtaaggataaaaaccagttcatgtatttgtcatacttcctacactgaagtatttaaaagtgaattataaggccgggtgtggctcatgcctgtaatcccagcaatttgggagaccgaggcggacagatcttctgaggtcgggagttcaagactagcctatcaacatggagaaaccccgtctctactaaaaatacaaaaattagccaggcatagtggcatgctcctgtaatcccagctagtagggaggctgaggcaggagaatcgcttgaacctggaaggtagaggttgcagtgagccgagatcgtgccattgcactccagcctgggccacagagcaagactctgtctcaaaa

SEQ ID NO: 222415 - DNA, 475 bp, Homo sapiens
tggtttgaaccaaagtgacactgaagtcaggaatgtcagctagaatgcaactgcagcaatccaggtacataaatagcatttgtatatcacatttgctttcttacctcatttcatattcatttaaacatatctattgagcatctatcaggtgccgggtggtaggtaaagcactggaggtacattgattagtcaatcagttatggtccctgttctcatggagatcacagtcgagtggggaaacaggcaccagtcaagtaattacaagactgaatgtctaatttcgaattacaagaattaccttgaagaaaaagtaagcagtgttatgggagcacataactaagaggcttgatatcatgtcctggtgggcaaggcttccctgacagaaattgcagcagaaatttgggattgaataaatattgattagaaaggggagtgtggggcagggagggggaaagaacactccaagaaaaaaaaa

SEQ ID NO: 222416 - DNA, 692 bp, Homo sapiens
actgacactactttatgtcggaagtattgaggaaccaatatgaagaggcttccagtggccaaagatgtgacagttagagcatcagtgtggataataacaggaatggattgaaatgcatcgaatatgcttgtctctctgagtccataatactaaaaaattaattggtcacctttgaaggataaatagaagcccatatcattgttttgaaaaattgtaaatagaagatatgagcatttatcctgccttttccatgtactgtatcatgggggatcaagtaatagacggggaggtttttccttatagaagtatcccagctaatgaattaagaagggttgattgaattttaatatcaccacttcgtaacctcaaatgaatgaacagatcaagacattgagtagcagtgctgctgacatcacaaaagaaacacccaggcattattgcctcctgatgggagaatgcactaccttctatgaaattatcttgctaaattaatggaatctgtatctcatgtagcctctacatccaatttacaggagatcagaagacagaagaacatgttaaactacatcatgtgggtacagtcagcaaatttcagacgatgggaaactgcaggtcaaacaacccaggttcttcaacaaataaaatgcaagggaaaaaaaaaagatggaggaggatcctgtagattaagagat

SEQ ID NO: 222417 - DNA, 462 bp, Homo sapiens
gtccacctgtgtgtgccctctcctttgtttccgtgtggctgcaggctggaggaccagggattgtctgtcataaggaaggagttcctacccctgcacatgctaggcaggtaaaggcttgttcccgcttacctgagccagggattcaacaccatgattggaacccagggccttaggtgattgttctttatccagggtttccatcagaaccactgctggatttttttttttttaaatatgggtgcctggcggcctggaaaacatggtgagacattgtctctactgaaaataaaataaaataaattagcaggacgtggtggtacacacctgtggtcccagctgcttggaaggctgaggcaggaggatctcttgagccataaggtcgaggctgcagtgagctgtgattgtgccactgcactacagcctgggtgatagagcaagaccccttctcaagaaaaaaaaaaa

SEQ ID NO: 222418 - DNA, 467 bp, Homo sapiens
gaagagccagataagattcacttccaagtgaagaaataattcccgtacattctaaaaaggtttccccccgtgatttaccacttgagaaatcaacacctctccatcatgaaagtgtatggagcattaaatcggaattggaagatgggattaccttggttttaatcaagcgttcattttcaacttagttttatagcatgaatattaaactccttggtgcgatggaaaagactggactctaacactgatagaaaattaatttgaagcatcaataaagaggccagtagctaaagaggagggaaggaccagtgggggaagacaggtcctgaaaggaatctttcaggtgggggagcaaggagtgacctgtgctaagaaactgacctttcacagacttttaaagtatgttggggttggggaaaatattatagagcacaaaacaaagaaaaggtagggggtgattgttataaaaa

SEQ ID NO: 222419 - DNA, 518 bp, Homo sapiens
ttaaggaagaagaaactcttctctgaaagttaaaagttttaataatgctagctaaaggagaaaatacttggattgatttttttttttttggcaatctaattatattgtaaatcaggtacctaacagttactccttggagcacatttgttcctttacccaaaagatgctgtcagggagcacagttagaagtttgcagaacagaaatctcaatatttttttttattggtgctaaaaacaggtcttacattcagtcagacctgttcaataagttcatcaatatctgataacagcattattttgatgcttaaactttaaacatttatatttaccatttgccacccacaaaggtcaggtttgttatttgttgtttgataattatattaattttcttggaaagatcctcttttcaaggtactggtaaattggtgagtatttttattagtaaagcatgaaatagtatggtaataaatgataagacatgtatttgtggaaagctgtagggtattcagtttaccctg

SEQ ID NO: 222420 - DNA, 487 bp, Homo sapiens
ctctgtgcctgccaggtcactctgaagccccttcctcctacttcattttctgtctcagcctccttcctgtttttctgcaccctctctctttctccctggcctctgattctctgtcttggtcttcatgtagcctgtagcatatgtggccccctcatcaggccttcttctgtcttggtctcagcccctctgcctctaggtgatgagggtggaggccccagctggatagctgggtagctgggtccctaggggaggagctgccaggatttggggaggaaaagtaaaaggtaggccttgcgcgctgccagtctctgcactgcagccccatcctgaatgtgggggtctttcttttcccccagccacccatctcagtcctgcctccagctttgctgtaagccaagtgtcactgagaaattgggtggggggaacacctctcagggacagggagggggcctgctggttgatccatttcaccccccagttgtctggc

SEQ ID NO: 222421 - DNA, 399 bp, Homo sapiens
tgtcattacagaattgatggcttaaggttggaacttataggcaaaaacagatgggtctctcaaaggttgatgttactacaaaggttttcctccaggtgctgtgtcggataaatttttaagagtgtaccttcaactgtacctgaaagctagaaatataaggggaatttatcatatttctgtaaggaatgacaaatacttgctaaaaatagtactcaagtgaaaacagtccattttttaaacatggggctaaatgatggatcttcaagatcttaagcaaaatttttaaaagtattatattcttaatttgctggctgtaaaactcttaagccctgctcattaattattaagaatctggccgggcacggtggctcacgcctgtaatacacagcactttgggag

SEQ ID NO: 222422 - DNA, 1246 bp, Homo sapiens
agcgagaagatgatgcatgtgagccctgcccttgggaagcttccaggttgggaaatgaggaatgagcctgacacccagggcccagagagacccaggacagaggcaggtcaggaggcagacacgcgctgctgggtaatgacgacagcaccagtaatcacggctactccttgttaagtacttactaagtgcaagactccaagctaagcaattaatagaccttttcttgtttaatccttaccacaattccatagggttgagtaggaagtccttcttgaagtctaatctcaagaattcatgccatggattgggccaatgttccacctttattggagtctggggacttaggtggaaaaggcagaactggctggttggaggagccacctccctgcaaggggccaggagggagattacggaggcgccaagcccagagctccaacatgcacctgccacagctccaggggagatcgggggcctgccaatttaccccgccccatgatctcatggctgtgtgcgccaggcactggctcagggagcagcatctcacagagaagatacttggatgggccacaggccaaaactgggccaaaaccctggagagggggacctggctcaaggccacaccacatttccatgtcattttccagtggcaccaactgagctggacagatgttctcacagagctacacatgccacagtcatcactagttgcgagagtctccagtgttcattaagcctattttgctggaagtttagtccctggaggattagtccctgcccttaaggagtgccaaagaagactttggaatctaagtcacatctcccctgctgcaattttttcctcttgataatcaaggaatctcactgataaaactctcaatgaggagcagctctccccatgagcaagttcttgccttcattgccagggaggccccagctaaggttatactgggaaaggaatctctggggagtacctggaagaggtcagcttctcctcaaaggaagcctctccagctggtgtactgcaaagccttccaagaccaagttccctcttcctggcctctggaaccagcctgtgtgccagcgctgtgtccccagtaacacacatgagtctctccctcagaagccacagaaggatgcagagagagaccaacccaggattgattctcagcacttactaattgtgtggacataactgctctggacctcagctttgctatctataaaatgagcaccctttttatagata

SEQ ID NO: 222423 - DNA, 469 bp, Homo sapiens
caaaacaaacaggagttgatgctcatagtcagtggacctacttaagtctgtaaccctagagtaggtattcttaatgagcaccttggtttccttttacaaaacttaaatttgcctctgatagacttacatggttggatttgtgcaaagaaagctaacccccaaaatggctataatatttttatatgggctgggcgcagtggcttatgcctgtaatcccagcacttagggaggccgaggcggatggatcacttgaggtgaggagtttgggaccagcccggccaacatggtgaaaccccgtccctactaaaaatacaaaaattagctgagcatggtggagcatgcctgtagtcccagctacttgggaagcttaggcgggagaattgcttgatcctggaaggcggaggttgcaatgagccaagattgcgccactgcactccagcctgagtaaaagagcgagaccccttctcaa

SEQ ID NO: 222424 - DNA, 170 bp, Homo sapiens
atgagaggcttcgaacatggagaaaaatgtgtttgcaggagggaagcatggagccaatagagagcaaagcatcaaagcatccaagtcaaggtcaggacttaaagtgtctggaccttcctgttaatatgagtcaatgattttcctgttctcctctcgagctatcagcatgc

SEQ ID NO: 222425 - DNA, 445 bp, Homo sapiens
tccactcagagatgaagaagcataggcagcaagttagtgcctatacataatatatatggaaaccaaattcagggttgattctttctttctttctcccttcctttctttctttctttctctttctttctttctttctttctttctttctttctttctttctttctttctttctttctttctctctctttctctcttcctctctctttccctctctctttctgtctttctttcttctcactctgttgcttagtacagtggcgcagtctcggctcactgcaacctccacctcttgggttcgagtgattcttgtgcctcagcctcccaggtagctgggattacaggcatgcgctatgaagcccggctaatttttgtatttttagaaaagatggcgtttcaccgtgttggccaggctggtctcaaactcctaaccacaagtgatctgccc

SEQ ID NO: 222426 - DNA, 436 bp, Homo sapiens
atactctttctcttttcacatccagatgggaggtgctggaactaatactgtaatactgctaggcttttcctaagccaggctttgtgctaagtgatctgatccaacggtgctaaactgttcagccattctgcattgtcccactccaccctcatgttcctcagggtggccctgcaaggcaggtattattgctcccatttcacacaggagaaaactggagcacagagaggttaggtaatttgctcaaggtcacacagctagctcatgggagaggtgggatttgaacccaggtttccaggactcgaaggtccattcgtgctccttatgctgacctctgtggctttcttgtcttatacaaaatctacttcttactcactttattaagttacaggttgcccttttgggaaacacaaaacaaaattttcaaacaacaacaaca

SEQ ID NO: 222427 - DNA, 485 bp, Homo sapiens
ggttgagctgttatgaagctggcactacttcaccattttgacttacagaaatgacagtcttaaatgcctcagtctaatagaacgcacgtcttcttgttcttgggtcagtgctctttgtaaagcatttttaaaagctgactttccagctggcctgtggctctgcagttttagtgtgactgaacatttcaaattattcagtacaagttgttttattcccctcctgggccccctcccatgcctcacatactttgagggccccagtggatcaagtctgtagtaatctttgaagaagcaaaggtagattggcatccccttcccaagcttagacctaggattttctcctttccctcaagtccctacagctctccaggtctcagtttccttgtcttcaaaacaaggagggtatgtgaaagccagcattttcctccttgactctttcctgtgctcctgtacaggttcctcatttagctcatttatttccttct

SEQ ID NO: 222428 - DNA, 297 bp, Homo sapiens
accacaggcatgtgccaccatgcccagctaatttttgtatttttagtagagacagggtttcgccatgttggccaggctggtcttgaacttctggcctccagtgatctgcccaccttggcctcccaaagtactgggattacaggcatgaggcaccgtgccctggcctaattttcaatttataatattaattattttttcacctgtgtaaagttttaatttctcaaattcctaattaaaaacaccttaatgagtgtaggcttttagctctactcattcccaataaaaaagagacttcta

SEQ ID NO: 222429 - DNA, 343 bp, Homo sapiens
cttctgcccccccgaccctgcccctgtcatggcagccggcttgcaaacacagcgttcattggctgccttccagtagaacttcccctccactctagtgtttccagaaccttccaggtaaacagccctgggagaatcccagcaaagacagtactaaaaggccccttcaagcaaagcatcccctctatagggctgccgtggtttctgagtaccagggctgcttacccacctttgagtgatggttatagaggctggtgcgaggctggaagacttcccttcctgggaaggacctcagggtgtgtggctccatccacactgtcctcctggccagccaggcagcaagacc

SEQ ID NO: 222430 - DNA, 444 bp, Homo sapiens
gcacgagaagtcaatactccttaataaactccctttcatatgtatatctatcctattagttctgtctctgcagcaaaccctgactaatccatctatacaggggtcattgggccacatccaggaagaactaccagagaaatcagcccaggctcagtcagctacaagtcccaggactgtggaagccaggggtctccagagacagagcaccccacatctgaaagggctgagacacacagcccttggccgctctaggattcagtgattcccaacgcgtatcctgaaactctgataaaacaatgtgcctctgtctcctgagtgaaaccgtttatggagttaagtttaccagcatctgtttatttggctacactgtgaatgttaaacagtttttagaggttatctgaataactggcacaggtgaaataaaatgaaataaaatgttgtgtt

SEQ ID NO: 222431 - DNA, 471 bp, Homo sapiens
cgagattgtgccattgcattctagcctgggtgacaagagtgaaactctgtctcaaaaaaaaaaaataataataaaataaaataaataaataaataaaaagaagataaaaataaataaataaaatggaagacaatccaatgggttaaaaataaaatgtaaactagctttcatttttacttttcataatcacataaaggaacagaaaatgatggtaacaaaatctttctatatggcttttatgtcttataccactcatttttatttggaaagtatatctttgatgggtttaacatgtggttaaatacaatttctcctgtttcgcagaagtagaagagttgacacatttcactcattttagtgttacaggataatgagacaaacttatttttataaatctctcaaggttgaaatcaacttatattgcaaattctaatacagtagtttctcattgcaccacagaaacagttaaag

SEQ ID NO: 222432 - DNA, 466 bp, Homo sapiens
cagtatataaagatgtaatttgttcacatcaacaactaaaaggagtggtgatggagctgtaaaaaagcagatattttgtatgttattgaatctaagctactataaaatcaaattatagtcttacaactttaggatgttaagtgtaattcctatgggctatggcctgaatgtttgtgtccctcaaagttcatatgccaaaacctaatccctaatgtgacagtattaaaaaagttgggcctttggggaggtgataaaccatgagggcagagccctcatgaatgagattagtgcccttataaaataggcatgagggagcttgttcatccctttcaccatgtgaagatgcagtttgaaggcaccatctagcagacagcgagccctcacaagacaccatatctgttggtgccttgatcttggacttcccagcctctacaaatttaagaaataaatttctgctgttttcata

SEQ ID NO: 222433 - DNA, 455 bp, Homo sapiens
tgagacagagttttgcttagtctcccaggctggagcgcagtggcacgatctcagctcactgcaatctccacctcctgggttcaagcaattctcctgcctcagcctcctgagtagctgggattacaggtgcatgcaactatgcctggcttatcttttgtacttttaatagagatggggttttgccgtgttggccaggctggtctcaaactcctgacctcaagtgatccggtagcctcggcctcccaaagtgctgggtttacaggcatgagccaccgtgcctggccgggttcttttttaatatatagtttctatctttttgttggtattgttattttgttcatatatagtttttctaatttcctttaggtgtggatctgtggtttcctttagctctttgagcatatttaagacaattgatttaaaatctttgcctagtagctgaatcctgtgtttat

SEQ ID NO: 222434 - DNA, 286 bp, Homo sapiens
caggacatcctgtaaatgaatcaccagattctgaaatcagctttgaccaaaatgagaatcacactgtttgtattaaaagcaactggaaagactatcctctcagtgatgatttctatagttcgttactagagaagtttctctaaacatgtagagagcatcagaaaccacaaaaaagaggtgcagcggtctctcctgagtgtgaagctggctcttggtattgcttcttggttcttctcttcctttgggagagtaagaggaagaggatgcagtcttagtagtttccctt

SEQ ID NO: 222435 - DNA, 508 bp, Homo sapiens
cggttgcacatacataactatccttggaaggacaaaagtagaatgaagaaagaggagagagagttgggaatcactgcaaattcttatgtcagcaagcattccgggtattttttagcagcttgttttggtctattgcttgccaaagcactatgaaaaaaatatgtaattgtatttcacaaataattgatataaacatttaaagagtgaatcacaatcataccttgttttatctttttctttctgctttcaagcctctctctttttacagtagctgcatgtttgttctaggctgagtgccagttgtatcaattaaacagtaactaattcaagtacatttgcaatctgtgtttgaaatgccagcccatacagtagttaccaattaagcatgaggcagattaatggatgcattgttctcctgggctaacttcaccacattgtcattaagcatgtaagccccactgaaccaaagacttccatttaaagggaaaggaaaacacatgcttaccaa

SEQ ID NO: 222436 - DNA, 496 bp, Homo sapiens
ataggtaggagtgtctccatttaaaatagagaacataggcagatgtaagatttaaattttgtttacactgaatttgatgtggttgtgtaacatcaacctgagatgaccaagaggcggtggatatatgaatatgcatagagtatggcagagtgatctggactagtgataaatatttgggagtcttcttcatatgaaaactaggagcggggaagaaattactcaaaggataaggtcaaaagagtagcgggccaagtatagatgcttggaagcattgatattaagggaaagtcggaggaggccatgaagaagatgggcaagtgccagaaggatgtgagaccgcagaaatcagaagggtaaagttttaggaagcagggacaaatggataaatgtcgaatgcagttgctttttagtgagaaaagaatgaaaaagtgtcattgatagtctcaattagaagataattaattggtgatttttgctaaagcgaatatgttgagtt

SEQ ID NO: 222437 - DNA, 429 bp, Homo sapiens
atgttaaaaagctccattttgagctgagcaaagagaatttaaattaaaacaaggaaagggagaaaatgcagttttcgaattcccatgccaaatcagggactgcatttaccaagtctaggcctgtaaagggtaaaatgtctgaagcttcaggtactctactactaagcaagtcaaaacctcagaaattctgttgaacacctcacaataatcaattttaaaacttttattgagtgcttactatatgccagcaggctaggggctttaaatgttattccagttgatccttaaagcaaccctctggaggtatattatctctgtctaagaaactgaggcttggaatttcaatatgagctattgttcacatagctaataagtgacaaaacagtatttgaagccaaagtcaatgccactgtcggtacattgtggctg

SEQ ID NO: 222438 - DNA, 168 bp, Homo sapiens
gagagcaaaggaggttaggatgaatcaagaagtttgagatgtctggaaaagatttggaagagggaagaattaaagggatagtcaatctggggcaaataaaatgcctgctgggtaacacaaagaaattaactaggactgaatggcatgaattcttagtggaagtgatca

SEQ ID NO: 222439 - DNA, 487 bp, Homo sapiens
ctccctctaatatctctctctcttttacccccattccccaaccattcttctctccatccctctcctctcctcttcctctctcttctctctctctctctctctctctgtctctaactctcgctctctcttgtatgtgggtgtgtgtgtgtatgagtttccactgtggattatatacacttgctagagaatattcatttcttttttttcttttttcatctgatgtatattcaaacattgttctttataaccatttctacctcattgctacatattgtacatgtagtatttatttgttgtctttttttgaatgtcatgcatttcgtaagaaaaagacttgtccttgaacttgaacagtctacctcagaaagactgtctttacactgaacagtattagcaacctaaatgataagacgcattagtgaagtgtggcagggtagataatgcacgagtacttgggatactgatggacttttaattgtattcataa

SEQ ID NO: 222440 - DNA, 252 bp, Homo sapiens
tattttttttttctgatattttaagctggttcatgtttttacgttaacactttcggttgtattgtgtagcagagagtcccaacaaagtgagaaaacataagtgtgacaattccactattaacccacctatccaactggcaaaagtcacttggcttcagttttcccatctggaagactatgccaatggttgtacttgtggtgaagttgaagtgaaataaagtttttaaagtggctgcaaaaataaatactgca

SEQ ID NO: 222441 - DNA, 557 bp, Homo sapiens
gtgtggtatatacactatgaaatattattcagccataataaaatgaaatcctatcatctgcagcaacacggatgaaactgaaggacactatgttaagggagttatttcacttaacagaaagacaaatattccatgttctcacttagatgtgggagctaaaaaattaatctcatggaggtagtgagtagaataataattaccagaggctgggaagggtaggggacagagcagagggcagcaggttggttagcaaatacaaaaatacagttagacagaaggaataagttctagtgtttgatagcacagtagagtgactacagttaacactagtttattgtatatttcaaaatagctacaggagaagatgtgaaatgttcccaacacaaagaaatgataaacatttgaggtgatggatatcccaactaccctgatttgctcattacacactgtatgcatgtatcgaattatcacagggaacccataattatgcatagctattatgtatcaattcaaaaatcagtgaaacaactgaaacatgaatcttaaaccaacatcac

SEQ ID NO: 222442 - DNA, 395 bp, Homo sapiens
tgcgaaggcaactccacgtgctcagagaacgaggtgtgcgtgaggcctggcgagtgccgctgccgccacggctacttcggtgccaactgcgacaccaagtgcccgcgccagttctggggccccgactgcaaggagctgtgtagctgccacccacacgggcagtgcgaggacgtgacaggccagtgtacttgtcacgcgcggcgctggggcgcgcgctgcgagcatgcgtgccagtgccagcacggcacgtgccacccgcggagcggcgcgtgccgctgtgagcccggctggtggggcgcgcagtgcgccagcgcgtgctactgcagcgccacgtcgcgctgcgacccacagaccggcgcctgcctgtgccacgcaggctggtggggccgcagctg

SEQ ID NO: 222443 - DNA, 467 bp, Homo sapiens
agaggcttagagaggtgtagtgacttgctcagagtcctcgctgtagcatggggtaaagccaggatatgacttcacatagtttaactccagaacttacactgtcatcttgttttgtttttctgcttctcttgtgtgtcaaaagaattcctccttagttgttctcatatggggcaaccattaaattaggcagtgtaaaaaacaagttatgcagaataaagtagcaagagcaatctactctgaaattagtgttttccctcactttagcacctttagctgacccagcttcctaccgcccagacattttacaaaaatctctctctggagttgcctcctgatctggattaggagtcacataagaaaatcagtctcatgagtccatcatttttcctcatttctgaccagaagtattctgccccatttgcttcaccttacttatttctaaatcactctagctcatttaaacaaac

SEQ ID NO: 222444 - DNA, 429 bp, Homo sapiens
gcttgtacgtttattatatttccagacagatgagcccttttatcgttataaaatgtccgtctttatctttagtgagagatcttgtttaaaatctattttgtatggtattagttgtcttatggctgtctttatgcttggtatgggctttttacatcctttagctttcaaccacttaagcttttgaatctaaattgtgtctcttttaggcagctcatattttgaccattttttaataatccattgttcagtatctgccttctgattgaagtgtttcgtacatgtgtgtttaatataattaccactaagagaggatttacacctactgttttctatttgttttccacatgtcttatgtcttttttgttcttttatttctttattattgttttattttgtatcaagtaaatatttttaaaattaccattttaa

SEQ ID NO: 222445 - DNA, 445 bp, Homo sapiens
gaggaacaggaacagaaatgaagctcagttgtctcagggaggaggggctcttcaggaccaagaaagtgcccattctgggtttctgctgcttctctcctccacctgggggggtgtgagtcatggcttgtcaggctggtgggccacacacaggttccaggggtacaccctcctctgaccttggaaatagaagggaagaaagcaatttccctcacagtgctgaaaagagaagttgagtcataaagggaagaaaagcctttcttctgctgagtaaaggagagcattcctgcccagttactgggggtggagagtctctatccattcctgggggccaccccagaagggggccctagctctggggcgggagcagctttgagggctgcactctaaataactatgcagctctagaaaacaaaacaaaacaaaataaaaaaaatgaaataactat

SEQ ID NO: 222446 - DNA, 480 bp, Homo sapiens
gttatttagcaatttcaactttgctggaaggaataaatacattggtacaatcattcctgagatatgttttaaattctaacttacataacttattgatgaagaagagttgattaggaatagacttctatcagatatcgtgtttattatttttacataacatgttatttatttttatttatttttttttgagatagagtcttactctatcacccaggctggagtgcagtggcatgatcttggcacagtgcaacctctgtctcctggattcaaacgattctcatgcctcagcctccccagtagctgggattacaggcatgtgccaccacacttggctttgtgcttttagtagagacggggtttcaccatgttagccaggctggtctcaaactcctgacctcaagtgatccacctgccttggcatcccaaagtgctgggattacaggtgtgagccaccacgcccagctaattttcacataacat

SEQ ID NO: 222447 - DNA, 343 bp, Homo sapiens
aaatatttcatttttgaaaatccaaaagtgaaattaaggatttcatttacaatagcaaaaagaataaaaacagaaatacctttaacagtagttgaagatgtgtacactgaaagtgacaaaacatgactgaaagaaatttttaagaagctaagaaaaaagggtggacagcccatcttcatggattgggaagacttaatactgttaagatggcaatacttctcacattagtctatagattcaatgcaacccacatcccactttcctttactgcagaaattgacaagctgatccaaaaaattgtaaggaaatggcaagggatccataatagacaaaacaattttga

SEQ ID NO: 222448 - DNA, 540 bp, Homo sapiens
tgttgaagagggatcttcaatgtttttctgtaaacagctctaatttattgattcaatttgaattttgtgattatttcaagttatttaaatcaacgtttgaattatatgtttgaagttttcataaaataggttaaatccacaagataattagaagacacaatgttcattttgtttttcatacagtaatatatctttttgatatctttaaaaatttccattttgtaaatgagttagtaacttagactgtcaaatatttcaggtcatattaaactttaaaataaggctggacacagtggttcacaccttaatcccagcactttaggagggtgaggcaagaggatcacttgagcccaggagttcaagactatcctgggcaacatagtgagaccttttctctaaaatttttttttttaaattagcctgacgtgatggcatggctctgtagtctcagctactctggaggctgaggtaggagaatctcttgagccccggagatggaggctggaggctgcagtgagccatgatcatgccactgcactt

SEQ ID NO: 222449 - DNA, 237 bp, Homo sapiens
aaagacagaaacaaaggagagagctctcaaatgagttcatttgaacaatgagcagagtaatgggtgttctcatcaatattctattattttcatcattatcttttttttttttttttggagacggagttttgttctgttgccaggctggagggcgggggggcaatctaagctcactgcattctccacctcgggggttaaagaggttctcctgcctaagcctttaaggctatcagcagg

SEQ ID NO: 222450 - DNA, 482 bp, Homo sapiens
ccgggctggagtgcagtggcacaatcatagcttactgcaacctatgcctcccaggctcaagtgatcctcctcccatctcagcctcttgagtacctgggactacaggcccatgctaccatgtccagctaatttttgtattttttgtaaagatggggcttagccatgttgcccaggctggtctcgaactcctgggaagcaatctgcctgcctgcctcggcctcccaaagtgctgggattacagatgtgagccaccatgcccagtcctgcttccttttatctcaaggaatcagtatttaggaaacagtatttaggaaatactgtttaggaatcagtatttaggaaacatttactaaatgttaaatgtactaactcctcttcatccctttcctaacagctgcttcttatcacctctgagaaatgaaacaaaaaaagatgagatacctccacagcctaagaatcctgtcatgcttgttttctttgca

SEQ ID NO: 222451 - DNA, 552 bp, Homo sapiens
caagagcaaaacgccatctcaagaagaaaaaaaaaaaacggtaattggtttttatttacttaagaaacccgtgtttttgttctagaattccacttagtgctccggcctataaaataatgtgtatccccaccacctcccagcccaccccctactcgtctgcattcacctacacacagttaaacatgcacatatgtttccgtgacacgatcttgctttgcatattgttcactgattggcttttccatataagatttaatttggtgattattgcttatcagtacctataggtctctctcattattatttataattacatcattattccatagggtattttaccacaatttggtcactttttcactgaggaatttttatgtcagtttcagttatttgttattgttaccaatgctgtactgggcatccctgtatatccacctttttgttgcattagttaagtggttttttccttttatgattgatttctaaaaataaaatactgcagcaaatgttaatgtttaatattttcataaaattaaaaatctgtgttccaaa

SEQ ID NO: 222452 - DNA, 567 bp, Homo sapiens
agggtctcagaagactcgtaagaagtgtcagccagtcctggaagaccacaccaagacttggtaagtcatttatactgacatgttaaaaccctgaagatgactaatctattcaaaacttggaaagatacattaattaaaatgtgcatgggtgttttatactacaaataattaacgtctcatttgttaattgtcaagaagctaacatttttggattctgaagtccgttgttcccacagttatatttcagataactttactgtgtttaggtacagttcagtaagagatctacttacgtaaaaggaagttgtttaaaagaaaaatgtgtgttctgtcattgttgagtagaaacagtagactttgtacttcatgtttccaaagcatataaacagaccattgctgttggaggggataggatctaacttttcatttgacgctattattttaaatgaaccagtgttatactgcagcttaacagctacattaaggtcttttactttttttctaagcttcagatcaccaacatagttaaatcaccatagtgatgtaatataccactgccgttattat

SEQ ID NO: 222453 - DNA, 401 bp, Homo sapiens
aaaacaaatagcaagttggtagacttaaatccaactatattagtagttatatgagatacaaatggaccaaagacttcaattaaaagacagagactgtcatactaaattaaaaaaaaaaaaaaacgaacaatcaccagcctgggcaacatggcaaaacctcatctctacaaaaaatatataaaaattagctggacatggtggcatgcacttgtagtcccagcttcttgctggggctgaggtgggaggatcacttgcacccaggaggtcaaggctgcagtgagctgtgttcatgccactgcactccagcctgggtgacgaagtgagaccctgtctcaaaaacaaaattccacagtatgctgtttacaagagacacactttaaatacaagggcacagaaaactt

SEQ ID NO: 222454 - DNA, 288 bp, Homo sapiens
agcccttggatcttttcctcgggctgctaagaataacactcgggggtgggtcaattgacctcacacaatttcccagactttttgttgggaacaacacaacttgttgttgttgttgttgttgttactgccagaaacacgttagaagtgttaaaaagtggctgggcaggtgattcatgcttatattctcagcactttgggaggtcaatgtgggaggatggatggcttgaggtcaggagtttgagaccagcctgggtaatataacaagaccccatctctacaaaaaaataa

SEQ ID NO: 222455 - DNA, 380 bp, Homo sapiens
catggtggctcacgcctgtaatcacagcactatgggagactgaggcaggtggatcacgaggtcaggagattgagaccatcctggctaacatggtgaaaccctgtctctactaaaaatacaaaaaattagccaggcatggtggcaggcacttgtaatcccagttactcaggaggctgaggcaggaaaatggtgtgaacccgggaggcagagcttgcagtgagccgagatcacgccactgcactgcagcctgggcgaaaagagcgagactacttctcaaaaaaaaataaaataataaataaataaatggatatggaaggtaggaaaaagcctttaaaaatgctgtgtaaatcataatcaacgtgctacaggaattgtaagga

SEQ ID NO: 222456 - DNA, 415 bp, Homo sapiens
tgctgcatcagggaagcgacctgccccaggtcacacggcaagtcggtgccagagtccacgctcctgactcggctggggacttgtgcactcattttcctctgtgggtgcccgccccccatgtccagaggtggggaaccgagggggaagccaccctgtccctgttcatcccggcctgtgagcaagccccaggcctgtggaggccagcggggagggtcacagcatcgcatctgcacccctcccccttctccttctacaaagagagaagaaaaactggcagcagctggggcgatccgggcaggaggcaacgtcctcctcagggaggggtcggggagagaactgggacctatcagccaagagcgacaggggcccgctgagacgcaaaaatatttagacaataaatgaagtatcggaaagg

SEQ ID NO: 222457 - DNA, 422 bp, Homo sapiens
gtatagtgacaacaataaaaagcctagaagataagactttgtttcaaaaaattcaagtatttagtttggacagaaaactgctgtgtgcttttgaaattttggtgagacgaagcatggtggctcacttttgtaatcggcatcttgggaggccaaggcaggaggattgcttgagcccaggagtttgagaccagccagggcatcatagtgagaacctgtctttacaaaaatgttttaagaattagctgggagacgtggcacgtgcctgtagtcccagccactctggagcctgaggcaagaggattgcttgagcccagaagttcaaggttgcagtgagctatgaacatgccactgcactccagcctgggtgacatagggagacactgtctcttaaaaaaaaaaaaaaattctgagctaggtgcggt

SEQ ID NO: 222458 - DNA, 622 bp, Homo sapiens
taataaaaagataaaaaagacttgaggacactgaagagcaaccaaaagcaagcagaaaccagacggagtctatacttagaataaaggaatggtattgagtgagtttcccaatttttaaggctttttgcctgaaaacagtccccatcctatgcctagtgaacagcaaaatatcaatagaaatcccacagtcttactgacttatagaaccagaatacccagttcaaggtgaaaacagcagctggaaagtgatgggaaagtttccgcaagagttgagaaaaggaatcctaaatacttaatattaattctacacaaatctctcactgacccatgaagatcgtacacatggggcagcctccaggcagcccagctaaataaaataactgagcagatattcctgctgcccattgtaggagagacagtttggagtttgagtacaatgaagttaatcaacaactgtcttagtcggcttgggatgccacaaccaataccacacagacttggtgggataacaactgaaacaaattttctcacagttctggagactgaaagttcaggatcaagattccaggagggccagtgtctgatgaaggctctcagacagctgcctcctcactgtgtcttc

SEQ ID NO: 222459 - DNA, 250 bp, Homo sapiens
cgaagcaaactcttaacaacaacttcggtcctgactgttggtgtggtcatctagaggccaccatcagaatcactcatttcctaaagacagggacctcagggtggaaagaacttcctgggacaaagctgtgaagaggctgttagagcaataaactcagctcccaaccaaactggttttgcagggctgagtggagagaagcattcactcatgcaccccaaatatatctatggcaccccttctgagtcaggtt

SEQ ID NO: 222460 - DNA, 458 bp, Homo sapiens
ctatgtttgtaactccatatcttgggattttctttttattattttaaatttacttcctgttaactattgtttatattcagttccctttgtttaaataactgatgcactttctctctcttctgtggtttgaaggtttgtgtccccttcaaaattaatgttgaaacttaatcccgggccaggcgcggtggctcacacctgtaatcccagcactttggaaggccgaggtggatggatcacctgaggccaggagtttgagaccagcctggtcaacatggtgagaccctgtctctactaaaaatgaaaaattagccaggtgcggtggcgtgcgcctgtagtcccagctacttgggaggctgaggcaggagaatggctggaacctgagaggcagaggttgcagtgagcagagatcgtgccactgcacaccagcctgggcgacagagcgagactcttgtctcaaa

SEQ ID NO: 222461 - DNA, 640 bp, Homo sapiens
ttactgaggtgtctcttccactaaaatagaagtttcataagaggaaccaaatctctaagcatctggcatggtgcctgcttcatacaaggtgtacaaaatgctcgtcaagaaaaagtcaataggaaataagttgtttcctttcagaagtaaaatgctcaacactgtttgcttagatagtatatctacaaagtgagtccaaataatttgggtccaaataactgctttaaagcaaaaaaaagaaggaggaatgttagtttgaatttaactatgttagtattatgtattcattttctattgctgtatggcaaactaccacaatcttagtgacttgaaacaatgctcatttattagctcacagttctgtaggtcagaagtccagcaggcatgaatagattctctgcttaaggtatcataaggtcaaaatcaaattggtggccaggctggtcttatcaggagtctctggagaagaatctgcttctaagcttattcttttttttttgcagaattcatttccttgggattgtagaactgaggttcctgtttccttgctggccatcagccaagcactgttctcagtttctagaggtcactcgcagtctttgacacatggccccctccatctgcaaagctctcagtgaag

SEQ ID NO: 222462 - DNA, 490 bp, Homo sapiens
cctatgattttggtttacacacggttttggtttggcttagcacgagttctggcttagacttttactaacttttcagttcatgttcctacaatatctgatagatatatcatgttagtctcaccagtcagtatattgactagctttggtttgggtgtacattccagcctaatcagcgatggctgccagattgggggtaaaggtgagatcaaatggggataagcacagttgcctaggcttgcttcttccactggcttggggttagagcatttttcaaagaaaggaactgtggataccccaaaattatctattatagagtggataataaaaatacacaaatatttttgagtgactttcaaataaatcataaaacaacaaggcattgtgactgcctataatcccaacactttgggaggctgagatgagaggatcacttgaatccaggatttcaataccagcctgggcaacatagcaagaccccatctctagtaaa

SEQ ID NO: 222463 - DNA, 578 bp, Homo sapiens
tctagaatgacagcaggagtccagtcaagaggtcctgtcaggccaaggccagaaagaagggaggacaatccctggggccagatgcccagtgtgaggggaggcatgatctgtcccatggctgtggccactgcaggaaggtctgtgaaaaggaggtgacaggccacagtcacctcctcttcacccaagtgattgctccttcaactgctatctgtgaaaatagcctttgttatgaagaaattgactctctctctctttttttttttttggagttgcctaggctggagtgcaatggtacgatctcagctcactgcaacctccacctcccaggttcaattgattctcctgcctcagcctcctgagtagctgggattacaggcatgtgccaccacacccggctaatttttgtatttttattagagacagggtttcaccacgttagccaggctcgtctcgaactcctgtcctcaggtgactacccgtctcggcctcccaaagtgctgggattacaggcatgagccaccacacccggccaaaaatggattctctatgtcataaattaaagaaatctataaatgtat

SEQ ID NO: 222464 - DNA, 543 bp, Homo sapiens
tgcagccactgggcctggaacatccagtccccactggtggacaggcacttatttggaccatgtgcctgtctgcctatgtctgatgtgatctccttcaggggcctatgtttgcctgcagcacggaggccctgcagacgtgggctgaggaggggtaagggaggacccttgaaatctatggctcctgtattcgtcccttctcacaatgctgtaaagaaatgtggggactaacaagagcgatgccatttctctacattggtgactgttttctaccttggtgacggtgttcccagaaacaaagcaggtgtcaaccttgcccatacttttaatagagcataacaaccctaaccacaacagagcctgatggcccttaccacatccttctccagcccccaacagttccaacctgccagcacttacgcaaaccctcccctatagaaactttattataaaaacctcagtttctaagtgacagggtctcagccacattcctgactgggacccctcacaggcttattcttgtaaataaacctgtttggccatcaa

SEQ ID NO: 222465 - DNA, 481 bp, Homo sapiens
agcattttcctgtggagctagcatgaatatccacacagttgttaaacattggcaaccgcatctctttgagcacattaaaatccacaacacctggagtctgaaatgctcacctattgtaagacgcacaagctttttctgtgagggttggccactgtaaaagtacagatcaaagagacgttccattttccagtctgataagagctgcctgtttgtgcaaaaaaggatgctgtaatttccattgatgttgcacagccaaataggtaatttgggagtcttcagcatgctgcccacctggaaaggggaaggggaatgcagataaatatatagattttgccacattgtgacacatgccgatacatgatcgcgaccaaaaagcagctctgaggtttcttgttgcacttgtcgcgtgcagggcactgtacatagagcaagatttgaaatcaaggcttcgtcatgaataaatttgcatttatgaatgatc

SEQ ID NO: 222466 - DNA, 924 bp, Homo sapiens
agttgcaaattaattgccaggctgttttccttaagtaaattcatgtgccgtgtagaaatatgcagatatgcattacacaggcacacacagagagatatttaatatgtggaatatcactctttcatgagctttattccttgattaatttgataaagcctcacagaggattttaagcaatatttaaatgtgttgaggttatgtttggatattcctgctgcctcttttcattcatttcaagtcattcttcagctagctatgggctgccttattgctattcgctcactgcttccatcttctgcccaagtgagaagaatagatgaagaacagaaatttctctgtgaaatgtggatacccgaataatttcataaatcattgattctatgtggtggtttttgtcttcttctgtggtgaatcttcaaaactgtattcaggactcatatttctagagttttaattggggtcctctattgtcaattgtagtagtgaccagagtatcgtggtttttgccatcagataattaaggctctggtgcataatttagactttctaagctcctgcctgaagaataaggtcttccataatatggaagagaaaagttatatttcagtgtaaatccaagagacccatcttctatgagaggcttaccagtgcattagtaataaaacattagcaatttagctagagcactgagattgtataatccttgcatggatgagcagagctcaaagccagttgttcctttaaagcatttaatgcaatggctaatgtttaggattaaagtttttattttatcctataagataattaagtcctaagtcactacaacttaagtagcttaactgtatgttggtacccaaactttttctataatggttaaggaggaggcacttactgagtttattttaaagttatgctagaaatgtt

SEQ ID NO: 222467 - DNA, 141 bp, Homo sapiens
tctgatagtgccaaacaaaaactgagaaggaaagaggatagtttctaaagacaaacaataaaatagtattattccatcacgcctagagatcatatcctaacctgaagctctaatttacagtacctattaaattaaatggta

SEQ ID NO: 222468 - DNA, 473 bp, Homo sapiens
ctctgccctcaaaccactatcgccgtgaggatgacgatgacaatgacgatgctgatgacaatgatggcctgtgtgcaacactctgctggccttcccagaggctctaccaggaatcccccacagcctgggacttctgctcctggaaacagttaaggctttggcaagaggctctcccacaaggcaattcgatctcccctgtctgtctgtgagggttcggggcactgctgtggcacgccagacgcagcagctactttctgtgaacagcctcctcataaatgtcagtcctgttggggggtggggagggggccttgatttattatatagcttttggacagttcctacagaaatattgccaaacagtggaataatcaactctttcactcaagccccctcagactttttttaatgaaagaataaagtacgcaatgagcctgagctaaataaataaaaatgccacacttttgcccaacaga

SEQ ID NO: 222469 - DNA, 558 bp, Homo sapiens
aatgcttagatataatgcttgctactatgaaaacatgttagatggtagaggtacgggagggagaatgaaaaaaaatgacatgtataagaaagaaagaaaatgagttacatatgtgtatacacacatgtatgtatttatattcatatcaaaataaggaagaaatattaatgattatcatttcctttctgcaacttgaaaaattgtcatagctgatacttataatgaccattttccaatataccttttatatcccctatgacctgggtaagcaccttgatgggtgatgcttccttgctttgtagggtgacctaaatctttatttttgaaggtgtagtcattagaactgcggcctctattgagtcattctagtttccactgactttaacgactggacatgggagttctaagcaataccctatgaaatttcctgaattcaggaatactcttccttatccccaatgtgtagtagtaacccaatttttcattgatattcactcaatttttcattgatattcgagatcaatctagcaaatacaataaatctcatttttgcctgtc

SEQ ID NO: 222470 - DNA, 502 bp, Homo sapiens
gacgaatggatttgctttgctgtagaggcagtggtgagagcaagggagggagacctgagcaaccattccctcccagggtggagggaatgagagtgggtgtgcatgagggagggccctggaggaccacctaggccaggctaggtcccttggactggacttgaccttctcctctgaccacccagagcacgtgcccacctcaggccctcccagctgcaggccatgtttaaggggactccgccatcgctccaattgttctgattagagaagcaaaaacaagccaggtgttaccacgaaatggtctaattagcactcactgctgactatttcttttttttttcttttctgttttaaaccctggacattttttattcactaatcatctctcagttcaaccagtgcagagccgcacgcgatttaccttttgatgttcgcagaagagaactcttgaatttcaaagagctggcagggatttagcagaattgaatgcagaagctacagccgt

SEQ ID NO: 222471 - DNA, 2170 bp, Homo sapiens
  misc_feature (2038)..(2038): n is a, c, g, or t
ctacacctggcttaaatgcatttttataattttagtataaacaagacattttagattgaataactttgtaatgtgctaggacagtagtttttaatgcaggtgggatccaacttttgagaaagggaaatgtgaaggttgaagaaacttaaaaatcaactgctgttggctagatctaggtgtgctgacttccttagaaaagaaatgcttcctttccctgcaaaccggagtttgggaaatttagagctaggaaatcatgtggtcgatcttaacgttataaatcactcagacaaatacaggataatgctgttttcggaagtgcttgtgattgtacaggattacatggtgataaagagttttcaatggctcctccagtttctgagggagttctgtgctttgctttcttggtaattccttctgcagaccttagagcctttgaggggggctgggtatgcttccgtgaatttaacagtttaacacactgttgaatagaagagaatctgctattggaactagtgattactaagaaaccacttctatatcatccagcatttgtatctactttaaagtacatattagtattttccttggtttacagatgaggaaaatgagttaggtaccgtgtttaaggtcacccatctgaaaagtggcagagaggggatttaaactcctggtcatctgaatctaaggtctgcttagaagaggagctgtttgcttctagacacatgcgtatttaggttgtgggtccacggactaatagcgtgggcatccctgggatattattagaaatgcagaacttcaggtcccacccacacctgattgcagatctgtgttttaacaaggtctctagatgattgcaaagcactacggcacagggacacttccccagaggaagtgtgatggccgccctccaggatatcatcttccaaggttagggacgtgccaaatatcccaagctttcagatatgcgactcaatcatctctaattatcctgctcaaccaaaaattaaagagcgattcttccaagtggaatcgagggaaacttttctcctggacaattctggagggagtccagctatccttaaggagatgcacagaataggctgttgccgacagcatgcttggaaaacctatcaacccggggtgcctcttccacggctgctgtccatgctatactttctcccattactgatccctctgaactagtctatcaaaccttctcctaaagagggtgagaacagattttgtcaggccagagaggaagaaagagatccagaatggggacgatcaatagcatgaaaatagagaagggcattgaaaagagcccagccttcagaacactccagtcctggcgctggagaactgcaccttaccttttactcctacctggttttccttttagaattcccccaggcatctatgctggagacagtagtgtctttgtctgttgttcccatccctgccttgctcctgccatttccaacgtcctgtgagtatatcttcacaggactcccccttccttttcacagtggccaccctagtttggatgtgcattgtcttacactgggaacattataagcgtttcttaagtggtcttcactcttatcccccggtaattcacagaaatagcatcagcgcaatcatcttctagtaacacggctttgcatctgtcactcttcctcaaaaactctcagttcctactgggaacagtctaaagaccaaaatgcattacggtctaaattaaaccaattactggttgcatttatccaactctattttccagtagtccttctcaaataaattccgtgagggcagcctacatgccttgttcctgctattagctcctagcacagtgcttgtacacagtggattttcactaaatattgattgaatgaacgaatgaacttattctcaggtttatgttttatagtctgcctagaatacactccttggtcaggccatttcctgtgactagatttcccttcccttttttcctgttcatctgaatccttaaaaaaccaagtaaggccgggcgtggtgntggacgcctgtagtcccagctactctggaggctgaggctggagaatggcgtgaacctgggaggcggagcttgcattgagccgagatcgcgccactgcacgccagcctgggtgacagagcgagactccgtctc

SEQ ID NO: 222472 - DNA, 555 bp, Homo sapiens
tttattaggctatttctcaaggaatagattttattttattggttttcacgttaatactgtttttccctaacaattgcattttattagaaaatttttcctgaaaacttaatgtttgaaatgaaatgcacatagagtatggcatgatgtgactaaatattttcctttattctcttaaatttttaattgttttccattgctcattataaactggtccagttaagctactggaggctggtttgacatacctgttggtgttttaacttttttttttttttttggagacacaatcttactgtgttgcccaggttggagtgcagtggcatgatcatggctcactgcagccttgacctcccaggctcaagtgatcctcccacctaggcctctcaaagtgctgggactacaggtgtgagccaccatgcctggactgtgtttaactttttacctttctattttttatgattttttcttgcaggctgacttgaagcaaaattggcagcaagatcctcctgcctcagcctcctgagcagctgggcctacaggtgcatgtccctgggc

SEQ ID NO: 222473 - DNA, 403 bp, Homo sapiens
ttttaagtttttgaagggaaaaagctggatgaggcagtacagaagagggaagaggaaaagagaggagagagaaagagcaagaggagaacgagaaggaataaggaaaagaaagaagatgaggaggagcagctgcaaccacgaccatatgtggcctgccaagcctcaaacatttactatctggtcatttacaaaaaaagtctgttgacttctgctcttgaagatctcattctgcctcattcctttaacatcatcttaagttgatgcctttcaaatggatacttctagttctgacctcaaccatgtacttacacatatccaatctcttagtcaaaaacagactcgattataagagttatctccaacttctggtgttcaaaattaaatctgtgataactcccttata

SEQ ID NO: 222474 - DNA, 454 bp, Homo sapiens
gagaggaaacatagtaacaacaaaacaaaaacccagcttagttcttgagtaaattaattgaattcctcacactagcagcttagtagaaaaagtgatatgtctatttgcagtcacaaatcttagtctctactgttctacataggatgtccaccattcaaccaaaaattacaagatacaagaaaagcaagaaaaacaacccactgtcaagacacaaagccaataacagaatttgattcatatgtgacccaaatgttggaatttaaaattcattaaaaaattccttaagacaactccagtggtaaagatgaaaaatttgcatgaacaggtagagaatttcaacagagacagagaaactataagacagaaccaacgggatggtagaatgtttttttaagcatgaccacagaaatgaataatgtctatggtgggttcctcagtagactccacaactaag

SEQ ID NO: 222475 - DNA, 355 bp, Homo sapiens
ttgtttgaggtccttatatattatttctagttattaatctcttgtcacatggagagtttgcaaatattttctgccattctataggctgtctcttcactttgttgattgtttctattgctgtacagaaggtttttagctgatataatcccatttgtccatttttgctttggttgcctgtgcttttgaggtctgtcttaggaaatctttgcctagactaatgtcttgacatgtttccccagtgttttcttctaggaacttcataattccaggttttagatttgagtctttaatttttatttgagatctgtgtgctgtgtacgaagtaggtatcgataggtatacacgtccctcgtaa

SEQ ID NO: 222476 - DNA, 220 bp, Homo sapiens
cgggtgcagagtagcaggagtgttgaagaaaaaaaaaaaaaagcgctaaggttttgccaggagagtatgatggaaaaaaaagggctcagaagtgccctacactgaaaagctttaatatatagatattatagcttcatatctaccaattaatctgatgactatcatctaccttataaaatagaaaagaagactgggcaaggtggctcatgcttgtaatgcc

SEQ ID NO: 222477 - DNA, 315 bp, Homo sapiens
gcacgagaagagaagaggatcaaagactgagccctgtgacactccatttacaaagctgcagaaaagaagaaaaaccagaaagggagactgagaaagaggaaagaatggagagggaagaaaaccaagaaagtgaggaatcctggaagacaggtgaagaaagtgttcaaggacacagcatggtgttctactgtcaaatgctgctgctaggtcaaataacaattgaccttttacccttgaaaagtcaatgaatccaggagctggattaatttgaaaaaaattaacaaaatagatagaccactggctagactaatacag

SEQ ID NO: 222478 - DNA, 442 bp, Homo sapiens
gcttccattttggaagctctactcattcagggtgaaaccgtattgtaaaatgccctagggaaggtcagtgtggcaaggaactgaagcctcctgccaagagccatgtgaatgagcttgaaaaagatcctccagcccaggccaagtcttcagagaccacagcccacttcaacatcttggctgcaagctcatgagaaaccataagccagaaccacccagctaagcagtttctggagtctcaactctttgaagctgtgaactaacaaatgtttattgttttaacctatggagttttggggtaatttgcaatgcagaaatagaaaactaatacaggtctccctctagttatattgtgctactttcacggttcaaaatcaggctacttcagtactagttttaaaaattattttctaaaaactccctctatcggatctacctgggtaaa

SEQ ID NO: 222479 - DNA, 444 bp, Homo sapiens
cattgttattacttttaaaacatctagactcacataattaatttaaattctgaatgttcaggaaagtattaaaaatctttgtgcctccgccttctcatctatgtaacttataaaagcagtagaaattagagtaaaattcagagcccagggcctgagacggacagatcacgaggtcgggagttcgagaccagcctggccaacatggtgaaacccccatctctactaaaaatacaaaacttagccaggtgtggtggcgcacgcctgtagtcccagctactcgggaggctgaggcaggagaatcacttgaacctgggaggtggagttgcagtgagctgatatcatgccactgcactccagcctcggcaacagagtgagaccactgcactccagcctgggtgacagagtgagactttgtctcaaacaacaacaacaaagacaaaaaat

SEQ ID NO: 222480 - DNA, 574 bp, Homo sapiens
ggttgtggagcttctccccttcagagagtccctgatctccgaaaatttggttgagatgtaaggttgattttgctgtacaactccttttttgaagttttactcatttccaacaaggaaggcaagttttcctgcttccattgacaaaggagagcaggcacctcctttcctgagtttcagcttgcttctgacagggaaggtgagtgtaagtttttccagcttctaagatggcagagaatgatcacccagtctgagccttatttccaggtaagtagctgaattagagttttgtcttaaaatttttgtttaatgactaaaatttaagattacccaccagctgcttttaattcctccttaccattagaacactcagttaatcatatgaattgtgcatttgtttgttttgcttaactctttttgtttatgtttggggttttattgttgtttcacttttctcccatctcttcctgacttggtcaaatccaaaggaatgttccaaattgtggggagcaaggcatctgaattggctaaaactcctgtggctgcaaaacaaaaacaaaaacaaaacaaaaaaaaa

SEQ ID NO: 222481 - DNA, 353 bp, Homo sapiens
aaaaaaaaatcgccagggaaattatcagaataaatttgtcagaagatataggaaaaatgataatgagtgtgttactccttgactactttattttacacatgtatgttgcttgaaaaatacttcaactgtgacatttagtttttaaatgttatccatgattcattgctaaaacgactattcttttactataaaagtgagttcagttcatatattagggttaattttatataatatggcacagagggctactgtgtctgttactcagtgtaaatcttggtattgctttttaaataatgaattcataatgcaaaatatgcaaaaataaaaccagcaatattatttttgtaaaaatt

SEQ ID NO: 222482 - DNA, 613 bp, Homo sapiens
gacacagcctaatcactctaccgtagcttcctgccgagagtgctgccgttctaccacagctggattctatttgctgcacactgacagaatgaaacctaaactagctcctcctaaactgtgtttgaagaaccagtttttaaaattaccaaccccttgcagattgatatttctgtaaagtatgataaaaatgaattactagaaaaatgaaatggggggaaaaggcatgtaaaatacaagcccaaatttttattattcaacttgacagacttcacattacacctttcagtaaattcaatcaaaagataaataatgggccggacaaggtggctcgtgcctataatcccagcactctgggaaaccagggcagttggatcgcttgagcccaggagtttgagaccagcctgggcaacatggtgaaaccctgtttctaaaaaatttaaaaattagccctggtggtgcgtgcctgtggtcccagctactcaggatgctgaggttggggggatcactggagcccaggaggccggggttgcagtgagccaagattgcgccactgaagtccagcctgggtaacagagcgagaccctgtatcaaataataataataatgatagaga

SEQ ID NO: 222483 - DNA, 482 bp, Homo sapiens
aagactgggtagtttataaagaaaagaggtttaatggcctcacagttatgcattgcctgggaggcctaaggaaacttacaatcatggcagaaggcgaaggagaagcaaaggcacgtcttacatggtggcaggagggagagcatgtgtgcaagtgtaggggaactgccctttataaaatcatcagatcttgtgccactcactcactatcacaagaatagcatggggaaaaccatccccatgattcaattatctccatcttgtttctcccttgacatgtggggattatggggattatggggattgcaattcaagatgagatttgggtggggacacaatgcataactatattagcaagtaaagacactcagtgagttggatctctcagcaccagcagggcctacaagcatatatgctctaggagcagtgtagtgtctccttaagtctagtggggcataaaggaaaacaatcccataataattttc

SEQ ID NO: 222484 - DNA, 553 bp, Homo sapiens
agaatggttcaatatattcaaatcaataagtgtgattcattacattaacaaaacgaaggctaaaaactatgatccattcaacagatgcaggaaaagcttttgaaaaaattcaacacacttttgtaagaaaaactttcaacataataggtgtatgtcaaacacaataaaagccatatattggcttttattattaaagccatagtgaaaaatctaaagtgtttcctgtaagaccagggacatcaaaaggatatctactctgatttcttttcaatgcagttctggaagttgtcgctagagaaattaggcaagagaaagaaatagaagacattctaatagaaaaggaagacatgaaattgtctttgtgtgttgacaacatgatcttatagatagaaaaccctaaaaccaacaaaaagctgttagaagagataaacaaattcagtaagtttgcagaatacaaaatcaatatacaaaactcagtagtgtttccatatactaatagtgagctgtctgaaaaggaaattaagaaaacaatccatttacaatagcaacaaaa

SEQ ID NO: 222485 - DNA, 386 bp, Homo sapiens
gaagcaggtagtaaggtaaggtttttcttagactcagctattgactcaggccgtcctgggattcccccaggggttctcctattctcaacagagtgtagttgtgttaagtgtggagtgtgtccggtctgatgtttctcgatccccgcccgcagtggttgcttgtgacttttttggtgtagaaattcacgtcgttttataacctgcccccgtttctccctctgaacagcagctcgagtaagtgtaaccataaagcacttatactttgacaagcagcgtgctctcttacctcttggccttcgcatgtgctgttccctgggcctggaaagcccacacttgcctacccgataagtctgtctcctccttatctgtggaactcagctcaaagg

SEQ ID NO: 222486 - DNA, 388 bp, Homo sapiens
gcagatgggattattttatagcatagttcatttcatttctcatttttaaaagcactttttgctttgtgtgttacatatgtttgcttaaagatttcggacttttggccaggtgcggtggctcacccctgtaatcccagcgctttgggagggcaaggtgggcggatcacctgaggtcaggagttagagaccagcctggccaacatggtgaaaccccgtctctactaaaaatacaaaaattagctgggcgtggtggcatgtgcctgtaatcccagctacctgggaggctgaggcaggagaatcacttgagccctggaggcagaagatgcagtgagcctgggtcatgccactgcactccagcctgggcaacaagagtgagactccatctcca

SEQ ID NO: 222487 - DNA, 227 bp, Homo sapiens
tagccggtcgcatctgatgcttgagaggtggtgaagttcaaatgagcctgttaggctgaggccctaatccaatggaactggtggtcttataagaaagggaaaggccataggagggcacagcgaggaggcggctgtggccatctggaggcaagggagggaggcctcagaagggaccaaacccgaaacaccttgatctcggacttctagccttcaaactgtgagcatgc

SEQ ID NO: 222488 - DNA, 190 bp, Homo sapiens
aaaaaaagagctttcaaaagttcatataacaaccatgagtagtaaaagctgacataatgtttactctgtgccaagccattctaaaattaacctctttggtcctcccaagaaccccatgggatatccatgatccttatccccaggttacaaatgaagaagctgagacccagagaggtggagccacttgtcc

SEQ ID NO: 222489 - DNA, 609 bp, Homo sapiens
catttgaaaatatacacacacattccagagtatgctatcagttaagagatgttattctcttttcacactcagaagagttggtcgtgaaaatctagttagtagcatagattttattatttacacaaatatttactgcttgagagttatgatcacctcacacacgtagtctaaaaactcctatgatcaaaggcacacatgactgatcaaataatctacataatccccaattacaggtaaaatcaagcctttaccaatgtgatgaagttgtgtttgaaatggtacatgctttgttgctggtagagaggcatctgcttttggtgattgttttcacataatgccaggaaggccatatgtccatcgaggcaacttgcttgacatcatgacctgaatatcctagaattttcacaataccttttagaagggagtggaaaggtttaaaagcctatactaagatttttctatacacagtttcctaaacagacttatcaacaaccaatatatgctaatcaagattttaccataagtgtcattacagataaacactgtagactatctgacaaaaaaaaaaaagaaatacaaacctgactttactaggaatattacgataaa

SEQ ID NO: 222490 - DNA, 298 bp, Homo sapiens
aggaaggcatagatggttcttgaggaggctgacctcttatcagtctcaatttttctatatcccctggatcaacagacctggaagtggatggactgtggttgataagagctgacacattgcctggccatcctcctgctaccacttccccagagaaagcacccgttatgtagtcagaggagaaaactgagcccatctcctctttatggtgaacaaagtaaggtttgttcatggcaagtaggggctggaagggagaacttgtgattctacgctgagacttacttacaaaaaaataaaaaac

SEQ ID NO: 222491 - DNA, 395 bp, Homo sapiens
gtattgattgtcactaaatctttaaaaattaagaggaggcagggaagaaagctaacagtttgtatagcattctgctctaaatggtaatcagatgttctagctatgaatcttgaaattgtatccctcaggagagccaaggatgatgcaggtagtatggcatactgatcaaaggtaggataggacaaataagaaataaagcagagtcagtaatgcagttctgtactattttctcctcatagtctatatttgtaaataataagactgaaattttttgtcttattagaatcacacattattatttggatattctaataatccccctcccattctttgtgtttatctgactactatccatatgaataaaaggaatggccatattctttataatactgtga

SEQ ID NO: 222492 - DNA, 320 bp, Homo sapiens
taccctgcggctcccgctatcctggaagaatgcgggggcttctggatgtggccatttgtcatccttgggtggcaggacacaaagatgaagcagtagctgccacagtaactcggtggcctctgaaggtggagctgacgggaaagggccccaggttaccacaaaggtacaggcggtgtccagcaggtgtggtggcatcccgtggcaaacctggctctacataaagtccctaggggagctgtcgagacacaagttgccgtattcataatagccccacagtgccaaccatccagtgcccatcaacagcagtacagagggataga

SEQ ID NO: 222493 - DNA, 407 bp, Homo sapiens
ttcaagaaggtggtcactggcatctttttggcttttagaccagagtgacatcatttgagaaagactgttctagtccaaccctgcagttttatagatggagaaactgaagcccagagacggaaagtgatactgaaagtgatttcaacagctggactcagagttggtctgagactcctggtctgacacctttgaattcggtcaggtgaggaactcgggaaggtctgcaggtggcgctgcttctaaagggccttcgggacacttgggctcaattttctcacttaaccttgggtttctgattgagagtgggaaacgctgcttttcctgatctcaaaggcgaaggttccaccaaagttgttcacacaagtgttataagagaaaaattttaaacaaattaaaatgtggtacat

SEQ ID NO: 222494 - DNA, 558 bp, Homo sapiens
ctcgtgggtggctgaggactttcaccaggcgggccccgggaggaggaagggaccccagagtcctcaggaggggagggcaggcttaggaaaaaaaaaaaaaaaatcctaccatcttcacgtttgttctgtcaaatttaaaagagactttaaaaacgttcatgtaagtttccctggcttctccctgggtacacacgtatcctttttactttccccaactcagttctgtggtgcgtgggaggcgctgcaacagagtctcggtccggactggagccccggcgagggccgaccccgttccccacgcagctttccctcgcgaggtttcgcactttccagcgcggttccttcccgcagccctcccggctcccgcgtgggacgcagagagaggttgggcgccgcgctggcccgggagtggcttacgcctgacgtagccccgctggaggccgtggcacgcccgccctggcgtcaactcccgcgccccgggtgagggtgggtggccgcgcctgggtcccggacgccgcgggcgctgaaggcctcgggagggcgcggggcggcggccgc

SEQ ID NO: 222495 - DNA, 267 bp, Homo sapiens
cacaggacaagagtgctcacccattggctgtatcccttcatgacttgacttgggctcagcctgtttggcaggtggtctctgaggctcccacctgtacaggtagtgaccacactgtacagcacttgacagtcactgtacagtgacgaactgatcagcatttgagccccactttccaaaggtctggctggagctctctgattatcatcactggctgcatggaacatccctacagactattgtttgttactgcacacccctggcttgggc

SEQ ID NO: 222496 - DNA, 347 bp, Homo sapiens
cccccaagcacccccgccccgcacacccttaattgcaatttaagggagaatattctttccgtcctctcttcgcccaagggcatttgcagggacccctccctagaagtcctgtcgtgggcctagcggctagaagggccaccccgcagagcgggtctccgacagccccagcccggtcacctttcaaactgcgccctcctgggccccgcattgggcgcgagcctggggcgcccaagggcccccactgaggaggaaggttgccggaccgagccctcgccaccgcttggcgcccccatcccccatcctcctccctttgttcgcctttccggacgccgacttggagatggcag

SEQ ID NO: 222497 - DNA, 548 bp, Homo sapiens
gaaattcagttttttgccttagagaattcctgttttatattagaagtttcaggtcttgttacaaattttaactctgtgatggatcttgtaagtgcctcaatagccctattatgcatcattatgtggaagataagaccatcatcataataaatacaaaacagcaaacagcattcagatattttcctaatacttggttacacagcttggttccccagaagcctgattctgtttttttgggagctagcacttcccaaaggcctgggctcccttcacagcatgtcttcagatgtcccctgggcccagaattgtctccagtggtgtttggtggagtgccgatggtagcttcttggttcaccagtcctcagaatccagcacatttaaacctgttttttttaagtcaccaggcaaatgtgggggggttcccatgtcaaatatgtctctcaggctaggtggttagtcaggttttcttgttctctgtattaaaagataatcttgccattttgctactttaagaactacatttcccttcataatagaactgccactta

SEQ ID NO: 222498 - DNA, 478 bp, Homo sapiens
gagacagtcttactttgtcacccaggttggagtgccagtgtcgtgatctcagctcactgcaacctccacctacctagtagctaggattataggcgtacgccaccacaccagataatttttatattttttttagagatggggtttccccacgttggccaggctggtttcgaactcctaggcaacagtgggagacagtctctacgaaaaaaaagaaccaaccaaacaaaacaccaccaaacataacatacatagcctcaactaaaaaaaaaaggttacttaaggtattacaacaacaaaaaagataatgactagaacaacaataacaacacaaaatgtcctaagtgcaagaaaagcaaagacaaaaaaacacagcaaaagcctgtatgtttctgtccatgtgtggacacatacatactctaatgagctgtaacacagaacagcagaggaactgacaggaaacccactgacactattacac

SEQ ID NO: 222499 - DNA, 550 bp, Homo sapiens
cagctgtcttttatgaaaatttctcagaagttacacacttccacttccacttcattgatggtgctgaataagatcaaggcataaggaaagagaaagatataggggcagacaaacaacagtctctgtagcagaacatgacgatgacacagcatatcatcttttctgattttaaagcaatcaacttagtatttaaattcaatcactcaagattttcctttgtatctttacttttcctcccttttcttaaagtaaacttaaatttccagagaacttacatattatgctgcaatcagaagaagggtctctgccttagctatagtgttgctgatcacagcaagactttttattgccatcatgaggccggtattactgctgagtctatgctttctctgtggtccttggtcgtgaagttcatacactccaaatcctactcattccaacctcaggtctctttagggccttcaatcttctgccgtttgtaaggttggagattctgcccttgcccatggttaggataggagaggctatgctgcagagaaaagaaaagaaa

SEQ ID NO: 222500 - DNA, 449 bp, Homo sapiens
cagtagatgacaccaagcattcaggcccacagaactccaagtaaaaggggaaggacaaaactcaagttaatttgggcctcttctgctgctctgctcccaaattagagatgctaagtgaacccatgtgagcgcggtgactcacaggcccagacgccaagaagctgccttgtttgatgctcgccgctgcagccttccacactgaagctgcagaagggattctagtgacagtgtttccttccacattgttcacttttacctctccatgagtgcatttggggtgtataagaatcagactttgaacgtggctctctcctaaaccagaacaccatgctgtactcaacctctcaaaacgaagcccacgtcaccacaatttgtgacttcagatgggttgctttctatgacaaatttgaggatctttataaaaataaattttttttcctccgcttgtc

SEQ ID NO: 222501 - DNA, 451 bp, Homo sapiens
gaacctgtactcatcctgcttgggaagtactagcagactagtagaagaactgtggggcatatacaacacattctaatgccaggtagaatgtgggaggtacagacggagcattttagggatttagagaggtacctcttttaggtcggcagggggttttcaaacagagaaatcaaggaaggctgcatggaggaggcagcatttgaattgggtcgcaaagagctgtagttcatgagggaggcccctagaccatggagacacttggcttccagtctctaattagactggtgagcaggaagcttcaatcactcactcaggctatcaggtcaggaagtctacagaaaaaaatcccaccttctttgggtggaagtatgggtggaggacttgtagcccaggcctgcctcccaaaaccacctcctgccacctgaaagagagtccctgtactattcatagg

SEQ ID NO: 222502 - DNA, 429 bp, Homo sapiens
cagcaaaaaaactgatgtcctcattccaaagggcataaagaactgaatgaattctgccaataatcatgagtgagcttggaagcggatccttccccagctgggctgtgagatgactgcagtgccagccaacagctagattacagcctgtgagagaccctgaagcagaggacctatttaagtcatatccagatttctgacctacagaaactgaggtgatacattttttggtaagcccctaagttttccggtaatttgttataccaacagataattaatacaagagttattccaatttttattttcattttgtatccagtttggtaaactgtatttttaaggaatttgtccatttccaagttaagaccttattatagtcttatttattaatttccttcagaggtagacaaagtataccaattcattcactga

SEQ ID NO: 222503 - DNA, 193 bp, Homo sapiens
gtgagtgagagaagttggtttcaaataatttatttaagtgtatttgactgttccatttcattgaaaagaaacggtagtagaaaacagattttaattgttagagaggttcgacaataaaatcagctgtcttataatcagcttataatcccacagatcagcccattaaaaagaggctgaattatttctgccaagc

SEQ ID NO: 222504 - DNA, 500 bp, Homo sapiens
actacactacacttttcttttttgtaatttcatagtagattcattaaaatcttgtcatggaaaagacactaggatttgcaaattactattccagaccagcttttgaaaaccctgaaaatggaaaattcaggagattccccccttaaaaatgaagaaatcaagtaagtctaagcaaaatatctcctactaacttaaggatctttaagcagcaacatctatcatgttacgacttctaaaagttagaaactgccatttaatcagcactataacctcatgaggtgagtattcctgttttacaggtgaggagacaaatttaggtaggttaaatcattttgccaaggtcacctagccataaagtattgcagctgagatttgaacccaagtctgtctgattccaaagcctgtagtcatgttaccactcttgtaaccattatgttatactgtcttagctcttttttatagagtggaatctgacttgtaattcttcatctagtattgcg

SEQ ID NO: 222505 - DNA, 222 bp, Homo sapiens
agtcacatggcctaaggatagatggtcaaggaactttggaaaaattggtccctgggggatgtgcagggcaaatactttttggctgtaaggtgtgtgcagagagtaagaactggatttaaatactgtaagttggttgggctgttagagccttttcctgctcaaccaattaagacccgagtgaggctgaataaaaataacattgtttttagctatctttaagga

SEQ ID NO: 222506 - DNA, 396 bp, Homo sapiens
cgtcattgtgacacatcaatgatctgaagatgacaaatgagtttttaaaaattcattcttaatgataaaagactttcaagatcatagaaactggtagcctaggcattgctaagtctaaagaaaatcttgttttcatagcaaatctcgggtgtcttaacagatgttcttattctttaacattctgtttgcccttgtacattacatgtactttatagcaagaggattaaaagaaatgacaaattaaactatgggtatgctgacacttaatgtaacataaatgattcttcaaagtctgattagacaataaaataattcctcagagctctataggagagatttctatgtaaaggattcttgagacttgtattacatgaataaatcaaaacttgcaaagca

SEQ ID NO: 222507 - DNA, 318 bp, Homo sapiens
gacaaagtacctgaacagacatttctccaaagatacaaaaatgtccaacaggtctatgaaaaggtgctcataccaatcaaagggaaatgcaaattaaaactattatgagatatcacttcacactcgtaaggatggctattatcaaaaagagaagcaataacaaatgttggtgaggatgctgagaaaagggaacccaaatgcacaattggtggaaatgtatgttggtagggccattatggaaaagagaatggatgctcctaaagaaattaaaaatagaaccaccatatgacccagcagcacctcttctgggcatatacc

SEQ ID NO: 222508 - DNA, 306 bp, Homo sapiens
aaaagaggatgaatgtaggagaaatcttggtttggcaaaataaccaatagatattttttagtccacttggctggataataaaatcttaataacagggggaaaaaaagaaagaaaaaggaggaaaagatttaggaaagaaaacaacaactttagtatggaatgtgaagaactggcaggatattcacgttgagctgtgcagtaagtagcttactggacatgtgaggctgaagatacagttgttcatatggaagcaattatttaaatcatgaaagtgaatgagattgccaagggatagagaataatcaa

SEQ ID NO: 222509 - DNA, 403 bp, Homo sapiens
gttttcataggttagatgcaataaaaattataactcagtccagaagtaaacctaaaattaaaattcttttgatgacaggacattttaacaacttatttactatttgcatcccacagaaataatgacagggtgattaatagaaaatattcaagcataaaactgtgttacttttcaatgaattccatggaaaaaaataaaattgaaacgtttgaagggatgaaaaagaaccatgtaaaacttctgaatgttaactccaaattaggtcacaccatttttaaacacagaagatgcagggcggcaaatcagtgttcttagattcaattagctacatttaaaagagggatgtaatagtttatttattttttattttattttactgtttgaggcggagtctcactctgtc

SEQ ID NO: 222510 - DNA, 580 bp, Homo sapiens
gtaccgaaaaaataccatatgggactcgacaactttttgacagtgacctgaaaggagcccaatttcaaccatgagacatgggttatagtcccaggaactctttttaactagtaatgaaaacttagcttctccaagcctcactttcctgatctgtaaaatggaggaaccatatgaccctgccacctcaagtggaaagataaattaaaaatgctttataagccataaagtcctataaaagatgtgattattttcataacaaatctatttaagaaaaaaaaaactttgcgggccccataccttgtgtatatgactttttgtaacttatacaaaagacataatcataataaaagaatcggaatctttctttggttaaaaactgcactagtaagtatattagcaacagaacttgtgctatttaagattaaataactctggcgctgattcagccatgaggcttactgaagaacagctgattctgatagttttaactgaataagcattaacagataaaatcacatgataaaaggcatgcatcttatgagtataaccagtggccttcagaggacatacaacttccagt

SEQ ID NO: 222511 - DNA, 589 bp, Homo sapiens
gtgctcagtattgtgtcttagaagtagtagttactcgggtatctttaaatgtatgggaggatgtcaatgatggtcttcagttaaatgttttacataacaattagaaagtgaaccaaaatgaactctttatctggaaatgttatcacaacctgggaatctgctttaaggaactgtacttagtattagtttattttcctaaactcctttgacttaacccctctgtaacccaaagcttaacatgcgcagaagatttctgcagctacgggttttatcctcctttctgctcagctcaggaatcagtgaggtccttttaaaaacactcaagtggtttctcctgtgcaccccacccacatggaaaatattatagttagtcaatcaaattttcctgaaattcagcatttgtttatcttccctgtacctgctttgctgatacactacaataatacgaatgataaaatgagtggttcatgcagtcttagcttgctgcctcacaatgttttccctctccacaacagacttggctatcaggaaaaaatttttaaatgaacccctcacacaacccacataaaaagactttatccaggcacaa

SEQ ID NO: 222512 - DNA, 153 bp, Homo sapiens
tgggaggtagggtcaagggattttttcttaagggtaagagaaataacaacatgtttccatgccaatggcagtaatcaagtagagaaggcggcgagaagaaatgaagagatcatgggagaattgctgttgtggtgttaatgagcaagagggaat

SEQ ID NO: 222513 - DNA, 215 bp, Homo sapiens
accagcccaggctgtgactagaacctcattctcaattcccaagtcccagggaaataactctgtttgttactgtttgggttaggtgcctgttgtgggttgaattttgacttcttaaaaaagatatgttgaagccctagacccctgcacctcagattgggaccttatttggagatagggtcattgcagaagtaattaattaagatgatgatactgga

SEQ ID NO: 222514 - DNA, 432 bp, Homo sapiens
gcacgagaagattagatgctacttttgaaaactttttgtgacccaaagagaaaattagaactctcataagatgaaaccttttttcattagagtagtaataattgtcatcttttaataatgatttctctctattagtagtcgactttactacaatattggagacttatttgtaatttgaattttcaactacatttttctgttttcatcccttttgaatggagcttataatggaatttcgaaactaaaaggcttaaagttagcttctctaaaagagcagagaatatatgctcttatttagatatttgatttagatgtagttttccctccccatggagaatcaaacatttatacagcattctaccttgaaactaagtgcaatgtttcttgaggtctttgattgtatttccaggtctattatatattaagagtggt

SEQ ID NO: 222515 - DNA, 224 bp, Homo sapiens
tgtctgtcccatctgagttagcttcattgaggatgtctgcatttaagcccagaagtagtgagaaaaggaaacagcatgtcactagggtggaggcagagagataggaggagagagagagaaagaggatgatgatgaaccctatgggggtcacccatcacctgctcaccatgagaaagctgccaccacaactaccccaggaagagaaagcccagagctgcagaagc

SEQ ID NO: 222516 - DNA, 558 bp, Homo sapiens
agaatgagaggaaatatttgcaaaccatttgtcttatacaaattaatacccataatatatagagaactcataaaactaaacaacctgattcaaaatgggcaaaacatttgaatagaaatttctccaaagaagacactcaagtggccaataacaacatgaaaatataatgagtttgacatcattcatcattatggaaatgcaaatcaaaactacagtgagataccaccacacatccattaggatagctaccaccaaaaaaaaaaaagaaaatatcattgtttcggtgagggtgtggagaaattggaacccttgtacactgttgttggaaaagtaaaatgatataacctctgtgggaaacagtatggcactttctcaaaaaagttaaaattagaattaccatatgatccagtaattccttttctgggtatatagtcaaaagaattgaaagtggagtctcaaggagttatttgtacacctacattcatagcaacattattcacaataactaaaatgtagaagccaattaatttacagtgacataggcaagatggcacacta

SEQ ID NO: 222517 - DNA, 339 bp, Homo sapiens
aaaatgtcctgatctatctagcagtctttctgtttttggcatatcctgtccaaatatgagtgaagctactcaacaacaaaaaacaaccacaacaaactgcagaattttgctcactgttttgtaattcgtttgttgataaacgagattttttaaaagttaaatcaatatgtaaagaaagtaatttccattttcttggtgtatattagagatttttaatatattgaatcctctgtgaggttaacagacaaaatggctttcctataagaaaatttgcaatgcaggaacactgccagcaaaaggactgatgaagcagagcaatacattacctttttttttttt

SEQ ID NO: 222518 - DNA, 474 bp, Homo sapiens
gaagaatgaagaaaacaaatgttcgtgtgctgatgtttctgaaaatgttctttaaaataaaaatgctgtgattgacagcctgaaaaggcctttaatcaaggctttcttctctacgcagatgataggaatggtcattgtaatctggagtatcacctgaaccatagtttctagaaattaatgtaaatatacaggccaggcacagtggctcacgcctgtaattccagcactttgggaggccaaggcaggcagaccatttgaggtcaggagttcgagaccagcctggccaacatggcaaattcccatctctactaaaaatacgaaaaataagctgggtgtggtggcactcacctgtaatcccagctactctggaggctgaggcatgagaattgcttgaagctaggaggcagaggttgcagtgagctgagattgtgccactgcactccagccggggtgacagaaagagactctgtctca

SEQ ID NO: 222519 - DNA, 410 bp, Homo sapiens
gataacactccctcggaaagaaaatgactcttattagacatctgaacttgagcaaaacattcatgtcatcgattataatataatggatggctcctactctggcagcaaaatttagctttaatgtaactacagaagcaaagattattcttgggggaataatgacagagtgtatctttctgatcatctgaagcagttcattcacctctgaaactgactgtaaacctcaggaaagaagcttctcagaaatacatgacccactaagctaagagccaactccctagtgaatcaccttccacacccgtgacctcaagtccaggacccgtgtaaagctagtttttaccatgtcttctatgactgctgggggatggtacactatcatcctagatccaattacccacagaaaaaaacaa

SEQ ID NO: 222520 - DNA, 756 bp, Homo sapiens
aagttctgcaagatgctctcagactaaagagaaatccatctggaaatgctgcataccatacccctctcttggagttgaataacaccgttggcatatgagaaattctgcagtaaagagatatcattgactttgttgaactctatagttcccaaacttgaccataggagttttttttggaactagtgttttacggcacacacttcaagcaacagtgaaccaaataattaataacatgtagaattctaaaccatatatctttttcacttattgtttctgataaagttaattggaacttctggggaacagatgggtactacaaggtttgttctaaaactacatatagagtgataaagaacagctattagaccctgatctgagtcaacagtcttaagaggcctaaagaaatgtttgctattttgcctgaaccagatccctctccctagaaaactttcagaaattaaataaagagataaagccatctaccacataagctggagtcttaattttaattcctgttagcggtttgacatgatgacattaagctattctaacccccttctgaaagcagttgccaccactctggtctttctgaaagcaatccatctgttagtttccttccagtagtttgatttctgacaggccaggtgaaggaaaagcaaacatgctacttagtaagcacaatatcatcattagagatccacttctttcttctttgtgtctcttctttaattttcacatgtgactatttcaatttag

SEQ ID NO: 222521 - DNA, 443 bp, Homo sapiens
gtgtagtcagaagtcaggtggaaggaagacttcctggtttcttgttccttttatcttaattcacaaaggaagcatgggaagggatgcatgggatgagaggggaaaaaaatacaggaattgaaaccctaaggcaatcatgacatgtagagacacatcagtggtcatctttgttgattatttccatcatcaggcatgcaattactttctaatggtgaccatcatagcatagaaagtattaaggtcctgggaaaaacaaatgtgaaccaaaaacctatgtagaaaatacacacacattttaaaggggaagttaatcaattaaccaagacagcactaagtagtactacaatggctaactggtttcaacctaactgagctggtggttcctttgctcccaggcatattctttgagctcttaagagatgggccaaggcttaccaaaaaaa

SEQ ID NO: 222522 - DNA, 420 bp, Homo sapiens
ggtcccccttgagcatttagccgagtactgatcaatggatgtatatggacaaactactcaagacaaaggaaagaaccaggcaaaagggttagagaaagcatctctcacacagggccaataagagtgcctgttcccatcacccacattggagaaattcaaaactcactgggcgtgacgtagaggacggaagaagatcttgcctcagtggtaggaaataattagccctacactagcactgctcagacccacctaacaatctaaaaagcaagctctgaaaggatctacgcatttctaaggatctacagtttctaacgcctcccagagcgaaactccaggagatttacaggaatacgaaaatatccattgtcgctttgctttgtatactggttttgaaaatctgacgctagcctaattcatttg

SEQ ID NO: 222523 - DNA, 521 bp, Homo sapiens
aatattccaaaatctaaaatttgtggtcccatttctgataagggatactcaacctgtactaggaggtacccacaaatgatggttcccagtcaacaaatatccatttcccttttattaggggcagtgttacatgactctgtgtgaatactgacagcattcagagagcaatctgacctctgttctccagaagcatgcaatctaggcatcggcacagcaccaaagcagagaaagagcatgatgtgtaattaagcttccaatgcatagtgtggatggtgactccaggggaattgttctttgggttataacttctttagtgggagaaagttcccaccacacatcttggagatcaggctcagagacactaagtgacttgtccaaagccatacaacaggccagcagtggagctcaagttagcttcaaaagggcctctgaaggattctgccagaagaggagctgcttaatatgttagcatgagcttgaaataataataataaagattaatagtaatgctaaaaaaaagt

SEQ ID NO: 222524 - DNA, 576 bp, Homo sapiens
gtagagacagggtctccttatgttgctgagactggtctcaaactcttgggttcaagtgatccacctgcctttgcttcccaaagtgctgggattacaggcatgagctactgcacccaggtgcatttctgctttgatgtctcagacctaacatctttaaagttaaacttaacatttttccaaaactagactcattattttctctcacaaacctccttctcatctagcattattactaaattgcatcactacccttctagctgcctaacagaaacctgcgagtaattctcgacttctccttccccctaaacactcatatccaatccctaagcttgactgattctacttcttgaatattctcagatactgaaatctaccaatttataggacatacagatgataaagaaacatgttgaagtatatcatggggagtcatcagcaaaatctagagtatgggacactctataaaaaaaacatttggaagccaggcatgatggctcaaacctgtaatcccagcaactcaggaggctgaggcaggaggactgcttgagatcagtttgagttcaagaccagcctggg

SEQ ID NO: 222525 - DNA, 351 bp, Homo sapiens
gctcccagcctgcccagatttcaggaaggaaagaagatcttttgcttcttcggtcgctgggtcggctctccagtgtctgatgtttactgaaatcttgatcgtggttagcctcccccaggacttcattgtttggaagatgccttcgccaagcaatctgagctccaggccgggaagccccaaggtcacaaattttaatggagccctgaaactaaacagaaatcatccctcccactagaacaagagcccctagaggccagcgacaccgctaaaataacatgtgtagaccaatgccgtccaggtaacagtgcctggcaaacacggtagaggttcaataaatacattttaactcaa

SEQ ID NO: 222526 - DNA, 357 bp, Homo sapiens
gcttacccgtttttagctctctggcctctacttgctgggtcccttattctaaggtggggacaaggagcctgagaaactggtctgggtttgctttggctccagcttctttgtgtcctacacttgacccaaagttgctgagaacagtgtatgcaaagccacgttaggggtcactcctgggccgaagcgccccagcttgctctgcacttgacctgagactgggtaagatgggatgaaagaaagagaaggatggaaaagagctgtcctgacctgcttgtgtgactcccttcactgtcctttacagagccagctgcttgatgctaacccagatgtacaagaactctatctgggcttctctgc

SEQ ID NO: 222527 - DNA, 1071 bp, Homo sapiens
ttttttttttttttttttgagacattcatgtgaatttctctgcgaggggaaagaagaccaattattttccttggatgctgtcccttcttttggaattaataagatggcttcactcagtgagaggctgtaaagacatttcactggaaacaggcagtaacagtggccagttgtttctgttaataccatcaaaatatccctactcttgtttgtgccttgaagaaagtccttcatttaactgagacatctgagcctgcgttgcggattctgattctctaaatactcctgcaagaatccctttaatttttcactgtgcaactcaagaaggacctttctagggtattgtcaggatacgtatgctaatgatattgtcaggttaggtgagaatgattgatcactcccttaaaatccttttttatgatgttaaagctgtactttaagaaagataaaactgccactgtggcgttgcaagtctgagctagctcaagcaaacaaaggaaattgcgttaaatttgcccaactctattttctcatcttcatatagcaagactctccaaacagcaagtgatctaacctatcaagtattatgcaatagctgaatttccttgcaatggtcagtttaaagaactgttaacttagcagaggcgacgtctcgtggccaaggcccttagggtccactccatggaatcaggaccccttgctgctgctttgcgagtgttcatggaggaagaaaaatcacttggtgttctttttttgcatggaagagtcataataactgacttcagatacagagaaagtgggaagagtgagaaagaaggaggtgaggccagaggatttggaaggctaccagagagaagcagccgaggcctgattgtggaaatgatgcttagacttgctttcagcaggagtgatgaagccagaatgagggaggcccagacgcccgggagaggtacaggggataggtgccatgtggtttgcaccaccgcagcaggctttgggtcccaaagacgcgaatggaaatagaagaaaatgcagttttaaatagaaaagaaaaaaaaaaccgagaaaatgtta

SEQ ID NO: 222528 - DNA, 374 bp, Homo sapiens
ttgcaaaattctattgtaaatgaatgtcaaatcagaattcggtatccatttctttggtgatgcccaccaaatgaaaccctgccacttgccctgcattcaaactgaaattggaatttgatcttgggaattactttcttgtctagtatttgactgatcaaatgtaactccttcccttttaggcccctttctttcttccttttaaaaacctttctctattcatgaagcacaaattagcctttggaagactctctatctagctcataaactcgttaccttcttcctcagaggcatgactcattcgcttttgtctctcgacttcttagattattccctttccttacatctcacttttcttttactgtggaaagaaatat

SEQ ID NO: 222529 - DNA, 923 bp, Homo sapiens
caccacgctcggccaataaatttattaatattatattaagatgaactccaataagacctttggcatgtcagtttaacataagtgaaaggtcctttttatgccttttgagccttccttcaccttccatccaacacacacatgtaccagtaaattgcagatgccatttctgggctttgcacactttctctggctttccatgttctgctcctgaccaactctcttgccacctgactcctcccagcctggctgcctgctttcagtagctgggccattgctgggaacactctgttgcctccctgtgctgtcctctgctgtgccattgtgtggaatgccctgcagcctgcctcaacacaatgaagtaatcttaccagtcgatgccctgactcctgacgtcacccttccctgccctgtgtcacctttccctgcatatttggaggataaggcttgattgaggctcgggtaccgagctccctgaaggtgccttgatgctggcacatcgagaaccagatgccaccccgatgataaggaagacagacccgggacttccatatgaattgggtatgatcgtctgacatgcaccctactaactgatggatcctgctgttaccccaaagctccagaaccacactggccagacacaggcatttcctgtcccctgaagagccactgaacccagcacaaaagagatctagagctctccaaacctatggaatggcaaccaaaaccatgcccaggttttgagttaagcctcattagtctcccttttcccttgacaatgtagaactgtgcagccattgctctaagtgaatgagagcagaagcctcaggacagaactgaacccaccagcttgagctgacaacactgccaggggttctatccacagatggaatattcctcaccagacctggaccagcaggtaccga

SEQ ID NO: 222530 - DNA, 375 bp, Homo sapiens
cacatgtcgtgccttgggaattgctcctttgactagattactgttttgaggttgacgctgttgtgtttcttacaagagtagaaaacaagtgcacaaaaatggatttaggtaagtggaaatttaatgcagtcacagcagtgccccacacaaacaaagtgatctacaaatgtagccttgataagggtccctcgctaggccagtcgtcacctactccctctgctggatgacagccctccggtatctgcactcagctcccacgttcctggagcttctcttctcagactgcgcagcgcccagagcttcaggtctctccatatccttcatcaacacctcctgaaagcgtgagaccttggagaggcccatgtcctccaggtg

SEQ ID NO: 222531 - DNA, 508 bp, Homo sapiens
gcagaggaagattaaattttgcatgatgaaaaagcaacacattctatctcaagtatcagaagtgggtttggctttgcttcattctttttatacttcttaatttaacacatagttatagacaatacgtaagcctataacatatattgaatcctgcttttgtcccttaacaacaattttcacagaattttgtatacatatacagaatcatgttacagtagggagccctctgctggcttgaaattaggaaatttaaggcataaacattctcaagaccctgattctacattctagagacttttcagtgggtaaaacacattcttcagtaatggcaaagaaaagagactttttgctaatctttacatagttgtttagtatgtcagaagagcttaatgattccccaaggaatgatacataaatatgtgtatatgctttaatatatgtgaatttataggattagcctaaaaatgagtttaataatagaaatgttaataaataattcccccaaatg

SEQ ID NO: 222532 - DNA, 588 bp, Homo sapiens
atagctgcacttaggacccagaaacaggcattgatgagaacagacagaacattggaccttactctccgtcttccttcctcaccagcagtggactgagaagggagtgtgtggccagggccatcaggctggctgtgccattgatgagctcatccttgtgcaagacaatggctgagcatagaaatattatagtatggcttgagtattaaatctaacactgtatgagaaggtaccaggaagatggtaattggctgtacaaatatcaaattgctactattgatgctggctccccacctactcccaatggaatttaagccctatgagaatggggacttggcagtccaggtattactagaattcaatacttagtgaaggccccaataatactgccacctactccatattgggatactgttcaaagtatggaattggaaatttcaaacccattccaattgcagattgggaccccattctccttctgtggtagtccttattattgactattgaaggtggaaggttgtttcaaaaagcagtggaattctgtggcaaaaggaaatctaaccttcatggattaaagacacctttttaaaa

SEQ ID NO: 222533 - DNA, 818 bp, Homo sapiens
tcaggatttacccctcccctctttttcttagttatgaggtattgggaatcttctcaccctggggccttctcattgtgcagctgatgtcactgagcaggtccagggatttttctttccttttttctttttctttcctttttttaaatttttttaaaaattttatttatttatttttttgagatataccatgggaaatagttcatttttaaattattgcaactaggaagagaaccttgatttttttttctgagaaaaatcatacataaatgggaaaatttgaaaatacagataagtgaagataaaattatatcacttagagataactagtattaacacaacatacattcttttggtcttttttttccatgtgtgttttttttttctcagaaatatgatacagaagtgttacaaactgttttcacctaacatattgaacgacttctactacattttaatgaatgtattccatggtatactggagccagctcagctcagacagggattgttaaatagtcaggatttccagagcagattattaaactattagtagcttgagatcagccatggtgggagtatttataccatggaagttaccagacaccatgaattggggcttcttgttttatttagagggctggtttattagtataccactatatacacattttatcatgtaaatgtgatttgttctgattgaaataatctccctattttaggttatttctgatttttgctgttataaacactatgtaatggcaatcatggatgtcctagtacacatccataattacttccttaggatacattccttgaaatag

SEQ ID NO: 222534 - DNA, 394 bp, Homo sapiens
ttttgttgatttagtgtacttactaatattttaataatctgtacttcagcaaaatataaaatgacttccttgagctggtacactagcgaaaagcttcctttgtttttttgtagcatgctttccatgtgcaagtttaattcttttcctgtatgtgtgagatttaaatttttttttatctgtgccgcttgataagtaagatacattctagttctttatataggttttggaacatctctttttgaatgaatattttagatgaagtatgatgatgtttctttccttcaatttaaaataattaatttcattctctgtcaatgactgtttattttcagaatggtatttaatcagggaaatttctgttttttctaataaagcattgtaattatctgtattc

SEQ ID NO: 222535 - DNA, 1354 bp, Homo sapiens
  misc_feature (1111)..(1111): n is a, c, g, or t
  misc_feature (1166)..(1166): n is a, c, g, or t
  misc_feature (1188)..(1188): n is a, c, g, or t
  misc_feature (1233)..(1233): n is a, c, g, or t
  misc_feature (1303)..(1303): n is a, c, g, or t
ctttcttttctacattactatgtcttaagccctgtcaaaaatgctaacatttgatagatctagatcacatttaaaataaggaagcaaaaaacttcggtcaaatagcttaaagtatcaagagacgtgccatctcccacaagacgggaaatccaaattgactctaggtcaaggtttctgaacatcagcactgccgacgtttggggccaaataattctttgtaagaatcacaggcggagtggtctgcatgcctcagtcccaaccccattcccctggctaaatcccagtcatctttcaggttttgttgaatcatcattttgtctgtctggtcttcccagctgtactgaagtgtggggtccatgtcctctggtgtgctccccatggaccctggatgtcccccactgagcactgtattgtaatcatctgtttacttagatggtgaggcagggaagttagatttaaatgccctgacccatggtctattctatctgttgttgtcacagtctaatccctcattgagtgctgttgtccccctacatcattctcaccaaattgtgacccagcctctatcttcataccttagacaataaagaacctactacctttcaagactgtcatcttattgctgaataattgaaagtgtatcctaatagtaattcccaatctttcttcctttcttggccctggtctgcctttgggggccaccactttcagaatgacaggtaggtgcaagcagctcacatcccaggctgatgtctcctaactactcagtctcttttggattcatatcttcttggccaatgagatgtgcaccttcatagaatatagacctcttcctttctgaatgagaaatgtgtgatgagaaaggcaaatccatgagggaagaataaatctcttccaagcctagcctaggaggttgggtctgggtctaggaccctgccccaactctgcaggaattagggtattaactatgtattaatatctggaatcagaaggcctctgctcctgtctaggttttatgaaagctcccagaaactaagtggaggcaaactctgcatatacctttaagaagtccaggctgggtgtggtggctcacgcctgtaatcccagcacnttgggagactgaggtgggtggatcacggggtcaagagagcgagaccatcctggcnaacacagtgaaaccccatctcnactaaaaatacaaaaaattagccgagcgtagtggtgggcgcctgnagtcccaggtactcgggaggctgaagtaagagaatggcgtaaacccgggaggtggagcttgcagtgagcngagatcacgccactgcaccccagcctgggtgactgagcaagactccatctc

SEQ ID NO: 222536 - DNA, 258 bp, Homo sapiens
aaggaaaaacagatacctggatggaccctggtgtgttgcagaggacatgtgaagcaatcaggatgcagttaagtggcacacaaaatagtttgactaaggtacaggagttacagcggaggcagtagaaatttatacttcaaaatttgaatggaatttctcaactttgcttggattagtgatggcttttatctcctggggatgtgtgatttttataagagtgtggggaatgcagcaaagataaaggggagaaagagttta

SEQ ID NO: 222537 - DNA, 540 bp, Homo sapiens
actgtttacacggatctattccttaggactgagtcattagcacaatcctgtcttcctaggcttattagagaaatcgaagacaggatatttgaattgaaaggtacctacaaatccatcttctttcccattgattgattgaatccctttcatactgtttcttgaggatggtcaatcagtcttgcttaagcacttcccccgggaggaaagtcactatttacagattccccagcctcttgcattgctaacagtttgtatcatgagaaagatctctcccatagagttgctctctcattaatagtcacctcttcttaaagcaacaaggccagttttgaggaatctctttgtgccccttttcagtagtagatcagggtttgcacttcaaaggatatcgtgggtgtctttttatgagtcaaaggcttatcatctttattgcagatcagtaacaaggcaggtttctggaatatgtatatggtttccttataaacagtccccaaactcatgtatcaacctgacaaagtctagactcaagagtttgtttca

SEQ ID NO: 222538 - DNA, 895 bp, Homo sapiens
gtaatgtgaaagcaagtttattaagaaagtaaatgaataaataatggctactccatacgcatagcagcagcttgggatgcttgattgataatacttagttacttcttgattatgtgctaaacaagaggtggactgttcatgagttttccaggaaagaggggggtaattactggaactgagagtcccctccccctttctagaccatataggatgacttctgtaaaacgtcatggcactggcgggagtgtctcttagcatgctaatgcattataatgaagcagcgttatttgtctggggtaataccagaggtttgttgccccacacctggagaaattgaggatgcagacacacacaaggagtgaggttaagagtggaggtttagtaggcaaaagaaagagtaagcatgacggcccagtgcggtggctcatacctgtaataatcccagtgctttgggattacaggcgtgagccactgcacctggccctgacaaattatttttaatttctttgtagagatgaggtcttgctatgttgtccagtctggtctcaaactcctggcttcaagtggtcttcccattgaagtgttgggattacaagtgtgagccaccgcgcccagccctggccttggttctttgctcctacaaagtgctagaaaaaaaaccctgcctggtccctaaacagacctccagggaccatatttgatcaacgaaaactccatacctggggtatactgacaaggcacgttttccgatttgtagagttacttgtttaacaagcaaaacaaaatacatcctgcaaagaaacaagaaaccatcacagctaggtttagatttaatgaattacttttactgaaaagaacaaaactatgtgagaagagtataaaactctagtgtgga

SEQ ID NO: 222539 - DNA, 667 bp, Homo sapiens
gcttgatgattaaggaatggtctcaattctccatagccacatcagaccaaaattccatttctttgcctatgtgaagggtttattattaattaccctattaatttatgtccaaaccagatgtgatttccttcttggagcaatagttcgtgaagaggttggttaacagcagttctgtgcccaggtaaatgagaggcaactgataagaggaactcgttgtgtataaaatcttaggattctagatttaggacctttaaggcagtatttgaattagtgctctggaatgtctatgaagaaagtttgggtctcttcagccagaattcagaccatttcaacattgcattccatgtatcatacacatatctccttttattattattttttctgctctcaaagcagatttctctcattgtaaaattagtagattcttaattcagaagattggagaatattaaaaaaagcttaaagtaaagcactttgaacactttattccaaatcacttcacctcatttgtgaataagtgcatggatataggcttataggactttttcattcaaaacagggttatataacaattgttttgaaatctacttgtttcttctaacaaaatatagtgaacaaattttcatgtcactaaattatgaactgtgtcataatcttttaatggctg

SEQ ID NO: 222540 - DNA, 547 bp, Homo sapiens
tactattatatctgtcggctgtcgacttatttttttttcttttgagacagaatctcgctctatcccccaggctagagtgtatggcgtgatcttggctcactgcaatctccacctcctgggttcaagcgattctcctgcatcaggctccccagcaactgggactacagcagcctgccaccacgcccggctagtttttttatttttagtaaagatggggtttcaccatgttggccaggctggtcttgaactcctgatctcaggtgatctgcccacctcggcctcccaaaatgctgggattacaggcatgagccaccatgcccagacaggtactatattgatgttaagcataaaattagggtaatttaactggctcaggaagagtatctagctcatttgtttcagtttggacaatgctaaatgctattttaggggttctatgcccaactggaaactggcaaacaggatggatgtggggggaaggaataaagataataaaatgcgcagtttaataaatgtaagaactgaaccaagtaatcttgcagatact

SEQ ID NO: 222541 - DNA, 393 bp, Homo sapiens
acagacttttcatagacaaccctgaatagccagaggctgccccacgtagatggaggggaaaaatgcgaggggaaacagttgaactatgagtgcttggtcctttccccaaattcatgaaccaaaatccaggagtgtaaccctaatggaggtttttgtacttggaaacaagaaggttcaccccaacataagagatgcatagagaagcagggtcaaaagacaataccccctggagaagtaggtccagtcagtgttctgacttcccagtttctgctccttgtctctcttatgaagctcagccacacttcccgcccttgagttcttccagatacacattatttataattatgggtacccctttatttaaactctttcagggtgttcttgcaactggta

SEQ ID NO: 222542 - DNA, 126 bp, Homo sapiens
ttagtagagacagcgtttcaccgtgttaaccaggatggtctcgatctcccaacctcgtgatccacccgagattaggcctttcttaagaaagatttcttaaataccctagcctcagttccctattta

SEQ ID NO: 222543 - DNA, 435 bp, Homo sapiens
tgccttcccctttctcaacttcccccaccagaatgggacatttgttacaactgaggaacctacattgacatattatcactcagagtccataacacactacatcctattcttgctgttgtacattctgtggtttttggccaccgtataatgacatgtatccaccattgtattgatgctgctttacatgatgagcttacttcaacagggttatgccctgataaaccatcataaattgaaatgcatttaatacattgaatctactgaacagcatatcttagcctagcctacctttaatttgccagaacacttacacattagcttacagttgggcaaagtaatctaacagaaagtctgtttttataataaagtgttaaatatttcatgtaatttattgattactgaaaatgaaaaataaaatggttgtatgtttacttg

SEQ ID NO: 222544 - DNA, 389 bp, Homo sapiens
tcaggccctgctgcttcctcttggccacagtgtgggtgtgaactcacaggggcagcatccctccagagttcaagggcattccattaaatcagcaatcactgaagagatttctgaatctcttagttaattgccttagggaatttagtatgccatagctgtcaccagattaattaggtgcagtaatagtagtaataggaaactagtcaaaaacaaataggatcaaagggttattagttttgttaaatataattcccatcttagtaagagaaattttccaacaaagctgacattaaagaatcaagtttttactgagaatattttctaggttatttatgtatcattttgttctaaaaaaaataaagcaattgtgcaaaatggggtggtgtcaa

SEQ ID NO: 222545 - DNA, 1222 bp, Homo sapiens
accacaagcacttactttatgaataattcagacatatgaagagctgattaatgactcataatttagaaccccacctactgtcccctgggtgggggggccagggctgctctccaatgcctacctcatgccctgtgcagaacacgtgaggctcacccacctccaaacagatgcagtgcgccctctgcctcaggcagggcactccccaacacatgggcagctgctcacacagagatggtattagggccttttggggatttgggaatcttgaacactcatgggaagattgataggcttctgggatgccttccatggagcggctcgggacaaatttgtgaatgcagcggccaaaagatctgcaatccgtcatgggttgagtagagctacccaatgcgccagcagcatagggaaaatgctgaggaaaatgtgacggcaggtgcccactcttaaagcagccacaagtctttactgaggtcctgccgggtcagatcctatgctggatataatagggaaggcgtgcgtttgaaaggatttctcagccgcagacgcaagccacgcatagcgctcggtgagagactggtgtccaggagcatggaccgaggtgcagtggtggggctggacttgagaatgactttcaactgccaggatctggtgaccaaccggatgtcagggacagagagaaaggcccaggtggggaaaactcaaggcttccagtgtgggaggctgctccactcagctggaccccacagggtcctggggaaagggcctatttgacgggcagcagaatgagctgctcagaaaacaggaaagagaagacatcatttcagacctgaggcagcgccgacctatttggaaagaagaaatacacagatgaagcccctaaaatcatttaagtgaaaggaaaataaaatctcaagacccagttcattctgccaaagggaaaagctaagctgggactgaggcatgcaagcctctgcctttccttctgctccagagcaaattgctgcggaaagcaggccaggggtctccacagggagctgctcttatgctgactttatcttatgcaaagatttactgagcacaagacaaatacatgatggatgattcctgtacccgctcctttccaatgcgatgtgtggactcagacatatgaccacaccccctccccttcccctcctgcctgctttgcccctttcagtattaaagccctcaaaatcctctttgg

SEQ ID NO: 222546 - DNA, 467 bp, Homo sapiens
caatattctattcaaaataatgttcagaggagatgggtagtaatcatttgctgccaagaaaaataaaaataagaattccagaggaacccacaaatggtttcagagtaatctcacttatcagaaaagttattactggtgttgtggaaagaattatattttggtgtctttgccaaaagagcttttcccagaaagaaaaatgaataacattaacagtgtttcgtgagcgcatgctgtatatgaggtgctgactcaaggttgaatagaacatcaccctgtccctcacaaagcctaccatctggcagagaagatggacatgtaaaatgcagtgtggggctgggcttggtggctcacgcctgtaatcctagcagtttgtgaggctgaggcagtaggatcacttgagcttaggagtttgagaccagcctgggcaacatagtgagaccctgtctctattaaaaaaaaaaaaatgc

SEQ ID NO: 222547 - DNA, 401 bp, Homo sapiens
cacttcacggacttctcaagtttctctcttttggcagatgaaaaatcttggctgattttgctcttctgataaatactgcaaaagatagtagaactgaagttctatctagtcttaacactgtacgaacactgtacaaatctttgaattcttatggttatagactgacttggggccaaggaacagattaaaattaggggacttgggcatgtggactttgagaagtagatttttctgttaggtttttcagttttgcttttctgtctgttttgtcttaacttagagtactaccttattcggtactccactgatgctataaatgtagtatttttaaacatcaatgcattgtaatgttgttgaactccaaaatgcccaagcatgttataaaaaggaaaggttatcta

SEQ ID NO: 222548 - DNA, 449 bp, Homo sapiens
acttgcattcttttaagttctgtcaaaggtagtacttctcaaacttaaatatgcatgcaaatcacctgaggaatcacagaagaattcagattctcatgtgaaggtctagagtggggcttgaccctctgcataataagcttccaagtgatgctgatacagcttgtccactttgaataacaaggatttagttgaaagaaaccctgaatcatggacatactttgatttatctctgctctttcttgatttggactcattaaaccaacttcagattacaatttgccttctctgttggtttatctaaatagcagtattgttaatcccaagattgtatcccttatggtgaataaacatgtggacattccagatttatgcatttaggcatttatttctgtgaggttggttaatgtgcatttgtttcagatgaggttaataaaataataatagctaag

SEQ ID NO: 222549 - DNA, 306 bp, Homo sapiens
cctcaagtaatccaccctcctcagcctcccaaagtgctgggattacaggcgtgagccatctcgcctggccgatttttgtttttttaaaagacagggtctctgtcactctggagtggcaatgatcctagctcactgcagcctcgcactcctgggcttgagcaattctcctacttcagcctcctgcgtagctgggactataggtgctcgccactacacctagccaatgtttacattttgatgtagagacagggtctctctgtgttgcccaggctggtcttgaactcctgggctcaagcaatcctcctg

SEQ ID NO: 222550 - DNA, 454 bp, Homo sapiens
catggacggtgaccgctctggggccagcagggtagagctgccttcctacatctgagaactcaagggcgagagggaggcagggcaggggagagggttggtctcagttcacagggcgaccctctggccctggttctgacggcgactcgctgtgtaagctaaggagtgtctcgctctgtacagcgggcaggtggtgggtctctgcacgtccagcatctccagctttccgtcctctgagctgttttgacatgggaggcgctggcagggagagaggggtcactgatgtgggaagctggtgcagagctggggagtagcttgtgatgctggagaacctggagatgcccctcccattccttgggcctcgactgtctcatctgtggaatgggcgggtcagactggataatctctaaccattgcttcccttcacttctgtcccaataaacacacacggagcttt

SEQ ID NO: 222551 - DNA, 577 bp, Homo sapiens
ttcatagcagaagcacactcaaattaaacctacactgagataccatttctctcccatcggattagcattaagattcaaaagtctgaccactccttctgttgggtgagctgtatggaaaccagcactgatccactgctagagggaattcagaaggttacaactaccatgtaggggaatgtctttaccctctgacccagtaatcccagttctaggaatctaccctgaagacacacctccaacaatacaaaaatatatacgcagaagattattcattacagcatcatctgtaattgtaacataatggaaacaatcttagtgccccaaaactggagactgattgaataaactatggtacacacacatgacagagtactatgcagctgtgaaaaaaagaatgaggaatatctcggtcaactgatgcagagtaatttcctggatacactgttaagtgaaaaaggcaaagtgtaaaatagtacatatagatatactatcttctgtgtaataaaaaggggaaatgaggcgaggcgccaaggttcacctattgccaaggttcagcactttgggaggccaaggcgag

SEQ ID NO: 222552 - DNA, 865 bp, Homo sapiens
  misc_feature (781)..(781): n is a, c, g, or t
taaagaaaagtagttcccttatctccactttccccctttccagcacctcagaggcaactgctttcagctgattactttgacaggcgtgaccttatttccacataattgcttatgtcatgatttttttctttttgagataggttcttgctctggggcccaggagggagcgcagtggcgctcttgtagctcactacaaccttgaactcctggactcagataatcctctggcctcagtctcctgagtagctgggactacaggtacatgctaccatgcctggctaatttattttcacagagacaaggtctcactatgttgcttgggctgatctctaacttctaggctcaagtgatcctcccgcctcggcctcccaaagtgttggaatacaggtattgaaatcaagtttagcctaaagctgcctccttatatatttaagtttggcctaaaggtttgtctgtatatcgtgacaagtggaggtgtaaacagactacacttgtgccaatcactgagttttggccaatcaaatgtagccaactgttcaaaccacgttcagataaggcaaatgccaagctgtagccaagcccagctgtttctgtacctcacttccattttctgtccgcaaaccttccaccgtgtgactgcgctggagtgtccgagcctactctggctgggaaggctgcccaattcttgaactgtttattgctcaattaaactccaaaaaaaaacacacaccacacacacaaacaacaactttttggcgcgcccctcggcccctccgggaanaacgttttttaaagcccactcccgtttggggcgccgcgaggccccccgcagggtaccgcgcacccgggcccacaaacgcgggtc

SEQ ID NO: 222553 - DNA, 210 bp, Homo sapiens
acagcattcaactgtatatagtcatgaaaaactgtagaaaaaggctttattgttttactttctgccagctttttttcctattaataaaatatgaaagttaagagctatagcatttcaaaatgaagagctatggggaaattcaagataccataaaatgatcaaagcaaaaaataaatgtccaatatactgttttgaaaaaaaaaatagatg

SEQ ID NO: 222554 - DNA, 830 bp, Homo sapiens
gatttttcttctatagaaacaaatatattttgaggttataggtttggccaaacatctaatgtataattttttgtggaaaataccacagactacatatttataattaagtacatgtttactctgtaaagctttctaaaactggtatcaattaaatgtagtaatcagccatataaagcacatttcatataacacagtatcatagtgtactgtaattagcttttttcctccagctgtagtatgttcagatgttaagtaacactttaatcagaactgtggcattgaggaggactttgggcgtataattgttatagatatttcttaggtacctgaaaggctgaaagctctgaaggccaggacatagtttttcatttacctctgtctctgtaatgcctggtgtagagcatggcacgtaataagtgctcaaaaaatatttgttgaatgaatactgagggcctttttggggctttcttaactgcttttagaaatacctcttttgggccaggcgcatggctcacgcctgtaatcccagtactttgggaagctgaggtgggcggatcacctgatgtcaggagtttgagaccagactggctaacatggtgaaaccccgtttttactaaaaatacaaaaaattagctgggcatggtgtttcgcatctgtaatcctcgctacttgggaggccgaggcaggagaatctcttgaacctgggaggcagaggttgcagtgagctgagattgcgccattgcactccagcttgggcaacaagatcatcatctttagataatctgttcatctttagaaacttggtctcaaaaaacagaaaacaaacaaaa

SEQ ID NO: 222555 - DNA, 813 bp, Homo sapiens
aaaatatttgttgaatgaatactgagggcctttttggggctttcttaactgcttttagaaatacctcttttgggccaggcgcatggctcccgcctcggcctcccaaagtgagccaccgcacctggctgataatcagtttttcaatcaaccatataaagcacatttcatataacacagtatcatagtgtactgtaattagcttttttcctccagctgtagtatgttcagatgttaagtaacactttaatcagaactgtggcattgaggaggactttgggcgtataattgttatagatatttcttaggtacctgaaaggctgaaagctctgaaggccaggacatagtttttcatttacctctgtctctgtaatgcctggtgtagagcatggcacgtaataagtgctcaaaaaatatttgttgaatgaatactgagggcctttttggggctttcttaactgcttttagaaatacctcttttgggccaggcgcatggctcacgcctgtaatcccagtactttgggaagctgaggtgggcggatcacctgatgtcaggagtttgagaccagactggctaacatggtgaaaccccgtttttactaaaaatacaaaaaattagctgggcatggtgtttcgcatctgtaatcctcgctacttgggaggccgaggcaggagaatctcttgaacctgggaggcagaggttgcagtgagctgagattgcgccattgcactccagcttgggcaacaagatcatcatctttagataatctgttcatctttagaaacttggtctcaaaaaacagaaaacaaacaaaa

SEQ ID NO: 222556 - DNA, 767 bp, Homo sapiens
tgagccactgagcctggcagtgtatccattttaaaaaacaaaaaacctgattttgatattttctgatattctgttacgtttttaaaggacatgcagacttgttgaaaggaagagcagaaagtggagaaagttgaaagacttatcaaagctcagctaggttagtgttatgtcttagaatccatgtttttagagcttaaattgcccaaagtagaaataaattgagttctttctaagacagatagttttcactgaggttacaaattttcctgaggatacaaaatgagaacattataattcccaaaaatgtttatatgctttttttttgcagttaaattttctaccttagctgttaactaaaaatgtccctgaatagaagcactctttcataatcctatctctgctttgttgtggattcagtattttcatagttgatcgtgtgaaatctataacgtctttgatagacaagtatattgtggccgggcgtggtggctcacgccctgtaatcccaacactttgggaggccaaggcaggcgaatcacaaggtcaggagaccaagaccagtctggctaacacagtgaaaccctgtctctactaaaaatacaaaaaattagctaggcgtggtggcatgcacctgtagtcccagctactcgggaggctgaggcaggagaatcacttgaactcgggaggcggagcttgcagtgagccgagatcgtgccactgcactccagcctgggtgacagagcgagactccgtctgaaaaaaaaaaa

SEQ ID NO: 222557 - DNA, 851 bp, Homo sapiens
gagttccctgtcactggaagtcatagagagattgctccaggcatggtgggagaaaagccagtttgacaggcggtggagggataagagggaagacttgagtgacgtggcacaaactgggtcagatctattaaagaggcagccctgggcagctggcaagagatcatgtcaagagacacaatgcaggtgccagcaggaccagaagatcagcttcttagagcgagtgccacctggaagggggaaaccaagggaaggggcacagcaaagggcaaagctgggtggtggaggaagtacccaaacagagggaagagccactctggccacatcaagtgaatactgatgatcgggaaacattcatgggaagttatttcactctctcgagtccagtgtaagtgagaaagtgtaatttaatttaaaagagcctaatttagccttccatcaactgtagatcttttaacgagacctttattcttctaggacagcatttctcaaactttaatgtgcgtaggaatcttattaaaatgcagattctgattcagtacgtctggggtaagggctgagattcagcacttctaaccggctcctagatgcccccggtctgagcactacacttagagcaagcaggtttgaacattgcgacttataacagtggacccatggtgtagacaagtccagaaatgactgctgaatcaacagtttttatgttagcttccgtataccttcagaattcagtgtttgtgtgcattctaattctctaaatgatgtatattagatttccattaacgaaaatatatgtttaagtggaactctccaattccaacttgccaaataaaataaaaaattcctgtcatttt

SEQ ID NO: 222558 - DNA, 500 bp, Homo sapiens
ggagctagaaggagagagttacctgattttcttccattctgtagatgagtaaattgacggtcgtggtctcagatgccaaggccataggagttcttgttccttctatctctcagatagtttttattgttcactcaacagtttaacaaccttttgaacatttgctgtgtgctaggccagagtttttcagtatttctgtacttgaggcgttctttcaaatacttgacattttgcagtacagtaacagaattaaattactacactatagttatggtacattgtcagctgtaatatatttttctctacctcatcttaagcttttgcatactttcatttaattgaggacaaaggcagtctttctttaatgtgatcttggccaaacactactcgtcatgtagttgaatcacattctacatttttgacatcattgtagcaatatacattttcagttattgtaaaaaaataaatatgaaaaataaaatttacgctttggtcatatcttg

SEQ ID NO: 222559 - DNA, 423 bp, Homo sapiens
agtttttattcataaacaaaattagactgtataagacttggtcctgggttatagacatgagataataaaaaggggacggttgattatgattctcctgagtctctaactcaggaaactggataaatgaaagcatcattaattaagatcaggatttcaggaaacagcaaattatggctggagaagtgattgcatgggaagttaaagtgcacagtttcggatataatgcctaggaagtaatcgtgggatatgtaggttgttatgtccagtagccacttggaaatgtggacttaggaaaaggttttaattgcaattttagatttagaagtcattggtaaagaagtggtagataaagtcataaacaacagatgagatcttgcagggaaattatgcagataaagtaaaagactcctagagaataaaaat

SEQ ID NO: 222560 - DNA, 150 bp, Homo sapiens
aagcttcaactgtacatcatgaataaatcctagggatctactgtatactatagtgactatagttagtgatactgtatagcatactggaaatttttctgagagggtaaattttacattaagtgtttttatctgccccaaaaaaaaaagctt

SEQ ID NO: 222561 - DNA, 200 bp, Homo sapiens
ttgatgtactgcatggaaggaaatcaaagttgttatctgaagatggtttaaggaccaaggaccttttatcagctattcaaacagtaaatatttacagagccactactatattgtgatcctgagaaggggaattaaagcagcagaggtttgcagagtacctgccgaggtccccgcagcatgtgtgaatggacactggaggg

SEQ ID NO: 222562 - DNA, 289 bp, Homo sapiens
tgagactcgtaagttcaggtaacttaccagtcattaaaccacaaagacaaagcccacatttttgaccaccactgcatataactgggccacgaatactaaaacaatgagaagcaatcagtcgtccgaaattcttttgtggtaactttcaggatataaattataaacaccatgataggtgctctagatttatactcagttatgaactttgacaagcattacaaagataacaagtatattagtcagcttttactaggttatgcttcagtaacaactacccccaaatatcagt

SEQ ID NO: 222563 - DNA, 258 bp, Homo sapiens
gttctgcctctgatccctcccatccccattacctgagactacaggcgcgcaccaccacaccggctgacttttatgttgtttctcatgttttccgtaggcgtcatctcacgtgtcgaggtgatctcgaacttttaggctccagagatcctcccgcatcggcctcccggagtgctgtgatgacacgcgtgggcacgacggagtttcactcttgtcgcccagggtggagtacgatggcggctctcggctcaccgcaccctc

SEQ ID NO: 222564 - DNA, 333 bp, Homo sapiens
gttctgcctctgatccctcccatccccattacctgagactacaggcgcgcaccaccacaccggctgacttttatgttgtttctcatgttttccgtaggtaggtatgtgtgtgtgtgtgtgtgtgtgtgtgtgtgtgtgtgtgtgtgtgtgtgtgtatctatgtatgtacgtatgtatgtatgtatgtgagtgagatgggtttcggggttctatcatgttgcccacgctggtctcgaactcctgtcctcaagcaatccgcctgcctgcctcggccgcccacactgctgctattacaggcgtgagacgctgcgcctggctccttctacatttgcc

SEQ ID NO: 222565 - DNA, 660 bp, Homo sapiens
ggttcttacagataaagagcaattagaagtcattaacagagattaacctctattataaaaagtaatagacctaatattttctttatgtcagaactttctcttgagctttgtaaattttccaaaaatttttttaaaaaaagatacctcctaattttgggatagcttcattaaaaacaaaaaggaagaagagaagaaaagttgtgatatattgctgaaaataatggtccttctttgtcaataaaggaaatttttctaagatgtgcagaaatacataggttcaagacttcccgtaatctcccagccaccaaagagagaatttctttttgccccattcatgatctccacttctgaattgttctggcaggactaagatatccttcaggagatcaagtagtaaactatttcttcccataggagaagatggattcttttctagggttgagtgctcaggttagttattttcagttctgactttcttggaataggttactgagagtatccactgctgtttagaaaggaacctaaatgtctgtgaaattcttgcaaatccttgaagatgatttatcttggaatgtggcagtcctatatttggtaggcatttttctagcagaagcattatgtattgcttatgtatattatatatgagaagagttttggagg

SEQ ID NO: 222566 - DNA, 444 bp, Homo sapiens
tgaagaagtaaagaggaaggactgaagaaaaggaagtccttcttctgtaagatgaaaaacaaagggtgacataacctacagctttcttaagaattctctcaaagtgatgaagcaagcctggtcctcccacccaaaaaggaggttttaaaaagtgattggccaggtgtgtggctcatgcctgaaatcacagcactttgggagactgaggtgggcggatcacttgagatcaggagttcgagaccagccgggccaacgtggcaaaaccccatgtctactaaacatgaaaaaattagctgagtgtggtgactgacatgtgcctgtaataccagctacttgggaggctgaggcaggaggctcacttgcactcaggaggtggaggttgcagtgaaccaagatcatgtcactgcactccagcctgggcaacagaccaagattccgtctcaa

SEQ ID NO: 222567 - DNA, 470 bp, Homo sapiens
aatcccttgtgaaatacgtgatttgcaaatattttcgcccattctgtgggttgcacttttactatacatagtgtccttagatgcataaaagcttgaaattttgatgatgatcagtctgtctattttttcttttgttgcctgtgtcttgtcatatccaagaagtcattgagaaatccggtttcaggaagctttttgttgtcttctaagagttttataatttgaggtcttatatttaggtttttgatccattttgagttaattttttatatgatattaggtaagggtccatattcattcttttatatgtagatatccagttttcctagtaccatttgttgaaaaaactttttttttttttgagacagtgtttcagtttgtcacccaggctggagtgcagtggtgcaatcatggctcactgcagcctcgacctcctgggctcaggtgatcctcctgcctcagcctctcaagta

SEQ ID NO: 222568 - DNA, 403 bp, Homo sapiens
aaagcaggcgtcaacgccattgttaatgcacggaggaggaacctgactgttagacctgggttttccagggttgcacggcttctgggagacggatgtgaccctgaggacagggcacaggccagtgtaatgccaggatggaatgagctgtgatctgtgctgtatagaggcctaggccaaggtgggactgacggatgaccaggtcagccgggtcactgaaaacactcttgggtcctcacctgccggttcccaggagtccggaactgccaggagagtggtggcaggtcccccatcctcagctgggtgggcctggatagagcagcaaggcgagggcacatttccctggccattccctccaggcacagctgtgacctgttcattccaaatttgtggaagtatttccaca

SEQ ID NO: 222569 - DNA, 315 bp, Homo sapiens
attaactgggatgtagataatcagaactctctacattagacaggcaacttagcagatgagcaaaactcacaaacacacataaaatgacctcctgcagccacacatcccttttataccttcttagcacacacatttcctagctctgtctactgaaacgggctaaaagcaatgacatctcagttgcaatgagcccagatcttggtttctgataccgttctctgctaaaaggaactaaggctcctcagaaaaatggctgattgcaggtctgagggaaggaaactccaagaagatcctggaacatcttattccagaaaa

SEQ ID NO: 222570 - DNA, 194 bp, Homo sapiens
gatgtgcagaaggtagaacccagccacctgagaactggggtcctggagggtaggtgagattgaaggacaaagactgactgcaaaccaatgaatgaggcagagcaccctctgaggcttaggaactcgtggggttcagtagggctctcctcggccagccctgtgcactgcccttgtctacactgctgctggtggtg

SEQ ID NO: 222571 - DNA, 506 bp, Homo sapiens
ggccgataatttgtaatgttcggtacccagttaatgaccttttacatatggacttgagcagactctgtggatacaatatatctcccatatcccagcgggtcgggcctaattgatatcattagagacccagtgcttttgcacatggccttggagatgtccgcgttaccaagaaagctgcttttgatttattttgcttttcttcttcattctttacctcttttctttcttcctttctcaagtcccgctcaaaggccaaacttgtgacggttaaaaattcacaatccaactgcagggttggaacactctggcttgcaaatctgtttctaaagctgggacatctaacgagtcgcccttggcatgtctaacaggtagtgagagagcccttttttttttttttttttttttttttacaaaaaaggggcagtctatgtgtaagatacactgaaacatttcagtcacttctcagatgtttcttgttccctttggaagaatagtgtcttcttggt

SEQ ID NO: 222572 - DNA, 348 bp, Homo sapiens
ataggaactggtccagttgccatttttctgcctttcaaggtaagctgagtcaggttcacagaaccgaaagcctaacaggaatcttcaagggatctgggttttctccgacctgcctttttcaaatcatgggtaactgggctttgagacagacacaaagccctctttcagcaagcctaaggatttctgtccctagcagattttcccagttacacacgcttgtgtgcaatggccgtgtttacgtgggcagccgctatattctctctagctcctgcttatggcagctctctggagttacttatgaatatgcagtcaagttgaggtgtttaaggctgtgtgcctgaggaagca

SEQ ID NO: 222573 - DNA, 486 bp, Homo sapiens
ctcacttagaacctgttttttaagaatacagcttaaagccatgatttgatagaatactcagagatcgtacctccagtacctcactcagtcttcctgagagtcaggtgtgaaacctacccttggttgagtacttttgaacctcagtatccctttgcaagaatttatacctctgccgtatggcataagacttcagtttttaatttttttacctaggtaaacatgaattgggctttaactgcttttgttgccttaactttaaaatttttttaatgttactttgatggttggagtaatactaaagagtaaaatgctgaattacccttgtttgcaaagaagttttactaaatagccctgctgtaactttacactagcaaacaaattctaaactaatggaaccatctctagttataatgaaaaattactagggttcattttagtgttaaaattccaactgtaattaacatttgctttgtttaacaaatgctt

SEQ ID NO: 222574 - DNA, 293 bp, Homo sapiens
ccttccactatgattgtaagttgcctgaggcttcccagtcatgcttcctgttaagcctgtggaactttgagtctattaaacctcttttcttcataaattgcccactgtcaggtagttctttatagcagtgtgacaatgaactaatacaagggtacttacacaaacctaaattatgtaacataagtaggctatatagtaaaacctattgctcctaggctacaaacctgtatagcatgttactgcactcaacattgtaggcaactgtaacacaacgataagtatttgtgtatcta

SEQ ID NO: 222575 - DNA, 451 bp, Homo sapiens
aaagaaagaaaagaaataggatacttcaactattctatagcactagaagcactcagaggattggtgggtaaagggatctgggtgttgcctttaagaaaaagttggtgttacgatgacttattaaatgaatgtcattctttccctgacgctactcattcccaccatctacctactcatataattataacattggaagagaatagtgaattcagatctctatgtatctgaactgggatcaggaaagctcaaaagagtatgatagtgcaaagacttattcctttgggagtgggttttaaagaagtgtgatttgccctagtatattaaaagaccagtggctcatcagaagtattgaagacattaaaggctcaagaatggtccaggtaagagaccttttgtaaatccttaccacagttaatcagaaatagaatgcaaagaattactactcaacaaa

SEQ ID NO: 222576 - DNA, 452 bp, Homo sapiens
cccagttactcaggaggctgaggcaagagaatagcttgagcccagaaggcagaggttgcggtatgccaaaatcgcatcactgcactccagcctgggcgacaaaacaagaccctgtctcaaaaaaataaaaaataaaaaaaaagaatgtaagctccacaagagcagacactacccacttccctcactgctgcagctccaggacctagaccagtgcctggcacgttgtaggcattcaataagtatgtgttggataaactttttaatattatttcccatagttctcactgcagcctccaaaggtaggtatggtgtttatctccttacagaaagagaacctgaagctcagagagactaaatcacttgctcataatcacatagctaataagtggcaatgccaaggtttctaccccagtctaccaccttcctgcattcaccctcgccctcatcctgaa

SEQ ID NO: 222577 - DNA, 593 bp, Homo sapiens
catagggtctagctgttagccacgtgctcagctaagacactggagccctgatattaaagaaggtgaggaatgatgctagtgctcaaccagcagtctctgtcacatcagctttgcagaatcatttgattctttcaactaggtgcatatacaacttcaatacaaatgaaaactaaatataagacatggttcttaaaaatcatcttttgtacaattgaggacacaatcaaaacccagacaccagggtcctgaagcagaatgcaggcatccacagaagaggcggtgctgatggactggaccccagagagtccacacctgcttggtgccataccttgggtccctccagatcaggatgctcccagcaacttttctaggatggttatactgcacatgctgcaaagatgagtgggcatccctgcaagcctatggttttagagtaaatggttccaaaagaaggtatgaagcagacccatagatggggattagtgcataggaggtttattggggagtactcttgggatcaacatctgtgagcaacgagaaagaagcaggattgagcagggaagaaggtgggtgttctggagctgagatcaaac

SEQ ID NO: 222578 - DNA, 449 bp, Homo sapiens
gcataaaggaacatgcaaactgatccaaatgtttataaaccaagtattcctctgggactcagtgccctgactttatgttttttaaaacatagagagtcaagctttgttcatacttgaattatgtacattgcattagccgtgcaatttaactttaacccacaggactgcaaagaaaattagctcagcctgcagaacaacgagaccacgagcaagtaagcacgttaatcaaagtgaaaggctcacccctcacgtctagctccgtccttctccagcctgtgcctgccagattatttcgggttcctcgtgtttgactcgtcaaagtggcagaaacaggctaaaatgttcactgtggaaaagggatttgccttttaaattaatgtttgtgcacatgccccgaggaggctgatgagaagcacgcaatttttttaaatcataagtgaatgcatacc

SEQ ID NO: 222579 - DNA, 645 bp, Homo sapiens
  misc_feature (591)..(591): n is a, c, g, or t
  misc_feature (623)..(623): n is a, c, g, or t
gaatatattttgtcttctactcacagaaaggaagaggcttggaatgtgattgaggaaaaattgctgtttatatatttaatctctattaataacataaaaataccatattagtagaggtttggaaattctaaaacaatgtattccagagataaatctttacccatgttatgaatgagaaatgtaaaaactagaaagataaaaacaaatagttaagatggtttccaagtatttcctgtagacattgtataataggttctatacaggaaaaaaaattccatgagaaaataacttcgtgaaacacatacattatatatctctcttggagatttaaaatacatattaacttgttattgactcaaagaagtcctgtaatcaaaaaatgtacttaaatttttttaaatctagatttttccaaatttgtttaaccatgaagtggaactaatgtcctcagaacatacttcagaaaacccatctctaccaaaaatacaaaaaaattagccaggcatggtggtgggcgcctgtaatcccagctaattgggaagctgaagcaaggagaattgcttgaacctgggaagcggaagttgcggtganccaaaattgcgccactgcactccaaccccggnaacagaacgagactccctctcc

SEQ ID NO: 222580 - DNA, 507 bp, Homo sapiens
ctactactactaaattcgcggccgcgtcgaccatgaaatgatggacttgctcagaacctttcatctctctctctccctgtctcatcaacttttttagagcagttttaggttcacagcagaagcaggcggaaggtgcagaggtacataaacccatgagtacccactgcctctgcacatgcgcagcccccccattgtcagcatccccactagagtggtcaacatgcgtgaacacgttatcatcaccaaaagtctgtagactccaagcctcttgttttcatcttgtctttgcctgatccagtgtagggtggatatgtagggagccagggcagctttcaagaaggaagtatgacctgttgatagcgcacactgcagtgcagcagggaacactgctgggtcctttgctagaaatatcttgttggtttctctgcaacatcttccttgacaccatctgttcttttgcctccaccaaagattgcccttgttacaggtataggtttcaccagatgg

SEQ ID NO: 222581 - DNA, 156 bp, Homo sapiens
gcaaatttatatagtgatttcaattgtccttcacattccctttcctgtgataagtgtctgggtttagggggtcacagtgtgaggttccaccatcttcagctatctgagacatagcttctattaataaatgttcctcttaaatgtttctttctgaga

SEQ ID NO: 222582 - DNA, 506 bp, Homo sapiens
tttttttttttaatgttggtttcttcccccagatgaccaatggtgttagattgtttgctcatatttaagaataagcccctgaaaagaactaactgaaagatctgtgtgggaaaacagggcttaacgactggtagaattcacttaaggtactctcagcagaaagcctatcagtatctgaagatgctgttatcttcagtcttccacaggagaaggataggacaggcttgactgtgcagttctggaaggagagcagaggaagagagctaacacttctatagttcaggcgtaggtttcccttgatctccttgttttttttttttttgttttttttttgtttttttttttttgagacggagtctcgctctgtcgcccaggctggagtgcagtggcgggatctcggctcactgcaagctccgcctcccgggttcacgccattctcctgcctcagcctcccaatgtgctattcttttcccaaaggtgcaatctaaactgtcaaacactgtcag

SEQ ID NO: 222583 - DNA, 538 bp, Homo sapiens
ggatgggtcctgggtgcacagcccaggtcagaaccataggctggctgcatgctactgcctgtgagtctgctgacaaaaaccctcatcaaatgagacccagtgctgggtctaagctgaggacctgatcagaggacatccctgtgaaaatccgagttctgctgaggacatgtaggaccacggggtgggagggtgaaagtggccctgcaggcccctgatgattgatccaaatctccaggctcagctgccccagccctgagccctccctgtagctcgtcacgcaagcattcagtaatctagactgacagctcatgacgacttattcccaggaggtggcctgggtggctgtcagagggactgacgccttggcccgggttgctcccctgggtacagctcactccatggcagccactgtctggacctggctattgcatgctggggcctctggtctccctgtgccccgagcagtgaaccgtcttcctcttgctctgaccccttgagtctcatcgtccacttccggcccgggtgaagctgcggccgc

SEQ ID NO: 222584 - DNA, 441 bp, Homo sapiens
gaataatttggtctctactattaccttaagagaccttcccctgtcttcgatttaaaaaaaaattactgcatacaaagggtaggagctacaagggacatagaataatttggactccactactaccttaagagaccttcccctgacttctcttttaaaaaacctatgggtctctgcacccctgaacttactttctacacctatttctctcttcacccccaaaatccatattagaatgcccctgcaggctataaagcctttcataaaagtaaaatacccagtcttttcaagagaacaataaaataggcagtctcctacctcttgtcttactctaatataaactccatgaagataagtattgtctccatactgttcatgctgcacagcagttgcccttatctgcagggcgacgcatcccaagacccccagtggatgcttgaaact

SEQ ID NO: 222585 - DNA, 443 bp, Homo sapiens
agatggctcttatgcattcttttgtctttaccaccttaattaaatgattctgaaatctcttgatcccttttcctgcacttaaggctcacactcttactaatgggaatattcagctggttgccttgttgtctcctataacttttggtgtgtccaaaatcaaagtcttcatcttagaacaaacttcatggctttccttgatcttgttattggtactggtattattattcatctaggcccattttaataatcattgattctttctcttatcccccttcaatttatttaggcacacagttctagtctaactttgtttaacacagtttgggctgggcacgtggctcatgcctgtaatcccagcactttgtgaggctgaggcggatggattgcttgagcccaggagttttagaccagcttggtcaacatggtgaaaccccatctttact

SEQ ID NO: 222586 - DNA, 539 bp, Homo sapiens
acagccaggggagagagttgacttgcagaccacacaacaggcgctggctgtatctagcatgaggaatcgcagagacatccacgggacttcctgcaggaaggaagaggaagagaagtcgtatttattgggcccctaccctgggaaattccccacgttggtgcttttcacaggttgttgccctgagaggcagatattatcatcccctagtcatgaaagaggaaaccaaggctgcaagcaggaaagtgactcagccaaggtcacacagctagaaagtggtagagatgggactcaacatgacatctcactccagagctggcagctgctacgggcgctgcccctgcttaaccgtgaccttcctgggatgacacgccggcctagtggcttctcggggctggtcttgaggacattcatacgcttcttcagcaaatacttactgagtgctactgtgtgccaggcactattctaggcacatcagatacagctggaaacaagacagacccaaatccctggtgcttatattctagtgggaggagacagag

SEQ ID NO: 222587 - DNA, 725 bp, Homo sapiens
agcattaatcaattccagttctgactcatttcagaggcttagagtcagaactggaattgattaatgcctccaagggcattttgagcattaggtcaaaaatttattgtttattttatttcccatgcaaaccataaccacatcatccaacccagcttaccagagaagatgattcaactagcccaaataggccattatgaatatttgaaaatttaagcttctaaattaaaaaaaactgattatgaaagtaattatatttaaaaaccattactgtatgtagggggtaatattaatgcttttgggtcaggatattatcccaagaacttttggaatgaatgtaacgtaagttgcttcttatataaatggagtaaattcatctgatgagtccactcatggggaaaaaaaaaagccagttttacataagaatgcccttagtgaagcaataaaaatgatgaattttattaaatcttgacctttaagtgcatgtcttttatttatttatttatttgccaagaccagcttgtttggggagaccctaacccagcagcactagaggaattaaagacacacacacagaaatatagaggtgtgaagtggggaaatcaggggtctcacagccttcagagctgagagccccaaacagagatttacccacgtatttattaacagcaagccagtcattagcattgtttctatagatattaaattaactaaaagtattccttacg

SEQ ID NO: 222588 - DNA, 526 bp, Homo sapiens
taatcagccaccaagtgataactgtctgaagggaggcttgctttgccatatggtgctcagctgaccgtttataattgccaaggggccttggtacctcggatttgtggagatgccttttttttttttttttttaacctcctgtgacacagaattacttggagttcagtagccaaatgttacttgggactctggaatgatttttcatccaaattgttctattttatatctttatatcaatagagagaaaaacatcctgagctcttgaaccatttctttgtgttaaatactttttccaagtggcagatcggcgtgggggacacctgatgttattttttgttacactaacgtccgtctcagtaaggtgatgtcagaatcttactcattcacccagcagtgagtcagggtccttgattagtgaatcttgattagtgaattttaggggtctgttattgacgctagagtttctaaatgattaaaccaaaggcttgctttcacaaaataaataacaaattcattttcatataga

SEQ ID NO: 222589 - DNA, 506 bp, Homo sapiens
tggtcttgaactcctgacctcaagtgatctgcccgcctcagtctcccaaagtgctgggattacaggcgtgagccactgcgcctggccttaaggtagcaagtcttggtgacttggcacactggaacacagagccactgcgggctgcatggatgctctgctgtggctatgcacaaacgaataaatcacacatggcaaaactctctgcttagtgattccatcgtaatcaagacaccagccgaattcagggaagcatgagatcaggcgactatgacaacaaagcaaacaagatatgatatttattactcttattatttagaacttgtaatattttcaaccacaattctgtcagacaatgtattccttcaatacacaggaacacactaaggcagtaatacattatcaaaagccaactgttaaaagaccagagtaaaagcagaatttagacaaaacaaatagtctcccagactttttattccttccaaacttgttattttaagttataatgt

SEQ ID NO: 222590 - DNA, 424 bp, Homo sapiens
cagggtagaagactctcatgactacctgcacgccaccatcttccccggcctggcgcaattgccttcaggatatgtacagcatgacccacagggatttcacttcatggaatgcaaaaccaacctgcatgagctttgtttgaaaacaaaacaaaacaaaacgaaaacaaaacaaaacaaaacagagaaatcctatctataaaattactcttaatggaaattctgcctgtataaaattaaagtggcaggtgagaaccattttcagcttgcttatgggtctcttacagattttccttgaagtttcatgtgttctaattccctgatatggagggaagagactacagttgtgtttacctcgaattatcattcaaatagaggtggtgttttcccccagtaaaattactaaggtaaattgcctatttctata

SEQ ID NO: 222591 - DNA, 511 bp, Homo sapiens
agatataatttcatagtgaaaacgttgatagatgctaaacaactacataagcagatgattcgaaaccatccccctgcttagacaaataactttgaagacaaaaataggcatgctaggtaggtagaacaaatcacctaagtatgtttaaagccttagggttccagaaggaggaggagagagaagaggttgtgcaaattggcaagccataccctttaggatcttaaaggttttaacaaaacaccttgggggaatttcattttctgactatttaacttccctatcttgcatttttcatctacatgtgagtatacattccatatattccttccaacatccaaaataatcgttacatagagagtctctatagaatcgttaagtcattcctttatttaaccacccttttgctaacaacatttaaattactagacagttcactcttaacatacactatttctttcaatcctttaaaaaccatgtgagctaagcatgttaataaaagtaacaattgaaa

SEQ ID NO: 222592 - DNA, 544 bp, Homo sapiens
attctcagagaagaaggaaggagaggcagatagcatttcatttttactactaagggatgcctcactgtgtttctattaatgcttatctttttgccttaaattctattttgtttgatagtaatatagttgcaacaattttctggttaatgtacacatgatgttatctgtttctacccattcacttgcaattttttgcctctttatgttttttaactgtacaatgacatacagaagtttattcagtttatacaagtaatttctcagatttataaagtaaaaagctagactgccagaggaaaaattccttacattgatatcaaaatatcttctagtccccataaatcatctgcaatcacttgatagaaaaaatatccacaaccatataggtcatgcagacttttaaaatgctatttgtattcagtttgtttcaaactgagcaaaacagtgcaacttttacttttgtatacatttcaaaattatattaatgttccttctcatttcaactcatcccattaccaataaaacgggagtgagataaaagggg

SEQ ID NO: 222593 - DNA, 320 bp, Homo sapiens
acttgtaattggcctctcatctgtctatttctttggaacatcaaagttgagaagatttgtagaagatgttaataaatctgtggtaatgagagtagaaattgtgttgaagtttaaaggaaagaacaaacatgataagatattggtagtacattattagaatatttctgtttaaattaaaatagtatttcagttattataacatttgaaaattcggttggagaatgttttaaagttattaagactgccatctgctagtaaaaattattgtttcaaacttcctgaggcctccagcttgggtgacagagcaagactctgtctct

SEQ ID NO: 222594 - DNA, 413 bp, Homo sapiens
ctggctgggacttccaagtactatgttgaatagaagtgatgaaaatgggcactattgtcttgttccatttctcagagaaaatgtttccaactttttcctgttcagtttaatgtttgctgtgggtttgtcacagatggtttaaaaaaaaattgaagagattgattctgagccatatatgagtgacaatggcctgtgacacagctctcaggaggttctgagaacatgtgcccaaggtggtcggggcaaagcttgcttttatacattttgtaatgagacatcaatcaaatagttttttgggttttttttttttgtttttttgagatggaatctcactctgttgcccagactggagtgcattggcgcgatctgggctcactgcaacctccgcctcccaggttcaagagattcttctg

SEQ ID NO: 222595 - DNA, 418 bp, Homo sapiens
ccagcctcctggcgctttgtatggtggctggaagtgcttgacaaatcatagcaccatcaaatttatacagtcgtccctaggtgtctgcaggccattggttgcagaatccctctctgataccaaaatccactcatttctcagccctgaagtcggccctgtgaaacctgtggacacaaaaagttggccctccttatacacaagtcccgcatcccaaatttgattgtggatgcagaacccacagaaacagagggccgactgtatttattgaaaaaaatccacatataagtgaaccagcacaactcaaatccatgttgttcaaaggtcaactgtaggccgggcgcagtggcccacgcctgtaatcaccacactttgggaggctgaggcaggccgatcaacggaggtcaggagtttgagacca

SEQ ID NO: 222596 - DNA, 427 bp, Homo sapiens
ctctggcacttgctatcagtacaagaagaatttcctctgggtagtggctgctacttgttgtgagtctgggggaaacactattggaggtgacaagagtccaaactgcaatgatgtgccacattcacccagctgcatctgaactgaagcagggccccagccaagccttgcctgagatcagcagaccctcgatgacccacaaaaattatctgcttaggacacagaagtcaattacacccaaaccctggatggaatcagaatcagaatcagccatgcaatgaggaagaagaaatgtaagttgcggcctgtgattccaacagttctctttctggaatggctaccaagagaaagtgtcctgcaaatcacagtgtccaacagaatcaacactggtaagaataaccaattaaataaaaacttgattctaataata

SEQ ID NO: 222597 - DNA, 507 bp, Homo sapiens
gattaaaaccccggcaacccttgcacggtttctgacttggaaacacacctccggaacttaaggaacagcttccccaggggggtcctgcacctgcctgggcttccattccctgatcctgcctccaccaacacaaagggccagggcagctctgaaggtgatagcggaaataacatctcaggaggctcttcagcgcctgctgcatcccaggacggagccaccacagtgccctctacgtctcccacagcgagcgcttccctagggaggctgcagaagttagcgggtaacacggttttctggcagacacagggcagaaaaatcggcctatggcatacccatttcctgcttttaaatgtggacagcctgtgctggatttttgtctgcttctgtcaagttaagtgttgtggaatttgtgccattaaaaaagttttcttgggccgggtgccgtggctcatgcctgtaatcccagcactttgggagactgagtggggcggatcacctgatgtcagg

SEQ ID NO: 222598 - DNA, 101 bp, Homo sapiens
actcttcactttccaattgttttactacatttactatgacctttgctcttgtggttattgaatctgcatggaagtaacaccatttaatgatatgctactgc

SEQ ID NO: 222599 - DNA, 648 bp, Homo sapiens
actgaattaggcttgtcaggagaaaaaatagaacactagttttcacaatttttacccggtagtagctcatgcatgaggctaagcatgtagtcctcatactatcaccttgaggtaaagtcctgttatccacaatttacatatggggaaaggagattaagtaacttccctaggtcaagcaggtagaaatggctgcacaagactcaagccttttactggttttcttcctaacagacataatttcttaagttctgtgagaaaattacaaagaaatctggaagcatcacattatccaacttcaaactatattataaggccttagtcaccaaaatagcatggtactggtataaaaatagacacatagaccaatggaacagaatagagaacccagaaataaagccacatacagccagctgatcttcgacaaagcaaacaaaagcataaagtggcaaaaggacaccctattcaacagatggtgctgggataattgacaagccacatgtagaagaatgaaactgtatttacttgcccctttcattcctctctgtgagagccatgcaccattgctgcttcttgttggccatcttggcccaaatcctctgtattcttgttgccagagtagaagtggtttcctcttcttacctggaagtt

SEQ ID NO: 222600 - DNA, 902 bp, Homo sapiens
ccaggttcaagctattctcctgcttcagcctcccaagtagctgggactacaggtgcgaaccaccacgaccaggtaatttttgtatttttagtagagatgaggtttcaccacgttggccaggctggtctcaaactgctgacctcaagtgatccacccggctcggcctcccaaagtacaggcatgagccaattcgcccagtgataaatgcttgttttaagcttctgggttttggggtggtgtgttaggcagcctcactggggcagtggctgacgggtacaatcagatgaaccctgaggcccctggaagcttcgagtgtctatgagggacctttcccggcctttcagccaaattggaagacccacttctctggactggatgctgcattgaattgagcaaaggaactgagtgcccggggagctcaaagggaagcagcccagccttccttccggggcagagcagtggtggggacctgtttccagctgcttgtgccccccacttcatggaggagggaccagggatcctcagaggagagggtgatgtttgacagtggctgcctgccctgaaaatcgcccttgtctgtccagcctggcctgaatttcacccacatcaacccacatgggatactttatttatttatttatctatttatttatttatttatttattttagagccagggtctcaccctgtggcccaggctggagtgccgtggtgctatcatagctcactgcagcctcaaactcctgggctcaagtgatcctcccgcctcagcctccagagtagctgggactacaggaacacaccactgtgcctggcttatttttctttttttttttggtagagatgggggtctctctatgttgcccaggctggtctcaaactcctggcctcaagtgatcctcc

SEQ ID NO: 222601 - DNA, 746 bp, Homo sapiens
ccaggttcaagctattctcctgcttcagcctcccaagtagctgggactacaggtgcgaaccaccacgaccaggtaatttttgtatttttagtagagatgaggtttcaccacgttggccaggctggtctcaaactgctgacctcaagtgatccacccggctcggcctcccaaagtacaggcatgagccaattcgcccagtgataaatgcttgttttaagcttctgggttttggggtggtgtgttaggcagcctcactggggcagtggctgacgggtacaatcagatgaaccctgaggcccctggaagcttcgagtgtctatgagggacctttcccggcctttcagccaaattggaagacccacttctctggactggatgctgcattgaattgagcaaaggaactgagtgcccggggagctcaaagggaagcagcccagccttccttccggggcaacatagcgagaccctgtctgtatgaaagaaaaaatgaaatacacaaaactgggttacatagtgactatttgatgcacatgttgtgagcagaggctcacagtaacctagctgtgttttcccctctgaacagtggctcagtgactggccaactctgtgcgtgagggagctttgcgagaacagagctgccgcgaatttacgagaagtgaggagctccttgtggcaagcagggacagcacactccactggctgcccgctcacctccacgcctggaactgtgactgttccctgacatt

SEQ ID NO: 222602 - DNA, 209 bp, Homo sapiens
gagagggagtgggtttgagagccggaacgaagcgagctggcggtgggcgtgcggagtggcagcaacgcgagagggaacgcgctggggctagcgcggaggcccagagcccaggcgggggaaaaggtgccgaccggcttcgaagggaggcgacggccgagacacacggtccggcgcgagccaggcgccccgcgacgtgcaattttattttg

SEQ ID NO: 222603 - DNA, 428 bp, Homo sapiens
tgcctcccaaaatatcttcactacagttatatcaagttgcctaaaattctcagcctagcagtctcttgtttgaggtaaattacaattctctgggagactttatagctgtgaaatatttaacctatgagggaaatacctttgcagctagaaatacaattttcaggtatttgtggattcaatgaaaaagaaataagccacaaaggagagattatcatgaaggaatggtttagagtttgaaagaatgatgtgttcagactctgggctgaatgaggcacagagaggcaacaagctttgaaagtaacagaagcagtaatgggaggtgagggagtggaagacagattttaattctgtgacttttttcctactgctggctttcgttctagcacatacatgattctggaaaataaagcatagtgttctcttttcta

SEQ ID NO: 222604 - DNA, 692 bp, Homo sapiens
catagcatatgtgtatttatataacaaaaaatgaatcaaaagttaattttattttgggcagtgttccctagaaacttataatatggccccatgcacttcaggttgaattttcttagtaaaatcataaagaggtccattttttcaaaaaatcaccaagtcaggctgcaagtttagaggttacttctattgtttcacttctctttcttcccagaagcagaccccagagacctgtgagccaaactccactcaccttttagcttattctaaatgtgtcctgcgggcttctctgtgaataaaaggcagaggctttttgacttcgtgtttgatgatttggcttttttcttttttttaccacctgacgggggatttcaggctcaatgtcccaatcgaaataagaatctttgagtgggttaacattgagtcttaaaaaggagggctgatttgttggagaggcaacaacgaattcatttttcactgtagagcactcaggaggagtctgaagctttgtcactgggcaacagaatgcctttctaagtaaatatggaaaatatgacctttgaaaatctagctgatatgatatatagattcttaggatataatttttaaaaaatatattatttccaagcactaatgatactccagagatactgcccacaaccagatgcagcatgtttatagtgtatctaggccaa

SEQ ID NO: 222605 - DNA, 411 bp, Homo sapiens
aagcatggtggctcattcctgtaatccctgcactttgggaggccgaagtgggcagatcacttgaggtcaggagttcaagaccagcctggccaacatggtgaaaccccatctctactaaaaatacaaaacattagctgggcgtggtggtgcgtgcctgtaatcccagctactcgtgagactgaggcaggacaatcgattgaacccagaaggcagaggttgcagtgagccgagactgcgccactgcgctccagcctgggcaacagagtgagactctgtctctaaataaataaattaattaataaataaatgcctacaactcagagactgaagctgcaacactatatttatgagatgactctttttccataaaggacatgtcttcttttccttgaaaatatacttttcttggta

SEQ ID NO: 222606 - DNA, 418 bp, Homo sapiens
tcccagggggcagctaagtgcaatactatatgttaggaaaacggaaactaatttgtagacagcactaatgatttccacattaggtaaaaaaaattttcattcttgtcttcctaatagcatttaaacagaaacgatttttaaaagttgttttaaacatttagaaacatcatggcatagaaacatttaggactcactctttgtaagtactgacaagcatggtcttgtaatctgtaaagataaggtagaataaatgaactaaaagaaattttagatgactaaaaggactatataatagaaagagggaaatcttggttcttaaaaattcaggcaattgaaacatttctgtataataccaagcattgttgcagtattgtctgaaatggttgcttttctaataaatgaaaatgactaaaatgta

SEQ ID NO: 222607 - DNA, 697 bp, Homo sapiens
attatgatctgaacttagcacacatgaagcaacatttctttgctacacagaggtgtcttggaaagatttcattcccaattcatttttcatagatctataatcaggcaatttctgcaagcaatgtatgaccccacctgagcaaccacaaataggctctccatgaaactgcaaaggaactgatgtgtggcatccatgctggttttgtctgtctataatatgaattcaagtatctgttcatatttccaattgtctcctgctagcaatatgtgccacaacatgacagtcttgtgacatcttaaggaaaagaagagttcctgttaaatgaatagctttagcttttacaggggattatgattaaaagtgatttagtacatcttacatgatatctcatttctacgtgaaaagaagttatagaatcttcatagagttccatgagaaaaatatacttgctatttatagaaaacgagaaaaaagaaaaaaatgagaaacaagtaagaaaaaatcctttcctaggcttttccttgatcttcagaggcacacagggtttaatggttccttaggttattattttgaggttttgttctttcttttgccttaagtaatgacagaagatatatatggccagacacatatgtataaacttttcagcagcattttaataataaaatatcacactattttctaatgctttgtacaa

SEQ ID NO: 222608 - DNA, 508 bp, Homo sapiens
tgagccctagatatacttggcttgcatttaggggccatgatgtttagagatgaataatgccttacatgctggagtcaccctcagtttgtcaaagtgttcacactgtgagaggctcacagaaatggaggctgactgaaggaagagcagattcacatctttcatcccttctttatgctcatgcttctaatttttgttcccatgttttcttgcccctcctcttcttagcatttattttgtctgtttctctttcccctcttctggctccctctccatctctcctgagcacagaaatgcggctactgtatttaatccacagtggccccctctggccccctctttgtgtctcctgagcacaggccctggccccctctccatctctcctgacctcctgatccgcccacctcggccagttattgctgttttataaggaaaatgttttctagtaccacacttgtctccctggaagggatagaagaaggagggaaggaagtagggaggcagggaagag

SEQ ID NO: 222609 - DNA, 720 bp, Homo sapiens
tgagccctagatatacttggcttgcatttaggggccatgatgtttagagatgaataatgccttacatgctggagtcaccctcagtttgtcaaagtgttcacactgtgagaggctcacagaaatggaggctgactgaaggaagagcagattcacatctttcatcccttctttatgctcatgcttctaatttttgttcccatgttttcttgcccctcctcttcttagcatttattttgtctgtttctctttcccctcttctggctccctctccatctctcctgagcacagaaatgcggctactgtatttaatccacagtggccccctctggccccctctttgtgtctcctgagcacaggccctggccccctctccatctctcctgaccacagaagtggggctgctgtaaccacttgggctccatagttctcaggatgacagtttcaggcacttaaccagatcctctttgatttggaatggggcggggaccagtgttctagcctgaccaggtttatactgcaacttacagtacctatgtttcaggagtcagtctgggggcaacatgtgtcaccttgaagattagatctgaactaggctcttgggggatccagcctgatctggtgcctataaaatgttcagacctgattaataaattctgagtatatatgggattctagggcttactatgcggctactggagacttgggatacacccagggatc

SEQ ID NO: 222610 - DNA, 1112 bp, Homo sapiens
actgtgggttaccactggaggggtttgagcagagccatggcatatactgatccaagtggaagcagaaaaactgccaggaaaatgtcacagccaccccttactgaacagcagaaacaccagcaaaacaccaactgcaacatggtgtattttgaaggtgagattaaatttacctacacctagagaaataattggagcacatgtctatttgggccaagaggataaaggccagtagaggaatcagatcaaagaacttcctcagggaagtgtgcagagaactggagtggaccttcccctaggaagctgcccaaaacgagagtgctggaaagctggccgcagtgaggcacttcagatcccaagggtatgctggggaagctgccacaggtgggagcacttgctgctggaccctaggcactgttgaaacaactgcaccatctgcaggagcccagcaaggtgccttcagccatgattataagtttcctgaggcctccccagccataagaaactccaaagccaggcatcccatctggagagagagaagactgaagcagaaacacaatgggaaggaagcaaagatggagagacgagtttttggattcaactgaagcccttgctatctgctagagtcagagtcatcacaattggggggtcttcattaagctacactttttaatggaacatcctagtgaggtttgagagtacagcttgatggtctatattacattactaagccgattttatgggttagtctatacgttttacaaatttgttattctaatctccccgaagaaataatttccttattgatccctttctttttcccccattttattttcccatattttgtgatatcctctacttcaactttaaaaaattataaccatagaaagaaatacattttacattatgacccagtgtgtatactcacagaaacatattcatatagaaaacaagtttcacgaaacaatacttcctctgtacagtgcactttggtgttgttattgtgttctattctattcattttcttccatcctactatgttataaaagttgctcttttacaaatctgtaatttgatcttatgacccactgacatgtctcaacataccatttgaa

SEQ ID NO: 222611 - DNA, 680 bp, Homo sapiens
taattcaaaaaaagaactcctagttttactgtgctggatctggttgtctttagtttccattatattcctgttccattattccttcaataactttgttctcccatgactcttctttattgttaccacattttttctgttcttttcagagacgagtttttggattcaactgaagcccttgctatctgctagagtcagagtcatcacaattggggggtcttcattaagctacactttttaatggaacatcctagtgaggtttgagagtacagcttgatggtctatattacattactaagccgattttatgggttagtctatacgttttacaaatttgttattctaatctccccgaagaaataatttccttattgatccctttctttttcccccattttattttcccatattttgtgatatcctctacttcaactttaaaaaattataaccatagaaagaaatacattttacattatgacccagtgtgtatactcacagaaacatattcatatagaaaacaagtttcacgaaacaatacttcctctgtacagtgcactttggtgttgttattgtgttctattctattcattttcttccatcctactatgttataaaagttgctcttttacaaatctgtaatttgatcttatgacccactgacatgtctcaacataccatttgaa

SEQ ID NO: 222612 - DNA, 471 bp, Homo sapiens
actgtgggttaccactggaggggtttgagcagagccatggcatatactgatctacgtgtatgtgtttctaagcaaaacttcttggaagaaaaggaaattcttagaagcaattagagtatcacacccatgctataccctttgattcattagcttgctctgtttttctgttattttgaaattacccaagtggaagcagaaaaactgccaggaaaatgtcacagccaccccttactgaacagcagaaacaccagcaaaacaccaactgcaacatggtgtattttgaaggtagaccaaatagcattttctgataatttggatataaactgtgaaagaaatatataagactcaaggatggttccaaatattttggcttgagagactgaaaatatacatttaccatcatttatgatagggaagcctttagggagaaaaagcttggaatgagataataaagattgtaaatttcagttt

SEQ ID NO: 222613 - DNA, 1243 bp, Homo sapiens
actgtgggttaccactggaggggtttgagcagagccatggcatatactgatctacgtgtatgtgtttctaagcaaaacttcttggaagaaaaggaaattcttagaagcaattagagtatcacacccatgctataccctttgattcattagcttgctctgtttttctgttattttgaaattacccaagtggaagcagaaaaactgccaggaaaatgtcacagccaccccttactgaacagcagaaacaccagcaaaacaccaactgcaacatggtgtattttgaaggtgagattaaatttacctacacctagagaaataattggagcacatgtctatttgggccaagaggataaaggccagtagaggaatcagatcaaagaacttcctcagggaagtgtgcagagaactggagtggaccttcccctaggaagctgcccaaaacgagagtgctggaaagctggccgcagtgaggcacttcagatcccaagggtatgctggggaagctgccacaggtgggagcacttgctgctggaccctaggcactgttgaaacaactgcaccatctgcaggagcccagcaaggtgccttcagccatgattataagtttcctgaggcctccccagccataagaaactccaaagccaggcatcccatctggagagagagaagactgaagcagaaacacaatgggaaggaagcaaagatggagagacgagtttttggattcaactgaagcccttgctatctgctagagtcagagtcatcacaattggggggtcttcattaagctacactttttaatggaacatcctagtgaggtttgagagtacagcttgatggtctatattacattactaagccgattttatgggttagtctatacgttttacaaatttgttattctaatctccccgaagaaataatttccttattgatccctttctttttcccccattttattttcccatattttgtgatatcctctacttcaactttaaaaaattataaccatagaaagaaatacattttacattatgacccagtgtgtatactcacagaaacatattcatatagaaaacaagtttcacgaaacaatacttcctctgtacagtgcactttggtgttgttattgtgttctattctattcattttcttccatcctactatgttataaaagttgctcttttacaaatctgtaatttgatcttatgacccactgacatgtctcaacataccatttgaa

SEQ ID NO: 222614 - DNA, 453 bp, Homo sapiens
aactgttgtaatcagagattgtctatttccatgcagccaaagccaggcatcccatctggagagagagaagactgaagcagaaacacaatgggaaggaagcaaagatggaggtagaatagctgccacgagccctgatagtttcaggccttgactgcatgtccttaggatctcaggcttctctgtttttcctttgggttccatgaaaaaccccgatattttggtaataaacacccttgggttgctttgcctggcttgaagattttgcttacaaactaaagaactgtggacaagatacacttcttgtctcaagagggcctgtatattttaggatttaactgcgtgtacatggaaagaaaggtcaggaacgttggttttacctctcttctcgatgagaacagcactgggctcccaatcactacttaacctttatcctgcaagttctagtttttaaaa

SEQ ID NO: 222615 - DNA, 2871 bp, Homo sapiens
  misc_feature (2)..(2): n is a, c, g, or t
  misc_feature (4)..(4): n is a, c, g, or t
antntttgctcagcccgcctgcgccgcttgggacgcctctgcctttccctccctcccttccccgacggcttctggcggccaagtggatgtggcgggtgatcgagccaccctgcccaggggcgcccagcactggttcagtgaacagcattttggacaggacatttggtgccaggtctgagtagccagtttgctgaattattgtcccagtcagccaggattgtgagctgtttgggaagtttcgtggaaacgcccaagtgccagcacaggtggagggacacctggaggccagtttcaggaacttttgccacaagtataaaagacttcagaagtgcaaagatgctgaaacagatactgtcggagatgtacatagatcctgatctactggcagagctcagcgaagaacagaaacagatcctgttcttcaagatgagagaggaacagatccgacgatggaaagaaagagaagcagctatggaaagaaaggagtccctgccagtgaaacccagaccaaagaaagagaatggcaaatcggttcattggaaacttggagctgataaggaagtctgggtatgggtgatgggcgaacaccatctagataaaccctatgatgtgctctgtaatgaaattattgctgagagggcccggctgaaagcagaacaggaggcagaagagcccagaaaaactcactctgaagaattcaccaatagcttgaaaacaaaatcacagtaccatgatctgcaggctccggataaccagcagactaaagacatctggaagaaagtggcagaaaaggaggaactggagcaaggatcgaggccagcaccaaccctggaagaagagaaaatccgatcactctccagttcttcaagaaatattcaacaaatgttggcagattcaatcaatcgtatgaaggcatatgcatttcaccagaagaaagaatctatgaagaaaaaacaagatgaagaaataaatcaaatagaagaagagagaacgaagcagatttgtaagagctggaaagaagactcggaatggcaggcatctctgcgaaaatccaaagcagctgatgagaagagacgctccttggctaaacaagcacgagaagactacaagaggttatccctcggggcccagaaaggaagaggcggtgagaggctgcaaagccccttgcgtgttccgcagaaaccagaaagacctccccttccacccaagcctcagttcctaaactcaggggcatatcctcaaaaacctcttagaaatcagggagtggtgaggacactgtccagctctgcccaagaggacatcatccggtggtttaaagaggagcagctaccacttcgagcgggctaccagaaaacctcagacaccatagccccctggttccatggaattctcacactcaagaaagcaaatgaacttcttctgagcacaggcatgcccggcagttttctcatccgagtcagtgaaaggatcaaaggctatgccctgtcctatctgtcggaggacggctgtaaacatttcctcatcgatgcctctgcagacgcctacagcttcctgggcgtggaccagctacagcatgccaccttggcggatttggtggaatatcacaaggaggaacccatcacttccctggggaaggagctccttctctatccctgtggtcagcaggaccagctgcctgactacctggagctgtttgagtgacagcctccatcagggtcatcctacagcctccaagcgggctttcccctggacaaatgccactgcaacatttatgtgtgaagccaaaatcaccctgcagcagagccaatactgatcaactgaaagtaaagtatccatggagtcctcattgacacctcttttctgcacaaatactggaattcaatgtcaagagaaaatgacctctgctcaaaagggagaagagtctcaatttcagcaagtacctgtcatgaagggtatgaccttaatgatgtacataaaataaaacaaatgaagaaatggaaaacttttagaaattaaggtgtacttgaaaacgaatatctatcatatgacccctgcactccctctgtatcatctcaggaggtttcaggggcctgttgacatgaagtttcgaagtttcatgttggctttggaatggtagcaaaagcctttcctggctgagatgatgcttaaaacacacctcacttattgtacatgttggaaccaggacatgagagacatagaaaaacagaagtcatgaatgtaaattgaatgagaggcttaacatgcatgaaaatacagatggacctgcaggaaagtgagcaaacatcgctgagtttgttttcttgttcgggagaatggggccggggctggcctggcctcccctggatatactctatagtgcaccaaaaggataaagcatctgtacatgtatttttttattttttatcagaagtgcttagacaagaacagaataagcaggctgtttggatgctacttgtggttgaattgtgttcccccaaaatatatggtgaagtcttaacccccatccccgtgaatgggaccttgtttggaaatagggtctttgcagatatagtcaagatgaggtcacattggattagggtgggccccaaatccaatgactggcatccttaggagaagagagagttttggtaatagacacaaatgcagtgggaagaagaccaggggacaagaggcaagttggagtgatgcagccggaagggaagggacaccaaggatctccggccaccagcagaagccagcagagaggcatgggacaggttccccacaagccttagaaggaagcatggccctgacttcagaattccagactccagaactggaagaataaatgtctgttgttttaagctgctt

SEQ ID NO: 222616 - DNA, 2800 bp, Homo sapiens
cggccgcggcgggtgtccggtgtccggtgtccggtgtccggtgtctggagccgctggctaggttcagtgaacagcattttggacaggacatttggtgccaggtctgagtagccagtttgctgaattattgtcccagtcagccaggattgtgagctgtttgggaagtttcgtggaaacgcccaagtgccagcacaggtggagggacacctggaggccagtttcaggaacttttgccacaagtataaaagacttcagaagtgcaaagatgctgaaacagatactgtcggagatgtacatagatcctgatctactggcagagctcagcgaagaacagaaacagatcctgttcttcaagatgagagaggaacagatccgacgatggaaagaaagagaagcagctatggaaagaaaggagtccctgccagtgaaacccagaccaaagaaagagaatggcaaatcggttcattggaaacttggagctgataaggaagtctgggtatgggtgatgggcgaacaccatctagataaaccctatgatgtgctctgtaatgaaattattgctgagagggcccggctgaaagcagaacaggaggcagaagagcccagaaaaactcactctgaagaattcaccaatagcttgaaaacaaaatcacagtaccatgatctgcaggctccggataaccagcagactaaagacatctggaagaaagtggcagaaaaggaggaactggagcaaggatcgaggccagcaccaaccctggaagaagagaaaatccgatcactctccagttcttcaagaaatattcaacaaatgttggcagattcaatcaatcgtatgaaggcatatgcatttcaccagaagaaagaatctatgaagaaaaaacaagatgaagaaataaatcaaatagaagaagagagaacgaagcagatttgtaagagctggaaagaagactcggaatggcaggcatctctgcgaaaatccaaagcagctgatgagaagagacgctccttggctaaacaagcacgagaagactacaagaggttatccctcggggcccagaaaggaagaggcggtgagaggctgcaaagccccttgcgtgttccgcagaaaccagaaagacctccccttccacccaagcctcagttcctaaactcaggggcatatcctcaaaaacctcttagaaatcagggagtggtgaggacactgtccagctctgcccaagaggacatcatccggtggtttaaagaggagcagctaccacttcgagcgggctaccagaaaacctcagacaccatagccccctggttccatggaattctcacactcaagaaagcaaatgaacttcttctgagcacaggcatgcccggcagttttctcatccgagtcagtgaaaggatcaaaggctatgccctgtcctatctgtcggaggacggctgtaaacatttcctcatcgatgcctctgcagacgcctacagcttcctgggcgtggaccagctacagcatgccaccttggcggatttggtggaatatcacaaggaggaacccatcacttccctggggaaggagctccttctctatccctgtggtcagcaggaccagctgcctgactacctggagctgtttgagtgacagcctccatcagggtcatcctacagcctccaagcgggctttcccctggacaaatgccactgcaacatttatgtgtgaagccaaaatcaccctgcagcagagccaatactgatcaactgaaagtaaagtatccatggagtcctcattgacacctcttttctgcacaaatactggaattcaatgtcaagagaaaatgacctctgctcaaaagggagaagagtctcaatttcagcaagtacctgtcatgaagggtatgaccttaatgatgtacataaaataaaacaaatgaagaaatggaaaacttttagaaattaaggtgtacttgaaaacgaatatctatcatatgacccctgcactccctctgtatcatctcaggaggtttcaggggcctgttgacatgaagtttcgaagtttcatgttggctttggaatggtagcaaaagcctttcctggctgagatgatgcttaaaacacacctcacttattgtacatgttggaaccaggacatgagagacatagaaaaacagaagtcatgaatgtaaattgaatgagaggcttaacatgcatgaaaatacagatggacctgcaggaaagtgagcaaacatcgctgagtttgttttcttgttcgggagaatggggccggggctggcctggcctcccctggatatactctatagtgcaccaaaaggataaagcatctgtacatgtatttttttattttttatcagaagtgcttagacaagaacagaataagcaggctgtttggatgctacttgtggttgaattgtgttcccccaaaatatatggtgaagtcttaacccccatccccgtgaatgggaccttgtttggaaatagggtctttgcagatatagtcaagatgaggtcacattggattagggtgggccccaaatccaatgactggcatccttaggagaagagagagttttggtaatagacacaaatgcagtgggaagaagaccaggggacaagaggcaagttggagtgatgcagccggaagggaagggacaccaaggatctccggccaccagcagaagccagcagagaggcatgggacaggttccccacaagccttagaaggaagcatggccctgacttcagaattccagactccagaactggaagaataaatgtctgttgttttaagctgctt

SEQ ID NO: 222617 - DNA, 1999 bp, Homo sapiens
  misc_feature (2)..(2): n is a, c, g, or t
  misc_feature (4)..(4): n is a, c, g, or t
antntttgctcagcccgcctgcgccgcttgggacgcctctgcctttccctccctcccttccccgacggcttctggcggccaagtggatgtggcgggtgatcgagccaccctgcccaggggcgcccagcactggttcagtgaacagcattttggacaggacatttggtgccaggtctgagtagccagtttgctgaattattgtcccagtcagccaggattgtgagctgtttgggaagtttcgtggaaacgcccaagtgccagcacaggtggagggacacctggaggccagtttcaggaacttttgccacaagtataaaagacttcagaagtgcaaagatgctgaaacagatactgtcggagatgtacatagatcctgatctactggcagagctcagcgaagaacagaaacagatcctgttcttcaagatgagagaggaacagatccgacgatggaaagaaagagaagcagctatggaaagaaaggagtccctgccagtgaaacccagaccaaagaaagagaatggcaaatcggttcattggaaacttggagctgataaggaagtctgggtatgggtgatgggcgaacaccatctagataaaccctatgatgtgctctgtaatgaaattattgctgagagggcccggctgaaagcagaacaggaggcagaagagcccagaaaaactcactctgaagaattcaccaatagcttgaaaacaaaatcacagtaccatgatctgcaggctccggataaccagcagactaaagacatctggaagaaagtggcagaaaaggaggaactggagcaaggatcgaggccagcaccaaccctggaagaagagaaaatccgatcactctccagttcttcaagaaatattcaacaaatgttggcagattcaatcaatcgtatgaaggcatatgcatttcaccagaagaaagaatctatgaagaaaaaacaagatgaagaaataaatcaaatagaagaagagagaacgaagcagatttgtaagagctggaaagaagactcggaatggcaggcatctctgcgaaaatccaaagcagctgatgagaagagacgctccttggctaaacaagcacgagaagactacaagaggttatccctcggggcccagaaaggaagaggcggtgagaggctgcaaagccccttgcgtgttccgcagaaaccagaaagacctccccttccacccaagcctcagttcctaaactcaggggcatatcctcaaaaacctcttagaaatcagggagtggtgaggacactgtccagctctgcccaagaggacatcatccggtggtttaaagaggagcagctaccacttcgagcgggctaccagaaaacctcagacaccatagccccctggttccatggaattctcacactcaagaaagcaaatgaacttcttctgagcacaggcatgcccggcagttttctcatccgagtcagtgaaaggatcaaaggctatgccctgtcctatctgtcggaggacggctgtaaacatttcctcatcgatgcctctgcagacgcctacagcttcctgggcgtggaccagctacagcatgccaccttggcggatttggtggaatatcacaaggaggaacccatcacttccctggggaaggagctccttctctatccctgtggtcagcaggaccagctgcctgactacctggagctgtttgagtgacagcctccatcagggtcatcctacagcctccaagcgggctttcccctggacaaatgccactgcaacatttatgtgtgaagccaaaatcaccctgcagcagagccaatactgatcaactgaaagtaaagtatccatggagtcctcattgacacctcttttctgcacaaatactggaattcaatgtcaagagaaaatgacctctgctcaaaagggagaagagtctcaatttcagcaagtacctgtcatgaagggtatgaccttaatgatgtacataaaataaaacaaatgaagaaatgga

SEQ ID NO: 222618 - DNA, 3296 bp, Homo sapiens
  misc_feature (2)..(2): n is a, c, g, or t
  misc_feature (4)..(4): n is a, c, g, or t
antntttgctcagcccgcctgcgccgcttgggacgcctctgcctttccctccctcccttccccgacggcttctggcggccaagtggatgtggcgggtgatcgagccaccctgcccaggggcgcccagcactggttcagtgaacagcattttggacaggacatttggtgccaggtctgagtagccagtttgctgaattattgtcccagtcagccaggattgtgagctgtttgggaagtttcgtggaaacgcccaagtgccagcacaggtggagggacacctggaggccagtttcaggaacttttgccacaagtataaaagacttcagaagtgcaaagatgctgaaacagatactgtcggagatgtacatagatcctgatctactggcagagctcagcgaagaacagaaacagatcctgttcttcaagatgagagaggaacagatccgacgatggaaagaaagagaagcagctatggaaagaaaggagtccctgccagtgaaacccagaccaaagaaagagaatggcaaatcggttcattggaaacttggagctgataaggaagtctgggtatgggtgatgggcgaacaccatctagataaaccctatgatgtgctctgtaatgaaattattgctgagagggcccggctgaaagcagaacaggaggcagaagagcccagaaaaactcactctgaagaattcaccaatagcttgaaaacaaaatcacagtaccatgatctgcaggctccggataaccagcagactaaagacatctggaagaaagtggcagaaaaggaggaactggagcaaggatcgaggccagcaccaaccctggaagaagagaaaatccgatcactctccagttcttcaagaaatattcaacaaatgttggcagattcaatcaatcgtatgaaggcatatgcatttcaccagaagaaagaatctatgaagaaaaaacaagatgaagaaataaatcaaatagaagaagagagaacgaagcagatttgtaagagctggaaagaagactcggaatggcaggcatctctgcgaaaatccaaagcagctgatgagaagagacgctccttggctaaacaagcacgagaagactacaagaggttatccctcggggcccagaaaggaagaggcggtgagaggctgcaaagccccttgcgtgttccgcagaaaccagaaagacctccccttccacccaagcctcagttcctaaactcaggggcatatcctcaaaaacctcttagaaatcagggagtggtgaggacactgtccagctctgcccaagaggacatcatccggtggtttaaagaggagcagctaccacttcgagcgggctaccagaaaacctcagacaccatagccccctggttccatggaattctcacactcaagaaagcaaatgaacttcttctgagcacaggcatgcccggcagttttctcatccgagtcagtgaaaggatcaaaggctatgccctgtcctatctgtcggaggacggctgtaaacatttcctcatcgatgcctctgcagacgcctacagcttcctgggcgtggaccagctacagcatgccaccttggcggatttggtggaatatcacaaggaggaacccatcacttccctggggaaggagctccttctctatccctgtggtcagcaggaccagctgcctgactacctggagctgtttgagtgacagcctccatcagggtcatcctacagcctccaagcgggctttcccctggacaaatgccactgcaacatttatgtgtgaagccaaaatcaccctgcagcagagccaatactgatcaactgaaagtaaagtatccatggagtcctcattgacacctcttttctgcacaaatactggaattcaatgtcaagagaaaatgacctctgctcaaaagggagaagagtctcaatttcagcaagtacctgtcatgaagggtatgaccttaatgatgtacataaaataaaacaaatgaagaaatggaaaacttttagaaattaaggtgtacttgaaaacgaatatctatcatatgacccctgcactccctctgtatcatctcaggaggtttcaggggcctgttgacatgaagtttcgaagtttcatgttggctttggaatggtagcaaaagcctttcctggctgagatgatgcttaaaacacacctcacttattgtacatgttggaaccaggacatgagagacatagaaaaacagaagtcatgaatgtaaattgaatgagaggcttaacatgcatgaaaatacagatggacctgcaggaaagtgagcaaacatcgctgagtttgttttcttgttcgggagaatggggccggggctggcctggcctcccctggatatactctatagtgcaccaaaaggataaagcatctgtacatgtatttttttattttttatcagaagtgcttagacaagaacagaataagcaggctgtttggatgctacttgtggttgaattgtgttcccccaaaatatatggtgaagtcttaacccccatccccgtgaatgggaccttgtttggaaatagggtctttgcagatatagtcaagatgaggtcacattggattagggtgggccccaaatccaatgactggcatccttaggagaagagagagttttggtaatagacacaaatgcagtgggaagaagaccaggggacaagaggcaagttggagtgatgcagccggaagggaagggacaccaaggatctccggccaccagcagaagccagcagagaggcatgggacaggttccccacaagccttagaaggaagcatggccctgacttcagaattccagactccagaactggaagaataaatgtctgttgttttaagctgcttagttcatgctgagttcatgctgacttgttactatagccccagaaagctaatacagtcgtttatgtaattacataacctgacacacaagatcgacccattcactgctgcccagtccaccattttcataatgaagtagaaatgggaggtaagaaaaacattccagccagttctgtttagccctgggacacatatttgtcccgtcaggaatcttatgccctcctggaacccccgcccacctcagtccagtcccagtcaggcgaacggcctctggacagggactgaggtggctctgagccactggagatcatttttcttggaggatggagattggctagtacctctggcctaactgtgtaggtcaatactcttttacattgccttctaataaaagcagaatgatacagcagtgttgttacaagcttgtt

SEQ ID NO: 222619 - DNA, 3215 bp, Homo sapiens
  misc_feature (2)..(2): n is a, c, g, or t
  misc_feature (4)..(4): n is a, c, g, or t
antntttgctcagcccgcctgcgccgcttgggacgcctctgcctttccctccctcccttccccgacggcttctggcggccaagtggatgtggcgggtgatcgagccaccctgcccaggggcgcccagcactggttcagtgaacagcattttggacaggacatttggtgccaggtctgagtagccagtttgctgaattattgtcccagtcagccaggattgtgagctgtttgggaagtttcgtggaaacgcccaagtgccagcacaggtggagggacacctggaggccagtttcaggaacttttgccacaagtataaaagacttcagaagtgcaaagatgctgaaacagatactgtcggagatgtacatagatcctgatctactggcagagctcagcgaagaacagaaacagatcctgttcttcaagatgagagaggaacagatccgacgatggaaagaaagagaagcagctatggaaagaaaggagtccctgccagtgaaacccagaccaaagaaagagaatggcaaatcggttcattggaaacttggagctgataaggaagtctgggtatgggtgatgggcgaacaccatctagataaaccctatgatgtgctctgtaatgaaattattgctgagagggcccggctgaaagcagaacaggaggcagaagagcccagaaaaactcactctgaagaattcaccaatagcttgaaaacaaaatcacagtaccatgatctgcaggctccggataaccagcagactaaagacatctggaagaaagtggcagaaaaggaggaactggagcaaggatcgaggccagcaccaaccctggaagaagagaaaatccgaaagaaagaatctatgaagaaaaaacaagatgaagaaataaatcaaatagaagaagagagaacgaagcagatttgtaagagctggaaagaagactcggaatggcaggcatctctgcgaaaatccaaagcagctgatgagaagagacgctccttggctaaacaagcacgagaagactacaagaggttatccctcggggcccagaaaggaagaggcggtgagaggctgcaaagccccttgcgtgttccgcagaaaccagaaagacctccccttccacccaagcctcagttcctaaactcaggggcatatcctcaaaaacctcttagaaatcagggagtggtgaggacactgtccagctctgcccaagaggacatcatccggtggtttaaagaggagcagctaccacttcgagcgggctaccagaaaacctcagacaccatagccccctggttccatggaattctcacactcaagaaagcaaatgaacttcttctgagcacaggcatgcccggcagttttctcatccgagtcagtgaaaggatcaaaggctatgccctgtcctatctgtcggaggacggctgtaaacatttcctcatcgatgcctctgcagacgcctacagcttcctgggcgtggaccagctacagcatgccaccttggcggatttggtggaatatcacaaggaggaacccatcacttccctggggaaggagctccttctctatccctgtggtcagcaggaccagctgcctgactacctggagctgtttgagtgacagcctccatcagggtcatcctacagcctccaagcgggctttcccctggacaaatgccactgcaacatttatgtgtgaagccaaaatcaccctgcagcagagccaatactgatcaactgaaagtaaagtatccatggagtcctcattgacacctcttttctgcacaaatactggaattcaatgtcaagagaaaatgacctctgctcaaaagggagaagagtctcaatttcagcaagtacctgtcatgaagggtatgaccttaatgatgtacataaaataaaacaaatgaagaaatggaaaacttttagaaattaaggtgtacttgaaaacgaatatctatcatatgacccctgcactccctctgtatcatctcaggaggtttcaggggcctgttgacatgaagtttcgaagtttcatgttggctttggaatggtagcaaaagcctttcctggctgagatgatgcttaaaacacacctcacttattgtacatgttggaaccaggacatgagagacatagaaaaacagaagtcatgaatgtaaattgaatgagaggcttaacatgcatgaaaatacagatggacctgcaggaaagtgagcaaacatcgctgagtttgttttcttgttcgggagaatggggccggggctggcctggcctcccctggatatactctatagtgcaccaaaaggataaagcatctgtacatgtatttttttattttttatcagaagtgcttagacaagaacagaataagcaggctgtttggatgctacttgtggttgaattgtgttcccccaaaatatatggtgaagtcttaacccccatccccgtgaatgggaccttgtttggaaatagggtctttgcagatatagtcaagatgaggtcacattggattagggtgggccccaaatccaatgactggcatccttaggagaagagagagttttggtaatagacacaaatgcagtgggaagaagaccaggggacaagaggcaagttggagtgatgcagccggaagggaagggacaccaaggatctccggccaccagcagaagccagcagagaggcatgggacaggttccccacaagccttagaaggaagcatggccctgacttcagaattccagactccagaactggaagaataaatgtctgttgttttaagctgcttagttcatgctgagttcatgctgacttgttactatagccccagaaagctaatacagtcgtttatgtaattacataacctgacacacaagatcgacccattcactgctgcccagtccaccattttcataatgaagtagaaatgggaggtaagaaaaacattccagccagttctgtttagccctgggacacatatttgtcccgtcaggaatcttatgccctcctggaacccccgcccacctcagtccagtcccagtcaggcgaacggcctctggacagggactgaggtggctctgagccactggagatcatttttcttggaggatggagattggctagtacctctggcctaactgtgtaggtcaatactcttttacattgccttctaataaaagcagaatgatacagcagtgttgttacaagcttgtt

SEQ ID NO: 222620 - DNA, 1563 bp, Homo sapiens
  misc_feature (2)..(2): n is a, c, g, or t
  misc_feature (4)..(4): n is a, c, g, or t
antntttgctcagcccgcctgcgccgcttgggacgcctctgcctttccctccctcccttccccgacggcttctggcggccaagtggatgtggcgggtgatcgagccaccctgcccaggggcgcccagcactggttcagtgaacagcattttggacaggacatttggtgccaggtctgagtagccagtttgctgaattattgtcccagtcagccaggattgtgagctgtttgggaagtttcgtggaaacgcccaagtgccagcacaggtggagggacacctggaggccagtttcaggaacttttgccacaagtataaaagacttcagaagtgcaaagatgctgaaacagatactgtcggagatgtacatagatcctgatctactggcagagctcagcgaagaacagaaacagatcctgttcttcaagatgagagaggaacagatccgacgatggaaagaaagagaagcagctatggaaagaaaggagtccctgccagtgaaacccagaccaaagaaagagaatggcaaatcggttcattggaaacttggagctgataaggaagtctgggtatgggtgatgggcgaacaccatctagataaaccctatgatgtgctctgtaatgaaattattgctgagagggcccggctgaaagcagaacaggaggcagaagagcccagaaaaactcactctgaagaattcaccaatagcttgaaaacaaaatcacagtaccatgatctgcaggctccggataaccagcagactaaagacatctggaagaaagtggcagaaaaggaggaactggagcaaggatcgaggccagcaccaaccctggaagaagagaaaatccgaaagaaagaatctatgaagaaaaaacaagatgaagaaataaatcaaatagaagaagagagagttttggtaatagacacaaatgcagtgggaagaagaccaggggacaagaggcaagttggagtgatgcagccggaagggaagggacaccaaggatctccggccaccagcagaagccagcagagaggcatgggacaggttccccacaagccttagaaggaagcatggccctgacttcagaattccagactccagaactggaagaataaatgtctgttgttttaagctgcttagttcatgctgagttcatgctgacttgttactatagccccagaaagctaatacagtcgtttatgtaattacataacctgacacacaagatcgacccattcactgctgcccagtccaccattttcataatgaagtagaaatgggaggtaagaaaaacattccagccagttctgtttagccctgggacacatatttgtcccgtcaggaatcttatgccctcctggaacccccgcccacctcagtccagtcccagtcaggcgaacggcctctggacagggactgaggtggctctgagccactggagatcatttttcttggaggatggagattggctagtacctctggcctaactgtgtaggtcaatactcttttacattgccttctaataaaagcagaatgatacagcagtgttgttacaagcttgtt

SEQ ID NO: 222621 - DNA, 560 bp, Homo sapiens
ataacaagcaaatgatgacattttcctaaatgctccttattggttaaccactgaatatatgaacacatatgaatattgtcattcatgtacttaaattcatttagcaaactatttgaacacttacatgtgcagtgtttggtgaacatgacatgaggaactagtagtaagtaaaatcttccccccaaaattcattgtggcttaaataaatatgaacataatcattactacttaatatactgagagggaatcttaataaacttggaactgggagggaatatttgtatacattgggtaaagggttaggctagatgacatctaaggggtctgagtgaatcatatcataatttttataacacatttcacatactaaacatcagttggccccatacctgattaagttacaaaatttaggagacttaacattaaggacttacaggttgagacagcccgtatttcacaacattattttgacacttgactctattccagagttgttgctatacaaggcatgtggcagaacaaaaaaaaagctggtgttgatataagagctttttacccag

SEQ ID NO: 222622 - DNA, 474 bp, Homo sapiens
tgagtgcctactatgtgccagcctgtgctaggcactgaggacacaggtggaaaagcccgaattgctccctgctctcctggcgctcatcaccccggaggtaggcacagccgccagccggaacttgtacagcgtcgacacctctccagatttcggatccagtcacttttcaaaaagatcaaggagcctgacgccccagccagagaccgcgcccggtcagggagcagggtccacccggaaacgttgcacccaaagggcaaaggacggccctccctcctgggcacaaggacccatcttctcccagtgggtctttccctctcgccaaaataacaagagtatagggtggggggtccctacccagaccagtccaatgaattggtggaatcatcagttgaatttccccctagtcaggggccaatgtaccctccgtctagttcttacagaaaaaaaaaaaattaaacagggaagtttttcttt

SEQ ID NO: 222623 - DNA, 396 bp, Homo sapiens
gttttaatatgtgcattagcttgtatattagtatattattaattataaagttgtacaccttttaataattacatgaattactaaacttttaccatatttttaatagctttattgagatttaattgacatttaataaattgcacatatttaaggtatacaatttgataggctttgacatatataatacccatgaaaccagcacaatcaagatagtgaatgtaatcattacccccaaagtttcttcattataatgtattaataaaccagtactattggccaggcacagtggctcatatctgtaattccagcactttgggaggccaaggtgggaggattgcttgagcccaggagttcaagaccaaactgggaaacatagtgggaccccatctttgcaag

SEQ ID NO: 222624 - DNA, 514 bp, Homo sapiens
gtgggtgtgggcgtgggagaacagggccaggacttagggtgagcagaggctggttgccctacttcctttggtcccagcctgaggctggcacccctacccagcagccttgtgacaccctcatgtcccacctccacatctttgctgagaatccccagggaagggagggccccatctatagtggaagaaaccttctgggcccaaatccagccacatcacaagactggatggcccagccgcgagacgagcatgtcagtggcttccatggccaatgggagaggcttcacccggctcatgttctgctgtggttgtcgggccaaacagatggctggggataaacagggggtggtgctgggtggggtgtgtgttggggtggctttgaatggcctcagcctccctctggatcctagggaaagaggccagtgaggtgaaggcagtgcttgaggaaggggctgtcattggtggccttcaaaacttgtttgtgatgtcttttcagcaataaaactcttgttcaaac

SEQ ID NO: 222625 - DNA, 340 bp, Homo sapiens
tctaaaaaaaaaaaaaaaaaaagtaaatatctgtatttttcaattaatgaaacaggtataaaccaggcttacatgtaaccatattgaagtcaacaggctgatgtgtaaaaacacaggagaagtgtatcatggccgcctcattgttagaatgctatgcagaagaagagtgaacttaaattcttcctatcctgaaagggctctgtattccataaatgatgctgggatagcatgctagccatatgcagaagaatggaattggaacccaacctatcactatctacaaaaattaactcaagatggattaaagatttaaatgtaaaacctcaaactgtaagaatcc

SEQ ID NO: 222626 - DNA, 668 bp, Homo sapiens
ctttctttataaaaatatgtggtttttttgttgaaagttttggtctctttaaattcagattttgtcttaggacagtaaaacccaggttgactgactcaggaaacagttgtctgctagtcactcataaatgtacggtcatatgttcactcttcttaaatatccaccttttataacacaaatgtaaaatagtatcagtctagccaatgatgaactctggaatccacttagtcttcagtaagtatgtgctgttcctctaaactttgccctgaagccagggatcttctcctaatgtatgtgacataaaaatccattttccatgtactcttgccaactgtctgataaggaattttgtgtgtgttctttctgactggagagtggaggacatctaagcttgtgtggcattggtccaatgattgccatgcatgacctgtaacatcaacagctcacagaatcctaaggaatcatgtgagaaacaggccttgggtcttatgagtcttctgggacctaaggtgataaaatggatggcacagaatggcatgtgatcaagcatggaggtgataaggaaacaattgctactctgtgtccatcagtccctgcgatgtctgtaaatgcacagtgtaatgtgaagcactttcagaatatgtttgtgtgtgtctgtatgctgagtg

SEQ ID NO: 222627 - DNA, 570 bp, Homo sapiens
ctatcaaccaatcaaccaataaaacaagacaaaagacatctttgagacaactgggaaaatctgaactgtatacttaaatattatggaattattactttaagtgtgataacggtactatgattatatagaataatgtacttattcttaggggatgaatgctgaagtatttaaggggacattatattaaggaaaaatctgatgtctgcaacttaaacaattaatcctccccaaaaaagtacagaacacacacacacacacacacttacttctttccagctctgatattctagaacatttagagatggcacaaggaacaatagaacaagtgattacatttctggaaataggtcccatgaggcaagtaacgtaaactgtctaggatagagtgaagatgcttttcaattacaatatccaagttttaaaggtattctgtaattctgctaaagaaaatcaagcaagaagggacatattccttgctttgcagtctgttttatatttgtctatttaatcataaattttgatctactaccctttagccagaatacaagattgctgatcccatctgtacat

SEQ ID NO: 222628 - DNA, 231 bp, Homo sapiens
cattaggagactctttataaatgttgttcaataggtgatactagtacaaaaaggaatgtgttttagggtcaaatacatacattagagaaaggacaaaaattggcttttattttctagcagtaaatggaaagaaggaaatgtaatcagccataaatcacagtgtccctaggataaagataaacctgttgcttaggcagccaggagaaacacagttattccttatagtgagaa

SEQ ID NO: 222629 - DNA, 330 bp, Homo sapiens
ctagctgcttggggaggctgaggtaggaggatcgcttgaacccaggagttcaagaacagtctggataacgtgatgagatctcatctctattaaaaacaaacaaagtactcttactagtgttgatttgaaccctgggctttgatccagagcagtgtttgttttaatcttagttgatttgattagtaattttcagaccttgaacaagacttggcatctctgagctttagcatccccctctgtaaaatggggatagtacctgtttcatggcattgttgggagaagttacctgctatgttctttgcatagtgactttcatagatcaagtagtcc

SEQ ID NO: 222630 - DNA, 311 bp, Homo sapiens
ctctggggtctcaggtatggttctatctcctaaggaatgctcaacaacgcaccagattttattccaatctccatgggacccgattctggtacacagtctcttttggtaatggagtcagaagaacagtttctgggaaacacctcactgtcttgaaacacctcccctttcaggctggctgacaattctaacagctgggcaccggagcctgcttcatgaatgctcatcagctagtctcagggcaccaggcctgaaataaactgtgaaatccctaaggatccaaaaggattcacaggatttctcattcctgccta

SEQ ID NO: 222631 - DNA, 381 bp, Homo sapiens
ttggtgatctgaaatttgtacaggtggcagcagtttttatgggttgtggctctattatttttaatgagctgggatttcaaagttctatctatctctaaagatatttctagaaggatattcaaattgtatttgaatgaagtatatcccataatacagggatatacttaccaggacagagtagtaacctttccaacaggtccatgagcaatcagattcacaattctaattttgtagttgagttctaacaatgtagttaattattgatttttaaaaaaacatttgaccaagcaagaagcaaaatcattattttgccaaaaacagcacgttcctaatttgcctatggaagagtatgtaatgcttttaaatggggatgaaatctac

SEQ ID NO: 222632 - DNA, 350 bp, Homo sapiens
ctgaggctgaggttattgggatccccagtgtggaccatgtgtcagattcagggaggggtttcagtgtagaaaaagatgagatgccacttggaagttgtgtggtttagagcaaatcactcagctgtcctggcctcagtttgcttatctgtaaaatgggtatccattgggaaaaaaattgtcattgagggccaactaaggaccacacacttttctggcacagaaaagtcaaggttctgatcccacggaccttacactccagtgggaggtgatggaccaggaagagtaaatccatgcagttcatttcaggggctgatcatttccataacggcaggaaaactgggcgagaagac

SEQ ID NO: 222633 - DNA, 533 bp, Homo sapiens
caggcagggcccaaacttatttctcttagtaactcactgcagttcctggtgcagatttctgttgcagtgggcacttagtaagtgcttttgagcaagttaatgaatctgagtcattgtggagtaaaataacccattgtatgcagcactaaagagttctccagtgtaatttccggaaggaacaggcacagaacaggattaaaggcattggttctgggtcaggccatctgaacttgagtcctttaccttttacccttttagcctctatacccttatctgtcaaatggagatagtaacatctaccccacagagatgttttgagaatatattgtaagcacctggcccgtggttagttttcagtagacattacgtgttataattattggtgttgttcattgtttttggtgctaggaggttaccacaccctatttgaatggttttgttatgcttataattgtgcctctatcatatataagaacttaggtctcttcgtgcttgcattgcaaaaataaagaaatatcttttaaaaaactact

SEQ ID NO: 222634 - DNA, 569 bp, Homo sapiens
ctggtggtaagagggaccaagaagaactatgggctcacagacaaagtctctgcttttccttagaggaagggtgccctgagatgcagaagggcttcccagaggaggtgggggaggactgcactcagcagatactctacagtctccccaggatcactgacctcaggcctgacttctctgtctcatctcaggaccatgcattctgccggccacagcctatgggggtggggggatggggagttgggcctagcattgttcacggaactttcggtggtccccaaatgcagggatctgttgccagcctcctggacccccgctctcaggctgctgctgaactgaaagagactgtccagtaggtggcgcgcgggcaccgccgagtacccggtccccatgcagagccagcccctgccagtgcacattctcagaacagagcccgggcgactgcaacctaggcctggtctgagtccatttcgtttagtttcagagaaagaattaacagaggcttagtaagtgtatctgctcagaggagagcgttctctgagaaaaaataaacaagactgtgtgaccccaaa

SEQ ID NO: 222635 - DNA, 831 bp, Homo sapiens
ttttttgagacagagtctctctctgtgcccaggctggagtgcagtggtgtgatcttggctcactacaacctccacctcctgagttcaagcgattctctgcctcaacctcccaagtagctgggactataggtgtccaccagcacacctggccaatttttttgtatttttcgtagagatggggttttggcatgttggccaggctggtcttgaactcctggcctcaagtgatctacctgcctcagcctcccaaaatgtcttaatcaaagataaaattccatatcttatgagtgccttgaacccattcacatataatgtggttgatgatagacttactatcttaatgcatgtgttttatttattgtgcttatggttgaaaaccatcttcttcatctctggatcatcagagtcaaccagagggcttggctcaaagcagtaggtattcaacaaatgctcattgaataaaaatgtccttgatcctctaattctgatttgattcgagaaataacttatggcaaagagctcaattgtaatggggttgggactaaaattcaagttaatgttgaaagatgtttcaagaagtatttaggttatattattaaatattagacactttctgtttatatagatttaacatataaagattttaagttttctgtgtatgtgaggtctcgtagtagtttctgctgaaaatgacaggggcgcggggttaagggtgaagacagtatctcaggattggagaaggaaatctaagatattgtctccaccagccatactcctcatgaacatgcacatggaaggacatttcccagccaaagtgaatccctttatttg

SEQ ID NO: 222636 - DNA, 479 bp, Homo sapiens
caatgttgagtgaaagaaactaggtacaaaaagatacaaacaaaacacacccaggtgattgcattaatctaaacgcaaaagcgggtgagaccgatctgtgctcttggaggttgtcctctgggggtatggtgcagctcggctgatgtgggtcacttaggttttcagtgctcagggtgaaagtgaggggtcaggagagagcagaaagctggatcaccccgcacatgctaagaaaccaggatggcaacgtggatgtggcgggttaagcaaattgaaactgtggataatcattagctcaacagatgccataagatcagagtgcccctgaggcctctggtctctggatgatgcccatgtatttatcacttagtcaccggagcacagatcttagaaggaggcccaggagccctggctgcacacgtaattccattgcacgctgattcagtttggtcaagtccacactacccaaatgaccagagtta

SEQ ID NO: 222637 - DNA, 440 bp, Homo sapiens
aatggtcaagggtagttttagttatgaaaatgttaaataactctgatgttaattaaaaattttcctgccactgtcagaaacctactttttgaagtacaggttttatttcttttagctgagtggctgaaaaatatttctctactttgccttgctggtgagtgtactggttatgttttgtactaactgtgcattcctccttctaggaatagctgcagtccacatccgcaatcatatttctactcctctcctgcctcccagtcatagctgaccaaatctggagtatgatcagacacaaggcagtatcttcattggccaagcagattatctcaggattttaaaacgagacatgcagaggatactctgttggtattttcatctttgaaaataagcccttttgcacctccaagtccccaaattcaaaatgaggcttatgattcctg

SEQ ID NO: 222638 - DNA, 353 bp, Homo sapiens
ctttatgcaccacattcagtgacagctgtcagctgtgagcgtaattataagttttcattacaggttttaattcaaaccaatctttatttatttgaaggctaatattaaaatgggcatgtgaaagttgcacgtattacgagcaaaactctgcctaaaaccatacgtatgaacctaaacactcaggcataaacataaaaagccatacacatctggtgcatgcacacacacagaagctttaaattgtctttatccttctcttaatttttttttggctgagcatgtatcattgaattgctataaagtaagtgtttatggagctgtaccacaattcataatctgattactagttgtga

SEQ ID NO: 222639 - DNA, 412 bp, Homo sapiens
aaatagtttggatgataaaatgatgacgaagataaatattctagcacccaagttaagggtgtaaagacagtatcgcactggcctcttctaccttattaggcgacactggagacatctacgtctacagtcacttgagaaattttttacctacgggttgaatttgaatttctgggtgttcgctttggtttatgatattcaacttttattcaggggatttccaaatagatcaggggcggggctgctgacctaaggagaggagaaagttttgagagaagttttagtagatcacagctgtgcatcagtggagtcccactgatactaggggagaaatagacagtgctgggaatggggcaatcctgccaggtgtttttgatgttatgcctacagaaaataaatttgcgttagccatatg

SEQ ID NO: 222640 - DNA, 317 bp, Homo sapiens
acaggtgagtgactttaggcaggtaacttaatctttctaagtttccttctctgtaaaacaaggccatatagttaatacctaatgggttcttatgaagattaaaggcattaatacttgtaaagcaccgggcagcattgtgttttgcatgaagccaatgctcaaaatgttaaattattgtagcactcactatggatataattataataaccagttttgaggcatcctttagaattgtttatgtaatggaattttatttttcttggtattagaatgtaatttactccaaaggaaaaacaaaatacctttggcacaggagg

SEQ ID NO: 222641 - DNA, 519 bp, Homo sapiens
taaagtaaatatattattccatattttcttctaaaagtttaaacattttacactacaatttttgaactatcgctaattgattattttatatggcttgatgtagggatatatttttttcagatggtagcctattatcccagccctattcattgcttaatcccagtgacctgctatgattcattcatacatcaaatgttcatgtatacatagcttgtttcattaacctattgtctattcctgcatgaataccacactttatctattactagagctatataataagttttgctatctggtagggtgtttctcctccctcctttcttttttcaggagtatcttggctattcttgggtcttctgcttgttaagttctttgaaaatattgtggaatttttattggaattgtttgaatctatagaaagaactaacatttaagtcttcatattcaggaacatgtgtacctctttttaactttagatcttctacaatgtattttaataaagttttataattcacacta

SEQ ID NO: 222642 - DNA, 500 bp, Homo sapiens
ggcagaatcacactccaaggtaaagccacagtcttaggtgacagtagacaaggaacttcctcccagaacccagaaccaaatactaaccccaagaaaagtactccacatatggggcaaggccctttgcaatgactggtggcaaaactccatcactaatgaccagcggctgatgcgtattttgtttcttctgttttctgagaaggaatttctactgtgtgtatccagtcccatccaccgatgtttattgaagatatgggtacagggacgagtggaggcaggggaagaatcggggaggggatgggctggtgacttgttcactgggagacacatccagatttggtgcaggtggctgcatattgcccagatattttggactttaagttgggtgcaatagctggataggaccctgggctatcttttttaggggagaggttgaatgtgttctgtgtgagggatagaaagggtatgcacagtacagttatttgagtggattctgtgtg

SEQ ID NO: 222643 - DNA, 295 bp, Homo sapiens
ttctataatcaactgttatttgatagaattgtttgaaaatattactacatgcttgatggcaggacctaaaacagcaggcaaaatatatatgatgccaaaggcatcttctcttatcactagctgatttacaaatgataatttaactgttaatgtctgagaatattttctctttcccatacacaataagaaaaatcactgtgtatactgagtggtgtctaggaatgtgatacgtattattcaaagtatgagttgccttgaaatcaaggtatagggaggaatgatgaggacacatggg

SEQ ID NO: 222644 - DNA, 367 bp, Homo sapiens
gacacagggctaaaggatttttccagacagtagattggtgccttctattgggactagaagtctttgcctccaactctagacattcacagttgtttggaaataagcaaaattctaaatctcagaattttcttctgttccagttaagacttatcaagggctggagcgtctgaactagatacaccaaaaatttttagagtgatgagatgatggagttaaacaaactgtcctgaactgcatatccaaagacaaaagctaggagataacaaaaactgtcctaaaactgcatatccaaagacaaactgtcctgaactgcatatccaaagacaaactgtcctgaactgcatatccaaagacaaaagctagcgta

SEQ ID NO: 222645 - DNA, 390 bp, Homo sapiens
tggccatgaacccaaggcctgaggactggtgcctttctgctaattaattctcgatgtcagacatctggaaacccgccttttctgcctcatctgagttgactaattaattaagctatgtttgtaaacaggcgttttctcctcagcacttctttcatcatctgtttctttagccacaagctggcaaccccatttaatggtagactacctggccaataattctgttcttgcacaggctgtggaggttcctttaggaggccacttagcactgtgcaagcagcccaggctttggagtgaggcaaatcaggatttgaatccagttgagccatttattaattatgtgaccacaggcaagttacctggcatcttaacatgtcagtttccccattttct

SEQ ID NO: 222646 - DNA, 639 bp, Homo sapiens
ttctacaaatgcattagcattggcatttataaagaaaatgacgaagttgagaggttatagttggttactgcagtgacttagagatgctcattttatagttattaaagcacaacgtgaaccaagttggcagagagataacaaggtaaaaatagcataaggatatgtcctaacaaaatgtccttggtgaagacacaggtagagaaaagaagccataataaagaaattagttccctgaccaaaacaacgggaatatcattcatcgttaaattttgttaatgaattcatgtagcagcggcccattggccttcgagtcacaacataactatgtcttaggtaatgtgattaaataaacttaagtatttatacttaagttcatatcttagtcacacgttatttatatcttagtcacacgttattgagtggaccacataatttcccccgctaaacattatcctttacaggttaaactgctgcagttagaaaactttgtctcaaattcttttgagtttggggtattgttaagaaaaaatgcataattaatcaaatgagagaaaggttttttggggggaggtataatttgtataagtaaactttgattaaccaatgtagctgtttaagtttcttcttccttacaattaa

SEQ ID NO: 222647 - DNA, 353 bp, Homo sapiens
gttgattaataagaatgtatgcctcttgctgtacattacttagccggggaaattgtgagaacagtactttatagtactgacagtgcactaaaataaaaatgcaataactagaaggtggagttattagagtgaaatgaactattgcactttgaacaaatgtttcaaattatatttcagttatttggttctttaaaaattcaactgcatttattaaaaagttaattctatatatttaaacaaatatgtattgaaagatattgggtttacaatagcaatgggttatttttaaaaattgggtaataagctactatataatcaaaaataaattgtgaatgttttcctttctttatata

SEQ ID NO: 222648 - DNA, 716 bp, Homo sapiens
agtgactgtaaacacatatttatagtcagcattgaaaccctttctagaaggaggagccaagatggccgaataggaacagctccggtctacagctcccagcgtgagcgacgcagaagacgggtgatttctgcatttccatctgaggtaccgggttcatctcactagggagtgccagacagtgggctcaggtcagtgggtgcgcgcaccgtgcgcgagccgaagcagggcgaggcattgcctcacctgggaagcgcaaggggtcagggagttccctttccgagtcaaagaaaggggtgacgggcgcacctggaaaatcgggtcactcccacccgaatactgcgcttttcagaccggcttaaaaaacggcgcaccacgagactatatcccacacctggctcggagggtcctacgcccacggagtctcgctgattgccagcacagcagtctgagatcaaaccgcaaggcggcagcgaggctgggggaggggcgcccaccattgcccaggcttgctgaggtaaacaaagcagcctggaagctcgaactgggtggagcccaccacagctctaggaggcctgcctgcctctgtaggctccacctctgggggcagggcacagacaaacaaaaagacagcagtaacctctgcagacttaaatgtccctgtctgacagctttgaagagagcagtggttctcccagcacgcagctggagatctgaga

SEQ ID NO: 222649 - DNA, 983 bp, Homo sapiens
tcgagatgggcttccccagggacgcgcggacaaggctctggccctcagagggaaccaggcatcgaggctgcgatggactggttgatggagcacgaaggacgaccccgatgtggacgagcctgttagagacctccccttggacatgatcctgggagcgggagcccacttcctcagagcaaggcggccttgcaaggatctggttctgcgtgccgagagataggcagatagccctgctttcgtagctgacaggaggaaagacacggaacaaactaagacggatgttggagctggtggcccagaagcagcgggagcgtgaagaaagagaggaacgggaggcatggaacgggaacggcagcgcaggagacaagggcaagagttgtcagcagcacgacagcggctacaggaagatgagatgcgccgggctgctgaggagaggcggagggaaaaggccgaggagttagcagccagacaaagagttagagaaaagatcgagagggacaaagcagagagagccaagaagtatggtggcagtgtgggctctcagccacccccagtggcaccagagccaggtcctgttccctcttctcccagccaggagcctcccaccaagcgggagtatgaccagtgtcgcatacaggtcaggctgccagatgggacctcactgacccagacgttccgggcccgggaacagctggcagctgtgaggctctatgtggagctccaccgtggggaggaactaggtgggggccaggaccctgtgcaattgctcagtggcttccccagacgggccttctcagaagctgacatggagcggcctctgcaggagctgggactcgtgccttctgctgttctcattgtggccaagaaatgtcccagctgagggcctttgtcccattgtccctctgtgaccccttcatctttgataaagcactgacatctccttcctaataaatagaccctgagttctgtacatgcctgactcc

SEQ ID NO: 222650 - DNA, 932 bp, Homo sapiens
gtaagcccaacttctcatttagcaaaaaaggcataaaatccatcttaagttgaaatttagtattattctacagcatataaagtgaattaacatggggatataccaaatagaaatctaaattttgaaatatttgaaattgaagcatttgagtaacttatctgtgaaaggtccaaggagatgctctcctaccaaccctactaaatttgtttcctttctaggcctcactgaaccataagtgttttcatcaaaaaggagcagagtggcaggtccaaactatatacctgataactttaggattaaagggaaagatagtgtaccattgcctccctgcttttattgtcatttaaagtttcgtcttcatggtgagtgattctgtagccaagtttgtgaccacccaatgaactatatagctgctgtatgtcctgcagagctcatccagaatagaatgttcttgatcaaaatgagagtgctagaaagctcatgaggctacaaggctacaaagaaaagtatattccaatttgggatgttattaagataattaggcagcccactctactcccaagagaagaatgaccaatttaatctgttgtcaccaagcggtttacagcttaaggccttttctgtaaaaattaaaatgcactcaaagaataaaaaacagcaaggtcaaatcaaggttttatctagtgttaggaacatttagattactctctgtgtgtgtgtgtatatatatacacttttatttttacattgtagagatagcatgtaaatgaacataggtattaagccatagagaagaattactatgcacctgatgaaaagaatcaggatttgtgtaacacagtaaacacattcttgtggaccagatggcaattacgtatacatacaaggcaagtactgagaagtaccaaaaacatctttgatgccgtcacttt

SEQ ID NO: 222651 - DNA, 733 bp, Homo sapiens
gaagaaaaataaatagaaagtagaaatattaagaaactacgaagtaggtgtaccacctccatttttccaattgcaaaaagaagatagtttttataaaggtgcttcataataccacttaaaagatttgcaaatagaatagtatttaatgagattatcttccaataaagaaaatggaaaggtttctcactgaaggtgaaaacacatatattattttaaaagttctgaagtcttcaaactaaaataatgtactataacaaaaaaacttggtttttcatatttcaagtctttttgtctggatctttgttcattcatggcttttattaggtttgcaaacagttggtggacatgtggtgaagtcacacctcattaacagaatataaattttccatgtggttttgttgcctctttgcagttattttgctctaagacaaacttctgtttcataaaagttgggcctttctgtcttgggaaatctctgcagatacttcatatttgttttaaattacacatcgtctcttaagttttccagtcatgctttatacttcattgtgtgccttaaaaatgttgtattattaggatcctcaccttgaaagattgtttcaaaaaattgttattacattgaaataagtcttttaaagtacaacagtgtcctgttatctagattagatggataactgaggattagaatatgtatggaagatcagtcaccagttaaattggttggttagttata

SEQ ID NO: 222652 - DNA, 524 bp, Homo sapiens
ggaatttccttgtcctgataagcctgggagcgccacgcgagcccagggcttatttcatcccttatcaacgactgtaaaagacagccgtccccaaagcggccaagttgagaaagactatgggaagatttgggtagaagcatgggggccaagctgtggcaacatcccgctgggagatgatagtgatcctgaccgggttcacggtggtggtgagagatggtcagagcctggatacatgttgaagtcagtcagtaggatttcctgacagactggatgtgagctgtgagagaaggcagtggtcaaggttgagtttgattctgattgaattattaagtaattttaaaaaacactactgcctttcccaatcctaccaagtaaaggatgctagataaaagaaatctcaagttaggccaggtgcagtggctcacacctatagttccaacagtttgagaggcagagatgggagtatgttttaaggccatgagtttgagagcagcctgggcaacacagcaagacctcctctctac

SEQ ID NO: 222653 - DNA, 360 bp, Homo sapiens
tctcttctcccatgagtccttctctgctgtggtttgaatgtgtcccctcaaaaattcaggtatttaaactgatagtgataacattaagaggtgggacctttaagaggtgattggtcaaaagggtgctccctcatgaatgggattaaggcccttatgaaagaggctttgtgcagcatttggctctcttgactttcaccatgtgaggacacagggttcctcctctccagagaactcagcaacaaggcgccatcgtggatgcttagagcagcctttgcaagacaccaaacaagccagtggcttgatcttggacttcccagcctccagaagtatgtgaaataaatttatgtccttttaaaatta

SEQ ID NO: 222654 - DNA, 314 bp, Homo sapiens
cacttcacaggacacgtttacatggtactgaaactttagagggactcctgcactatcagacatcacccattactgttcttttttttgtttttttgagatggagtttcacgcttgttgcccaggctggagtacaatggcacgatcttggctcactgcaacctctgcctcctgggttcaagcgattctcctgcctcagccttccaaatagctgggattacaggcatgcgccaccacacccggctaattttgtatttttaatagagatggggtttctccatgcctcaggtgatcccagcctcaggtgatcgacttgc

SEQ ID NO: 222655 - DNA, 419 bp, Homo sapiens
gtgaaataagctgatgccatccgtcagtcacagttgctgtgaggtgacatgagacgccaagtgctcaagacattccacctcagttcagctccttgctgctccaggctttcgtgcatctacatcatttctctttatcctggctccctctgtctctgttttccagcctctgtttgcgtctgtccctgtctgggcaggagggaacagcagaggcagcaaaggctctctcagcacatactgtggggaggagcggccctgggcagaggacagggtgggcctcacctcctccatctgagctggacatttccatctgtgccacaccatgagctcctgtgagccccacatttcctgggcatcctccaccttgcagtcagtcctgataggttctcttcttgacagtgtaaagcacccttccccaaggc

SEQ ID NO: 222656 - DNA, 527 bp, Homo sapiens
gatattaacaatatgaagcaagaaaaagaacacataatcaagaaccagatatttatttaggtcttaagatctgcataactggagagatacaccttgttcatgggtcagaagactcaatatcttaagatcggttttcttcaaattgtctatggattaaatactatctaaatcaaaatcccagcaggcaattttatagaaatggataagctaattctaaatttcatatggaaatgcaaaggacttagcccaaacaactttcaacaagaaaaataaagttgaaatgctaacactacgttatttgaagactttattataaagctatgttaattaagacagtctggtacagtcatgcaccacataaggacatttcagtcagtgacggatcacatatatgacagtggtcccagaagattacaataccatatttttactgtacctttcccatgtttagttatgtttagatacacaaatacttaccaccatattacagttgcctacaggattcagtacaggtttgtaccctagaa

SEQ ID NO: 222657 - DNA, 670 bp, Homo sapiens
gcaatagcattgggatttgtgctcagagtcacagtttacatctgaccacaatttctatatgaattttttaagataaaacagtaagaattttaaagaaggtttctgaaatttaaaaattataataacataattaactttgatattttaattccatgtaatttaaaacatttaacagatatataatgttccactattaatttaactagatgtataaaaataaaacatatataataaaaatattctacttatttttaaattatctatattatactgagtaaaagaaaatttaggaatataaataaatgagcatttttgaacatgtaaaaatattttcttgctgtttttaggagacttttagcaggacaggagcttacctctcatctacctctgcttggacaaaccagtgatgtgatttgcaaataggctgtaacttcaccgaaaacacatcacagtaaagaaaggtagtgactttcagagaatttgacctaacttagaatttgtaaaagagaaaagcattgtccttatgcctaaagtacatgactgtttctttttaagttacatgtatatttacctgaccaatttgttttactctgtattttaagttatcaggtgaaatggttttggaataaattaatgagttgtttcttctgaataaatgtgcatgttacaa

SEQ ID NO: 222658 - DNA, 502 bp, Homo sapiens
aagcaaaggaaagaaaaacccaaatcggtgttacaggtttttgaaggtctccctggattaatgcaggtcattttttatcctagggaaagcacagaggatgccttctatctcaatgtttcccttattttattgattaatctttcactttttcattcacttaacacttaatcattggttagtatgtgccaggcactgaaaagatccactaagaatataaaataaacaaaacaacatttctgctttctagttactcccaaggccactctccagccagttctcctgggaatcagccaaaccacagccctgttaggcaccattgaccttctatttccaatgattgggaaatagtcaagcatgggctgggagcttagttgtataaagcagcaagttgctatgaagagttcaaaggtatgagagtgcaagaatttggtttgggtgaccttgtccatgtaagattgtcaagaccattgtgactgtcagctctggttagaaaccctgctgt

SEQ ID NO: 222659 - DNA, 499 bp, Homo sapiens
atgtattcttctagtataagtatgtcccatgcaatatttgggacatacgtatactaagaaattagttatttatctgaaactcaaatttagtgtcctatattttaatttgctaaatccggccatccaactgcatcacagatggagtatgaagcttacagctccacctaggaagtgctgcgcaaaacaagctggacccaaataatcaagcatttagagctaactccagtttacagaaaatatggagaagaggagacagaacaagtgaaagaacttcatgatgaggcaaacaaatgaatccaggacacgggacctcctccaagatagggagaggggctgaggaacgctccagattagaaaaaactagggacatggccacccaatgctatgtcctgatcccaacaagtcaactgtagaaggacatttttgagacaatcaggtagcttcaaatttggactgcgtacacaacttgttaagtttaaaaatggcactgtggctctgg

SEQ ID NO: 222660 - DNA, 115 bp, Homo sapiens
agggaaactgttgggtgcctgcccttatgtacaagcagagctctgaatttgaggcgggaaagaagacagctcacattccatgttcacacgaacatggctgggagtcagtttctct

SEQ ID NO: 222661 - DNA, 406 bp, Homo sapiens
gcacgagaaaaaaagtcccactgacgaattggaatatatcctgaggaactgaacgggtgataggccgagacacagtctgatgagggtgaatgtctgaaagactcaggggatttggcttggtgaaggaaacccagacagagacatgtggcaattttcaagaactgacaacgctgtcagccggaatacaggtttattctatgttgctccagaggccaaaagtaagaataacgtgtagaattacaaggaggcagatgagatttcatatcaaaaagaaaattaatcgttcacggtacctggaaatgaggtggtccacgctgtgctcgcatcggctctcccccagagttttcaagggcaagccagtggcctcgtgtccagttaggacgggtgcagatggggcatggaacgg

SEQ ID NO: 222662 - DNA, 281 bp, Homo sapiens
ttccctcatgtaattaaataaaatatttaacacgtattcatttcataattatgataatcatgacatacttttttgggaaaattatcttttaacagaataagcaagtaaataatacatcgatggtgtactgtgtgatgcagaaaataaagcagagtattgaggaatgcaggacatgttagtttagaagtgttccaggaaaccagggaggtggaggttgcaatgagccgagatagcaccactgcactccagcctgggcgacagagcgagactccatctgaaaa

SEQ ID NO: 222663 - DNA, 309 bp, Homo sapiens
ttattttcatgtatgtaatgtgctagcttttaagaagcatcatatagacttccagactaggtttaaaatgctaaattgcctgcctatgtgtatcatttttcacagggtgaacaaaggagataatgattcctttgacttctgacccaatgactaccactgtaggcaagaacaacgttaaacatttttgaaattttataaatgttttagtggcattacctgcagaattttattgttgtggttttttttggactactgtcttgaactgtagccatggaaaagtttccttactaaaagaaataatcaggaata

SEQ ID NO: 222664 - DNA, 408 bp, Homo sapiens
gagtcagcctgccattagcctctccctatgaaatttctagcgtggtcattaccgctcacttagcaacgctctggcggggcagaaagttgtcttttgctcccacaaaagcaaacacttttcctggtcaggcgatgcattatagagtcagttctcctgcgcttgggccgatcaataaccaagtcggggcccccggacgcagcccagagcccagccccgcgctcgcgggttcccgggtgcccggcccggcccatccatcacgcggcccccgctgcgcgcaacccgggcgggacgagcccccgcgatccgtcttcgccgtgaactctgcgtcccctcctgacctcgcgctcaacccggacacactgggaggtgcgaagcggcctcccggggctcggcccgctccccgccgca

SEQ ID NO: 222665 - DNA, 434 bp, Homo sapiens
tatcttgctctggaggagggagtgagaactggatcactggttacggtggtgactgggacaacagcacagccacagacaggaacacagaaggcagaggcagccttgatctgcaagggctccagttaaccccaatggggaccctcgatggacaaaggcactctcctaggcttggtgatgaaagtattcctcttacagccaggcaaggcactcagggctctgcagcagagaagttagagctgtagcttttttgcttggtgttttcactaaaacttaatttcttgttgcacttgttggatgggcatgtcccataggggaagtttccactactgtgttctaaactttggactgcttgtaccatcttacttgttccctcattaataatgaactaaataaaacctttagtatatgctaatttcatatctttacgagagtca

SEQ ID NO: 222666 - DNA, 491 bp, Homo sapiens
  misc_feature (3)..(3): n is a, c, g, or t
  misc_feature (16)..(16): n is a, c, g, or t
  misc_feature (24)..(24): n is a, c, g, or t
ccnctcacggtactcnagctaganaagaacagtgttggaatcttactatttttttttatcattaggaaaatacagtgtgattttatttttatgcaaaatctggcaacttagtcacatcatgtaaaggagggagacaagctactggttgcttctgtgttcttctagaagtccatgtcatggcaggccacagagggtggtgagggcagccacagggactgctgggtgctgccactgtggggttgtgtctgtcctacccagctgcaactctgaccatgcagtcaggaaatgataatttgacacaaagaagcatcactatttctctcacattctagacttttggtttctccacatagacttgagaagacactctaagacagcatataaggagaggagcacccttttgattttccttttaacctacggaatcaccactcagttccacattctgtggggtcttccccaccttcctccgtattgaggtaattcgacct

SEQ ID NO: 222667 - DNA, 537 bp, Homo sapiens
ggacagaacacagcaaacttctaggagaaagggcagcataaagaagggttccacgaaggcaggcacatggaaggtggcagataaataatgaacagcctatcttagctgaaaccaagaaaatgcaaacgggaatggacaatgggtggaggtatggaaagatggtgtagtatttccggaaagctaaggtgaagagataatagagacaggaggaatgggtgaataggaccaagtagatggttggtggaggcttttataagaattcattccttcagatgaagagtattgagtacggactatgtactggacattcagtaataaaacagacatgacctctgctctcgaggtgcctactgtcaagtgactgcaaagacttaagaggaagtgaatggtaaggaaagtgaggcagcaggtcttacttacttcaaaataaaatggataaaagaaaggaagagtttttgcaaagaaagcaaaaggttagccttctttaaggatgcaaaaacatgtgtttttctttgtgtgtgtgtgtatattccttaa

SEQ ID NO: 222668 - DNA, 479 bp, Homo sapiens
ttattcttccaaaggcagtctatccaatttttggaccactctgatggtgtcagaggccttctgtagattgagctcaaataactcacttctagttgtcttaggtcaacaatgtgtggccacagagattaagtcaaactcctcttcatctctgtgctgttcctgaatttgccagccttccaggtttctgagttgttgataaacaccgcacaggagacatgaggacagaacccttcagtggagacctgtttggatattgcaggggctttctgtgccccgcctatgcgtgatttcagcgctgtggagcctttaaaacagacgtggcctggacgactgagaaggtttgctttgactctgctgcagagggaaggtccagagtctcgtaggtcccactgtgtgctgagaattccatctgatgccctggataaccctcaagcctttgcaacagccagactaaataaagactcttgagtgattctgaa

SEQ ID NO: 222669 - DNA, 593 bp, Homo sapiens
ttattcttccaaaggcagtctatccaatttttggaccactctgatggtgtcagaggccttctgtagattgagctcaaataactcacttctagttgtcttaggtcaacaatgtgtggccacagagattaagtcaaactcctcttcatctctgtgctgttcctgaatttgccagccttccaggtttctgagttgttgataaacaccgcacaggagacatgaggacagaacccttcagtggagacctgtttggatattgcaggggctttctgtgccccgcctatgcgtgatttcagcgctgtggctggagtgcaatgacacgatctcggctcaatgcaacctctgcctcctgggttcaagcaattcttctgcctcagcctccagagtagctggcattacagcaattaccagctgatgctgagtaacttctgcccccttaaagccaggcacatactaactggttcacctcaatctgcaccactctgctgcccagtgcccagtgtgtggctattcaaggatattgcagtgtttctttggacccgtgtgagaattatgtactatgtggcacaataaatgggaatacattggttttcaag

SEQ ID NO: 222670 - DNA, 432 bp, Homo sapiens
gttttgttgcagcccaggaataagttttataacattggcagttgggctacaagtttagaacttatacatttagaaaattccaaagtgttccaatttccaaaagtaaagttggaatactttctacactggcttcaggtttaccaaatgtacacataagggataaatttgtcctgccaattttgctagtgcctatatatcagcagattcgccagacaataaaaaaggggacaattgattcaaaaaccattacctctcacttctggttccactttgcttcaaaatggcagaacatagaattacacagcgttaggtttggagttgcagttatcttcagcacacttaaatttcttcttttagattttagaaccaaacttccaaatgtgcccatccatggaatacatggaatagctctgggctatcccttcaggggaa

SEQ ID NO: 222671 - DNA, 438 bp, Homo sapiens
  misc_feature (304)..(304): n is a, c, g, or t
attgtccatccactcttcttcctgtacttaccaggacagaacagccgcaacttctcagacagttcattcttcttttcctcacctactaccatctaagaaaggtacttgatgactgtggctttagacaagagtccttttcttaccacagggtgggcagcaccagctcattagaaccatttgtgtgactgactgaagacagctcaccttggaacactgcaggaccctaagaggatggaggtggagtttttctgctcctacacctggataggcaagaccaaccacttaccaggtgcacagtggcagncttggcagaaaagcccattaaggcccaggaaacatacaattgttaaggggaccaagaatgtcaatgaactaaaagtttctggaccggtttattaggcaaaaattaaaaataaaaataaaataagagaccctaaa

SEQ ID NO: 222672 - DNA, 472 bp, Homo sapiens
aatagaataacttttacaaatagagatgcatctgtggtgaggatttcttctactagaagtgagcgtggtcagggctgaagaatgatgagaaaagccactgccgagcgtggagtgggctggggccaaaccagaaagcatcacattctggaagcagggatagaggcaggaatatctgccagcccccagggcatcaggacagtagtgaagactgacagccaggctgcttgtaaatagactgacagccagcctgcttgtaaattaagagtgatctttaaagtctctgtttccaaaagatatctagcagcatccctagttgtattactaaaaacaacatggcagaataatgaaattccattaattctctactgggttataaaccaaaattccaaagtcaataaggttctttgaaaatagacatctttatttaactataaatctaggctaataaattactaaataaaataatcatgaa

SEQ ID NO: 222673 - DNA, 356 bp, Homo sapiens
agggaaagagagctctggtggctcttcctctccttataaggacagcagccctgttgaattagggcctacctaatgacctcatttaacctttatcatctcctcacaggccctatctccaaatatagtcacattgagggttagggttacaaaatctgaattttgacaaaacacagtcagtccataacacatatcaccaggtggtatataatttggtttgtttcactactggcctttattgcaggtggtgtctgtcaagtttctccaatgtaaagttcctcattttccttttgtaattagtaactgttttgttgggggacacttggaaactatgtaaatattccactcctcaaaaaata

SEQ ID NO: 222674 - DNA, 545 bp, Homo sapiens
tgacgtgcacaggatatgaaaatgtctgatagtgttgtggctgcagtgagacctgggagtggcagtttctttcactgcagttgtctgtccaaagcgaagtgaactagcaagtctcttacaaaagggcaagctctgaactgcgcacagtgtgagcacagacacagtggggctaatctacaggggcagtgttagcagcaatgggttgtccaagatttctgagaggattagcacctagaaaataatcttattttgctttgtggtgtcagacaaaggaactgaatgagaaaattattgaagggcatattgtagctgatatgcagatccaaggctgactttcttcctctcccttgaatccacttatcacaaaaatatggaatgagcagaacttatgggcataaccataaaccaattttcctttgtttcctactgtctctttaaagttttctcagtgggagaaatcttctgtgtccttggatgaagacttactcagtaaattactttatgatcactgataggtaataaaagatcctatggtcatttaaaaa

SEQ ID NO: 222675 - DNA, 570 bp, Homo sapiens
ttttcaacacaaatattactccatagccaatattaaatcctgtaattctccaatcatgatattctctatcacacctccctgcctttgctcctacaatatttctgttgacctttctttattcattcacctggaaaactcctactcttctttccagacacaagtcaaatgttacctttcctgtgtagccatttccaaccactccacgaaaataatgtggtcctttctctgcacttccacagctcatttcttatgctctcaatacaatgtattgtaactatttgttcacttatgtatcttctccactagatctccactggattcactagagcacttttaaaggaatattgttcatttttctttctatcctcagcatttggcacaggtcatagaacataatgaagctccaacaaatgttgaatgaaataatgaatgtgcgaatatttttaaagttcctagaagtaaatatggattttagatttttataagatcttgcatcacaaaaaaagcattgagtactttgcctttctggttttatttttacaagctaaccttcctttaaagcttaaaaaa

SEQ ID NO: 222676 - DNA, 319 bp, Homo sapiens
ggcacatgcctgtagtcctagctacttgggaggctgagatgagaggatcccttgagctccaggagttcaaggtggcagtgagctatgatcatgccatcacactccagcctcagtgaccctgtctcaaaaaaaaaaaaaaaaattggcttctacatttagtatctctatattcattttaattattttctcacatagcgtgactttcctgcctctcccccttccactcctgtcaccccagaatctctcagtggtaggagacagaaagggaacattcctctttgttatttcacccatctttccttctcatgcaccctacagc

SEQ ID NO: 222677 - DNA, 496 bp, Homo sapiens
aactcctgacctcaggtgatccgcccgcctcagcctcccaaagtgctgggattacaggcataagccaccatgcccggctagatacgattcttgttcagtaacttagaataactttttttttaaaaagggtgtttgtgggtgaattatgtttgagagacagagtcttacttgttatccaggctgttctccaactcctggactcaggtgattctcctgccgcagcctcctgagtagctgggattacaggtatgagtcaccatgcccagtcaggtgaaaggttttaatgggcgaaagcattggaataaatgtgactactacataccctcagttatgtgttgctattaagtctggattggtgccaatcttgtctccttcctttgccttcgcatctttataataaacttttagcaactgcctgttaatacaggtggggtagggctgaggggaaacttttttgtcttttatctcagaagcagtagaatggactaataaataa

SEQ ID NO: 222678 - DNA, 391 bp, Homo sapiens
tggaatctgaaattactttcagatttttttttaaataatgcaagtagatcaaatgttgatcacaagcatttcaatctttcaaaatgtattggaaaattaaatgaaaagtggagtttggtacaaacaatgccccagggcaaaaaacaactaacactagattttccagtccagccataacacaaatcaatttgagcacacttctatggccagactgccagattgttatgactgctaattcactcaatcaaagagtgcattagcacacccggcacaaatagccttaacaatagagtgcatttctcaacaattccaagatatatcacaatggagaggtaaagaggaagatcatttttatatctacatatttactaatggacctgtttccttagga

SEQ ID NO: 222679 - DNA, 816 bp, Homo sapiens
accaagtatggcagccaagagagtgctggcattaacccttccctaaccccagacagcacagctcaaagctgcaaaagagacttcttccttctgcttgaggagaagagagggaagagtagggaggactttgtcctgcatcttggttactggctcagccacaacaaggtatctctacaacgctgcatgaatcacagcattcctgggcttggggtgccccctaaagcagaaactgcttagttcacaacacccaagttctttcaaatatctagaaagttttcccaagaagaacagctacaaataatatgaggcggtaaagactacgataaatacctaactcttcaatatccagacactgaagaacatctactagaattaacatcatccatgaaacatgacctcaccaaatctactaaataaggcaccaaggaccaatcctggagaaacagagatatgtgacctttcagacagagaattcaaaatagttgtgttgaggaaagttgaagacattcaagacaacacagagaagaaattcagaattctatccgataaattaaacgaagatattgaaataattaaaaagaatgaagcagcaattctgaaccagtgtatttgaaaatatactgtcagaggaaacaaacaaacaaaaaagacaaaaaaaagtacatctgtacgatctagaaaatagcctcaaaaggtaaaaatctaagagttattgaaggtctttaatagtatatatggaaagatacagggatagaaaatttattcagaggaataagagaacttctgaaacttagagaaaaatatcaatatccaatt

SEQ ID NO: 222680 - DNA, 228 bp, Homo sapiens
ggactatgtctgatatgagtggcagtatgtatgatatgagttggagaaacaaacaaaaaagacaaaaaaaagtacatctgtacgatctagaaaatagcctcaaaaggtaaaaatctaagagttattgaaggtctttaatagtatatatggaaagatacagggatagaaaatttattcagaggaataagagaacttctgaaacttagagaaaaatatcaatatccaatt

SEQ ID NO: 222681 - DNA, 357 bp, Homo sapiens
caatcctcacactcaaacctcccaagtagctaggatcacaggtgtatgccaccaagcctggccaattttctttgttttttgtaaaaacagggtctccctatgttgcccagactggtctcaatctcctgggctcaagtgatcctcctgccttggcctcccaaaatgctgggattacaggcatgcttcatttcttcattgtgcttttctcaaactgaaatcaccccgtttactttgttattgtctgtatgcccaatacctccaaaagtgtttggcacagagaaggcactcaatgcactttcccagaatgaaggagtggccctaaaagcattttttgtttgtttgtttttctttgagaca

SEQ ID NO: 222682 - DNA, 483 bp, Homo sapiens
caatcctcacactcaaacctcccaagtagctaggatcacaggtgtatgccaccaagcctggccaattttctttgttttttgtaaaaacagggtctccctatgttgcccagactggtctcaatctcctgggctcaagtgatcctcctgccttggcctcccaaaatgctgggattacaggcatgcttcatttcttcattgtgcttttctcaaactgaaatcaccccgtttactttgttattgtctgtatgcccaatacctccaaaagtgtttggcacagagaaggcatcactgcaacttccgcctcccgagttcaagcaattctcctgcctcagtctcctgagtagctgggattacaggcatgagccaccgcgtccggcctaaatgtcacttagtacctttgatataaagagaaaatgtgtgaaagatttagtttttagttttttggtttgtttgtttgtttgtttgttttgagtgtgattctgg

SEQ ID NO: 222683 - DNA, 1883 bp, Homo sapiens
  misc_feature (1329)..(1329): n is a, c, g, or t
ttcattctgtcatcagatacctccaaatttagaacaatatctatccgtagccattggttttcggatatgctttaccctgggaacgtgcgtaaaatacatttccgtgtttggctatttctttcccagctgcatagagggtgtcaccattattttagataatagccatggccggtgcccactttaatcacttttccaatcacttttcactgattgcttctaaggcacttgatttcagatgtcactttttgctgaaatacctggataactgtttcagggggccttgtggactaccgagaagtttgcctccaggggttggtaaacttctaaaagtgccaagtcatgaatattttatgctttgcaggcccaagaagcaaaagtaagactattatgtagatacccataaaacgatttaaagtgaaatcatttaaaaatatgaaaaccattcttcacttgcaggctacgaacaagcagcctcctgtttgactggggttgctcagcgagccttctggcttctccggcacacacacattcaggtctccatctatgcaaatggagacctccttcttcttctcaccactgtaataaggagaaaacagacagtggaaggtttgtagaacctcatgattgactatagaggctttcagcatttttcctttactattaaatgggacactgtactaaaaaaaattctattgtttctatatttgttcatttattgattggatgttcattcatccaacaaatgtttattgaacaggtcctgtgtctccactgttccaggcacgggggatacctaatgaggaaaataagacatctctgccctctggagtttttagtttacatatgaacaagtataatatgtaggcttttggatgacaggtatcatatagaggagccagggaaggggacaggatggacaggggaagagggttgttagttttacatgtgatggaaagggagagtgatcagaaataaggagcagaatcctgtgtgttgcagatgtctgggcaggcgcgctccggaaaaggaagaggtggcgcagaggccctgacctgggaatgtgtgactagggcggaggctggagacccatggcagatgaagccaggccttgagatgactgtaaggacttggaagggagagccagtgggatttactgaggggttgagtatggggtgaaagagagaaagagtagtctaggacgaccccagtggttttctcctgagcatcggaaggttgactttcgaagcaggagagcttcagtggcacagattgtgggggatgattggggctgtgtgggtacagagtgagtttgaggtgcctgtcagaganctacaaggaggtggccattaggccattaaaatctggagtataaaaatctggagttcagaaaagaagtgtaggcttttttgagagttgttgacataaagatggtgtttaaagctatgagactgggtgagataccagcaagtaagtcagagaagagcaggggccaaagcctgagccccagagcactccagcattaggaggtggaggagatgagggagcaccagcagaaacctcgaaagaccttccaggaaggtagggggaaagcaggagactggtgttcagaagccaactgcagaaagtgttcctgaggaggaggcagagagggggcttcggtgacacatgatgctgactgggtcaaatcccttgaggaccaagacttggccttggcattcagtaacatagtggtcactggagaccttgacaagaggtgtcagtggggccaggcgcagtgcctcatgcctgtaatcccagcactttgggaggccgaggcgggcggatcacctaaggtcgggagtttgagaccagcttgaccaacatggagaaaccctgtctttagt

SEQ ID NO: 222684 - DNA, 1738 bp, Homo sapiens
ttatatacagaatagagctttattcctatgtgcccatctctgagaaatgtgttagcattcccaagtattttacactggcaatctggctacttaagacaaacaaattcaaacaacatttttatattttgactgacaccctcagctcctaaatttaagagaaataatggtacttaactattttcaactatagtcttcagtgattgaaaatgccttcattttaattctgtgactcctgatataaattaagaaaaacaatgcagttgcaagggcctgcacaacactgaaaataaaccaaaaattaaaaatggcacttcccaaaggaattaacaaacgtggagtcatggtgcttgcaagttccataactgaaagcattttgtttctgatttccctttataacatgtatttgtttattgaagcaattgtacaactaatggcacattgaattactttgtatgaagtgttttatattatactatttattttagcattcgttctttttcttcaccagctctatattacagtagcaaaagaacacttagttttaaaaaatgctgaaaggggttcaccacccacccaatcgatgaatggacttttgaagttgcttgtcagcaaattgtggatattttacaaaagcaaatgaactgtgacaatccacaactcccacagatgtgaattcagaaatgcatctgaaactccggtatgcctgacaatctattctttaagtttcattaacaaagtggcatccaatcctttcacttacaattccttgcaggaatgtattgtctagaggctgtctagtagtgattaagagagggtttttgttttgttttatttgtttactgtattaggtgaggaatgccatatttcttgtcagccaacagtacttgtctgagacagaaatttaaaaaaagaaaaagaaacctaactaattaaaatttctgtgcactttgcttccctgaccatattgattttatttgcttaaattgaaacaatacgctggatttgaccagattttgaccccttgaaagaagaaaagccctatatagtacatgtttctttgggttattctagtactgtttccttatttgttctgcaaatttcaaatcattttttgtgtgcattattttacatctgctgaaactaaatgtgttattattgcactcattaaaaatgaaacaatccatttctcttggaaaaaaatgacaagctttagatgatgaaagcttaaattatccatcacttgcaaaatgaattcatataatttgtgaacattattaatgtaaatgagacatttctgcttagattttttttattttgatgggatcattatatggttgatcatatgtgtgtaggaagctgctgtacaattaacttggagatctgaaaatgctttttgtcctcattgttgcagtttcaattgtaatccattgcatctcattttcttgggtgttggcactgtaatatattaaaaaaaaattcagtgctcagtattgtaacaactgtccctactgaatattccttttcataaatacttgctaccacagggaaattaagttttcatatagaataactagtttcagtagtaaccattgaagaattaaaaatgtggttcaaggcagatatttttatgaaaagttttctctattgtaaaatttgttgtatatggctatgctactatcatggaataagaaaagaacaagcatacctcaaataaaaaaaaattctgagttaaaaaaat

SEQ ID NO: 222685 - DNA, 812 bp, Homo sapiens
gtggtgctcatgcctgtaatcctagcactttgggaggccgaggtgggtggatcacctgaggtcaggatttcaagaccagcctgaccaacatggtgaaaccctgtctctactaaaatacaaaaactagctgggcatgggcgcaggtgcctgtaatcccagctactcaggaggctgaggcaggagaacccaggagttggaggttgcagtgagctaagatcacaccattgcactccagcctgggcaacaagagcaaaactccatctcaaaaaaagaaaagaaaaaaaattagccaagcgtggtgccacatgcctatagtcccagctacttgggaggctgaggtggaaggatcacttgagcccaggaggtcaaggctacagagctatgattgccactgcactcaagcctgggtgacagagtgtgacgctgtgtcacacacacacacacaaatcacttgaagtaattgtgtggttgtgtcaccaattttatatacacttagattcacttttattgctttttttcttaatggtttaattgtattttaattatataacacatttacatggttccgacatcaaaactataaataaagacagagaagtgtgtccatttctgccctctcctccactctctccccatcccctaggcgtagtcatttctttattagtccttactttatttttcaaagttacgtaataaatgtctatgtttctaagctatctttagatttgtaaaagggctaaaatgttacttttaaacatgtttggtttattcaaatttgtttataaatctctcctttgtacccctggctacca

SEQ ID NO: 222686 - DNA, 257 bp, Homo sapiens
agggctggagccaacagctctttgggcccagggcagttctttctgtggctgcggcaccttcccgctccctgctccccgctaagatgaggccgccccattgtttctccggggcagtctcccttccgtctgccctatgccagagactgagcgctggcgaccgtgaactgtgtgtggtgccgctgcacgccctcctgggtccttcagggccagtccactcaccaggcaccgtgtggcagggaaggagccgagggcgacac

SEQ ID NO: 222687 - DNA, 864 bp, Homo sapiens
cagtggtgcaatctgggctcactgcaacctctgcctcccgggttcaagcgattctcctgcctcagcctcctgactagctggggctacaggcatgtgccaccacggctggataattttttgtatttttagtagagacggggtttcaccatgttagccaggatggtctcaatctcctgacctcgtgatctgtccgcctcgccctcccaaagtgctgggattacaggcatgagccaccgcgcctggccaagaaactcttaaattgcagatgtacactaggtgtgtgctgtgtcctgggtaatctcagactaagaaggtggacgccagattggaaggtctggaagaggccacgctgcagggaacccggtgtgcaatgagttaaaactggttttccaagacctctgagaatggggaagtaagtgatggcataaagccgcagggcctgttcatttgtcgggggtgggtagagaggggggactatcaccatctccagggcggcctgctgtgctgggcagcctgtgtgcagttccctgggtttaccagcactgctccagggcttggcctcaggctactggcctctgttaagcagagtttcccggagtaaactgaacctggggactctggctcagcagagctctgctacggcctaagagatgctagctctgttttcccaacttaatgaaagggcacttgacaagacagagcccaaagacagccctctcaagacccaggaggctcccacccaagagagctcagccctgctgatcaagactgggagactggtcagaccaatccatactggttggatccagattccaaatgaactgatgggaaggtgctactgggtgtgtcacaaaccatagtccc

SEQ ID NO: 222688 - DNA, 551 bp, Homo sapiens
gtgccgtggctatgtgaagagtgagaaaaatcaatttccactgtccacggaaggttgtttgatttattactgttggaagaagaaattctttatctcccaccccctgttggagagcactgttttacagtctgctgttagagaggctctataaaagcagctatatttgtgcaaattttggtattttgataaccttccttgactattcagaggacattgaacattcccaatttttataaccctcatttgtttttgattaagcaattataggcactaaaagacagtctgcaagagagtgtggccagcgtacctgcaggattatttcatgccataggaagcatcagacggctttaatatttcatgaccactggcaggaggaaggaggggtttgctaggaaagagcagaggatgcgatctggagtcagacggggattgggatcccaactgccattggagaacaggtcggtgtccatgagcctcagtttccttatctgaacaatgagccaccacaatgtcctctcttgactttagctttgtgacttgccttggcaaat

SEQ ID NO: 222689 - DNA, 551 bp, Homo sapiens
gtgccgtggctatgtgaagagtgagaaaaatcaatttccactgtccacggaaggttgtttgatttattactgttggaagaagaaattctttatctcccaccccctgttggagagcactgttttacagtctgctgttagagaggctctataaaagcagctatatttgtgcaaattttggtattttgataaccttccttgactattcagaggacattgaacattcccaatttttataaccctcatttgtttttgattaagcaattataggcactaaaagacagtctgcaagagagtgtggccagcgtacctgcaggattatttcatgccataggaagcatcagacggctttaatatttcatgaccactggcaggaggaaggaggggtttgctaggaaagagcagaggatgcgatctggagtcagacggggattgggatcccaactgccattggagaacaggtcggtgtccatgagcctcagtttccttatctgaacaatgagtatgtgtagcagacaataccgtccagatcctcttagatcccttcaagcctt

SEQ ID NO: 222690 - DNA, 407 bp, Homo sapiens
aactgattccatcattgcttttgccataagggcccaagcaagtcaggctcccaaacctgctgaggctattgttaatgtcagcagaatcgcgttggagatgccaccctcccatacccctggggcagtggcctatctcctgttttaccttggagcccagccctgtccctacccctgaaaagaaactttcccctttcccgttttccctgcaaggcatagctcataaataatcatttcctgctgcataaccattcgaaatggaatccctatgcttgactatagtggggaaaatttgtttagcaaggggttttcattatataatatgtatgtgacatctggtaataggaactgcattatatttattgttttatctctaagaaaacattgaaataaaaggaaaatgatcaggg

SEQ ID NO: 222691 - DNA, 464 bp, Homo sapiens
atttgtttccctcatagttaaaatgcggccaaaattttctctcctgcttgcattatatagttgttaggataaaatgtgatcatgtatacggatttgaatattaacaccacttcttgcaagccatgtaacttttggtaaggttaagtttctttttgcctgcttcctcatccttaaaatgggataatactggtagctacctcaggggttttgtgaaagcaaatgagttaattcacaaaaattgtttttcagaaacattagtctcttattacttcataaactttaagtagtaacagaccaatgtttctaaaaaacagatgccaagatgaaaactagaaataaagacactgttctaatacatagaacaatgcctgacagtcctgatatattaactttttaggtgaatgtttgaaggttctgtgacttagtatatttttagtatactgtattttcgaaatagcatattt

SEQ ID NO: 222692 - DNA, 438 bp, Homo sapiens
gcacgagcatatgtgcataaacgatctctctgtagagtaaataagacttattgggcaataagaattttaactggcaaagcacatttccccccagtttttcaactaaagaccattttattgcactttttttacatagtattttagagaagaggagggggactcaaattttaaggatggttcaacaacaacaaaaaacagatggttctgaagtctcctgtgttctggtgaagccggtggtatagagtggactggtgcgggaacacgtggccccggtgccaccagctggtcacagtggggtcacagtgtggtcactagctgtctgacgcatgaccactggggcgtgccctggatggagtcaccctgaggatgagatgggatgacttacagggaagcgtttggaaaactgcagtggattgaattaaaatgaatgagagcatg

SEQ ID NO: 222693 - DNA, 447 bp, Homo sapiens
agtttggatgggaaacaagttagactttaaatttatcatatttctaattcacaccaccaagtaataaatacatcaatcttcattatgtgatgggaaaaaagtagagtcagagttcttttcaaaattccttaaattgttcagaagtacaaacaatattttacttttttgctagaagccagaaaaatccttacaatcattcagacattcttttaacgtgtatgtcctatttcagactttatcagcttcattgggatgaaggattcccagtgaagctgtacatatgatgtgaatctgctctgtgccatctagttccaaaatgcgtggtgtactctggcacacctaagacaaaagaagcctattggccagaatgatcacattggctgctctgcctatggagaagccatttattcctttactttcttaataaagttgctttcactttactct

SEQ ID NO: 222694 - DNA, 511 bp, Homo sapiens
aatatttcacataataagcatcaggaatgagaatggcttcagatatctcaacaacatcatcacaatctatatgtagccaaattattacttgagtttatgggtgaaataaagacattttacacatgcaatttctcacaaaatttatctcttatgtaccctttctcaggttgtgttccaccagaacaaaaggataaatcaagcgaaagacagacatgggatacaggaaataagagatctaacatgggagagaagcaacaggaatacagggatgacagaactggagatcccaggaatgacaactttgaagggcaaccagtctagtgggaataggactgaaggtttcaggagagaccgtcagaaaaatgacactggtagaataccaatacacctgaatgtcctaagaggaaatttagatggctggtgaaacattcaaggatgaataactgataaatacagagaaagttaaataaacagaacactacaagaaaacaaagagttgcacagaaaaaga

SEQ ID NO: 222695 - DNA, 602 bp, Homo sapiens
tgctaatcatttgatatacatgtttggtaaatttctcattaagtaacgtggagattataaataatacttgttggtaattagtttgtaagctcaacaactatggttatacacatgcaaagcatgattcatcactaagttgaatttttgtacataactcattcgttcaacagtagttcagtgtgtcactggtatgttagagtcctaggcttggtgctttggacatctagaaacagtagatgaaacaaataggtaaagtgccaggactgggaaaatacaaggcacttggtcaagtacgatttatgatttttacttatgccaaaatgaagcttgtagtttacaggcgaagatatttttcaatttcagaaatatgaacaaaaatggaagagatgacatttcagctgagaaggctataaaatatgagtagaattcagatacagacaaaggagataaaaatagcattccaaaggctgggcacagtggctcatgcctattatcccagcactttgggaagccaagaccggtggatcacttggggccaggagtttgagaacagcctggccaacatgactaaaacccatctctactacaaatacaaacatttt

SEQ ID NO: 222696 - DNA, 490 bp, Homo sapiens
ctgctccatttcaggaagcgtagctaacaagaatgctggtttatgaatttacacggagaggttgttcatggtcctttatttgagaatagtagtaagtggacgtcagagagtcatcttgccccaggggtacgcccctgtattttgatgggaatatttcagtagctcctaactggtccactcatgttgcctggatgttccatgctccttcacaaagctgtccttgctaagttgctaactagaaaacccttcctgcctaccagctagtcaacaaactcctacttccccatcaaaacccagctaatatgtcccttctgttttcttttcaacaacaccatttatagatcctccaactgagcctttttaataacactagtaatgttatcatttattgagctcccattatctgctaggcaattttaagtattgatatacttgtaccttttaatgttcatggtaattatgcaatacaagtataactatttacatttct

SEQ ID NO: 222697 - DNA, 412 bp, Homo sapiens
atttttctttaggtaattggggtcttattggtccacaggcagccctttattcacttctaaggcataaacgtttttccattatcattaaaaatgtcaaacacgctgaggcaggagaatggcatgaacccgggaggcggagcttgcagtgagccaatatcgcgccactgcactccagcctgggcgacagagcaagactccgtctcaaaaaaaaaaaaaaaaatgtcaaacatggccgggcacagtggctcacacctgtaaccccaactgagatagggtatggtggcacacacctgtaatcccagctacttgggaggctgaagcaggagaatcgcttgaacctgggagcagaagttatagtgagctgaaattatgccgctgcactccaacctcagcgacagagtgagactatctc

SEQ ID NO: 222698 - DNA, 376 bp, Homo sapiens
tgtatcataaaatgtatccatcataattgtataatgtgatgacttttactgaaaagaattgtacaactgtgatcacagtcaaggctatgaaattctggtgacacccaaaattccttcatgaacctttacaggcataccctatatctaccatgagacccaagtgaccactgatgttctttgtgtctttatattgttgcctttgctactaataccatgtaaatggaatgaaataaaatgtagaattttacatctggctattttcacttagcataacaaatttgaggtccatctgtgttgcagcatgtatcaatagtttgtttcttttcattgctgaatagtgttgcgttgtacggatattccacgttttgtttatcct

SEQ ID NO: 222699 - DNA, 328 bp, Homo sapiens
tacatggctgtaatactgccacacacctcaagcaatctgcacaaagactttctgtgcttcgtaaacataccggttcaatgacatcccttttcacactactcacataagaaatatctccaagaaaatgtcaagtggttataatgtctgccccttttggtcatgctactctgattttattttaaaaaacagctctatcgcattatgaagaaacattaaagcacatctgcaggttatatatttcggcttgtattttcatttagaatcatcatatccacgtaattccagaatggtaaaaataatgacaactataattcctttcatttggcaa

SEQ ID NO: 222700 - DNA, 713 bp, Homo sapiens
ccaggtgaagtgttgggtatttggtgtgcggaagaccggaaagaactggatccagcagaggagaaatacttcaagaggatgctctgggctgggactcagctgggttggagccctggccccaatatatagagcaggacattggttactcatgtcaaggatggactcagtcttcatctgtaaaacaagggggctaggcaaggccttcccaaagcagtctcaagggatgtgaagagttgtgaaaagactaaagtttaagcagagttaagtaaatttctcaccgcctgctgggacttgtcagtgtgtttcaaaagctgacgtgcattgtgaatctctgagaggagaattgctgggcagcaatttcctgagctgagtgaatcacagatctcagaactcttcagcctgctctcattgcaaagttgtgtcctccatctgctgttctgtagaatgtttgggaaaggctgctctgtagttttccttccagctctgacattctaaaattctaagttggtaaaaaggctacaaaagcctggaaagccagagatgtcaaagagaggtcagagatctggttgtcgtacttgtctaacaaggttgcacgtggtgaggatttagaatgatgctctacttctaggtctaggggaacagatggaacagaagagtgggagaaaaatcaaaacaaaataagtataaagttaagtcgatgaaggggaagagaa

SEQ ID NO: 222701 - DNA, 433 bp, Homo sapiens
gacatcttcatgttctcttcctgccttttcagctccctaataacaactttatacttgtttaacaattcttcgtattaaattttttccattccagtaactcatgtgacatctatctcttgattatacactgactgatgccaggaggagaaaatagtatttcagtttgacttgaaggaagggtagaatttcagtaagtggcaggaaatttcacataggatgagtgtcagcatgagtaaaggtagcaaagatgaggaagtatggtgtatatttgggaaacattttgtgttctaggcttttttgaagcacaaagtacatgttacaaaaaaagactatagagaggttggggtagacactaatttggaagaccttgaactctaggctaggaaatttggatttgattgataacaaatgattttttttaaaaaaatgaaat

SEQ ID NO: 222702 - DNA, 600 bp, Homo sapiens
catattcagggggctaggcgcagtggctcacgcctataatcttagctctttgggaagctgaggcaggcagatcacctgaggtcaggagtttgagaccagtctggccaacacagtgaaaccctgtctctatgaaaaatacaaaaattatctgggtgtggtggtgcacacctgtaaatccagctactcgggaagctgaggcatgagaatcacatgaacctggctgggaggcggacgttgcagcgagccgagattgcgccattgtactccaaactgggagacagaatgagactgtctcaaaaaaaaaaaaaaagacccctcatattcaaataaagtactgaggtactggggttaggactccaacagatgaattctggggggacataattaaacctttaacatcacctgatcccatggaatatatttagagttgatgtgtttgtctccccactagagtgtaagccccatgaggaagagaccactgctctattccccgtgccaagaatagtttctggtacagagaatatgctcagaaaatactttttttttttttgagacagttccgctcttgttgcccaggctggatcttggctcactgcaacc

SEQ ID NO: 222703 - DNA, 379 bp, Homo sapiens
gaacatctcttaggaagagtccagttaacctttcctcctgatataaagagcacaatgtgaaagagacagctctttacccctctccatctctgaaggaatttgtgggacgccactgtcccaagattaggaaagcaaacacaccaaagtttgagataatctgctagaaaactgttcagatttctggccgcctggtaatgcagaatactccggcaagaggataacacttgtccttgttaatgggaaatacctggagacagtgagttttttttttaatttgagggaaagtgttgtcatttttgccacctgctactcagagatgggattttgtcagattttggttaagtaataaaaatcttaagttttctatgacagttacata

SEQ ID NO: 222704 - DNA, 498 bp, Homo sapiens
accctggctggtcacgccactacacgccatcagaacacaggagccatactggccgccctgctcagcctcagcctctgcattcagccacctggtcctgtgggtcctaccacgtggacgctctctgacacctgcccttctgcattcctgctgcccctgcctatgtgcaaacattcatctcttttctgttttattgctacagttgcccaacagctctttctacctacgttctcaccttccccctcctccctattctactccattgccagagttacatggctggagaaagaacctcaaatgtagagtggcatgaatctcactcctcagttcatgactgccatcatcatcatcaccatcatcaaacgtgtcctttgattttttttacctgatttcctctatcattctaaccacccttccttcccacacacataagctatagccacttcaatgtgtttaataaatgtccttagatatggatggatccgcgaagaacatgcagca

SEQ ID NO: 222705 - DNA, 430 bp, Homo sapiens
gcacgaggtggagagaggtcagggatactgctaaacacctacagtgaacaagacaaccccaaagaattatctgcccaaaatatcagtagtgctgaggatgagaaactctgatctagagatcgagaatcagaaaagaaggtagaggcccggcgaggtggcttatgcctgtaatcccagcactttgggaggcagaggtgggtggatcaccctgagttcaggagttggagaccagcctggtcaacatggtgagaccctgtctcacctaaaaatacaaaaattagccgggcatggggtggcacacacttgtaatcccagctattcaggaggctgatgcgggagaatcatttgaacccaggaggcggaggtagcagtgagctgagatcgtgccactgcattccagcctgggcttcagagtgagactcttgtctca

SEQ ID NO: 222706 - DNA, 333 bp, Homo sapiens
ccaaatcatcttcaattaatacatcgcttattttttccaagttgctcaaaattctgagcacattctcatttacatctgtatcgagttagtgttaggcatcatcatctccactttgcagatgggtgcctaaggcggggatgaatggacttttgtaagtgcagagctggagcaaagtttaggtcacagctttgccaagtcattgttttgttttcctgggagtaaaccggagatttagtatggacctggctggtttaattattgttttgggaaaaaaatctaaaactcattccaacatgtcttgaaatgaattataatgttgactctaaagtctca

SEQ ID NO: 222707 - DNA, 336 bp, Homo sapiens
acatgacataattgctttttaaaaactgaaaacctttggtctgtaattacttctttgatttccttatcattgacgtaattgttagcatttctgaattgattttgttcttttcagaagtttctgagcatttctaatttgatgtttaagaaggcatttgtagataaatcttggaaggtacaggcaaaatgtgcaaagctctagctgtgggtgagtgacccggaacaaagcctggagtcagaatttgaatgagaaggaaactacttactggagagttttcaatcctggggtaaattatgtctatttctggtgttgtttatcctgttaactcagtagaaa

SEQ ID NO: 222708 - DNA, 616 bp, Homo sapiens
ctagatcgatttctttacattcccttattatctgccctcaccctttgccagggtaagaacagctgccttcagctcattcttccctgaagctttgcaaaacctcctggccttccaagaaggtttgcctttttccctacaatttttataacttttcctaccagcctgactgatctcctacatctcccccttttctgatttttgcatcaggttttgttgattgaagagtatagatgtgtgcagcaacaggtttgtcaggtgccacggttataactcatgttctggctttgcatcctagaattagtaaataacataagacaaacatgagtataatcagtaacattcttttctaatcaaggagtgacatgtagtattacttggcacctcagttcaatgtgtgccgttactaaggaaccccccactaggggtatgttaacccctttcagctaagcagttatgttattagagactgcccaagtaacagggtggaagaaaggcagatctaagagatgagcctaatagagtgtagcaggtgcaggttgcaggcagagcgagagcataaaaaggataaataccctatgagagttgtgatgtacaacagagagtatagccaagggac

SEQ ID NO: 222709 - DNA, 550 bp, Homo sapiens
atggctttggaggcagttaaatctgaataggacttgaagctcacttcttccacttaacatatgaccttaggaaagtttcttctcctatctgagcccaagtttactcacttgcagaatggaatgggaacacacataggtaaatcacagggctatcacaaacatgtaaacattttatgtgttaagttccattctgtgggtcagatcgcatctagagcaaataccctttaggatggatggccacaaactagagcatatccaaaagagagcaagtacaactatgaaggtttgagacctctgaactgtgatgggtagaaagaactgaaagcatctgatgaggaaaaaaaagaaaacttgggaggatatgatagctgtcttcacatcaaataaccagttccaatcagtgtatcttcaaggataagagcctttagttgagcatacagaaaagcatggcttataaacagacctgtctaaaacagaatgagttgccctatgaaagagctgttcattgtttaactagatgtagttatgcaatgtttggtaatactgatca

SEQ ID NO: 222710 - DNA, 505 bp, Homo sapiens
cagggagctgagtgcgaggagacccgggacaccgctgcactggccccgcacgcgcgtctcagtggcgggtgtgctcctgcggtgttgggacgcatggagcccgtgctgtacgaaacagtcgtagaaaactacaaacaggctacacgagggggaggcctcgagctgcaaagtggtggctgtggaccacgttaaaccgtctctacccggcctgtgcgcttggcctggcagcctgagctcacaatcgtccgaccacgtccactggacgccctcggtgactgctgggcacatacgggggtcatcctatcaaaagttacggtgaagtcagggtgggtggcgagtccctgcaaggtcgcccctctgtgccaacacagcctgatggcttcttgtttcaggaaacatccagaattacaactggccattgagttattacatatcaattgaacaaggtagttttaaaatgaaagaaaatcttgcaacatgaataaagagatagactctttgaatc

SEQ ID NO: 222711 - DNA, 497 bp, Homo sapiens
gtttttttttttgctccaaagttcaatctgggataccatattatatttagtcattgtgtctccttagtctcctcctacctaggatggtttcttggcctttcctcatttttcaaggccttaaagagtaccagtcaggtattttgtagaatgtccctcaatttcagcttgtctgatatttttctcataattcaactggggttaaggatttgggggaagatacaacagaggtgacaagcttttctcattgcatcatatcaaggggtacatgatagcagcatgactcactactgctaatactaaccttgatcacttcaagtggtgtccgccaggtttctccactgtagagctactgttttccccttcccatcctctgtaaggagcaagtcactacatccagaccacactcaagggaaaatgatagaagtaccacctcctggccaggcgcggtggatatgcattgtataatgctttgtgtattcaaggaaacttgtgcacca

SEQ ID NO: 222712 - DNA, 451 bp, Homo sapiens
agccagcgcgcccggccccctttaatatttttagacctcaggttaactaaaacctcagaaaacaaaaccacggataagaggggatgattgtaatgtcacgggttatttggggttgcctctctactgtatgggtggcctccaaactgggctgaccatcaggaccacagggcagcttatcttatttttcatagtagctttaaagctaactaaatatggccttagaaggactccgtacttctttatttgagtcctcgtggacgaactgcaacctagcttaatagatagacaagattgaaaacctaatttaggagtatgcacctgtaacaatagctaagtcaggaccacagggcagtttatcttatttttcttagtcgcgttaaagcgaactaaatatggccttagaaagactctgtacttctttatttgagtcctcgtggacgaactgcaacct

SEQ ID NO: 222713 - DNA, 254 bp, Homo sapiens
  misc_feature (224)..(224): n is a, c, g, or t
acatcaattatacctcaataaaacttaaaaagaaaaactagacaggaaaaaactaaaacttttttttccaagtaaaagattaggaaaaacttggagcccacaattaaaattataagacatcacattatttcggatttccagaattgttttttttttttttttttttttataaacagatttctctctgtgtttgcccaggcgtggagttgctagtggttcgactntcagcttcacctccaacctctccaccctcc

SEQ ID NO: 222714 - DNA, 525 bp, Homo sapiens
attacccacattttaatttcattctaatgactagttcggttctgtcacaacaaactaactctcagctgttattctcaactaaaccttctttcaagattaagaatcaaatattcaagaagcagtaattttactcaatcctcaacttcttaatgatatgaaagagtttcaaagacatactgcatggtgaaactttccctaataagggaaatatttttggtgaacttattgagtttctgcctcccctatcagattataaactccccaagatgaaatcttgtatctagagcaaaagccctggccccacctcctcttctttctaccactctgtcaacgatcttctaaatctgttgaagctgacatgtaaagctatatatcattttagcagctctgaggtaaggcatttgtttagtgtagtgggcagaacacaaatcgggcagttaagttcacctctctgtacctcagttttttttgtaagctaaatggggataataaaatgtacctgacagagcggatatgccagggagg

SEQ ID NO: 222715 - DNA, 466 bp, Homo sapiens
cctttcacccattttgttttaccaaattgtaaataaatcataacctggtaccatcacctagacagaaattttgtggaatatctacactataaataatggaacccctgtaaagtagtaactatttcaaagttaggatctcttggctttggcaaattttatttttgtgaaaattaaagttgggcattggcaacccaataccttttagtgttccactagaacaaaattaaatattaggccagtaatttgacgcagtggtatccaaacttttccatttcatgccctaaaaattagacactcacaacccccatcataggcatattcacttatttgtgtgttcatttttacgttgtaggtattactagactaacacatgtgttcatcataaatgattgtataatatatatattttaaatgataaaatataaataatgagaaagaataaagatgaaaatgatgttttattttg

SEQ ID NO: 222716 - DNA, 421 bp, Homo sapiens
atactctccggtgtcccttcactgccctctggcgtcccctcaccttctggtgtcctgtcaccaccctctgatgtcccttcattactctctggtgtcccctcattaccctctggtgtcccttcatctgctccatgtcctctactctttctgctagcaaagaccagcgactgcagcacgggggccacacctgggatggaccctggaggggcaagcatgtggttcctttgacactccacacagaaggcccatgcaaggccatgttcaaccagagggatggaagggggacactgaaccttctggcacagggtgggctctggtagggggcaagagcccaggagactgtgtggtttgtcctcagcctctcctgatgcttccagggcatgtccattttcatgtaaacttaagagacagtgtcaacagt

SEQ ID NO: 222717 - DNA, 416 bp, Homo sapiens
tgttttacttagtataaaacccaaactccttgtgtggccttagccctgaagttttttggcctctgcttccttctcatgccagcttcctgcttgcccattagtctccaaccacactggcatccttttggctctgtgagtgtgccaagctcatacctgctatagagccttaacactagctgttcgctctccaggaataacttttccccatcctgccatgactggctttttcttgtattcaggtctcagctcaaatgtcagttcatcagagagacctccaactaccaacttaagtggccccttcagtcactatctataacaggggtatccaatctttggcttccctgagccacatcggaagaagaattatcttgggccacacataaaatatactaacactaatgatagctgatgagctt

SEQ ID NO: 222718 - DNA, 363 bp, Homo sapiens
atgaggtaacaaaaatattaaggtaacttatccaatgtcacgcagctaataaatgttgagtcaggatttgaatggagcagtcgactttcagagtctctgctcatcacacagctctgtactttgtaagttgtgtatcaccatttttatttagactagaacagcactgcacagtaccactttctgtgatgatctgcacagtgcagtagcgtagccactagccacatttggctcttgaaatgtgcctggtgtaatggggagattgacttttttatttaattcagttttgattaacttggatctaaatatgaatcactgcatgtgttagtgtattatatgtgtaacaacagcttttttatcttaata

SEQ ID NO: 222719 - DNA, 717 bp, Homo sapiens
ctgtgttcttaatgaagacacctcttatataagaggcgtctggtgttgttctgttgtcaagatgaagtcaggtgtccagtaaccactgtttgcaaacttgtatcaggacatcttgaactaatttgctgttgccatgaatccttctccaatgtttgagccacccagtgggaataggaatgtcctggaacactctgtctccactttggtcatcttcagaaaagttatctttcctttagagaaactttgggggttgctgtgcacgccatgcaattttagagtagaaggcagccaggagggcgagactagtgaagggggcttcgtgagaaagtcgtgactttcctggcccttgaggacttggcaagtgggtggaaagagggaggacagtctagcaagaggggccccatcattcgaggtatggtgtccagcttggtacccatgcatgactgtgaggagacaggtctctggagtggagaacgggggtagaagcaatgggagaaagaaggttggtgcgggtcatgaggtcaggtgaggatttgattctggaggagggctcagtgggaaaattttggaggtcagaaatcttatggggagaaaagtatttgagggagcctagcctgtcatggtggatgtggaagggaggtcagtttagaaaggcagtggttggagcaatctaccccaatgagcttattggcattggcatgcaaaggcttttcagga

SEQ ID NO: 222720 - DNA, 477 bp, Homo sapiens
  misc_feature (468)..(468): n is a, c, g, or t
  misc_feature (471)..(471): n is a, c, g, or t
ctaattaaataggactctctggaaatgcatgttattaagtatacacgcaataaggtaatcgatttttgaatgttctaagtttcatatctgtattagtccattctcccactgctttaaagaactatctaaaactgggtaatttatgaataatagaggtttaatagactcagttccacaggcttaacaagaagcatgactgggagggctcaggaaacttacaatcatgacagaaggcaaagggcaagcaagcacatcttacatcttatcctagcggagtaggagagtgagagagagcacaaagggggaagtgccacgcactttcaaaccatcagatctcctgaaaactcactatcttattatttttttttaattttttgagacaagagtcttgctgtgtcgccaggctggagtgcagtgagctgagattgcaccattgcactccagcctgtgcaacaagagtgaaactcnatntcaaga

SEQ ID NO: 222721 - DNA, 382 bp, Homo sapiens
gtatgtaaaagcaaagcagcaatgctaagaggaaatgaaaaatgaaatgtgtttttcccttcataaccatataaaacaatttaaaaagcagttagctgcctagttaattatggaatgataaatttcagagtcaaatatggttctagaatttgccaattgtaattttcttccatttatgatgacatccaattagcattttataacatgtatagaaataaattacttaattttatgtaaaaaggtgtagtcttgagaagttgcttcctgatctatctcttctattttaattaagcactctccacctttaagatcctgggacttagattaagaaccaggagatatctctgctatagcatgaacattgtcatcaaacacaagccaa

SEQ ID NO: 222722 - DNA, 477 bp, Homo sapiens
ggtggagattactgaaaaagtatgggagaaaattatacattttgatagaaaatcgtaagagttgaatggtgtttgcccaaaaggtttgtccacccagaatctcacagtctgacctcaatcgtaataagcatctttgaagatgtaataaggtaataaagtgtgctcatcctctattacaataaattctaaatctaatgagtgtccttataagagatagaataacagaaagacacagaaaaagcggggaggcatgtgaagacagagtcagagagactggaaagacaaaaaccgctaagaattgctgacagcatggaatgggttttttctgggtctccagtggaaaccaatactgccaacacattcatttgtcttctggcctccagacctgtgagagaatcaatttctgttgctttaagtcatcaagtttgttgtaatttgttatgacaaccctggaaacctaatacaacaatgtgatgc

SEQ ID NO: 222723 - DNA, 449 bp, Homo sapiens
gccccagataccagccaaggaggctggaaggccaaccaagctccaaccactgggcgtcccatcgcagcgtggctttactgctaacgttggcattgctgtttgtgccaggggttctgttcaaaaccaagctcttagaagaatttggaggaaattatgactgcaaccatgtctttaagcagctaaccctggagagagaatggaccaagctaaacattaaccattgctgctggtaggcctctgacagcacaaggtggtgagcctgtctttcagaaaccagctagctgggttcaaaaccaagcccatcatgtagaagctatgtgaccttgaagaagttaattagactctctgaacctttggttctttatccaccaataaaaataatctcacctaccacccagggttgtaggtccaagtgtataatgtacaaatgaataaattaagacagtctc

SEQ ID NO: 222724 - DNA, 383 bp, Homo sapiens
agaagtctttatcaaccacagcagaatccacagttatatggcttctgggaatttccaggttttcaggtgctaagtgagggaggaagagggtatgaagcctcctggcacagagttgctggcaatgctctgccctgctggccctgctgccttcaccatcagccactcaggtatagaaaatgcagctacctcttaggagtccagagaggaggtctaacttaggactcaggccagtggctctaccatctaccagaacctgtgatcttggacaagtgattgaattctgtggatcctccatttcttcaaaatcgataaaatggggcaataatggtatttctctcttagagttgttatgagggttaaataaagtaatccatataaactat

SEQ ID NO: 222725 - DNA, 625 bp, Homo sapiens
gcacgagctgacatataaacacgttacttatggatcactttgagagaggaaacactattcagaagatttaaatcccagaatttaatccattgctttattgcaagtttacagaagacttgtcttcagttttatctgcagtagttgatctattgactttaaatgttgaaaacttatactaatgttgcttactgtccaaaattattcctgggagataaacattcagattttctacaataaccactgactggccccttagcagccattttaaatgtaaatttgatgatattgcccaaacatccccagtccagttcaactttcagatcctcaagcctaccatagtcctttgtgtttgatatttctttcttatccttaaatgtggtagctccatgagcacagggacctgtgttttgattcactgtctgcatacttcactttgcagaacatttttaaggtccatgcatgttgtagcatgtatcagaactagactccttttatggctaaatattccattgcctgcgtatagcatatttatccattcagttttcaatggacacttggggtgtttccaccttttggctcttacgaataatgctgcaataaatattgtcatataagtatctgttca

SEQ ID NO: 222726 - DNA, 540 bp, Homo sapiens
cactgagcacataatgctttttctaatgaaccatttgagagtgagatgctcctttactgttgattactttggtgcatttttgtagcattgacatgctcttatgtaaaaagagtataactattaaagcaagatattaatagtgatatatcaatcactaccatctgatcatcagaccccattcagattttgccaattctttcgataatgtctttcattgcaaaattctaacccaggatctgtgcatttgattgtcagggctctttactctcttcatgtggaatggcttcatagtctttccttttatggcttttatgcttttaaagattacatgccagttattttgtagagcatcccataattagagtttgtctaatgtttcttcctgattagatgtaggttatacatttttggcagcaatgtcacaaaagtgatgttttgttcttattgtattctgaattgatactcaattttggtttattccattattactgatgttaactttgatcacctgaaggtagtgactactagttttctccactg

SEQ ID NO: 222727 - DNA, 591 bp, Homo sapiens
ccagtgagtctgagtgctggcttgcctgcctataaaaggggacaacaattccttggaagattgttgtgtggcaccatagcagtggctaaagagccagacacacttggttgtgaatcctggttcttcccccttagttgtacaaccttgggtaggttacatcacctctttgaaccttagttttgccacctgtttaatggggataagtgttgttatgtgattgaagtcatacatgtgaaaaaatcttataaacagaaatactggcaaaacagaaggcagtatttccacagtcagtaaggagaacaggctgtgccgttgaagctctggcctgacctctgtttggatccctccttctctgggccagcatcaagttttttttctttttcttttttttacattttagagacggggtctcactatgttgccctggctggtttcaaactcctggccccaaactcctcccagctcagcctcctgagcagctgggattacaggtgtgagccaccatgcccagctccaacgtcaagttttgaagagttctttttatctcaggccctgatcccagggatcgaagtagcactggagagagaggaa

SEQ ID NO: 222728 - DNA, 368 bp, Homo sapiens
aaatgatatataatatataatattatatatataatggatatataatatataagatataagatataatatatatgtaatagatatacaatgttatatatataatagatctataatattatataatagatatataatatatgtacaatagatatataatatataatagatatataatatatatataatagatatataatattatatatataatagatatataatattatatatataatagatatataatattatatatataatagatatataatatataactttccatgtgattttcctcttaatttttttctagctgatccatatgaattcctcttattaagaaaaataaagcatccaggattcaatga

SEQ ID NO: 222729 - DNA, 469 bp, Homo sapiens
atatcatacagtaaaactctcaccaatgacagcgatgatgtagggtgaataattgagcatttgttaaacttctaccattgtgaaagtaacctattattttcctggttgtgcactgaaatgcctcaatcaccaacagaacaagtcagtaaaaaatgatacagttcattttgtattgctgtttttccgtggggacggtgtggtgtatcacatctctcaccccttgaactctactttaccaatactgtgctcaaaatctcttccctcattcattttgtaaaatgttttatatcttggtggcgattttttttttctggctgttaaaattaagcctgatatcatgacatggttttctgatttaggattactctatagaaaagaacagtatctggcaaaaagtatcatgtcaaaacaaaacaaaacaaaaaaaaagaaattggtagcagctgccctgaaatacatttctgtctct

SEQ ID NO: 222730 - DNA, 523 bp, Homo sapiens
cacacagttttgttagaaggattaaataaaataatcaatgttaagtgtttcccaccatgcctaggcacacagtaaacctgattatgttatgatcactggcaagagaagaaagaataggaatcctgactctgccacgaagtaatcttagccaagttatataatatttcttggtcccctactgctctatttatagtatggataatgtattcgctatcccccaatactattttaaagattagatgagaaaatttaaagcaaagaacttttaaacagtaaagaacaatactaatgtaaagttaaagtattttaagggctctctactttttaaaatactgatttttaactcaacatggtatttccacacaatggaataatatgcacccattaaagatggtgtgtatcagccaccgtgttggctcattcctgtaatctcagcactttaggaggccgaggcaggagcatcacttgaggccagaagtttcagaccagtgtgaacaacataatgagactccgtctctacaaa

SEQ ID NO: 222731 - DNA, 685 bp, Homo sapiens
cttaaacataaataaggtaaaacgaaatttaaaaaagaatctcagatgtgtgtaaaagttcagctactagaatgctcatccctattatttatgataaaagaaattggtctaaaagatgacagtattttcaaacaagtggaaaggaaagagacacattagactttaaggaggccatgccatccagaaagatttgtttagacaaggaacatcctttgtgtgtttgactcggggccaggaacagaaactgaaaatccatagcagagaagagatactcctgaaacagatttgggggaagagagatagctaggaccacaggaaagactatcaagcaccttggtctaggagtgcaggagtttctggtataaaaatgcactgcagttccactgtgaggcttattttttggaactagcctgggaaccaaaccacctcttgcaacattgttactggagggggaaagcgcttttaatactaaagacttggaagtgaatttttagtatgcagtcaccacataaattcagttgcctacaaagctgagcctcctggaataccaactgagcaggatggacttttttggaagacactttatcccctgtgttcttcacccctacctctctttctctgccttcctctccctcctcctttttctcctcctcctttcttctctgccttcttcccttctctccat

SEQ ID NO: 222732 - DNA, 358 bp, Homo sapiens
gggaacaggcagtttaaaacttctacttctgtggaggcttgggtggcgctctgtggaaagacagtaaagtgcctttagaggcttgggtctgcattcaccctgctatgccatccctgagaacttgaagctgaaattcttcattttatcgtggaaatttgtagctgtacagaaaagtaggagtagaataagaagctcccatatagccctcaccagtttttaataacgatcaacactttgcatttaaactttttgattatgcagcctagtagtaaaaagagttttatatccccaatttgggtatgttctttgttttttaaattatgtacatataacactgtattgttaatattaagtatac

SEQ ID NO: 222733 - DNA, 315 bp, Homo sapiens
cgctacggcctgggcaacgagcgaaacgctgtctctgggaaaaaaaaaaaaaaaaaaaaaaaaagattagtcaggcatggcatggtggtgcaccagtttccagttactcagaaggctaaggtgactgggttgcttgaagctaggaggttgagggtacaatgagctatgatcacgtcaccacactccagcctgggcaatgagtgagaccctgtctcttaaaaatcaaaaagcgaaatgacagcttttgccttttaattgttatgttagatcatttactttcccttctgcttgctcttccccttctgtcgtcttctc

SEQ ID NO: 222734 - DNA, 207 bp, Homo sapiens
cattcattcactcactcattcactcattcattcattgctgtatagatccactgcctgagacaaaacctattcactaacatagttagccattagtggtaacaaccactcatttgttcctttacccagtcactctccctttaaggaggatgacacattcatttacttattcttccatccatttcctaggatcacaccttcattcattcc

SEQ ID NO: 222735 - DNA, 471 bp, Homo sapiens
tacaggcgaacgccaccacacctggctaatttgtttttgtgtttttagtagagacgggggtttcaccgtgttagccaggatggtctcgatctcctgacgtcatgatccacctgcctcggcctcccaaagtgctgggattacaggcgtaagccaccatgcctggccaagtgaacttttttttattggatgaattgagccctccatgccaagcctgtccatagtgaccagcaggacgtcatctttgccgcaaggagcgcctggcatttggaaaagatgtgacataatcagataattacaagacgccactaaaagtgcagtaacaacgcataagctaagtgctgtgggagcccagtgagcaagtgccagctcttcccgggtcatttgggtttcccaagccactggtatttgaaaggagaactggtgagtaggtgttgccagaggagaagagatattcttaggcaaaatgttgtg

SEQ ID NO: 222736 - DNA, 627 bp, Homo sapiens
gtcaagagctcctggactacaagtgttgggtgaagtagtttattcttcactgtacatttccagactaacaggcttctcataaatgggccctggtggaatagtcattgccacatggattttgttgttctctcctgtttaaccccgtgataacccttagagggagaaatcaccactgacatttcggaacaagaaaacggaggttcagaaatagaaactaactgttcctgtgtgacacaagtagagaagctacagaagaccagtgtggcagacaccctctaacacctgtgtacctaatcttggaatctgaacatgaaaaggacccagttcacagttggaggaggctcatgtccccgacagtagcctcctacacagccaagccttgtccattccattgtctcagccctacctgcagttgcagaaggcaatgtgtctttctcctaaatgtagggtaaagactctgaactgtctgtactcacagttgtccttcttgagaaaatataatccataatttaagaataattattcattgagcagttaaagacatgtcatgggttgcttttcagaatcttttttaaaaattcattttgtttttttgactctaaggaatatcctgggctcagaattaaa

SEQ ID NO: 222737 - DNA, 561 bp, Homo sapiens
agttttagattactgtgagctatgatcgcaccactgcactgtggcctgggcgaaagagtgagaccctgtctctaaaaaaataaataaataagaaaagaaaatcaagcctttggtgactctcactccaaatctctttctaagacaggctgctcttcagcctgctgactccagcctccagcacagttcaggtgagctaagtgcatacagcctaggagctttcttaccaacttgcaaaacttacttgcctctatgaggcaagtgatcatgtggtctccgttttacagagggagctcagattaaaggtgcttctctgtggtcattaaaggggtgtccagggcttgtgaatcccaatctctaagtcttttcctattttgagtatttgtacatatatgccctttgtgtgtgtacgcacacacgcaggcacgtggggtgttacccaagagttcgtgctgtgcacgtgtgtgcacaggtgtataagtctggagctatgctcttgggctgtgtttagaatgggctgaaggcgttatatggattttttgaaacttggggcaatggaggtaa

SEQ ID NO: 222738 - DNA, 288 bp, Homo sapiens
atgtcaagtatcttctctgaccaaaatggagtaaaactagaaattaacaagtggaactttggaaactgaacaaatatattgaaattaaacaacatgcttctgagtgacccctgggtcaaaggcaaaattaaggagaaaataaaaaaatttcttaaatgaaaattgatacataataccagaacctatggaatatagcaaaagtattgtgaatagagaagtttatagcaataaatgcctacatcagaaaagaaagatttcaaataaattatgtaaaaatggacttcaagg

SEQ ID NO: 222739 - DNA, 549 bp, Homo sapiens
cagtacactgacccctagaggcaagggctggtgtcagccccacctgaaccatgttggttcaggaagtcaggtaggcttagcgccccaaggaaaatctgaggtctcttactggaaaagtgggtaaatggatgctgggttatcaaaacagtggatgacttctcttttactcctaattctctgtatttgctgaaaatacttatggagaagactatatattttagaaggtcatgcctttagattcaaaaaagggaaatgacgaatactagcacagtgtctattgctggatacttgcataataactagagcgtatattataaaagttgctgtgtcttgctgtgtctcccaggctggagtgcagtggcacaattatggctcactgcacccttgacctcctgggctcaagagaccctcctgccaactacttgggaggctgaggcagaagaatcacttgaacccgggaggcggaggttgcagtgagctgagatcatgctactgcactccagcctgggtgacagagagagagtctgtctcaaaaaaacaaaaaacaaa

SEQ ID NO: 222740 - DNA, 516 bp, Homo sapiens
aaatgttctttcaaccatcgggggaagctgatttagtttaagtttaccttatccgaagcatgtagttagggttaggtgttgcgggaattgttgagttacttgagaaaccaggtattcaaagttcacagttacaatggaatgttattttagtcatacctctaatatcaagtgagataatatgcaaaactgcgtttgtatatcctccactctttttaagataaacttttatgataataaaaattaccaattagataaatcaattaatatttttccctctgaaatatgacaaacatacaggaaaggacagaaaacatatatgtagagattaatgaataatgataaaagttaagtaaagatagatattaccacaccccagagtgtttcctgcattgatcctccttattacaatgcttcctcctagaattaatcattcttctgattttcttgcttcttatgcacatattcttagtagcttttttgcttattttaattatatttgtgtgaatagaatgaaac

SEQ ID NO: 222741 - DNA, 542 bp, Homo sapiens
ggaccaggggccccatgggtgtttggaatccctgatctgggtcaggcactggcagcaggattccagcctggcctggactctggtgtgtcccgtttgaagaaaccccgccctgtgaaagttcaagtttagcatccaatgacccatttaagaggtttgctgagccacgtcacaggagggtctgggtgcaaacggaggtggcaacacacagagcgagccttgagcacccaggttacccccaggacctccagtctggctggggggctcctgctgtcctgtggagcagccccctgggatcagggacggggctgagctggagagtgtgcaggattgattaatgatgtctgccacggtcaggccaactgctgtgtttctggggcccacaagctaaaaatggttggaaaaaaatcaaaacattaatatttgtgacatatgagaatgctatgaaagtcaactttgctatccataaatatttgtgacatatgagaatgctatgaaagtcaactttgctatccataaataaagttttattgacataaaaaaaa

SEQ ID NO: 222742 - DNA, 617 bp, Homo sapiens
gacctcccctccccaccgccgcccctgcggtgagatcctgcctgccggggcgcaggggcccgcggttgggctccgggagacggaagaggccccacagctcgggccccacgcagtggacgctgccacttaattttggcgtaattgatgtcaaggcgggtgcccgggcccccagtgaaatgcctcatgaactcgctgcgaggaacggcgctccacgcggtgcacggtggccaatcagagctgccgcttctgatggaggctgagccggctggggaggcgtcttggccaagaaccagccccagcctcgctcagggccccaacccgcagaccatgtaattaagctgcgttctgcagccagggcaagagtctcagctctgaacatcttcccgcacctctgaggagccaggcctggaaaccctctaaaatagatttttctgcctcaagacagaagatgggcgttccaggcagagaagagctgcccagtcacgtgctctgctccacctggtcagagacccttgacctttagaagactggacctgagggcgtggctggtggacctgagggcgtggatggtggacctggccacccagctgtagctttttgggttcctgtggtcccat

SEQ ID NO: 222743 - DNA, 839 bp, Homo sapiens
gatgtccctgcccctccgttccctccagagtctcagctctgaacatcttcccgcacctctgaggagccaggcctggaaaccctctaaaatagatttttctgcctcaagacagaagatgggcgttccaggcagagaagagctgcccagtcacgtgctctgctccacctggtcagagacccttgacctttagaagactggacctgagggcgtggctggtggacctgagggcgtggatggtggacctggccacccagctgtagctttttgggttcctgtggtcccatttcttgggtcaatctcacacctggcagctcccaggaagacacccccaggcccctcacactcctgggggcagctggaattggcttcagggcgggaccaggggccccatgggtgtttggaatccctgatctgggtcaggcactggcagcaggattccagcctggcctggactctggtgtgtcccgtttgaagaaaccccgccctgtgaaagttcaagtttagcatccaatgacccatttaagaggtttgctgagccacgtcacaggagggtctgggtgcaaacggaggtggcaacacacagagcgagccttgagcacccaggttacccccaggacctccagtctggctggggggctcctgctgtcctgtggagcagccccctgggatcagggacggggctgagctggagagtgtgcaggattgattaatgatgtctgccacggtcaggccaactgctgtgtttctggggcccacaagctaaaaatggttggaaaaaaatcaaaacattaatatttgtgacatatgagaatgctatgaaagtcaactttgctatccat

SEQ ID NO: 222744 - DNA, 275 bp, Homo sapiens
ttttcagccaggacatctgtcttctgctcttggacatcagtgctcctgattcccaggccttaggacttgagtcaggacttttatcattggccctccattcagttcttggattgcaagtataccagcagcttttctaagcctctagcttgcagacaacagaccatgtgacttctcagcctccagaagaatgtgagccaatccctcattaaaaaatctttttgtatatatcgctctatatatgtcctaacaattctgtttctctggagaaccgtagc

SEQ ID NO: 222745 - DNA, 235 bp, Homo sapiens
tgttattaactttttactgaaaaatcaaacatagagtagaaggatttccactttctagacgtactgttaacgttttgtcatattgcttcatctagacacacttttaaaaatctctagcagataaggacttttttctccaaacattcaatatcattattacacataacaaatttaacatgtaattccataatcctatttcatagccagtttatgtatcatttcccccagttatctc

SEQ ID NO: 222746 - DNA, 444 bp, Homo sapiens
aaaggcctcaggaaacagttttcactcacagggagaattactgcttcccatgaaagcattttccagtgagtggaggtgggtttaggtgttatctgtgcggcagaggtaccatctcccatgtctagaaaggaaaaagagaagatgaaggccttgcccacatccaatccaaaggggagagacatcctggcgagctcagcacataagagaacgagagattagctgtccctgcatcagagcgccaggaaggctgtcccctctgatcactggctggagcctgcatcacagtcacccgtgtttgcactggaagccatgggcaacgcaacagattgtgaggaaaccctgcagatggctccgttaataaagctgccgttcaccatgccaaagctgaagtggtttctatgggaaactctcacaataaaatagaaggaagtttttttaatcaaa

SEQ ID NO: 222747 - DNA, 376 bp, Homo sapiens
catcctccctcctctacccatgggctcatttgaaggtgtgttacctctgtgttttgctctagctgtgccctgacttggctcctcttccttcctttctgcttatggaaatctttttggaactcccctgctctgctgctccgtcccccacactgtccttttatgtttcgtgtgtctgaacttgtctctcttctaggctgttagctctttaagagtcaggattgccagctgggtccagctgttatttgagcaaatcctccttgtttccgggcgtcagtttcctcttctgtatagtaaagtgttgttaaatcagttgttctccacactacccttcagtggtttcttttttttttttttctttgagaccctggtctcactc

SEQ ID NO: 222748 - DNA, 440 bp, Homo sapiens
gtcaacataaatattttctttttctgctatagcatcttgtataatctgtttgtggccaatattattgataggcttcctttcattgtattttagattcatttcactactagcagtgtttgaggaacagataacattttactatttttcattcataatctttggttaagattaatactgccaagttaggtagaacatgaaaattacaggtgaaagataatgctattcttatatatggagtttttgctatttgagggaatgagatgaatatgttttctgccctcgttgagcttatgttctaacctggaaagagaaacagaataactctaatgatacatgatgtattaatgaaatgtagggaaggtatgcattggcagtacctaacattagcctggcactatgcttagacaccttgtttcatctttcacaactctgaattatag

SEQ ID NO: 222749 - DNA, 433 bp, Homo sapiens
aacagatagaggctcccatgtaagtcagtagggacttcgtgtttgttatctatctgttgtttctatggataataaagtatgaccatcggtatactaactttccgttcatctttacttcccttctgttttttaaatcagtgacttctagtttccaagggagagttttactctgtcaactttatagttaattgtgcagcttctattgaatagctgttatgtttaaggtgcttgatgaatcacattttttacatatttgagagacagcaaacagcatattgcacatgtagttccagtggaagaaacagtggagttagaggtttatcagtggccagatttttaacagaagtaaccatagaaagggaacaaatggaggccaggtgtagtggctcacacctgtaatcccagcactttgggaggccgaggcaggtggatc

SEQ ID NO: 222750 - DNA, 310 bp, Homo sapiens
taaacactagaagcatatgctatgtcagtcaggtttccaccagataaataggactcaaaatggatcacagacctaaatgtaaaagacaaaattataaaactcctagaagataacaggagaaaatctagatgaccttgggtttggcaccctgttgttttgactttacaaattgttactaaaaacatctgggggtgagctccatttgcactggccttgtgggcagttgtttcccttttgaaggtgccccacttgacctctgagtggctagtggggacaaggagtgatagcaggaaggaatgcagcaaccaag

SEQ ID NO: 222751 - DNA, 435 bp, Homo sapiens
ccaaccaaccaaacaagaaaacctgagggctgtgaaagcctatgccacccacaagctttggatttagatctagactagatgagagtgggtggtccaatttcaatagcctccaaagtgactgtaagtttgaagtttagtatgaaatttggagtcaaaagaagtgaagctgattcacttctaccagttaacagctatgtgatcttggccaaatcacttagtccttctgagattcaatttccatctataaaatgggcatatactacctcctttctgggatttaactaaagaaaggtttgtcaggtttaactaaaagatgtgtgtaaaaatacctgttatccagtacagggaatgcaatgaatcttccctccttttccccttcgtgggttttattgttaaactcttaatataaataaatatatttcctgtaaaaccaaa

SEQ ID NO: 222752 - DNA, 316 bp, Homo sapiens
gataccctaagcaacatctgctgaagtaaactaaaaatatggagatatattttactcacacacacacacaaatatcacatatacataatacatactcacaaacatgcatacacatatccaatctgtaaagttttttccccaaaatatacattttgaatgcatccatgagcggactgaaagttaagggtactcagaaagcagtaaatggaccattaaagctggctgttgtagaatgtgatgaaccaggcttcagattctatcttgtagggtacgcaggataaaaagtagactaataggtttaaaaaaaaaaaaaaaa

SEQ ID NO: 222753 - DNA, 626 bp, Homo sapiens
actactgagctgctagtctcagcacgctgcctacagggtggccctgctctgcaggagaagtgacagagctataacccagcctaggctataacactgctgtttcaataaagctcttttcttctaccactggcttgcccttggattctttcctgggcgaagcaaagaacccaccagggctgagctccagtctggggctggcctgccctgcatcaaggttaacatatgaaatagagtgctaaaatatatagtcttaattgtactagactgagttcatttattgctctatcatttaaaattcctggcatagaatatgtgctcaaatataaatggttgagaaatgatttggtatctttgtaagaaagtgtctctttcacatccgatgcattctttcaaaactacacgtttttggtaaatttatttaacaaattcatgtaataaatattaagtgcctacaatgtgacaagcatataagcactgaaaatagggcaataaatttaaagacaacaagctggacatggtggctcatgcctgtaattccagcagtttgggaggccaaggcaggtggatcacctgaggtcaggagttctaggccagcctgaccaacatggtgaaactccgtctctact

SEQ ID NO: 222754 - DNA, 165 bp, Homo sapiens
gacgctgggccaggcatagccaggtgtcacccacatgtgggctggggctggctcactacagctagcaagagccatagttttaggaattttgcaagcaggatgttaaagccagccattattaaataatgtaggatcaaacagtgtttcaatccctacatctatctg

SEQ ID NO: 222755 - DNA, 185 bp, Homo sapiens
ggaatgaactaagtagacagattagcaggagaaaaaggcatacaaaatttgcttaacgtgcatagggaaaaatcacagaagagtgattactcaataactcaattaaggtccagatgcttgtatacccttctcctcctatccctcaaccccgacatcattaacgggccttcctcttaaaaaaaaaa

SEQ ID NO: 222756 - DNA, 521 bp, Homo sapiens
cagtattttgttatggtagccagagcactgagtacacataacagagaggaattaaagttgcagatggaaattaaggttgctaatcagctgacattgagatgtggagaggagcttggattatctaggtgggtccaatgtaatccttaaaagtggaagaaggcaaaggtaatgaagtcctattgacaccttggttgtaacctagtgagaactgtattgaatctttaacctaaaacactgtaagataatcaattcacattattttaaacaactacatttttggtaatttattacaatatcaagagaaaatcagtataaacatgttagggcatattttctgtttaataacactttaatgaatattttggatatacacacatacttgggattcatttcctccagaaagaaacattgatatagggaacaataaaatgacaaattttattctatctgtagcccctataagttgccactatgagaacactgagtaaatggaataaaaaagagcacaaatttgccctttc

SEQ ID NO: 222757 - DNA, 526 bp, Homo sapiens
ttcatgttgcactcagatggtaacttctcaatgagctcttccctgggacttgatgtgaaaaagtaaatttaaaaaattaaaaaacaccccacttatacccccaatgcttagtacatagtaggtactcagtaaatattaattcaatgagagaaagacagttgtttgtgttcctattagctgtgacattcacagcacagaagtaagaatctcttttatgatatctctagcttcttatggggagaataagacaacctgtttaaatcggaagactgcatatccgaactggagtgagatctcagtgtgattttggactcaggtgctccacggtctttggatcaacagcaacaacaaaaatggaggcacccatctggacttgccaagtctttattttaacaagtcaggatgacaagaaaatgtacaaaacctataaccaccatctcaatctgcataatttatgaaggaaacacttgaattctagaaaagtaggaaagacataattttagaataaaaaactctttttcaaatg

SEQ ID NO: 222758 - DNA, 673 bp, Homo sapiens
ttgatatttgatatatgagagaggagccaatcacagtccttctctagaatttttcaaactggaattgataagattttttccctcctccatagtagcatctatgaattatgaaacttgaatactgtcagtgccacatagaagaaactgttctacagagtttgttagcatgtttatgtgtacgtgccatgtaacaggaagaatacgaaagagtaaaactgagggataagaaaaaaataggagagagagaaagtgagtcatggctaccggctaggccttggtttggttgtttctgtatccctaagtatctcgttctagcactgtggttattcacacttcttccaaatacacgacatctttcaaatactttgccctgtttgcctaaaggtgcttaagttgggtttctgatatttgccactagaaaattcctaacaaacacttttaaacttcatcacactgaaattacttatgtaatttcaattatgaaattatgtattatggctgtaattataattactgttctattatcttattgtgataggcagaattttaagatggcccccaagagaccccagggtggcactgtacttataatcccagctactcaggaggctgagggaggaggattgcttaagcccaggagttcgagaccagcctgggcaacatagcaagaccc

SEQ ID NO: 222759 - DNA, 745 bp, Homo sapiens
ctgacgactataaagtcaggtctctttcctcttctgttcatgtaattgattgcaggaatttatgtgttaaaatttctaccttttagcttttagttaaacattcctgttttttgagaatatttgaatccttatgctattgtctttctctgtaacatacctcacacaaatttgttaaataaccgttgtatgcttttataaaaatcactgaagaaggctgggagcagtggctcacacatgtagtcccagcagtttgggaggccaaggcaggagaatcacttgaggccaggagctggagaccagactgagcaacatagtaagagccccttgctatgaaaaaaaaaaaaaattagctgtgcatggtggcaggtgtctgtagtcccagctactcaagaggctaaggtggtatgatggcttgagctcaggagttcaaggctgcagtgaggtgtaagattgtgccactgtcctgcaggctctgtgacagagcgagactccatctcttaaagaaaaaacaggccgaggcgggtggatcacaaggtcaggagatcgagaccatcctggccaacatggtgaaaccccgtctctactaaaaatacaaaaatttgctggacgtggtggtgcgtgcctgtaatcccagctactcaggaggctgaggcaggagaatcacttgaaccagggagtcggaggttgcagtgagccgagattgcgccactgcactccagcctggcgacagagcaagactccatca

SEQ ID NO: 222760 - DNA, 683 bp, Homo sapiens
attctagaggccgaggcgggcggattacctgaggtcaggaggttcaagaccagcctggccaacatggcgaaaccctgtctctactaaaaatacaaaaaaattagccaggcatggtggcgcctgcctgtggtcccagctactcaggaggctgaggcaggagaatcgcttgaacccaggaggcagaggtcgccatgagccaagatcacaccattggcgacaagagcaagactccatctcaacaacaacaaaaaaatcccatttctaatgaataacttacaagttttactattatattcttattttactagtgatttctctttattttcatagttatttaaatatatatatttccatattggcagaatggaactccacagataatatgaaattctatccttcatcaaatgtttcactatcttgttctaaacctttccttatgcttcttcaattaaacagttttggcaatgtttttatcttacttacccttctttgtccttactcccatccccaactcttacatgttaattatttagaatttaattccaggatgttattaaatgctcctcctgtaacatatttgctgactattcccatttttttccaaattaatactgccctcatacattattactcatctagaactaactatttacaagaatcattgctcaccactatttttatga

SEQ ID NO: 222761 - DNA, 147 bp, Homo sapiens
gcagggcgattttgcttttaaaataaccatgttcacctttaactgcaaacggctgtgacgagagttgtatttaattttaaattgcccatgtccagtaaccctctgtacctctttaaataataaaatgtttttaatcttcctgcagct

SEQ ID NO: 222762 - DNA, 507 bp, Homo sapiens
ttatcagcgctctcattacatacatgtacgctaacgaccttatttgcgtcagctgacatcgctccccctgttttaaattgttattcccaaaatcaaggcttgtgggtccttcccatccccagctccttccttcccagcccactgcaggccagcttccttttccagcacctcccacgtggccaaatccgatggtccccacctcgctcaatctctcagaaacatccagtccactgaccgctgcctccctctgggaaggctttctgctgtagacgtctcggaccctacactctcccggttttcctcctgcctcacgggacaatgctcctctgaatgtgggagggcccctcttggtcctgactgcctccccttccccacactctcgctagccccatggcttcaacgtggtgtctgctgaatctacgtctagagccctggtcactcgctagagcttggatttttatcaaactacctcctgagcacctcaaacttaacatggccaaaataaaa

SEQ ID NO: 222763 - DNA, 531 bp, Homo sapiens
attatcacactcaagataaaaatcagtgactaactttgatcaggatgctagggactttactggttcaaataaaaatttggcctagcttataagagtttgcagattatttaataatccactcccaaagtggacatcaattagataagtggtccccaaccttttccaaaccagggatcagttttagggaagactatttttccacagaccaggagggtgtgatgggggatggtttcgggatgaaactgttccacctctgatcatcaggcattagactctcgtaaggagcccgcaacctagatccctcgtgtgcgcagttcacaacagggtttgtgctcccgtgagaatcaaatgccactgctgatccgacagaaggcggagctcaggccgctaatgctgggctgctactgatctcccactgtgccatccaggcagtggacctataccgttccacggcccagggggttggggacacctgaattagatatctaaatatagtgaatttgcatcatatgtatatttatctgagggaaa

SEQ ID NO: 222764 - DNA, 791 bp, Homo sapiens
agatggagttttgcttttgttgcccaggctggagtgcaatggtgtgatcttggctcattgcaccctccgccttctgggttcaggtgattctcctgcctcagcctcttgggtagctgggattgcaggtgccccccaccacacctggctaatttttatatttttagtagagatgggatttcaccacgttggtcaggctggtctcgagctcctgacctcaggtgatccgcctgccttggcctcccaaatcatgctgggattacaggcatgagctgctgtacagggcctaatagcttactttctaactttcctgacatctaccatgcaaattgtagccatacaggctgctctgtaagctgattggcccctgatgactcagtctttgtgctcatagttaggtttttcttctccccttcaccttagttttctcatactcagattccacagaacaagtgagcacaggaaccctgtgacgatagagtcctgcttgacgttgaactcctttttcccagggcagactgatacttcccctcttgggctgaggtgttgtgcagtgtccacgttgaggttcaggtcctgtccctcaccagaatagtatcttctgtatagacttggtcagactttctccacattctgtgtcaggttattgtcaaataagggatttctccatttccgtagccaatacttaccaatcctgattgcgtattgaaatttcttggggagcttacccaaaaaattactgatgtctgggctccaggccagttaaattctctaggcattgatgtaaaagaaaa

SEQ ID NO: 222765 - DNA, 333 bp, Homo sapiens
tggtttttggggatagttaagcccaggccttaagacagtttgatattcagttttgttatttaggtctgggttagggataccgccagagagcatccaaacatttctgtggttgggaaggctagttatctgtgagcattccagatgaaatagcctataatgggttatcaccttttgatcttacctcagagaagattgaattggatctacctatctgatttagcagaattaaactggatttggatggaagggtaatcagctatttaatttgccagttgttagttagcatttcttcttgctgtatctcaaggatttactttgaatattctgtatttt

SEQ ID NO: 222766 - DNA, 444 bp, Homo sapiens
tttttttttaaatcataaaggcggctggggatggtgcctcatgcctgtagtcccaagccctttgggaggccgaggtgggcggatcactttgacgtcaggagttcgagaccagcctggccggcatggtgaagcccccgtctctgctggaaatacaaagattagccaggcgtggtggcacgtgcctgtggttccagcctctggaatagttgggattacaggcatgccccaccatgcttggctaattttttgtatttttagtagagatggggtttcgccatgttgtctgggctggtctcaaactcctgagctcaggcaaagtaatcccaaaggatttcaggcatgagccaccaagcccagccaaattttaaattttatttaatatttaattttatttgattttaactaatttaacattttaaaagaatgctcccttcatttattgac

SEQ ID NO: 222767 - DNA, 348 bp, Homo sapiens
ggcagagtctctttgtgtcatccaggctgagtacagtggcgcaatctcggctcactacaacctccacctctcgggctcaagcgattctccttcctcagcctctggaatagttgggattacaggcatgccccaccatgcttggctaattttttgtatttttagtagagatggggtttcgccatgttgtctgggctggtctcaaactcctgagctcaggcaaagtaatcccaaaggatttcaggcatgagccaccaagcccagccaaattttaaattttatttaatatttaattttatttgattttaactaatttaacattttaaaagaatgctcccttcatttattgac

SEQ ID NO: 222768 - DNA, 395 bp, Homo sapiens
ggtaaacaatgctatggtttaattatgttcaacttacaggcttataactactagacaaccaatggggaattcatagtttgccatagagaatgcctttgggacacataacctgtttggaatgaaaaagccctggagagtattgtaaaataacaaatgtcaggtttgatggaatgactatgcatgcaattaagtgattttctttagtgctagagttcttttttcttaggtaaatcattttaaaaaatggaccagactttgtgaaagtagatatgttacataaaataatgttagctaaagatgaatggaataggttaagagtgtcttcttgaaaatttgaactatatctctttcaaaaagaattttattacctctaggctggacttgactgaaaagtt

SEQ ID NO: 222769 - DNA, 458 bp, Homo sapiens
ttatttttgattcattccttttgtacacatttatacttatcttgatgaagcagtgtcctcatggttgtgtaaaggcagtgtgacattgtggttaggacactggttcaggagccagactgtctgggttcagatcccagcctcttatttcatgtgtgaccatgagcaagttttgtcatctgtagaatggaaacaggagtcagggctcatattcagtcagtagacacgagtacaataggaaataattatgtgctgattggtagaatagccttgacctggcccctgaggtgtccctgtgctgggccctctgggtctctgcagctctagagaataaagagggagtgcctggcacagcaaggcgcatctgttccagttgcacagtggggtgcggtgctcggattttgaacatcacccccagtgatggcacctgcttcttaggatggtcctcaggattgaatgaa

SEQ ID NO: 222770 - DNA, 347 bp, Homo sapiens
tccttaatgccatctttctctctgaagacaatggtttcattttttaacaatatcctgtgggggaagcctgacccagagaactgtttaagatacccatattctccatcctgaggcaggaaaagaattctgaaaaggctgtagggattggaactctcagactgtgggacagaaaaattagcacagtaacttccttctccacttttgtgggttaacccaaaactgttatctgaactacaaattccttaagattagggattgtatcttttttgtttttgtatctctagtacccagtttaatgcctcagtaagtgatgaataaacaaatgaatgcatacatgcacaaacaaa

SEQ ID NO: 222771 - DNA, 388 bp, Homo sapiens
gcattagcaatggcccattcccaaaaaacattatccaaaaattcagggtgtatgtattgatttatatctaggtcatagcaatggtttcttttctctttttctctttttttttttttttttgagatggagtctcactctgtcacccaggctggagtgcagtggcacgatctcagctcactgcaacttccgcctcttgagtataagtgactctcctgcctcagcctcctgagtagcgtgtgccaccatgccttgctaattttttttttttttttttttttttgtatttttagtagagatggggttttaccatgttgctcaggctgatctcgaactccttacctcaagtggtctgcccacctcggcctcccaaagtgctgggattacaggt

SEQ ID NO: 222772 - DNA, 346 bp, Homo sapiens
gttactgcaatcaggagctctgggagtccactggacttctctaacttgactttagagaactccatctagcctctctgtctcagtgtccttatctgaaaaacaagggggtgggctggatggattctgagggccctcagacctctaagattgtgtatatgctcttagggagttagcatgctaacgggctgttgctaccaaggtaagttttggcatttttttcctggtggtttctgtgtacacagtgagacacagagtgtgtattggtacagggatgatagcaacctttgtccttctacaggaaataatgccctgtgactctgactcaagacctagtctcttgttaatt

SEQ ID NO: 222773 - DNA, 504 bp, Homo sapiens
tgttttgaatagcttaattatggaaggcctcagagatgacattaaacccaaaacctgaaaggtgagaaagagccagttacagaagatctgaggaaaattctatactgggagaaaaataactgtaaagacctcaaggtaaataaacttggaatgttccgttcaagaaactgcagaggcaagttgggttgcaaacaattagggagagtgggacagggtgaggtttgagaagcagggaacatcataaactttgtagaccatagtagtttggtttttattctaaatacaataatagctaatattttgagcacttactgtgttatttgggatttgaatccagatgctctggttgaagagcccattccctaagtgtcatgctatactgactctaagcaaaactttgccattgcttcatatgtgttcatgccctgtcagggcatagaaagcaatctatgtcctgacaatcacggaagtgtattccagatacaatagaaatgtactctgaga

SEQ ID NO: 222774 - DNA, 490 bp, Homo sapiens
ccatagcagcatctgagtagatgtcagaaaaagcattttacaaagttcattctttcatattaaaaactcagcaagttaggcatagaaggaatgtatctcaacacaaaaaaagatcacatatgataagcccacagctaacattatatacaacagtgaaaagttgaaagctttttctctaagatcacaaaccagacacactcaccacttctattcaacaaagtactagaagtcctagccagagcaattagacaagcaaaagaaataaaaggcatgcacatggacagaaagaagtaatattgtctctgttgtcaggtagcatgatcttatatatagaaaaccccaaagaccaccagaaaactgttagtactggtaaatgaattcagtaaagtcacaggatacaaaattaacatgcaaaaattagtcacattttacatactaacaatgaattcttttaacaagaaataagaataacatttacaatagctttaaa

SEQ ID NO: 222775 - DNA, 460 bp, Homo sapiens
actttgagtaatgtgtgtgtgtgctgattacatgtctgccttgaaatgcaggtcctgagcaaccaccacagattgtgaatttataaattaacctcttactgtccaatttcccttcttacacttgtcagtgaaaatgaagaaaaatatcctaactataaattttttcaccctatttttaagtaatagccatgattgtaagtgaggctgtgtggttccttgaactttgaactgaagtctgttctgatctagccaggtattttctaaggccttctatttttattcagttgaaaccagtcccaaagggttagataaaatatatcacactgttttttgaagttttcttctgaatgttgtggcagaaacacacactcaggttcttgtctcttccatattcccactcctgtagtagcattttctctgtactaggatggaaaatttgctaaaatataaagaattgcta

SEQ ID NO: 222776 - DNA, 501 bp, Homo sapiens
tatttcacctagaaaatagaactagatatagtcccatatgcattgagttgttaagagaattagatcagaaaaggtagaaggtgtttagcacaatgactttcatgtagtaaaggctcaacaaaagttacgtattttaaattccttaactccacccccaccatttgccccattctggcatgcatttttattgcaggtcattttaatgacctagagtcattcattgatccttcatacatttgtttttgttgttttttctttgatatgattcattttttcttttttcgttttagcaaaacccaagtatcaagttctgcactcagtactgagataattgcactacacagagatgagtgcaatatggaagctaaacacaggatgctttgaagaaaagaagaatcccttctattttgtcctgtaccttcctgtaccgcataaccatgctcagaactcaaagaacacacagcctttctcaagattatggctggatggaaaaatttctaa

SEQ ID NO: 222777 - DNA, 531 bp, Homo sapiens
  misc_feature (437)..(437): n is a, c, g, or t
  misc_feature (446)..(446): n is a, c, g, or t
  misc_feature (473)..(473): n is a, c, g, or t
  misc_feature (493)..(493): n is a, c, g, or t
  misc_feature (516)..(516): n is a, c, g, or t
ttttttttgtttgtttgagacagagtcttgctctgttgcccaggttggagtacaatggtgtgatattggcccactgcaagctcttctcccagggttcaagtgattaacccacctcagcctcccgtgtagccgggaccacaggtgcaccccaccatacccagctaatttttatatttgtagtagagacagggtttcgccatgtcggccaggctgatctccaacccctgtcctcaagtgatccacccgcgtcaggctcccaaagtgctgggattacaggcgtgagccaccatgcccagcctattttttcctaaataaaaaatgtgacatcacatccacataaattaccaaatatccctctcatctttacatcatactgtattcccttctctgtcttttgtcgacgcgggcggaatttagtagtagtagtcgaccccggnaattccgancgggaactgaaggggaacagctttccnaagtggtcggattagagctngggtaatcaaggtcaaatggttnccgtgggaatggtat

SEQ ID NO: 222778 - DNA, 503 bp, Homo sapiens
cgcatcatttagagaataattgttaatcagcatagacattttcagttaattatgcaagagtgagagcttgggttattgtttctgtcctggcttgcacatatctgcaaaagcaatttgcagtggccatcccctgaccttcagtgtacagttttagatgggaaataaggggttttgtgttttctggttgggagattccgaataatgacttcagcctggttaagcagctacagtgtggtttgaaccacataacaggcagccaaaagcctttctggtctgtcaacagcacagattcaaaagtgagtgtggggggaagtggctgtgatggtggtgatggcagaggctgcagggggcttgcccattccattgccaggctgtcagagagcgctcataagtatgggattgttaaaggtagcagagatcaaatattttgattgatgacatttacaaagtatttatttggctgccaagtgctaatttgatattgtgacgccctcttttttaaa

SEQ ID NO: 222779 - DNA, 477 bp, Homo sapiens
cttaggagggtaccaacccaccaccctggccctgaccccagcatcttttcagaccaaacctggcaaagccagctcctccctatcccactccaaagctgtcctccactctccgttacagaaacacctgccagctcactccctgctaggattccgaagtccctccaagccctaggtcggcctgagcagcctcagccagtaggagctctcctatgggaatgaaggctgggagcatgtttagaaagcaaagtccccaagtttaggatgagcccctcacccccattcctttaaaaaagagcttccctttctgcctcctcacttccttcagcctgggagggttccactccataattggcttgtttactgccactttgagggtttctgaatggcagagatgggaggaaaattttgctggaagaaaaggagtgtgtgccttgagctttgaggctgatgagtaaaccctccaaatgcctctctaac

SEQ ID NO: 222780 - DNA, 484 bp, Homo sapiens
ggttgtatttactctggttatttttggctatatttattttcacatttgtcttctacattattgtttgattttctgcattgtgactctgcttatctctaatatactttaaaattctaacacttactttagattcttttatatatcatttaactcctttttaattttctgcttcttaaccaacttccttcgtattttagactcctaatcaggagtttttctttaatcttttatatcatagagaggaattttttagaaaaaatgtaaatatagagaaagacaaaagaaataataacacacctgcatacacaccacctaaagctcataatcatgaacattttctcatacttgttttgttggcttaaaattcaaccaacccccactttaactctggcactcccagaaacctttaccgtgcttctctctccccttttcaacagcacttatcaccgcctaaattaacatacggtttccttagaggttatat

SEQ ID NO: 222781 - DNA, 224 bp, Homo sapiens
tgtctattatgattaccttaagcaaagcaagatgcatgaataaccagcagtaaatcaggtattcaatacttgaaattgtgtaatattctgtgactgtgcatctggccaatttcaacttctccttctttttttttttttttttttttttttttttttttggaggaaatttccctttttttgccccgggggggaaacagggggccccactttggccccacgtacac

SEQ ID NO: 222782 - DNA, 124 bp, Homo sapiens
ttacaggcttaattcactttacttttcttgtataaaaaccctatgttgtagccacagctggagcctgggtccgctgtatggagactctggtgtgggtcttgaggaggtggtcagtgaattcctg

SEQ ID NO: 222783 - DNA, 255 bp, Homo sapiens
tatgggctatctggttcctctgctcagggcctcaacaagttgaaatcaaggtgtggccagggtggtgattcttatctgaggcttggagtcctctaccaaatcattcaattctttacagaatccacttccttgcagttgtagaatgaaggtccctgttttctttttcttttttttttgagagggagtctcgctctgtcacccaagctggagtgcagtggtcaatctcggctcactgcaaccttcgcctcccaggtt

SEQ ID NO: 222784 - DNA, 376 bp, Homo sapiens
gttccctgggatatgtttgatgagtttttgtggcagagaagcagagaaaggagaaaggtgatgtctatactacttcctttttctccccagccacaaatgccagagtctataaagagaccctgagaagcaagctctgtgcagagtcacttctaagaaataccaggataaaatgtaggtgagagacatttgtgtgaaaaaagggatgagagagaggaggaaggattgagaaaattttcaaggcagaaagggacctatatcttctaatttggcaaaatgggagaggtaggtaggagatgggaatgctctcttatctatctcgccttttggatggagattaataacacaacccaggagaaagtgatccttaggaagccca

SEQ ID NO: 222785 - DNA, 504 bp, Homo sapiens
ctttaattttgatttgatgcttgtataaagagcaaaataaaagtcaaattttattcttctgtatgtggatagtcagttttttctacaccatttattgaaagtaattttctttcttcattgtgtatttttagttattttatcaaaaaaatcaattgaccacagacacacggatttatttacgggttctatatccctttgtactgttttacatgtctgtttttatgccattactatgctgttttaattactatagctttgtaatagagtttggagtcgggtagtctgatgcctccagctttgttctttttgttcaagattgctttggttggtccaggtcttttgtggttccatacaaattttagcagtaatttttctatttctgtgaagaatgacattggaatttgatagtggttgcatttactctgtagattgctttgggtagcattgacacttttacaattctaatttttgaattcatcaataaaggatgtttctccacttatt

SEQ ID NO: 222786 - DNA, 334 bp, Homo sapiens
aagaaatggggggctctctggctccccaccccccatccctgcagccccaccccaccccagccctgcgccaaagggagagcagagccccctccccgaaggccacgtccctggggagacagtgagctcatgcaaggggaatgttcccaagttggagtgagtaagaggcgggccaggcggtgggggggctgccaggcgcggggctccgcgtgccctcgccctcgggtgctgtctagacagagggcagaggcgggagaagcggctccagggcctgctgaccctgacatgcccagtgcctggtgtttggtggtgtttgaggggttgggcaggcggccgc

SEQ ID NO: 222787 - DNA, 387 bp, Homo sapiens
cagaaggtattcccttggtgtctgaccagccaatagatggaagaccattttgatgttaaatcctttttttttaaccacatattatgttaatccatttatatgaaatgtccagaataggcaagtctatacagacagaaagtagatgagtagttgccagggtgttaatgggtatgaggtttccttttggggtgatgaaaatgttctaaattgattggagtgatggttgcattgtgagtgtcctaaaaaacattaaattacatatatgtaatcgtatcatttttaatcttatctttttgaggatacaatgggtgcaattgtgtgagctacgtgtgtatgatgagaatcaggtggttgtggatctttgtcccgggatcaaaagaggagaag

SEQ ID NO: 222788 - DNA, 467 bp, Homo sapiens
tatttccaaagttaaagcttacacttacagttcaaacaaaactaaatcaattaggctctatcctaatggtgtaggtcagagtccaggtgacatcaagacctaaatgcaaatgttgattgtgtggttgcccatgttcctggagtcagttactcactactagagtcatgtgtcagagacaaacatctcttggggcatcctagccattagctttgccaacagagcaggtactaaatttatccaaaggctttgtatgtgctattgcttgatacatgctaggctgcttggtcactacattttataatgttcacagtggccattagatatgcaaattttttgtgttgtatagttgagtattggtggcagagtcttgcactgtcatctgggctggagtgcaatggcatgatctcggctcactgcaacctcccgagttttcctgtctcagcctcccgaatagcctctcgaatagc

SEQ ID NO: 222789 - DNA, 252 bp, Homo sapiens
gttgctgattgcattgttattttaatcaagccttaagcaacggcataattggtggatataatttattcacttcctatacagttggtacattaatatccctaagtgcttcacttttctctctctctctctctctctatattttttctttttttggtttttgtatttttattttatatgtggagtgcttcagtttctagttagctcttacctatttgaatgttgccttgcaactttgagaagtccaaagtttgt

SEQ ID NO: 222790 - DNA, 602 bp, Homo sapiens
cattttacattcctaccaacaattgtccaggtttcctatgcctccacatcattgccaacacttgttattttttggttttcttcattatagccatcctactatgtgttaagtggtatttcattacggttttgatttgcatttctgtaatggccaatgatgttgaacatattttcatgtgcttttttggccctttgtagatctttagagaaagaaatatatatttaagtcttttgcctgttttttaatttcattgtctttattgttgagttgtaagaatttttatgtattttggatactaatccctcatcagatatatgatttgcaaatattttctctcattctatagttgtctttttatttgcttgttattttactttgatgcacgaaagttaagttttatgaagtccaatctgtttttttatttggttgaacaagttgtaattttaatgtatgtgtaaataaatttaaaaaataggactattatttctatatgttattctactccttgtttttttcacttaaacataggtcttggagatctttttatgttggtacataaggattgtccccattcattaattaataaattactgcatactata

SEQ ID NO: 222791 - DNA, 379 bp, Homo sapiens
agggtgagactctgtctcaaaaataaataaataaataggatctgatacatagtaagctatcaatagctaccatattagccaggcaccgtggctcacccttgtaatcctagcagtttggtgggctaatgcagacaggattgcttgagctctggagttcaagaccagcctgggcaacatagtgaaactaaaatagactttactaaaaataaaagtacaaaaaatctgccgggcatggtagtgggcgcctgtagtcccagctactcaggatgctgaggtgggaggatcatttaagcctgggagatccaggctgcagtgagctgtgatagcgccactgcactccagcctgggtgacagagtgagacccagtctcaaataaata

SEQ ID NO: 222792 - DNA, 387 bp, Homo sapiens
tattcttatttcaaatttcaatagtttactactggtatataggaaagcaaccgacttttgtatattgatctagcatcctgtagactcacttattggttattagagttgttttatggattctttgaagttctccatatggacatgcatattatctgtgaaaaaagatgtcttatttcttcttttctgatctgtataagttttgttttgttttcttgcactagctagggctcccagtaggatgttgaacagagtggtaagagaggacagtcttaccttgttttcaatatcagagggacagtgttcagtctctcaccattaagtatgatgttacctgtaggtttttttttttaatgctctttatcaagttacaaaagttttcctctattc

SEQ ID NO: 222793 - DNA, 388 bp, Homo sapiens
ctctgatgtaatgttgcccattctaacaaagtgtttgcgaaaccttaattacttgccctatttggtgagaatcaggcaacgaacagagaatcacatttaatatggatatagaaaatatttcgaccgggcccagtggctcacacctgtaattccagcactttgggaggctgaggccggggattacaaggtcaggagttcgagaccagcctggccaatatggtgaaaccccatctctactaaaaatacaagaagtagccaggtgtggtggcatgcacctgtaatcccagctattcgggaggctgaggcgggagaattgcttgaaaccggaaggcagaggttgcagtgagccaagatcacaccactgcattccaacctggaggatccgtct

SEQ ID NO: 222794 - DNA, 219 bp, Homo sapiens
gccccgcccctcccctcccccgccacccggcttggcctcagccccctcccctcccaattctggcttgggtcttggggacgaagatactaggggaaaaggcctagaggccgaagatcccagtatctttcctcctctcccgccacgcccccttcccaaggaggcggaagggggggggggggcagcaggggttggtcacctgagcccaacccgcttcagtca

SEQ ID NO: 222795 - DNA, 501 bp, Homo sapiens
cttctgggctcaagcaagtctcctgccttattctccagagtagctgggatacaagtgcatgacacttttatagtgtctttaaagtgacttagaagggtttttctttttgttttaaggttaaattgaccttgtcatttataaaagcaactatgttcatcatgaaatttagagtctagaggtggaaagaataccatcatccatgggcttatcactgagataaccactggtaacattttttttaattgcgataaaatatacataagaaaatgtaccattttaaccatttttaagtgtacagttcagtgacattaagtacactcacattgttgtgcaaccattatcactatccatctctacaagttttttaatcttcccagacttaaactctgtacctaataaacactaattcccattttctctcccttcagccatgacaagcaccatactttctgtctctgtgaatttgactactcttggtacctcttttaaatggaatcattc

SEQ ID NO: 222796 - DNA, 372 bp, Homo sapiens
tgaggccaaggaggaggtggctgctgaatatctgttacttgggagaagctgtggcagtggggattgtatttgttctgctaagcctcttgtattaaggctttcataggagttgtaactagcctttactttgaagaatcgtgacagagtagactcaatattgtagctgactagatctgagaggggcaggagatggtgtcttggctgatgccctcagcccacctttaactgcagtggacacagagctgcatctctgctgtgtgtctttgcacttcctgctccaggccttctctgacaccatggcggccccctgagcctgtgccgagattgtgccactgcactccagcctgagcaacagagctaaactccatctca

SEQ ID NO: 222797 - DNA, 511 bp, Homo sapiens
gatcatagaccatagactgccctggacttgggctgtttccagtgtggggctaccgggaacaaagctgctatgaaactttgtgtgcaagtctgtgtgtgtgtgtgtgtgtgtgtgtgtgagagagagagagagagaggacttccatttctcttgggtaagcactaggagtggacttgctcaatcagacgtgactaatgtttacttgtaccttgtacaggaaattgctgggaagtctcttgagagcagtgaccatttcccattcccgataaccgcatgtgggggtcctacaccaacccaccacaacctcaccgatgccgagcgctgttgcgcattcacactccggtcactctcgtgggtgtgccgtggcaccttcatgtggtttgaatctgcacgttcctgtaggtgaaccgtgctgagcctttcttcatgtgcttattggccaagggtgttcattcctttgtgaagaatgtgttcaaatcttttgctcattaaaaaaaattcgttgttggtc

SEQ ID NO: 222798 - DNA, 426 bp, Homo sapiens
tatgttaaggaaattaaataaccattttgtggtgtgtctaaggtgagtgaactcagattcaataggcaatgagaggttgctttttaattctgcaagtatttaataaacaagaaaaatatccacattcaagggcagtattagcatgtcagatcacaacctctgtgatttaattatacatgtcctctgttcttaaagagttgtaaagggaaataagaatcctagacaacagccagccgtccgtctgtggtactgaaaacatctacagagcaatggactctagaacccctttctcttccaagcacattttgaggagcttctgtacctcactgctgactctagggccccactccctgcccaatcttcccattccccaagagcttcctccccttccattagaccttggtgctggagccctgatcattctgt

SEQ ID NO: 222799 - DNA, 396 bp, Homo sapiens
taaaatcatgagggcctgggttacagtggcagtggtaacaggaaaggagtgaagttaagaggtttttgaagaataatttgtttatcgaaactaattgaaataaatatttgtaaagtctttaggatgtgaaccatctctaaaatgagaagttaatcatagatatttggaggatagtttttcaagcttcattgaaaagtcaggccatcagttattattggcagtatcttgatgaaatttcaaaaagccatgaaaacatcgcatgaatgattttggttttcatttgtcctgcttaatgtgcatatatttcattcagaaatactgaggtggattagggattgtggatctgtagtagtagtagtagtagaaataggaattttagatgcttaactttttttt

SEQ ID NO: 222800 - DNA, 173 bp, Homo sapiens
cataatcctcctgcatctatgatctcggaacaaatgcaatcactgctaagcagcccaccctctggcctagactcatgacctcatcctgcagagctgaggagggtgcagtaagacagactgagctgtgcagggtggctcagtatcaggagatgatgaacaaatggggatcccaa

SEQ ID NO: 222801 - DNA, 316 bp, Homo sapiens
tgggcagatcacctgaggtcaagagatcaagaccatcctggccaatacggtgaaaccccatctctactaaaaatacaaaaaaattactggaccttaaataggagttttccagaaagttaaggagataagaattgggagcagcatggatcaaggaaatggaagtataaaattaggtattttttcactgctctcactatgcttagagtccaattagattacatcttattgtggtagtggattatatcttatgacagaatgagaagaaacaatctcattcaagttagtgaaaattcagaaatggtacagacaatctggg

SEQ ID NO: 222802 - DNA, 235 bp, Homo sapiens
taaacgacaaagcaagactttgtctcaaaaaaaaaaaaaaaaaaaaaaaaaaccatgaaatacaaagttgtaactaaatgtggaagacaaactacaacgaggacacctcaagctaagggtccatgaactgtgaccaacggacaaaatccctgtgttgttataggtctgtgaatgaaaaatggtttttacattgtaaaaaaaagatgagacagaggccttatgtgacccacaaagc

SEQ ID NO: 222803 - DNA, 525 bp, Homo sapiens
gggagaggatgcagagtaggcagcgaagctgcttccccacacccgggtttgactctcccaccagcccgccgcctgggaaacgcgccctcggctggcatcggggtaccagagcccggctcctttcttcctttctttcttttttaaacggctctagcgcaaaccaggcagtgggtcagggcccagaggcgggggagggaagaggagagggctgtctccaactcggggagaagaacggccggccgcaaagtttcccggtttgtgccagtttggggatttgcgaatcagaccggagcggagggaacggcggcgccttttcagtggcggagatctcaggtgccccacgccagggtctactagagaatcgggcgaccgcaagctcagtcgcgggatcaggcgaggctcgccagctccacgaagcgtcaccggcacgtatttttctttttttaacagcctgtttctaccattcagcctctgtctcacatgctttataaaaaaaaaagaagtaataaaactcctttaaattaa

SEQ ID NO: 222804 - DNA, 645 bp, Homo sapiens
cagactcgtctcaaactcctgggctcaagtgatccaccacccttgttctccaaagtgctgggactacaggcgtgtgcctggccttgctgagtttcttaaatctatgtatttttcaccaaatttggggagtgtttagccattatgtcatcaatttttatttttgcaatcaatctttttcacctctccttcaggaatacaatggtgtgcatgacctttaatattgtcccataaattcttgatgctctgttcattttttaagtgtttttcctctatgttcttcagattggataatttcaatttacctattgcaagttcactgactcactaattcttttctctgtcactttcactttgatattgagcccattaaaatgaatttttattttagatattgtagtgtttagttctaaaattccattgggttcttcttttgtagtttctatttctctcctgagaacttcatctttccattcatttcaggagtgttcacctctagttcttatagtatagctgtaacaactgctttaaagtctttgataattccaacatctgagttgtctcaggattggcatctattggttgtcttttccattgataatagtttaaattttcctagtacttttttgagtgattttggattatagc

SEQ ID NO: 222805 - DNA, 465 bp, Homo sapiens
gagaattatcacacagttcaatttgtttttgtattgagtgcctgtagttaagtatttgcatagttcagcaacctgcagagttatttcttcccttttttggagacaaggtcttgttctgatacccaggctggagtgcaatggtgcaatcgtagctcactgcatccttgagcccctgggctcaagcaatcctctcaccctagtcttctgagtagttggggctgcaagtgtgtgctaccacacccagctgatttttaaattgtttgtaaaaataaggtcttgccatgttgtccaggctggtctcgaactcctaggctcaagtgatcctcctgcctcagtctctcaaagtgctgggattacagccgtgagccaccatgcccagtgggttattccttagtgagcaattgtttcttctgttagaacatgaatttataatttgtttttactcttggggataatatttaaaat

SEQ ID NO: 222806 - DNA, 886 bp, Homo sapiens
ttgctctgtcacccaggctggaggtcagtggcgcgtccttggctgcaacatccgcctcccgggccagcgaatgccccccaacattaatccccaccaagtccaagccagggaaaaggggattcatttagaaatccagacgtgttgaccatgtttaaaaacaaaaacaaaaacaaaacaaaaccaccacttttagagagtaaccaaatgcaatctaaaggagcggtccccagcgtttttaggcaccagggactggtttcatagaagacaatttttccacagacgggtgttagggaaatagtttcgggatgaaactgttccaccttacatcatcaggcattagagtctcataatgactgctgaaaaagcgcacaacctggatccctcgtgtgcacagttcacaatagtgtttgcgctcctatgagaatctaatgcggctgctgatctgacaggaggtggagctcaggccttaatgcttgctcacctccggctgtgcggccctaacagtacctgtccatggcctggaggtttgggacccctaatctaaaggattttttttcccgctattttcaaaagatctccaaaatccaagccatggaaaaaggaaaatccaatacctcatcttatacattgaatagaatttctcataggacgttcctttggataagggcttgcaaccctgtgaaacatttaagaactaatttggagtcttgatacagtgccaactgcagcccccaaaggtaccaaaccaataattatgatcctaaattttatgcttctcagaatccaccctggatgtttactttcatgattttgttttattttatccaagtggatacagtttatgattactctttgctattaaattttttgaggaaacttaaaaagg

SEQ ID NO: 222807 - DNA, 290 bp, Homo sapiens
atctgaggatccccgaacatgtcgatgctatacaggctcttttttgtttccatatgaattttaaagtagttttttctaattctgtgaagaatgccaatggtagtttgatgggaatagcattaaatctattaattactttgggcagccaggagtggtggctcacatctataatcccagcactctggaaggccgaggcaggcggatcacgaggtcaggacatcgagaccatcctggctaacacggcgaaaccctgtgtctactaaaaatacaaaaaattagctgggcatggt

SEQ ID NO: 222808 - DNA, 611 bp, Homo sapiens
ctgaatgtaaatggtctcaattctccaattaaaaggcatagaatggctgaatggttaaagaaacaagacccaactgtaggctgctctcaagaaattcacttcacctataaagacacactcatactaaaagggtggaaaaaggtattctatacaactagaaaccaaagaagagcaagagtggctatactcatggcagataaattagactacaaatcaaagactgtaaaaaatgacaaaaaggggtctatatataatgataatgggtgaatttactatataatgatacaggggtcaattcagcaagaggatataacagttacaagtatctatgtacccaacaccagagctcccaagtatagaaagcaaagattaatagatctaaaacagaaatagactgtaatgcaataatagtagggtacttcagcaccccactctcagtaatggacagattacccagacagaaagtcaacaaagaagcatcagagttaaactacacactagaccagtggtccccaacctttttggcaccagagactggtttttgtggaagacattttttcccagaactggggatttgggggacagtttcaggatgaaattgttccacctca

SEQ ID NO: 222809 - DNA, 560 bp, Homo sapiens
acacaggagaccatggagctggaggggaaggggcagaaccaggcaattcatgtggtcttggatgctgccaggctcaggattcacaggggggtccttgccctctaccttgctgtcctccttgcagggatgcatggcctgtccacctggcgaccagtcatggccatgctgtgagtgagaacaagcaggaattcagctgaggacaatcttgggcagggcagtggggaccttgctggttggtggggagtgaggtctgtctcagtctgtttgtgttgcgataaaagtctgtttgtgttatctgaggtggctaatttataaagaagaagtttatttggctcacagttctgtaagcggtagcagcagcatagtgcttcttgtgcaggagagagagagacagtgtgagaaagagagagaaaggggaagggtaggagggagagagagagagagaaacagagaggacagagaggagaaagggagaatagagacacagagaggagaggcggggagggaggtgccaggcacattttaacactcaatcttacggtgggaaactctctcattac

SEQ ID NO: 222810 - DNA, 349 bp, Homo sapiens
caggggaccccactcctaggtgcccccagacacgcagagccggcccatattatcacaggggaccccactcctaggtgcccccagacacgcagagccggcccaggttatcacaggggaccccactcctaggtgcgcccagacacccagatcctggctggcattcccactgggctttagtggccgccatccttccgtgcacgcgctgtgctcaaatttcacccagactcggcctcgccctgttgacccgcgggacgtcaccggtgtttactgaccgtgtgggtgtgctctgggctcctttcctgttctcgtttttatcctggtgcacgcacatgtgtgcattttcttacca

SEQ ID NO: 222811 - DNA, 380 bp, Homo sapiens
caggatgttccatcttaatgactggcaaaatgggggcaccaatgaaacagaaagagagaggcatggggaagaacctgaactcctttcttagctgccactaggaggttaagaacttataataaaggatgggcttattttgaaaaagtcattttttaaaaagacttctacagaaagacattctgtgtagctaaaactcactattttgattgcatatgtttatttgtgttaaaattatcaagtattttccatttagcctttgacagttactaatgaatacatcttccaaaagtcacatgggaagtactgataaaatgcttgtgttcccattgatcatggaatgggcttatctctttgagagaacaaaactatgaagttagatc

SEQ ID NO: 222812 - DNA, 468 bp, Homo sapiens
agaactaaagaaattttacgtatgagaaaagtaaagtttttgacaggtagggagataaggttcgttaactcttttaggccaccattaacttttcaataactcttgctgttgggaataatggaaaaacataagctcgattattcatattgacccagattgccatatcgtatttccaatcaggagatagtctctgagcaggtaggtcttgcagttagacaaagagagagttgtatatggtaccatcttctttcacactgtccaacatgaagctaagattaaaggatttaaataactgtcgcctcaaaataaaatgagtttttgcctgtaagttctaacatatacgatggtgttgaaaattgtcttattttcaagatatcatttgtgttattttaaaatatctcttctaaaacaatagcataatccattgaattttctacattaaaaacaacattataagacaactgcatt

SEQ ID NO: 222813 - DNA, 464 bp, Homo sapiens
agatagaggtgagatgtaacaaatcaagaggccttgatgaatgactggaattgaagaagagggaatgagcaaaaatgaatctaagatttggagcttggttggctgggaggataattctgctattgcagaaatcaatgaggtcaatagacaagctcatttttccacagcagtagtgttgcagcaagaaatgaaggcttttgaagagcatatgcagtagagataccatatgcaggaaaaatggctcactggagagttgagaataaaggagaggagttcaagggagggaatggggatgattggggggctatctgcaaggagagaattgatgtgctgggaacagacgatttctgagggagagagaaaaacccagggccttaaaaagtgtccttggtcaagaagcagaaggagaaagaggagcaggaaaccataaaagaaacaggcgaagcaggagagagaggagaata

SEQ ID NO: 222814 - DNA, 492 bp, Homo sapiens
aaaaaaaaaaaaagtaaatattcactcctgcatttatcctggctctgagtctcaactgtgtctttgttttctttgtattttcctagtgatgctctgatacttagacatggcactctggcctaactacaaacagactgctcctccagtgggcttaatctctgtctggttttctcccttctgatatgtgtctctgccatgattcagaaggtatttgagtctgtctaagaatttaggtgtttccatgtccccaactttcctttctcctccatggtatgacgcagccccaaaaccatgaacatcttactttcatatctcaaagtaggaagttctttttcccccagattcatgggcatctttcttttcccccctttttttgcgttgttatttatttaaattttatatttgtgaattcacaggttgatgtgtttcattatattgtttctaattctcttaaagtaacttactatacaagtaaaagcttcttgtaccaca

SEQ ID NO: 222815 - DNA, 339 bp, Homo sapiens
ctttatcagcaccatccttcaggactggttttttccccactttggattgattgggcaggtgatttaccatccaagatgaagagttttaaaagaagaaaaagagacatgggaaattgctgtgcatgtgcaacagcatgcgtgcgagagaaagagagatacaaatcctgttgtgttatatctattgacagtttcataccaggcagagctggcaaaataaacttgagtggacgatcctagcaacttgagaattgattaaagcttccttgggctttcagcacagtgtccacatcaaaaaggcatgagaagcaaaataaatgattcttttgccatgatatgccg

SEQ ID NO: 222816 - DNA, 402 bp, Homo sapiens
ctaaagatagattgctgtagcattgatagcacttgctaattagattgaaaggagacagggatggtggtgtaagagagcagaatatacggttttttagaagttattatttcactgagttttcatattttgaagaattaagcataaaatttccttacctaaattctgtaatcaaatcttgtatgtttaaaattatttgtgtgcacatgtgcacgcgcgtgtgtgtatgtgtgtgtttaacgaacacatttgagttttggaatattcagcaaaatgatagttgctggctgggtgcagtggctcacacttgtaaacttagcactttgggaggctgaagcaggaggatcacttgaagccaggagtttgagaccagcctgggctacaaaacgagaccttgtctctaca

SEQ ID NO: 222817 - DNA, 506 bp, Homo sapiens
gcattcaatagaaaataattaagcatgtgaagaagtaaggatatacaatccataacccaaaatgtcacagaagactgaattagtagataagaatattaaaacatatatttattttttcaaaataaattttattgtgtatatttgaggcttaaaacatgacgttataggatacatatagatagtaaaatcttattaaagtgaagctgactgatacatctatcatctcacataattcctttcttcttgtgacaagtgcagctaaattctacttacttaacagaaatccctaatgcaatataattttattaacgttagtcctcatgttgtacacttgatctctaaacttgttcatcctacatatctgccattttgtatcctttagcatacagtatttcatattttcaaggacttagaggtaagattgtagatgttaagtaggaatatagaagatataaaaagatccaaattaaacttctggtcatgcaaactataatgtctgagataaa

SEQ ID NO: 222818 - DNA, 219 bp, Homo sapiens
taatgctgagatgctaagatggttttctttgttgcctagagcgctgggagtcttttgcaaaagctgctgccaatcaggcttgcctatctttgcagggctaattaacagcacttgggcaagcaagggggcggacgcctgcacgatgatgcgaatggtgccatcccaaggcttatgactaattataaacacaaagcacttaagggccgagattaataatga

SEQ ID NO: 222819 - DNA, 607 bp, Homo sapiens
gtttctgtgaagggagataaacccttgccgatgataaacagtaggcagagaagctgtagctttagaaagaagctgtggcaaagtcaagtggcaagaatttgggaatgacacacattttcccatcatgtcatgggaaataattagttttcatacaagatggtaatacactgtacatttatttataaatcctccacttctcttccatgttagaagtattttgagattactaaaaaaggatcactgctttgatgtctggcagggctaaacagccatgttacaacattgttattattaccttccattttcatagctgtttactctttcaaaagggcttcattcacaagtatgttcttatttgatcttcacagaaatttggatagaattaggcagtattattagcgccatctcacaaatgaggaatctgttggtcaaatgggttaaaaaccttgctagaggccatccagggacctgaaggcagagatgggactcagttcaggtctcctaactctcactgctgtgttcctcatcggtcactgttctcaggaccacatttcagttcagctcctctctcatttattgactacccgctatgtttcaagcactctgc

SEQ ID NO: 222820 - DNA, 967 bp, Homo sapiens
ggagcggggctttgccagggtccattgtactcacgctggggggctagagaccttcttttactggttctgcttatcagccaaacttcacctaacctttggacttgttaagccagtgccttgcagcctaggcgcggggcttttccaccggttctcagttccgctttagtccagagagaagacactacgcttcggggttcagtttgttgtaataggtgcaaatctttgcttctcataattctgcccaatggaagaacattctctgcctacccagcttgcctcaagaaggataatgaagtgttcagagtaaatgtccctgaagaacaatctcttcgtctgtctctcactcgctatcaggatagaagcatcaagtgtaatgaagatcagtttctgtgttaagctgggaaaacccatttaaaaaacagcaatcacttctgttgtaacaacaaaactttgattggcagttgcagctgctgtgtgccccatctgattcccaagcctcattctctctcaaaattcaggtgtcagcaaacccattcttccccacaccccagctaactatgtgaatgtgcaggcaatttcacacagaggataggacaaacttcctatgagtgtccaggtatgttttccaggtaatctggctattcatatctagcaacttcctgtaatgctccttcctagtcctaccttgtaatatgccactttgtgcaatataagcgcttatcaagtaattgttctgtactatagatcttcaaacagattcaccagtcccttcatatggaagtttaaaaagagctgtgtaaagtagaccagcagatagtctttcagaatgcagttcataatgttaagtgagctatcttgtaaaactcttcagttaaacttcccccaaatagaggaagacggagtaggattgaaataacatctgtttatgcttcacacagaataaagtcgtgatggactgatataataa

SEQ ID NO: 222821 - DNA, 378 bp, Homo sapiens
acctgaaattcaatgtttatatcaactttattcataactaccaaaaactggaaacaaccctattgtctatcaactggtaaacagatcaacgaacattcatataatgtacatccatagaatagaatactactgagcaataaaaaggaccaaattacaaatatatgcagaaaacatggatgaattgcagcagcattaggctgagtgaaagaagccaggctcaaaaagcaaatgtatgattccatttatgtagcattgtagaaaaggcaaaactgggtgggattacaggcgtgagccaccctatctggcctattttatttttgcttatttgtattttctaatgtttctatagtatgaacaagttatgcttttgtaactaaa

SEQ ID NO: 222822 - DNA, 286 bp, Homo sapiens
ccagaaatctgctttttaatccaagagcagcatctgaaaccagagtcaagactggagaaccaggggctgccttctcggtcagacagactcggaggaggccagtatccagatggtgtcgcctcatacactgcaaacctgaaaacaggccaccgtgcccacctgctccctggaggtcagccacatgcggagatccacccagcagataggtttttggattttgctgatcgatgggaaggatccatcgatgtggattccaagcctttcaataaaagcgactttgatgttg

SEQ ID NO: 222823 - DNA, 616 bp, Homo sapiens
tgagaatccccacagtgtgacacagagacacaaaatgaacaaatgctgttgggaaaatggcaccgatagacttgcttaaatatagagttgccacaaatctttaatttgaaaaaaaaaatgcattatctgtgatgcacagtaaagttaagcacaataaaataagttatgcctatataaaatattttgaactgaatgaaaatgaaaacactcttgtcaaaacttgtgggatgcttgggaggctgaggcaggagaatcgcttaagccaggccagggaggcagaggttgcagcaagccaagattgcaccactgcacttcagcctgggcgacagagcaagactccgcctcaaaaaaaaaaaaaaaaattgcaggatgcagctaaaccagtgctttaaaggaaattaaatactattagaaaagaagaaagatttcatatcagtgatccaagcttctatctcaaaaaaagaagggcaaattaagcccaaagtaagtgtgaaacaataaagatcggagcagaaatcattgaaatagaaaatcagaaaacagaaaatcagtgaaatcaaaaactggttgtttgtaaagatcaataaaacatagtcctctagccagaccaaggaag

SEQ ID NO: 222824 - DNA, 333 bp, Homo sapiens
gaaatttcacttccaagaatttaatctatgaaaatccctacacatgtactcaattatatttgcataggatgtattataattgttttgtttttgagacaggatctctgccgcctaagctggaggtcacttcaaactcgacctcccaggctcaagcgatcctcccacctcagcctcccaagtagctgggaccacaggcacgcaccatcacgcttggctaattttttttgtattttttgtagagacagggtttcaccacattgctcaggctggtctcgaattcctggcctcaagcaatctacccacctcagcctcccagagtgctgggagtacagg

SEQ ID NO: 222825 - DNA, 606 bp, Homo sapiens
  misc_feature (242)..(242): n is a, c, g, or t
  misc_feature (245)..(245): n is a, c, g, or t
  misc_feature (259)..(260): n is a, c, g, or t
  misc_feature (262)..(263): n is a, c, g, or t
atccgtgaaaatcacctgctgtcatgtgtttgaagagccatagatgaaagaaatgaaggctatgaagaaattattattgttcattctgaagtttttctttttctaatagtttgatttgaagtgattttgtgcagcaaacttggaaaaccatcatttaatgcacttgcactttgatatgtgcaaataaatgctaaaatataaaatttgcatatgtgatataatttaaatatatatatggcctntgncagaggcagagctnntnnctcccttgccttttcttcctttctaaaggaaccttgagttttttcgggaacacacctctacccaggttgggggtaagtactaattagttgagtcacacagcacccctttgagtttgctgcagtattgcatgcagtttgggaactgtgcttttaacctgtataaataattagaatttacttataatagaaaataattagaaatgacttaagtgattgctaataaagtttaccaaattagttatctagacaattaaatataactcttctgatataaatctaagagaaaagcgaagtacagaattgttacatgctactgttattatatgaaaaaaattgcctgtga

SEQ ID NO: 222826 - DNA, 554 bp, Homo sapiens
ctgcctttcccaaccaacttgaacaacttaccgaactccagcagtcctacactaggactattttgtaatcacaacatttaatgaataaaaataaaaggctaggacattaatattcaaaatcaggaaataagtggtaacattatcactatgtaattataaacacattattagttctaataggaaaacaaagcaaagattacccgacagtaaatagggctaagaacctgttttagcattgagtactcagacaaaaagaagggaacagacactggggcctacctgagggtgatgggtaggaggaaggagaggactgaaaaactacctatcaggtcctatgctcactgcctgggtgacaaaaccatctgtacaccaaacccccatgacacgcaattcacccatgtaacaaacctgcacatgtaccccctgaccctaaaataaaagctggaaaggaaaaaaacaaaagaaaaaaagaatctgtttagccaaaatgaagactatcttatagtgagtagatgaatgacaattaacaacacaacagaaaaatacccagtggc

SEQ ID NO: 222827 - DNA, 627 bp, Homo sapiens
acttcaagtgtgatccaaggtctggcagcatcatcactgttgcccgggcatttgttaaaatgcagatcctcaggccccaaccaaggcctagtgaatcagaatgtgcattttaaccacaagttcaatgatcggtgtgagtctgagaacaaccaccccagatcactgtttgttctctcttctaaccaattcatggctgtctgtcattgtcacatcactgggttgggtagctaaccttcgacactgctttttctggtttttactcttttctccattttttcttttcccttttctgttcttgtctttcttctttttccgccatttcttgcatgattctccccatgtgaaaggcaccaagggggactggcttccacagccaatggaagcattcctttcctgaagccatcaatccaaccacgctgtgttttcggccatctttgcatttgtgactgctctgggacattttcactgatgcacagggcgtcctgttgctacaaatagtgaaaggtgccaagctgctgaatgccagctaactgaggtatacctggaccacttcataaactaagggaaagtaactgtcattttttttttttttttttttttttttttttttttttttttttatttttt

SEQ ID NO: 222828 - DNA, 409 bp, Homo sapiens
aaaaaaataaaaaaatgcagtctctaaattttgggggagactgatttcagtaataaaactctagtcttccaaaaaaaaaaaaaaaattcttttaaaacttctaattattaggtttttttttttatctcttcagtacatcaaaatgtctggtggtaggaaaatactggactcatatatgactgtctacgtgatttgcagggcccagtgcaaaatgaagtggatgttgtacctcgttcaaagtgttaagcgtttcaagatggcaacagcagagcattaggccaagtatgaggtcattatgtacatgggtccttgtgtgaccacagaggtcacaggaacatgaagctagacctgagtgtatattcagataggtaaatcttacagatttttaaaactcaataaaagaaaaact

SEQ ID NO: 222829 - DNA, 1314 bp, Homo sapiens
agaggagagggaggtcacggcgtaaaggtgcagctgccgccaccgccgcttctgcaaggtctcagggacgggctgcagccatgtcctattgccggcaggaagggaaggatcgaatcatatttgtaaccaaagaagatcatgaaactccaagcagtgcagaattggtggctgatgaccccaacgatccatacgaggagcatggattgatactgccaaatggaaacattaactggaactgcccatgccttgggggaatggccagcggtccctgtggagaacagtttaagtcagccttttcctgcttccactatagcacggaggagatcaaggggtcagactgtgtagaccagttccgggccatgcaggaatgcatgcagaaatacccagacctctatccccaagaggatgaggatgaggaagaggaaagagagaagaagccagcagaacaagcagaagaaacagctcccattgaggccactgcaaccaaagaagaggagggatcaagttaatgaaggccacaaggcactgggcaccagtccttttggagtggaccttttgcaaaaggccttgtcatcaccttccaagaaagtttccttctgttgtcctgtgcattataatatacaaaataacttattttgatgatcagaggtcttgaggtcttgacctcttgacatatacactgaaaaaaatgggggttgtatgtatgtgtgtcctacccaaacctgtggccgccacttttgaattctcagattgccctgaattttgccacttttaaataatgtgctgaataagctcagcaactaaaaaccattacccaagaacgtttcttgtgagtgagctgatttattctgattcattatattccttttggtagattttataccccttggggaaataatacaacaaaaacatctcttaaaaatgctgggatggggccatatctactagcagaggccagatggtcagatatgatttctgcaaacccatcttgaccttgagtatgtgaaggggtactgtactttattcctgatacattttggtttccatgtaggtgttgagctcctggttttctgtgtttggatgatgaagatttggacccttccattcataatccctttctaagtgaagggagaggctggcttggctgttccttgttattccgaaagccctggtttggggcccatgttcacactggctctcagtctagtcaggtgcaatgttcttgagaggtggggacctaattattaccagagtagcagcaagagaggaaacgttgtgaattaagtattcaattaaaaggaaacatgatttcta

SEQ ID NO: 222830 - DNA, 1484 bp, Homo sapiens
agaggagagggaggtcacggcgtaaaggtgcagctgccgccaccgccgcttctgcaaggtctcagggacgggctgcagccatgtcctattgccggcaggaaggctttgcccaggatggttccttctggaatgtctattcccctccttccctccctgaagctctttgtcagggacaaaggtaggatccctccccttccgtcttctccactggatgcctgtgtcgtattcatctgtgaccaccaggtactaccacagagctggagctgaggaagggaaggatcgaatcatatttgtaaccaaagaagatcatgaaactccaagcagtgcagaattggtggctgatgaccccaacgatccatacgaggagcatggattgatactgccaaatggaaacattaactggaactgcccatgccttgggggaatggccagcggtccctgtggagaacagtttaagtcagccttttcctgcttccactatagcacggaggagatcaaggggtcagactgtgtagaccagttccgggccatgcaggaatgcatgcagaaatacccagacctctatccccaagaggatgaggatgaggaagaggaaagagagaagaagccagcagaacaagcagaagaaacagctcccattgaggccactgcaaccaaagaagaggagggatcaagttaatgaaggccacaaggcactgggcaccagtccttttggagtggaccttttgcaaaaggccttgtcatcaccttccaagaaagtttccttctgttgtcctgtgcattataatatacaaaataacttattttgatgatcagaggtcttgaggtcttgacctcttgacatatacactgaaaaaaatgggggttgtatgtatgtgtgtcctacccaaacctgtggccgccacttttgaattctcagattgccctgaattttgccacttttaaataatgtgctgaataagctcagcaactaaaaaccattacccaagaacgtttcttgtgagtgagctgatttattctgattcattatattccttttggtagattttataccccttggggaaataatacaacaaaaacatctcttaaaaatgctgggatggggccatatctactagcagaggccagatggtcagatatgatttctgcaaacccatcttgaccttgagtatgtgaaggggtactgtactttattcctgatacattttggtttccatgtaggtgttgagctcctggttttctgtgtttggatgatgaagatttggacccttccattcataatccctttctaagtgaagggagaggctggcttggctgttccttgttattccgaaagccctggtttggggcccatgttcacactggctctcagtctagtcaggtgcaatgttcttgagaggtggggacctaattattaccagagtagcagcaagagaggaaacgttgtgaattaagtattcaattaaaaggaaacatgatttcta

SEQ ID NO: 222831 - DNA, 1028 bp, Homo sapiens
agaggagagggaggtcacggcgtaaaggtgcagctgccgccaccgccgcttctgcaaggtctcagggacgggctgcagccatgtcctattgccggcaggaagggaaggatcgaatcatatttgtaaccaaagaagatcatgaaactccaagcagtgcagaattggtggctgatgaccccaacgatccatacgaggagcatggattgatactgccaaatggaaacattaactggaactgcccatgccttgggggaatggccagcggtccctgtggagaacagtttaagtcagccttttcctgcttccactatagcacggaggagatcaaggggtcagactgtgtagaccagttccgggccatgcaggaatgcatgcagaaatacccagacctctatccccaagaggatgaggatgaggaagaggaaagagagaagaagccagcagaacaagcagaagaaacagctcccattgaggccactgcaaccaaagaagaggagggatcaagttaatgaaggccacaaggcactgggcaccagtccttttggagtggaccttttgcaaaaggccttgtcatcaccttccaagaaagtttccttctgttgtcctgtgcattataatatacaaaataacttattttgatgatcagaggtcttgaggtcttgacctcttgacatatacactgaaaaaaatgggggttgtatgtatgtgtgtcctacccaaacctgtggccgccacttttgaattctcagattgccctgaattttgccacttttaaataatgtgctgaataagctcagcaactaaaaaccattacccaagaacgtttcttgtgagtgagctgatttattctgattcattatattccttgttattccgaaagccctggtttggggcccatgttcacactggctctcagtctagtcaggtgcaatgttcttgagaggtggggacctaattattaccagagtagcagcaagagaggaaacgttgtgaattaagtattcaattaaaaggaaacatgatttcta

SEQ ID NO: 222832 - DNA, 753 bp, Homo sapiens
tatgcttcaaggtttaaaaagttatgctttgggagtttaaatcctcttttttgaaaatataataatattatatatttatttagcattactgtgtgccaggcattattctgaacactttaaccatattaactcatttaatcctcagaataactctgtggcttatatagcattatgattattgtcttacaaataaaacaaggcacaaagttaagtaacttcctaagatcttacaactagtaaatatttgggatgggttggtgaagagtactaaaatgcccaaaacactgataaaaacaaaatagaatttgagatgcaagaccaacgacaaactgacagtatcaggtctacatattgtgagaacaatgtatatggtattacttacacaaagtaacatatgtggtatttcaatgcattctatatcaaagatgtgggcaataagacaattttcttttaccaaattacaatcttattatgaatgacctgacaacagtatagcagcatattctctgaacagatctaacaattgtatgcaactaaaaatgctaaaaaaatttattttataatcactttatacaaatccaagaactgtcaaaaaagtaggcaataataagatgctgataaaggtaaatggaacatgaaagctgattttttttctgttaagaacatttaccaaataaatttaaatcgagttttagtttgaagcattttagaattcaggggttagaaagccaagctcagggcccactaaatttg

SEQ ID NO: 222833 - DNA, 352 bp, Homo sapiens
gagaacctggagtctaagtcttagggatgtgacccttcttgaaggcaagtcactggtgacaattcaccttcaggccagcttccgtgagggccgtaaagtgcctctcagtgaagattattaggagcctggccaaatgtttgcccaagttgccttgaaaggcaaaaacccatttaaatcccattcagactaaaggtcaaaagtctgatatcctgggtttttattgtgtcggatggggttcaggagcagtgggatgaagaaccaagagtgttataacacccaaggagcattacgtttccaacggagccaaacttccctgacttgatagttttgtccaaggccagccctgtgagcc

SEQ ID NO: 222834 - DNA, 494 bp, Homo sapiens
cagcttctacgggggggtggtctgtaactgcactggagggggaatacctaaatgctgctttccgcccaaagtgggaaatccctgctgctcctgtaagagtcacatctatctgcaaagaaaaaactctggctggtgcttggcatttttacctattctcttgcattaaaaatgactaagccatactgaatagtttctcacttgtaagtgggagataagccttaggtacatatggacataaagatgggaacagtagtaaaggcaatccctttcagagactgggggataagagattatttctttcaatgcttgaattcttgaattgttgttttgcactatatgaagtgtcccagggattcgctttttttttttttttaaaaaaaagcactaaattttaaattatctgttttttcataattttcaacagtatcacaggtaaatagtaaaattattttaaaatggaaaatgttttttaagtttgaagacaaagcaacttt

SEQ ID NO: 222835 - DNA, 277 bp, Homo sapiens
tttgagatggaaagttgagagggctgcagtctgatggcctaatgaggcaaggtttatagctggtagtgaggagaatggatggaagattaggaagtttcaggagagaaataggcatgaaatagacatctcagtgcagatatgcaagcttagtagaggaaaacctaagtgtgctgagcaatgttgaatgtctttttgaagttggaggtgatgtatttaaattgaaaacagtatgcctaattgtgtgattttgcctcaccaatgttcagctgtttaggta

SEQ ID NO: 222836 - DNA, 717 bp, Homo sapiens
cctgcaatcccacccaggccacagattggaaatccctttccaaaaaaaaaaaaaccaaaaaaaaaaaaaaaaaaaaagaagaagttattaatatattctttgcgtttggttaaaaacaagtctgaaaaaacttttttttaggttttatttattttcttttgcactgtctttaggtatttcatgttgatatgttattttgaggaaaagtgtgtcatatatcaaatacatctaacaccatttccacagtttgtgttatgtgactattttatgaaagaaatcaacttcaaaggaggtttgggttttactttgttttgtttctgtaattcataaacaatagtgcccttgaattggtccagagtttacattttagactttgtgttctgacattttgccagtggcttacttgaagaaacactttaatgaatacctgtgggaagaatttctctcatggtttactaataagaatggctgtgcttcttctgggcccttaccttatttttatcttatagatgctatgactctcatcgatttttttttttagaagtctgatagaaaatgtagggatgaatttccttgatacctttagcaaatctgtggcaccttactgcaatgcattttagagccaaaccttatttccagctttcttttatttattctttattatttatcttttctttttccagatttttatggtaatttaaaaaaattacttaggta

SEQ ID NO: 222837 - DNA, 1290 bp, Homo sapiens
tttttaggtctgcctagactccactatgtagctgcaccaaaatttatccaccagttccctctactggacacttggattgtttccacacttttttagtcacaaacaaggccacgttgactaactttgtacatacatcattttgtatttttcagttacatctaactagggaaatagtccttgaaatgggattactggatcaaagacttagaggtttttcagactattccaaatagtgtgaattcagactccaaacctcatgagggtcagccagtggctatatgaattctcactaatgagaattccttccactagaatctccttccactagtgttaagcaagtcagaaagtttccttactgtctgcctccacagtaatttttttctctggtacaccctcctcctgcgcgtatagccctttgatgggctctggctttatttgaggtctgatcaggtctgtcctgctgtgcgcttgggcctcctcccagtcagcactgattgttgctgtggagtagccagcacctgcaccctgatctggtattctactttgatgagggtttccctcactatcttgcaagttcaattttagagggtggtgatgttttttctaactttttattaatgttataccaatgtaacatccaacaacatgaactttaatatcctctaatacccagtttatgttaaatttcacccaactgtctcagaagtgtcttttatacataataggtttgttcaaatcaggatccaggcaagggccacccacttggttgaaatgtctcaagttccacaaccctatcccacactgccactattatgtcgtttgttgaaggtcatttgtcctatagaatatactattctggattttggctggttgcttcctctttcccccatactttcacttatttatcatatttgggtgttgtcaacctgacccatccatttacaagctccttattgactttttcacctagtgattttatccagcagtgaccatacctggatctttatttcattaaggggtttctaaatggggatttttctaatcttagttgttctgcattggttagtcacgattcttttatgaagacatttgccttgccatctacttggtttctctgaaattcaattcatacaggaaaaacaagataaatgctgaattatttattgattttcagtattgagttgatatcctagcagcttccaaaggtgaccaatgaatgtttatctgagggttatttttatttttattttttttgagacagagcaagactccgtctcaacaacaacaaca

SEQ ID NO: 222838 - DNA, 315 bp, Homo sapiens
atagctacgaaatataaacatggaaagactgtggcggcaggcggcagacccctgtgctccagcgtctgagctacctgtgccctgctctgtggatctcccatcaagttcagaggctttgctaactggtaaacagcttgttcatcagtgtggctgatgcaggaatgggttctctggtcaggggcgatgtcctatcctcgcagaatactgcagacacctccctccctgcacggaccgggcaggaacagcgagctatgagccctgccacccttcctggatgggggacacagctggggccccacccagacctgactccca

SEQ ID NO: 222839 - DNA, 488 bp, Homo sapiens
agaagaaacatgaacaaaagagattatgccctctttttaagtattaagtgcgtgttcccagatattggtgcttaatgtagtggttttgttttaagtgagaacattaggctaacccagtcacccagggtcatttatcagttttcatcgaatcagggaaattttcagctactgtttcttccgatattttacttgcccctttccctgtttccacactatgggaactgtcagcttaagataatcctttatagtttcttttgagcattagatcatatgttactgattttcatgatgtcacatctttgtgacgctggtattttaccagatgctgtgataaacaataaacattatctgaaaataagtgtggatcaggaaatgagagtgacagtgtcccatctgatcccatggtttgagaagttacgtagcacccaatatgcataattgctgttatttaataatgaaataaaatatttcctttcaattatgataca

SEQ ID NO: 222840 - DNA, 457 bp, Homo sapiens
ttgaatttctacttctcatcgatctggcccagtgtaccagtgtctaacattcccctgaatttaatttctccactcaaattgcagaacactgccacaggaacagttctttctgtcaacagaagcccaaaagcagacagaatataggatatgctctcaggaggcagcctagcttctgaaggcaagggatgagagaatggactgggctgggccatgtgtgccctatttctcctttcaaatatgggccaaaacctaggagcattacactaaaggggttgcctgcacagaaaaagcaaattaggaatgagtagtccctttctccataattattattatataccagcaaaaccttattattttgaatacagtaggtaatttggctgaaaaacatctgatttgtgaaataatcgaaaagaaaatattgctattttatgctaacaccaaaaatataatttgataa

SEQ ID NO: 222841 - DNA, 324 bp, Homo sapiens
attaatctaaaaaaggtctcagtagtaacttattcatgaaggaagaactaatttagtagtcaatgttattgaagggacagaatatcacagttttacacgtacattggttaaaattatgatgtggcttgagaaaaaacctccctaggcctattaacctaaaatttgttagtgtagaataagctctgttaatctaggtcattttacatttcaggctgctttgcgttggctaaaataaatattcagctgtaaatgacaatttggttcaaactgtattattatagaaagagttgcatttctaagattgtttagaggacttatttaatc

SEQ ID NO: 222842 - DNA, 415 bp, Homo sapiens
tgctggctgcccattgctgtggctgtgcccctgggactttctgtgtctgcccaggagggggtgccagcatcaatcagcttttcagccaactagtacttttttaaagttgccttaaaaatgaacatagccagctgggtgtggtagctcacacctgtaatcctagcactttggaaggccaaggcaggcggatcccttgaggtcaggagttcagcaccagcctggccaacatagtgaaaccccacctctactagaaatacaaaaattagctgggtgtggtggcacatgcctgtagctccagctactcgcgaggctgaggcacgagaattgcttgaacctgggaggtggagggtgcagtgagccgagatcgcgccattgcactccagcctgggtgacagagcagactctgtctccacac

SEQ ID NO: 222843 - DNA, 332 bp, Homo sapiens
atgcctgtaatcccagctacttgggaggctgaggcaggagaatcccttgaaccctggaaggcagaggttgcggtgacccgagattgcgccattgcactccagcctgggcaacaagagtgaaactccatctcaaagaaaaaaaaaatcatagaggcttcctgctcctgagttgcagctggtgacttaaactgtggaaccgcaaaggaaaactagttacgtttcagagtcataggtcgtacaactttgtgaacgtactaaaaaccatgggaacagtgtacactttgggtgaattatatggtctgtgaatatctcaataaagctgtttaaaaagt

SEQ ID NO: 222844 - DNA, 460 bp, Homo sapiens
ctgctttacttgaatgatgagtcacattattttaagaagtcaatatgaatgtatagtacctacatttttacttggaaattgtacttcagtatgtgttatcagtcatacatagctcattaagaatgtaaatatttaaactacttttggatagatgtggttcaggggaacagatttgttgatgttgtgggtttgtgttagtaaattggctattttccaggtcatgttagtggtaggctttccatttcctgttgtgacatgttggtcataattttcagacggctcaggaagccagatttgatctctgtggtgggtcttatatcaaagcagtatcctgtggggtttggccactatcgctgttttgtagaacttccaacttagtttggtagtcaaacttgtcagcagtgatctaaaatgtataatattttataataagtgttaatatttgttgaatgcattctgt

SEQ ID NO: 222845 - DNA, 628 bp, Homo sapiens
acatgttagagaaaatcaaagaagggaagataaagaaagctaaaggagctcatgtaatataccttcaattgttaaaaagagaacacagaagatggccgaataggaacagctccagtctacagctcccagagtgagcaatgtggaagatgggtgatttctgtatttccaactgaggtaccacgttcatctcactggggcttgtcagacagtgggtgcagtccacagaatatgagccaaagcagggcgggggatcgcctcacctgagaagcaaaaggggtcggggaattccctttcctggccaagggaaaccgtgacagacggtacctggaaaatcaggacactcccaccctaacactgcacttttccaacggtcttagcaaacggcacaccaggagattatatcctgcacctggctcagagggtcccatgcccacggagcctcactcactgctagcacagcagtctgagatcgaactacaaggaggcagcgaggctggggaaggggcgtcggccattgctgatgcttgagtacgtaaacaaagcagcagggaagcttgaactgggtggagcccaccgcagatcaaggacgcctgcctgcctctgtagactccacctctggggtcagggc

SEQ ID NO: 222846 - DNA, 616 bp, Homo sapiens
agagttctgagattctttattagcaactgacagttttctaggaactgaatttttacacttagagctgcgaaaagccaaaagcatttctaaatgatctccatcccattcccctcaaataataatgtacacgctcattatagtttgttagtttctcatgcctttctttggtgttctcatggttgtgagaagttgggagaagcagcgtctaaatttaggaaatggatttcttttctgttactaagtacattgctataatttaaagacaacaggagaacatgtcttttatctcaaatgggtctgctatttttcttctaaggtgtttctctaagagtaacattatgtaatttaatcagtgttataaaaaatggaattcctggttaggattttaaaaggtgatgttaacagatatcaaattttttatattagggattgaaggacttttatttatttatttcattttaatttttaagctccaggatacatatgtaggatatgcagctttgttacataggtaaatatgtgctatggtggtttgctgcacctgtcaacccatcaccttggtattaagcccagcatgcattagccatctttcctaatgctccccttccccccaccc

SEQ ID NO: 222847 - DNA, 556 bp, Homo sapiens
aggccaacatactaaccggctccaatagccatcactcaccaagtgcgtttacaaggctttgttcctgtctcttttgtggcctcacaatggcagatgcacaccaggtcccacaaccagagaaaaagagagggaggttactcgtggagatgtcagaaaaagtactccccttgtgcctgacttctttgattaaacccttgtttgattttgtccagagaggcaagacttcaacatgtagctctaagtgctgggccaggcaccccaggtttagatgaaaaactaacgctgatagaggtatgtgtttacatcagaccgaggttatacttacatttttcatttgttaatataaatctaagttaaccacctcaagcgggactcagcaagggctgctctttattaatgggctggtcgttgctgtttttaagagagtgtcattaaccctaacatacgggctccttgtgtaattgaacagtaaatgtgattatgatcccaactgccatctccaggcacttcttggaacacaagttctttgtacaggagaaatagtcagacacaaagg

SEQ ID NO: 222848 - DNA, 568 bp, Homo sapiens
tcatgggggtggctccccccagatgctgttcttgtgacagtgcataagttctcacgagatctgatgattttataagtgacagtttccctggcctttcacgctctcacctgcccccacataagacgtgctttgctttccctttgccttctgccatgattatgtttcctgggacctccccagccatgcagtctgtgagtcaattaaaactcttttctttttaaattacccaacctcaggtatttctttatagcagtgtgaaaacagactaatacacatctcttttatctctgtcctccatccctcacttctcattctcacaataggtaaccactcttattttccatttattgtccaggtaatttctatgcacatgcaatccaaggtaaatatatgcattttttctttttaaaattttatttattttttccagctttattgaggtataactgagaaataaaattgtataaatgtagcttgtacaatgtgatgttttcatatatacagtatgaaatgattaccacaattaagctaattaacatatccatcacctcacatagttatcattttg

SEQ ID NO: 222849 - DNA, 507 bp, Homo sapiens
acctgtctctgtttattcgtttgtttttaatttttgtaatcttgttgggtcaagagaagaggttcactactaggcacggcctggtttggtcctcagatgactggctcagagccaagacatctggattctctaaaatattgaaaaaaccaaaggtgcttttcctactcctttgcttatactcacacagtcactcaacaatttacttctaacaacagatacgttgaggtttttccccacacacctagcaatctgcaatggacaccgactgcatgccctaaaaatcaattcaattctgacactatctactgggagacagtgtcagatcccacaagcctgttccccccacccaacactacagatggtaattgcaagcctcaggttgcgacctgtgcttctgttcaactggctatacattgggactctcatgacccccctccttaggctcaattaatttgctaaagtggctcacagaactcagggaaacactttacttaagtttgaccattt

SEQ ID NO: 222850 - DNA, 577 bp, Homo sapiens
tatgtcgatggctctgaatgccagactctgccgtgtgtgtgtgtgtgtgtgtgtgtgtgtgtggtcactaaccacagcccacaggacaaacccagcccacagcctttttgtgtatggtctgaacacagagaaagtattttagttttgttgttctttagagatggagtcttggctcaccacaacctctgcctcccaggctcaagcgattctcccaggttcaattgattctcatgcctcaacctccgaggtgctgggtttacaggtgtgagccaccatgcccagcccacatttgatgaatttttttgtcttttgttcttttaaaaatcatggttggaaagcagagcataattgttctttatgtagatcccaactgattgggattgttagggagatgttttggcattcagtaaatgtttttgttttccattattaagactatgaatattttattttattttctgagacagggtctcagaatttgtcaaatttgtaaaatttatagccagatgtagggtaggggtggcctactttctgtaaagggccagatagtaaatattttaagctctcaatggaccct

SEQ ID NO: 222851 - DNA, 430 bp, Homo sapiens
gcccagctaattgttgaatttttagtaaagacggagtttcaccatcttggtcaggctggtcttgaactcctgacctcataacccacctcggcctcccaaagtgctgggtttacaggtgtgagccaccatgcccagcccacatttgatgaatttttttgtcttttgttcttttaaaaatcatggttggaaagcagagcataattgttctttatgtagatcccaactgattgggattgttagggagatgttttggcattcagtaaatgtttttgttttccattattaagactatgaatattttattttattttctgagacagggtctcagaatttgtcaaatttgtaaaatttatagccagatgtagggtaggggtggcctactttctgtaaagggccagatagtaaatattttaagctctcaatggaccct

SEQ ID NO: 222852 - DNA, 349 bp, Homo sapiens
tagtagtttgtggtttcaccaatcaggctggtctcaaattcctaacctcaagtaatccacctgcctggaagttttacctttttaaagttagatgaagaggaggagatgatgtgcagcaagatcaggataggagttactgaacacatttagaaagaccatgtgggggatcacaacaaaagtccacgtgcaccctaccctttcacttgaacctgagctgtggaagccgtcccctggccagccgttgggtgtgggccaccactgtttcttggattggggcagcggctgcgttccaggccatctttattgagccacccccctagtgcatcatctctgcttctcactgccatta

SEQ ID NO: 222853 - DNA, 452 bp, Homo sapiens
gctaaaagtgatctacttgatcactgctgtggaggcaggtgagctctcaagttctcccgtcagtggatgcagaaacaaagattttagcgcaagtagtcaatttggaaggcgatcctgggaaacactgtattggagtgggacctgagatggagaaggaaaggaagcatatgaaaggtgtgctctcaatctctcattctgctgggggtactctgggatcccacgtagggcgtgcatcgggaaggaaatgtaaatgtggactgtgtggcttagcaggctccaggtgcagagaaagcatcaggtgaagccatggagggcatggatacgagcagagcatcagcagttctcataaaagacaccataccagcacacctttcccacctgccccagtgcagtaattcttctgctccattacaaataaagggcctgtcttttgccaacctctgttcctgcca

SEQ ID NO: 222854 - DNA, 475 bp, Homo sapiens
gtgatattttctatggaatatgattttggtcttcaggctatgtttatataatcattccatcaatgttattgaacatcttactatgggccaggtagtatgttaggtattgtacttataaaaataagtaaaaatgactacaagggtaaaaagctcacttaccttctaagcccaagtggataacaaaactggttgaggtagggttgccagatacaatatagggtgctttaactgaattgcatgagttgcattggacctacttacactaaaaagtaaaaataaaatagttgtttatcttttctgcacatttaaacaggcttcttgcattcatatttgctaaatgcagcaaccctaactagctgggaactggggagagctagaaagtacatgctttatctaaagggagcagctactacctcccctccccaacccctctcaggaatcattgccacaaggcatgcaaccccagtgaactcat

SEQ ID NO: 222855 - DNA, 406 bp, Homo sapiens
ttacatgcactttgtcatgtaactctgcagtctgtcccaataaatgaggcagataaatttcctgctctttgatttgggctcattcatgtgattttctttggccaacagaaacaggtaaaagcgtcagtgtcctagtcccaagactaggccttaagaggcctcatatgcttctacatgccttcttatgtttctatcatccacatgagaaaaccatccacaggacagcttgctagtgacagaaagaggatgacggacacgtgaagcagagctactccaactaatcccagctaaccactgccatgtgagaaagccctgccaaaatctgcagtgccacccaaccaagctaagttgaaagcagctggcccatggatacacaggtgataataaacgaaagttattttaaaaa

SEQ ID NO: 222856 - DNA, 322 bp, Homo sapiens
gcttacatctttctcccatgctggatgcttcctgcccttgaacatctctccaactgcttcagtttttgcagtcggactggcttccttgctcctcagcttacagatggcatattgtgagaccttgtgatttcatgaggacagcttgctagtgacagaaagaggatgacggacacgtgaagcagagctactccaactaatcccagctaaccactgccatgtgagaaagccctgccaaaatctgcagtgccacccaaccaagctaagttgaaagcagctggcccatggatacacaggtgataataaacgaaagttattttaaaaa

SEQ ID NO: 222857 - DNA, 410 bp, Homo sapiens
aggccaggcagctgccagagctgggccctagaaaatgacactctggtcctcaggtttgttcggaaactcatcacttttccaaacagcccacaagagactgatttctccacctgaatcccagtgcaccaattggcaggggagctatgcctcacggaacagccaacactggccacttgcatggggcatgcccttcctggggcaaaggctgctagggagctcagaatagaacttggcaagaggagaactagaaaaaggaaactgacgttctggggctaagctgggagtgtttgtatgattcatgacccccttccctggactgtcctagataaatctcagctgctcctggcccatgggacctggcccaccagctttttgacaatgtgaagaccactccacccttacccacaaca

SEQ ID NO: 222858 - DNA, 471 bp, Homo sapiens
tttctaatagaggaaaaatgattttcatgcaacatccttgagaaatcaaagcatgtgagaatcatcaagataggtaaaaatttgaatatcagcatatttatctcttcaggggatttttgaacaatttctctgatgtttcaagttcagcaaaatacatacttctgaggtcctctttgcattgattttaggtatcttaggggaaatgtattctcccactaataatctaccagaaagcagctctgagcgtttctttctagtaactcctggggtcctgagacttgggacttggactcagcagtctgcattcaggtcgagttcagtcattgggatggaagtgatacagtcccccttgggagcgataccaaagtgcttaccgagcacttgcttcaagctgagatgactgaactctcctcccctctcctgccccttcctctgatatcctaaataaagggagagagttcacagctcctg

SEQ ID NO: 222859 - DNA, 607 bp, Homo sapiens
gacatggggcatcaagtatagcctgtttgaccccagcagaccccagacatgtctgtagctactggtctcacctagccccaaggcgtccctcacctggccaccctcatcttgcaaataatgtgtctccgagggtgtttggctctggatggagcttgtccttggagggcagaggtttgctactgtccaggttgttactgagtatttgcttcatgcctagcagtacctttcaggcgatgcattgagtgagggaatgataggcatgctagggaccctgaagataattccaaaacagaagtaaaaacaccggaatcatggcagcatggctggaatatgtacatggtccccatagtgaccacttctcactgacaacacccattggatatgtgaggcccagaggatttatgaatgagaaaatccaaaacaacaagaaaacctctggtctcaatactttacacttatatctactatttaaaaaaaaaaaagttggctgtgcatagtggctcacgcctgtgatagcagcactttgggtgactgaggtgggcacattgcttgagcccaggaatttgagaccagtgtaggcaacatagtgaaacccccgtctctatac

SEQ ID NO: 222860 - DNA, 1167 bp, Homo sapiens
tggtcttgaactcctgacttcaggtgatccgcctgcctcagcttcccaaagtgctgggattacaggtgtcagccaccatgcctggctcatttgctgtcttaaccacaatattattaaaatattatactgacatttaaccaagaatgtttaagtactttctgattatttacttgtctctagaacacatcagtgaatagttaagtccttaatgtcttggtaagttcttggaaacgtctacttaaaaagtgaaacaatgtataatgaaaccaatttttttttcctcatcaatgtcgtaaggaaatgaggttgattgaaacaactttggagaaccttctgtactcctttcatttagttgcggtttccaagaacctatccacaacattaagtggggacttactatatagccaaaaataaaatgaaaggcatataattttgaaatgtacttgtagctttggaatgtactgtacagtgagttcgtcatacatctagatgaggatgtaaaagaacaaaaacttggaatttccctccctctccatgcagctttgaagagtctttaatccaagggaaacctacagttctttctctgccgtaggttctcttctcctctcttccacttcctccagctcctgtttgtctcttcctccctgtgtgtcttactaccttgttttgggggtttgttttctctcctgatttttacctctttcagtcctcaaaatggtctgaataaactggagattaatttatttttgaaagaagtgtttgtatctactaagtgaggttatggaagagatccaaaaatgttctgggtggcaggagaagacatttaaaatacacagttaataagccacatttagataatctataattgactgtagtttattcagaaatgtcttttgttaaataaagcttctaagtgaagtctcaaagccacagaattaagaaaggctgtttgtttagtcaatgtgattactgctcatatttttaaaaggaaaaaaaagcaaaaaaaaaaatcagtttttcataaaaggaaatgtgtccactattttaaagatataaatattctgtctagtagatatggtatctgcaataaatgtgtttgtacatattgtcatattctgttaatatcaccgtaatttccaagtgaactttaaaaaactataagggatc

SEQ ID NO: 222861 - DNA, 314 bp, Homo sapiens
caagtcaaccctgggcaacatagcaaaacactgtctctacaaacaaacaaacaaaaaacacaaatttgccaggcacggtagcatgtgcctgtagtaccagctcctggggaggctgaggtgggaagattgcttgaggccaggaggttaaggctgcagtaagttgtgattatgccactgcactccagaccccgtcttgaaaaagataaataaaaaatgttttaaataaaaaagacttcacatgattgacctcgctacaaaaatgacaactcaaatctcacaggctctttctgtgtggttggttgggttaacttttg

SEQ ID NO: 222862 - DNA, 519 bp, Homo sapiens
gctaatagtgctgaacttgagaacgccgctcttggtggacagttgcatggtgtctgtttttgacaataatgaataaaggtacttgtgcaagcctttttacagacttatgcttttctcccccctaggataaatgcctaggggtagaattggtacatgtaaggtagatttagttatccaaagtagctgtactgtgttacactcccaccgtcgatgtatgcaaactctagagtctggtttcttgacatctatgccaaatattggtaacacaatttttaaaatagtagcttttctagtagatgtgtataattatctcattttattttttattactaacgatattaagaaatttttcatttgcttatttgctattatatcatttttgtgtagcatctgttagtttttatagctctcttgtttctatgttgtacattatatttatatattcttgctcttattcataataaatagtatatataattgtgtaattaaaaataaacattaaagtataaatatatttac

SEQ ID NO: 222863 - DNA, 802 bp, Homo sapiens
ggccatcagctgctgagaggctaggcaagccctggagtccttgtcagttttttgataatgactacctttactcggtactgcaggccaccctgtgaccatttctgtggtctgagccttgcctacctctccacctctcttcgtcacagcattcgtccattcattcagcagatgtgttctgagcatctgtcacactgggggctttctggatgtagacgtaggacgtgatatctaaattgagtgctgagtcggggaatgggtctgatgctggcagggagacccatgactcctttttgtgacacagcagaaactctgggtgctggctgccgtggcttcttcttgcttagtcacagggcagagttcaggcaggaaaatgaggccaccgggcctcttgtcccagggaaaaaagccttttataaagataagaggataaggccccgtggacactgagttgggacccaccctgatagccaatctcagtaggagctggatccaagaaaaagcaggaaagtaaacaaaaccaaaatgtgctggttttgagtccttctcctgaaaaaaacggagctaaacccatggcggtttagagtttaggggctgtgggtgtgagtatatatgcgcctatgtatccccccactcatttttgctagaaaatggcaaaccacctttctgtatcttgttgcatttcccccgattttgtgagcccagggagagagaacaaaacggtgaccagctgtccttgtttctgtgggaagttgtgaaatttcatgtagtcttgatcttttgtcctcagccaccctcatttttt

SEQ ID NO: 222864 - DNA, 453 bp, Homo sapiens
ggcgggattcttgctactgagcgatccgtctctcctcctggctagactgaggatcttctctgtccccgtccttctggaatttcattatgatgtcacctatggtacatttctttcgtgtttccaacttctaattctaatacaatttcaaactcacagggtaattgccaggatagtccagggagctctcacacgtgcgttccggactcactgcctgctcccgtctgcccccttgcccccgcctagacctgtgcacgtgcagctactgagagtgaagcagagacgtcgggcccctgggccctcaacacttgtgtatatttcctaagaacaagcttctcttacgcagccacagaacaactcgcatcaggaaattatcattcatacattattctctaatccattgtccatagtcaaattcatgaattgttccaatgatagcctttattgcaaaaaaaa

SEQ ID NO: 222865 - DNA, 225 bp, Homo sapiens
ttcttaaacaactgaagagtatgctggttctagtttctttcctctgaatcatgtgtgtgtggtggcaatttagtgactgggaggcactggaaattattggttataataaattgatgtcatgcccacagcacagcaggcaaaaaggatgaattagagacagaaatagtaatagggttttgtccaggaaacctcaagcatatgaggtattgccatgttgattacttt

SEQ ID NO: 222866 - DNA, 437 bp, Homo sapiens
agaaagggcccacatctcgagtctccagtctctccttgaaaagagcaccccctaatcccggaggaagggagggtgaaggaggaggggagagcccactacaggcaaggcaggaaggttaatcattttgttaaccggaaagggtgctgccccgcctggccgtcgtcaccgagcgtgtcagtcacccgctctcgatttcgccgcagaattacctgctcaaagagccaccccaagaagccctcagctccgaggtcttcccgcccgtcgtctgcgggaagtaaacggcgtcctccctccaaagaagtggatgccccttcgactctcctccgccccccggcggttcctaaatctaggaaagccagccccggcatcgctcactactcctgcacctcagctctgggatacccgctcagtacagacagaccatcaaccaaaaaaga

SEQ ID NO: 222867 - DNA, 660 bp, Homo sapiens
gaatttttagatcggatttttgtggtaaatgtattccctcagctatttgcatgtatgtgggtttcagtaagtattcctgtttatgttttgggctgcatttagacttgttattccttttgcaaaaattccttgagttcacccaataaaaccagtaaaaatcagccatttgcagtgtggtcaggaaacagtcaacagtattagctggacattagtgttgggtctctgagtttcggatgaaggaatgatcatttcagtagtttagttcacttgtttttcctctttgtgttaaggctatcattcagagggcaaacagttcccggtgttgtgaattgaaaatatgttctgaatagatttgctgattgttgagtatgttttgcttacacttaaggccaaattcttccttgaagatgagcttgtcaataaacatcaatggaaaaataaccccaaatttgtgacttctggggaatttgaatttaaagagaatatctgtaggataacagactgtgggtttctagtcgttggattaacatgttttgtttagcatgcttagtgtgggagtgttcaaggatcttagaatttgtttttcttaaagcaaagaattgactgagtttttgtgctcatttgtataatgagaaggtttcctcccatcatgtgggttcg

SEQ ID NO: 222868 - DNA, 272 bp, Homo sapiens
atatatgcaaataaatatagaatgtgtccagcagtgatgaatgcagtaaagtttttaaaaggcaaggtaatgggtttgagagtgttggggtgtgctcttttatggaagggtcagggaagggctcgctgagtaggtagcgtttgagcagagacgaggtaaatgaaccatgaggctatctgagggaagagtgttgcagggagagagaacttctgggtgccaggacccagaggaggggtgtgttcactgttcacaaggaacagcaaggaggctgg

SEQ ID NO: 222869 - DNA, 437 bp, Homo sapiens
tcagtaattgtctttgctttttaattaggttttactcagtttcttgtgaacattttatttgctcttaaaaaatagattggtagcacatttctttcataactgtagcatcccaggataatttcttatgtgtttttacatttatattaacactttttaaccttacctctgtcctattcatattaagtattgtatattattcattgtattctttctttaatgtttaatgctgttaaatgttaaattctttttccctcttaatatgtcatggcctttggtatgtaagaagcagaccaaacttgacttcacttgcttctaatgacccatctggcctgcaaaataccagtttattttttccctaaagctcacaagtagccaactggcctgttaatttcattctcattttaaattaaaatttaagggaaaatagcaaaatataa

SEQ ID NO: 222870 - DNA, 466 bp, Homo sapiens
accaaccaaccaaccaaacaaaaatcatatacttgaatcaaagctgaaacttttcagtggtgatttacaaggaaacaagtaacaaaatgtgaaaaatatgagcatttatttaactttggaaacaagaaaatgccatcagagttagaaccagaatcatagcatatcagagcccaaagggccttccaaggtcttagttctatccattcattgcctaggtgtggacatatattcattaaggataaatggcatgtcagagtcacctgcctaatgtgtgaaagggtcatcatgttctgattcttggcttagcatgctttcaattaataccacattggtagggaacatgggtcaacagaatgagaagtataaagtgacagatgtcttctgaaaagtaatggtagccagttgaataatgaaaacagtaaattttaagaagactagggagtacaatgtaataattttaaaaaga

SEQ ID NO: 222871 - DNA, 595 bp, Homo sapiens
tgggtgagggtccttcagaaggagctgtggttgaacagcaagattttcccctatgcatggtgtgttagtcctttgtgcattgctataaaggaatacctgaggctgggtaatttattttataagatgtttatttggctctcagttctgcagtctgtacaagaagtgcattgtccagcatcagcttctggggaggcctcaggaaacttacagccttggcagaaagtgaagggggagccggcatgtcatgtggccagagcaggagcaagagtgcaggaggggaggtggccacatgcttttaaacaaccacctcccacaagaactcactcactattgcgaggacgacagtaccaaggggatggggctaaaccattcatgagaaatttccctccgtgatccagtcacctcccaccaggccccacctccagcactgaggattatagttcaacatgagatttggtggagacacagatccaaaccatatcaaatgggttctaggaacttagcctagatttcagatttaggaacagtatcataggtcaccttttcaaaatacataaagtttcctacagaaacaatatcaattaagtgcatgttt

SEQ ID NO: 222872 - DNA, 325 bp, Homo sapiens
gggtcctcccaaagcctggagttgcagttagagtttaccaccttgggatggcacatggaggtccgaagaacggatagacagctcaacaggcagccacagggcctgaggcaggagtctccctcagcggggacattcagcaactcactcaagactgactctgctcaggctgtctcggctttcacagaggtagggttgggaggagggtggctcagagaggctggggaaggccaccaagtaccacagcttctcatggcatcacacagggacaaggcttgggggccctttttaagcagcttgacccaggatgctccagtttcatgcctgc

SEQ ID NO: 222873 - DNA, 160 bp, Homo sapiens
aagctttttttttttccaagtcattagtgaacaagagcccttaggacaaaatactggggtaaaaattcaaaatggcaatgattcataaaatttgtttcttgtaaaaaagccatggtttcgcagagctctcgttttactttcatttatgcctactaagctt

SEQ ID NO: 222874 - DNA, 313 bp, Homo sapiens
aactctccagtttttaaatgtgtggctaagttttaaaaccagtatttcagggcttaggcacctacacaccatttgaaatactggttctaggaaaatgtgctacaatgccaagcaactgattaaaataagtcaaataccattacatcacaaactgaggcaggtagaagcttccaatatatggttttaggcaaatactgtgtgctttctatgtgttgttctggggctgtaggatgcaaagctaggaaataggcaatacacacaaataactacaacagacggcagtatgtactatatcaaacatatgtcaacatga

SEQ ID NO: 222875 - DNA, 565 bp, Homo sapiens
cactttgggtggccaaggagagaggatcatttaagcccaggagtttgagaccagcctgggcaacatagtgagaccttgtctctatttgaaaaaaaaaaaaagaccaaaattgatgccacgctgatttccaggccatgctctgatatataaactagttcttcaaatggggctgacacctcacacgttgttagaagggaattccaatgagagagtggcagggtgaagttctcctctaagcttcttccttccttaagatttgatctggatctctgggtgcagtatcaataacttcaataacttttctttttactgactagaagattatgagagttctcatgaatatggagttgctaaaaataaaagtttaagaaatttccagctgggggcggtggcttacccctataatcccagcactttgggaggccgaggcaggtggatcacctgaggtcaggagttcgggaccagcctggccaacatggtgaaaccccgcttctcctaaaaatacaaaaattagctgggggtggtggcaggcacctgtaatcccaactacttgggaggctgaggc

SEQ ID NO: 222876 - DNA, 145 bp, Homo sapiens
aaatgctgtgctatgtaacaaaataatacaatgtacatatgtataaaagttaacatatacatatcaattaacataagcataactgtaatcacatatactgataaataaaaatataaagtaatatatggtaatgacccaaccattt

SEQ ID NO: 222877 - DNA, 530 bp, Homo sapiens
aatctaaatatatgacaaaattgcacagaactaaatacacacacacacacacagacacacacatgaatctggtgaaatctgaataggatgaatggattgtatcaatgtcaatttcctgtctttgatactgtatttagctgtccaaaatgtcaccattggggtaaaatgggtgaaaggcatacatagatctctgtattatttcttagaactgcacgcaaactacaataatctcaaaataaaaagtctttttttaaaagacaggccacaagctgaaatttataatacacaaacatacaaaacaatcgggaacaaaatacaaaaaatacctatgacaatgacaacacaatagaaaaaaaaagggcaaaagggtacgacctcaggattcacagaagaggaaattccagctaataaacctatgaagagatgtctaacctcattggaaatcaggaaaacacaataataaaataacaatgaaatactactttacatccatcagattggcaaacttttaacagtctggaaagatcagg

SEQ ID NO: 222878 - DNA, 518 bp, Homo sapiens
tgaagaaaaaatagagtcatgagataaagtagctctgttaccctgattctctaaccagggaggtgaggaaagacctcactgagtgggtagtacttgagtgcagacctgaatgctgggaagaacaatttgagcagaccaagtggcaggtgcaaaaggcaggtgtagctgacattgtgtgaagagcagcctggaggctggggtggctgaagtctggggagtcaggagagataaggtcctgttagacaggttttgtgcttaatgtgatctgtgatttgagtcccttggctcggtgttaatattgagtgtttgatggcagcagaagatgttcagtaagcacttctagagctgaagatagctgtgcaagtctgtagtaataggaatgtggctctgaatttggagctaggtaacttggagtgaaaacctgtgactttgagctttaatctattaagcctcagtgtttccacgcataaaataaaagaactaaattaaggcccattacgttatacttccaagactta

SEQ ID NO: 222879 - DNA, 758 bp, Homo sapiens
gttctctcttagacctcttcctctgagggaatcagctaccatgccatgaggatactgcagccgtcctgtggggaggcttttatagagagaaaccgaggtttcctgccaacacccagccatatgagtgatccatgtcagtgagcctctgtggaagttgatcccctggctcctgtcaagcttgctaatgactgtagcttcatctgatatttaatgcaactataagagaaacctccaagcctgaactgcccaccaagctactcctgaatctctaaccaacagaaactccagaagctgcatggctgtgccacgccagtctgcacgctccagctgccagacagcatgtcttcccctttgttaataatttctaatggtttactttcaagttaatttactctttcctatatctttcatttggctatggagtccatgtagtaaatttttcattgcagattattgtatttttccgtcttttttatagtttctactactcagctgagaatttctaccttttcattttttccagtgtgttagcctcatgaagcaccattataagagctgctttcaattatctgatatttctaatatctggaccatctcaggactggcatctattaattgctttttcccatgagatttagtaatgttttatcagttcttcatatgtcaaataattttaggttgtctcctggacattgtgaatgttatgctgtataaattctgagtcctgggtcttgttataatcctttgaagaacactag

SEQ ID NO: 222880 - DNA, 499 bp, Homo sapiens
caagaaagacttttaaatgttcttgatacgtaaggcagcaggtggagattcaatgatggtactgccattgagcatatcggtcaagattttaacagtgtaaggcctcttccttaaattgtaaaatagctcatcttttgattgaaactgctaaagtgtaagacatgtaagactcctgttagaattaacactctctgccatttaggtgggggatgaaacattaaactgttagtatacttgtaccttagaataaagtaccttattgtcctgctataagaaataatttgacaactaaaaatccatggaaggtgtaatacagcaattgaaagcttgagtaaattcaattttgtgggtttttttttttttttggaaaaccccctatttaaaaacacaagtgatttagattaagatatttctttcagtatttttggtaggggtgagatgggtgaagaaagaagagtcttgttcaattcagacaagagaaatgaattggaactctgga

SEQ ID NO: 222881 - DNA, 373 bp, Homo sapiens
atggaaagaatgaatgctccagggctggcaggggctgggtaaccttggcagtgccatgaggcagggggtgtgtctgcggtggttttgtgctctgacgtctaagcccaaggcctggcacataataagcattcggtgaagatttgctggactggggatgctcactcgcctttgggaatattgtgaggccatgtaaaaggatggttttgaacgctgtgacttcaccacatgaaacgcttgggatacaatgtgaaaatgcaaaatgagcctataaaaggctgtgcttacaagcgaaatgtaagtttctggctgcctactaacatgtagctacacaaacctggaagtcttcctgccaaacatgcagaagagtcttcgc

SEQ ID NO: 222882 - DNA, 278 bp, Homo sapiens
atatcttactgttttacagaatgccacctttatgaagggaccatgccggtttttactgggaaaagtaacgagtaatctaaacacagtgttactccacatatacaccagagaacaagagctcagttccatgaatagagcagactccactatctccatgaaattttgggatgcaaggtgctatgtaagtgtgaagccactaccaagttattctcgtcttaataaaggacaagttgatttactttgttaccccaccaataaaataccggaataagacttga

SEQ ID NO: 222883 - DNA, 215 bp, Homo sapiens
aatgcatagacttaccattgggttacgtcttgataaagccatcataaactaaaaatatctgcatttagtacagctaacctaccaaacatcatggcttaacctagcctaccttaaacatgcccaactgaaggctaatgttaattgttctgagcatgtttaaggtaggctaggttaaacatgtttaaggaaggctaatgttaattgttctgagcatg

SEQ ID NO: 222884 - DNA, 4261 bp, Homo sapiens
aatgcatagacttaccattgggttacgtcttgataaagccatcataaactaaaaatatctgcatttagtacagctaacctaccaaacatcatggcttaacctagcctaccttaaacatgctcagaataattaacattagccttcagttgggcaaaatcatctaacgcaaagcctattttataataaagtgttgaatatttcatgtaatttattgaatactgtactgaacgtgaaaaagagtggctatacgactactccaagtaccgtttctactgaatgtgtatcactttcatatcaccaaaaaactttaagtggaaccatcatatacctgggactgtctgtaattcaaaatctttctagacaaggaaggaatcaccagtagcactgctgggctatgggtaggtgggcaactacctactaggtgtaaatctgtcaaccaaaaaagtaaattatggtggctttaagggagaaaatgttcctctgaatgtgtttaaaatcccatgggtgtagctacttaaatgaagaaatctggtgagtacttagctatttaaaatttaattctttgcaggtacttactttacaagaagtattcttatatagagagattcatattgctataaatatgtacataatagctaacatgcgcttaccactggcagacactatgctgttatttaataggcaataatcctatgaattagtattattagtatcaccatttttcagaatttaagttttcagaggcaccaagagtttgaactttaagacatttagctaataaaaaaatgtggccaggatttgaatccaagggaactgaattttggagctggcactcttaaacactatacaatgcagttaaatatatgtagtttactgcccataataaatttttccaaaaaagagatggcttcttaaaaattttaaattagattcagattagtatagacacttgcaagtcaatgatgcttaaaaactaaactaaaaccctatgccagttgagtgtttatttcctggaatgtttactcacatacaccttatggtggagaggggagtttataattggccacagagcctgagacctaatatttttgaaatcataatatattttacagtacttcacaatttacaaagcatatttacatacattgtatcacatgaacctcaaaataatgctgtgaaatggggcagataattctgtaaacaggcattattcttaactttatagatgattaatgaggcttacaatgataagtcatttccttaaataacacaattctctcaaaatctaagatgttccaaatgactgaatgcattatgaattagcctatcataggctttatcatctgtcacataacatttaaaaaaagatttctcacaataaaccaaaataaaattttactttattttatttctgctttatctacaataaatattataattcaacagtaattactattgttgaactagcaaaacccacataacaaaataaaaatcagaacatgaaaagctatagtaaggagaatgagaacaagtatggatcataaaatccagaattaggagcgaaatggtccaaaaattatgagattaagatcaatgattacataaagcactcagcatttttgtaattacttaaatttgtaaagtgccttcaaaaatttgttactcttttataatccctaagagatcactgagagacaataatagcctttacacagcagatgaagaacattttgaaagtactatgaaattcagttattatttttgtttaaaagaaaacatcttgtgattctaaatcacaagagcccgaaattctttctgaatataagcaatgccatttacaaacattcctgctgcacccatcttctacaccccctgttgtaatgaattcgcatacctgcctccgattacaggctggattgccccaaagtagtcttctcagaaacctatctacacagttagcttctttctcttgtgcatcttcaaactctctttgtctttagcatcaacatgatatactttctgatatttcccatcttaaacttttattgttttttcttatctcaagaaaaccctgccttgactcacggccattcctccagttgtcacaattccatccctcttctcctttagaaagtcaaacttctcaaagtatggagaaaacaataaccatattttaaattggcaatcaaacttcaacttgctccatactggcttctgatcccctaatgctctccaaattcctcttgttaggtcgccaaagttaaatgaattctttttagtttctatcttatttggcccctccagctgtacttgatactttgtccacacctttccttcttgaaacctccctctcttggctcctacaacaccatgctctcttttctcctaaatttatggccatttctcaatctcctttattggcttcttctcaactactaaatgttagaactactcaggactctgggcttttactatatactccatttcctaggcagtctcatacatgccctgggctttaaataccatctatctgatagtatctctaatatagatctgtcttctgagttccagaacttagcaattctattagatgtctcctgggtattgcaatactcagtaagttcatatctgacagagaccttctaaactgtttatcttttaacctttcctatttcactaaatggctcttccaccatccaactagttgcaaatgctaagaacctaccatattcaaatgttgccatgccttgtggtgttcatactacttaccaagatatgtcaaatcgatgtcctcctcttcatctgctgtcatctccccagtcaaagccctcttatcttgagcacactgtttcaatagcttcctaactagtttccttctatctttgctcccctccaattcactctccatacagcagccagaattattgtttaaaaatgtatactgggtcatgtcctgcccctaagatacggaaatggctctttcttgcatatgaaatccaaatgcggccttgcctgaatctaatcctgcctaggtctgcagcttcagcttgtgctactctagccattactcctatgtttccatcatgactgattctctttcagtttctcagattcaccaagctctttgcatgtgaattgggagtaaaatcgtccaaaaattaagaggttaggattaaatgattacatgcctttcctttgcttagaatgttgttccacactccccactttggcttcaagactttgttaacacagttctgtctactgagagtgtcctttccctcatctctgcctgatgaagttctattcatctttaggactgatcttaaatgtcatcttcataaagtcttcctggtcaaattttccctgtaagcatactgagttacttttttctccatatacctaaagataattttgcatatgtctctgttataacatttatcaccgtactgcaatcattttttaaatttctgccacattagaactgtacaatatgagatacgtgaatataggactgggccttctttagatccccaaatttagcaggtgcctaacatcatccaatctgtcacccattaatattgctttaagaataagagccatcttacatggcaacaaccactagtgaagattgtatttattaacttgttagtgtttgtcatcacggtgacatacacatattcagaaaaatgagtcaatattaataattaaagacgttactgtgatgaagtttcctgaaatctgagctcatctgtatacccatatccaatgacttgaatgtctcaatcaattcattggctagcacaattctcaagccttattagggaccataatttctatggttgacatcttaatgctgagtaggagccggaagctttgtggactctcaggttcatgcacctgaaagtcctgtgcttaagtgtgtgcatgatcttgctcagaagcaccaagaacaggggtgagaagagagaatgtagaacatccattgttatacaagaggcagtgacaacagagatggcctatttaacttacttcaaaagcctttaattctcaagcaccaggaaaacaattttagagctgactacaatagatcttttgctagactgttctgaagactagttttttagaaagtaaaaccatattaccagaatattaatccacaataaggttgaatacaatttgttaaagaacagactccatgtactattacaaaaatgaggtctgacctgaaacaccatccatttgaaatatttaaaaaaaaaaa

SEQ ID NO: 222885 - DNA, 463 bp, Homo sapiens
actgatatgtgccatgacacagataaacttcaaaaacatgttaaataaaagaagccaaacaaaataccagcatcgtatgataaacgtccaaaaaaagccaatccatggggacagaaaatagatcagtggctggccatggctagaaacagggattaactgtcaacgggcacagaggatcttacattgtgggtgatgaacaaatctaaaactggattctggccatggttgtgcaacttgataaatttactacaaatcattttattgtacatcttaaataggtgagttttatgatatgcaaattctgcctccaaaaaaagccattataaaagagagagaaggttgggtgcagcagctcacacctgtaatcccagcactttgggaggctgaggcgggcggatcactttaggtcaggagtttgagaccagcctggacaatgtggtgaaacccatccctactaaaaata

SEQ ID NO: 222886 - DNA, 406 bp, Homo sapiens
gagatgatgatgtataacagtgtgtgacacattagtactatgtaatagtttgccactggtacagtattatcttttttctttttttttcctgattcagatcccaaaccccgctttgtaggtgcaggaaacaggagacccagaagtgtaattccttctagtgacccgcctaaagagcaggtcaaaggacaggaaggagatttagatggtttaaaatctcacagcggaggggattaatggagggggcgggcaggtgtacagggtggagccttcctgatcccagggctgaaggatggcggtcctggcccgccagctgcagcgtctcctctggaccgcttgcaagaaaaaggagagggagaaggaggggagggaggaagaggaggaggaggaggcggggcgcagggccccc

SEQ ID NO: 222887 - DNA, 392 bp, Homo sapiens
ggaaatcgaggcaagaagagacaaggcggcttctaaaatacggggattcagtcctacaccaaatgtctcccagtgtggaattttttaaaaagatattgatccagtaggccaggtgaggtggctcacgcctgtaatcacagcactttgggaggccgaagcgggcggatcacctgaggtcgggagttcgagatcagcctgaccaacatggagaaaccccgtctccactaaaaatacaaaattaggttggcgtggtggcgcatgcctgtaatcccaactactcagggggctgaggctggagaatcgcttgaacccgggaggcggaggtcgcggtgagccgagatcgcgccattgcactccagtctggacaacaagagcaaaactccatctcaaaa

SEQ ID NO: 222888 - DNA, 422 bp, Homo sapiens
ccttcatgtctgcatggtctctcagtcatgtcattctgtaccaaggtcttattactccccaaacccaggcattcttttgaggcatcaaattctgaggctgggagtttgatgagtttcttgcctctcctgtcccgtggtaggtgtgcccaccacctgtggacactggtgctgctcaccacactcttccctggcaccacgctcttctcctggacaccaccggcttcccttccctgtgttagggttggcagagcctgaaaagctgggaaagtggcacagactgtatcgatatctttcccactttgtgaatgacctcctcatattctccaggaccaaccaagctcttggggcctggggcacatgggaaccatgcagtgtggcctctcaggggtgcagggagccccgccccagaaaggcagagggta

SEQ ID NO: 222889 - DNA, 429 bp, Homo sapiens
cctttttggcaccagggactggtttcgtggaagacagtttttccacggccagtgggagagggttgtatgggcatggtttggggatgaaactgttccacctcagctcatcaggcattggttagagtctcataaggaacatgcaacctagaacccttgcatgttcagttcacaatagtattcatgctcttatgagaatctaatgccaccactgatctgacaggaggtggagctcaggtggtaatgctcacttgcccactctcacctcctgttgtgccacccagtttctaacaggcctcgaactgctactgttccatagcctgggggttggggacccctgcatcagaagatatattggttgaaaataatcaggttgaaggatgaaaaggagaaaaaaagactgtaaaataaaaagtatgagatgtataagta

SEQ ID NO: 222890 - DNA, 656 bp, Homo sapiens
cgcgtcccagggggcacctgcctagaggccaggcactgcactggaccctcagacacagcttgtgcagcctgcttaggagcttgggaaatgactgtcatctgtgatcttgctggtcccaggaagcccattttacagatgaggaaactgaggcccaaaggcacgaagcgacctctctcagcctcaccaagagcactggaaggtggtgtagggctgcggccgtgcgcacagagagcacagcagcaggaaggctcctgggcctccagctcccctccctcagaagcctcccagagtgacaggaaggtcagaggccccggggagggggcggggccaggatctggcaatttcctatccctctctgttggctctgtgcatctaattactccttgagtcatctgttgctaaccaggaggggaaattaaatattaataatgtaatacttctctgtgattaccccttgttggggacagatcagagggcagatgctgccccatacagacaggggacacatgctgcggaatgtgcataatgcctcttgaaagaaccaccttataggattccacgcggtcagactcaaaactgctgctgcttcctgccttcctcctcacctcccccaacctggccactttaattaaaactccatttaatcaaaaaacaca

SEQ ID NO: 222891 - DNA, 554 bp, Homo sapiens
ccacgcgtccggtttcaaaaaagaagagtaagtcaaaggttaaacttttggggcggaggaaaaaggataagaaagaggatacagagtttaatcagagttggcatcagatagagtaaccatggacatttggaagctgtaacctctctcatatttcgccaaggataactgcttcctgtattatcatgtaatgagttttatgcgtgatggaaaatgtaaaagtaatcttaacccaaacctgcattttaatgccacatggaccggctgtaatttatggcatctttaagatagatgggtacacatattatgaatatactttccttttgccagaccttgacattctgtagacttttaatggaatattatttgcctctttcatcttaccttgacgtatgaggtggatggcttacgtgcagggtaatgtatgaaccttcccaagctctgtacaaatataacttgtcattcgtagagacgtatgtatttatatgtgtgcatgcagtcttatttgtagattttcttcccatttgcttaatactgaacgctatggcctagatgtg

SEQ ID NO: 222892 - DNA, 494 bp, Homo sapiens
gctgggaatttagccccaggcccaaacaaacacgacagaccctttcaacgctaatcttctcgggtcaggaggcttgtgatattttgctatctttcttgatattttgaacccatcacaaggtctctaaacagggacttcgcttatacccagggcccctgaaatcacaaacaaaagacaactgtttttaagtagagatggccttggtagtttagacctgaggagagtcattcaaacattaattagaagacagattaatcagttaaagttcgtggagttaagacattaaacaatggggcaattaaacatgctagcatacccggagtctgtgttgataaactacctagaaatgtatcttgggagagtcttgaggattgagggctggaaaagcagcgcctgtacctgataggatcgcccctcctccgagactttcagttccattcctctagtccacatcataaaccaccaataaagctgaatttaaatcccagctatta

SEQ ID NO: 222893 - DNA, 392 bp, Homo sapiens
agggctctggcatatgcattgggcctctgtgaggttttaatgaatgaaggctgaagaaactccacagagatggtgactttcccccagcacagctcttgccctcaaggaagagacactcgaccaaacaggcaactggaaacaggatggcttcgtgggcgtgtgtgacttacacagggctgtgcactcagaagaatcccgtgactgacttaggctctgcagctgccatcttgaaattcttaataacttttgaatggtgttgggggtggggttggaggggatggtccacactttcattttgcactgggcactacaaattatgtgaccggctctgattaaaatgctacaagaactaacatgaaactggacacagaaaccagaccccagagcacata

SEQ ID NO: 222894 - DNA, 351 bp, Homo sapiens
agggctctggcatatgcattgggcctctgtgaggttttaatgaatgaaggctgaagaaactccacagagatggtgactttcccccagcacagctcttgccctcaaggaagagacactcgaccaaacaggcaactggaaacaggatggcttcgtgggcgtgtgtgacttacacagggctgtgcactcagaagaatcccgtgactgacttaggctctgcagctgccatcttgaaattcttaataacttttgaatggtgttgggggtggggttggaggggatggtccacactttcattttgcactgggcactacaaattatgtgaccggctctgattaaaatgctacaagaact

SEQ ID NO: 222895 - DNA, 676 bp, Homo sapiens
taccacattacttgtttctttataatactgtttagtaaagttatttgttatcacatttttggtgtgtttatggctcctaactcccaaccccaaatctgtaaactctttgtaggcaagaaaactatttattctttaaacgtttcaccaatgcctagtgtactgcctagcatgtagaaaatgctcaataaatttaattgcttgaccgactagagcaaaatagattaattattctcagtatttttttaattaaaaattccatctcattcacaacttaacagatgttaaaatattaactgtcttttcttgctggtattttctaatttttcctataccaaagaggctccaaaaatttgtttttatgaatatattattcatgggagggtcagtttagtggcagagttagattttttaagatagtagaatttcatgagatggagtgaaagctctagttagacatggacctcagagctggaagcccagaatccaatccagatttaacaatggcttgttgcacagcatggagaagttgatttaccttcttataacagtttcttctttaaaatatagattcagtattagtcaagtcccaactatacagatagggatgttggagaattaattaaagagtatctataagattctttgacttgactttaaaatgtatcattaaagtagt

SEQ ID NO: 222896 - DNA, 418 bp, Homo sapiens
ccactatattgtattgcagcgaatctcccttttaaatgtattaatatttgacttatatatttggatgctctggtgttgggtgcacatatatttaaaattgttatattgtttggttgtattgactcctttatatcattatgtaatggtgttttttgtcttttttcaaaatcattcgttttttattttttattttattttttcacacatttatttcagcaaaacatcatcctttgtattaagttaacattaatttggattttagagtttatatggttttgtttttatcttttatgtaagttaattttggttcttcagttgtgtaaaaattacaagggaaatgaatttatatataactagttaaaactgacacatacaggatacacattacaataaaaacaatttaagtcaatcctggaaa

SEQ ID NO: 222897 - DNA, 432 bp, Homo sapiens
tagttatttcacagatgccactggggtaggtaaactgacccaactctgcagcactcagaagacgaagcaaagccttctacttgagcagtttttccatcactgatatgtgcaggaaatgaagacattgcctgccatgcttggaactgggaaattattttgggtcttcttcttaatcccatatctggacatctggaacatccatgggaaagaatcatgtgatgtacagctttatataaagagacaatctgaacactccatcttagcaggagatccctttgaactagaatgccctgtgaaatactgtgctaacaggcctcatgtgacttggtgcaagctcaatggaacaacatgtgtaaaacttgaagatagacaaacaagttggaaggaagagaagaacatttcatttttcattctacattttgaaccagtgct

SEQ ID NO: 222898 - DNA, 641 bp, Homo sapiens
ggttgcagtgagctgagattacgccactccagcctgggcaaaagagtgagaccccatctcaaaaaaaaaaaaaaaagaaaagaaaaagaattgtggcctgagttcatggaaactagttctggatatgttctgaatattaggtcattttagagtttttgtttgtttgtttttgttttgttttttttcaggaagccttttggaagcattttgtctgattctgattcattgtgttgaattggctgctaaaaatgttttgttcatttcccactgacatgatctttgacacagcatgtacagtatcaaattccttagctgttctatgtgttgaaataattgagaactctaccattcagatttgaacctatctacataacactttgctttctgtggtatattctgctgttcccacatctccctcttgaggtcttcctctgctaattatttgcctttaaggcttcccttgtacttcagctctccatgagctgctataagcagagaaggctgattaattgaaacctgattgtgcccttcatgggaatgcaagtttgctatagtaatttggtggcactgagttcagccatctgttcatattttcctctgtgaaaacactgtgcaagattttccaggtatacataaggctt

SEQ ID NO: 222899 - DNA, 308 bp, Homo sapiens
acagctcatacttcagtggtatttgcctcttaagtcacttaccccttattactctgaacaaaactggaatccgaaaaaaacaaaaacaaaaacaaacaaacaaaaaacactggaactgtggctcatctctcagggaatgagctgacacttagtagaatctatgacatgagggctatgttagagaccctgaaatgaagctgggtgaaaaatatcaaggtgttgtgagtgacaaagatgatattccaaagattcaactgagaaagagtcagtgtatcttattattaaaattgcttctgtaagagtcatca

SEQ ID NO: 222900 - DNA, 426 bp, Homo sapiens
tcacacatgtaatccagcactttgagaggccaaggtgggaggatccctcgagcctaggagttcgagaccagcctgggcaacataacaagaccttgcctctatttataaattcaatttattattattttttttaaaaaagggagagaactgcgaggaaataaaaagagaaagggccaaggccaggtgcactggctcacacctgtaatcccagcactttgggaggccgaggcaggcggatcacgaggtcaggagatcgagaccatcctggctaacacggtgaaaccccgtctctactaaaaatacaaaaaattagctggagatggtggcaggcgcctatagttccagctactcaagaggctgaggcaagagaatggcatgaacccgggaggcagagcttgcagtgggcggagatcctgtcactgcaat

SEQ ID NO: 222901 - DNA, 412 bp, Homo sapiens
agagcacaactgagctcccagaaaacagccagcatcaatggctgggcatgtaagccagctggcatggacattccagaccagtctgtccttttgtcaccttagctacagggaaggcccatgaccccagaagtgcccatcattatgctgaattcccgagcctcagtggtccaccgaggtgtggaagcatgtctcacaagggtcagatggagttctggcctggattgatgtgtagatgcttgagggagaagctgggtttctttcagctggggtggctctgctgggatgtggtgggccttgggtttccaggtggtcattttccttatttgcagtagaaggaatgaggcccatatagagaatagagcaaattaaagggagagaaagagaaaaaagtaaggagagaggaagaaagaga

SEQ ID NO: 222902 - DNA, 538 bp, Homo sapiens
gggacttgctgtgatacctgccaagtttccttatggaggaaggaacacatacctcttctaggcagttgacataagagccttgagggttaagtgactccactgacctccacttcagatgcctggagaatcaacgtgagcacagataggctagaacttggggatgtggagctggagtgtgggtttcccacagaagttgatgggagcagagtatggatggctctacatgctgaagaaatcacttcttgtactttggcttttcttgttagggagggtaggcgagtctataagatgtcaaaaggagtttttaacactggtcttacatcactcaagggcagattgatcagagacagactggaggcttgaaaaaacatacctttggcataagagaaaaaagtattgcggaaataggagtagttcactggagagttgccaatagaagctgaaaattcttcagccttttgacccataaagtacttggaaaaatcttatactgaaaaaaaaaaatcaagttgcagctagaccagagggatgtagaatc

SEQ ID NO: 222903 - DNA, 702 bp, Homo sapiens
gttttagggtcagtgaacagtaatgatttaggtatacagctaggacctacatttaaattcttacctgtctactaaaaaaagattataaattttcatcgaagattaaaattatcaaacttttttaaaagaagcctttttttattttgagacggagtcttgctctgtcgcccaggctggagttcattggcgcaatctcggctcgcggctcactgcctcctccaccttccagattcaagcgattctcctgcctcagcctctcaagtagctggcactacaggcgtgtgccaccatgcccagctaattttttgtatttttagtagagacagggtttcactgtgttagccaggatggtctggatctcctgacctcgttatctgcccgccttggcctcccaaagtgctgggatcacaggtgtgacccaccacgcctggctcatttatttttgaagttccaggtagggtaataatatcttagcttagctttaaacagtcttaacagtcataataaagttgaaatgcctttaaatgttgtacctaatgtagtgcaatgaaagagctctgtgtaagggcttttctttgtattgattaatttgagatgacttattaagtagtgggaaaccctaacagttggtttttgacaggaaaaaaaaacaccttaaaatttgttttttagggtggaaaaacagggaaaaggctgatgttt

SEQ ID NO: 222904 - DNA, 2503 bp, Homo sapiens
  misc_feature (1299)..(1299): n is a, c, g, or t
agctgattttctgacagccccttctcctctcctcactggatatccagtttccagggtctgtgtgtggtgggaagcaaactggcctgaggttccatccactggtagaaatgaccccaaagacttcccatgcagggagggcaaagaagaaagtgctttggaatggagataccccttttcctcctcctgaatgtatcagagttagttatcaatgctgactgagtgtgcactctcctagacaccatggggagaggcagaagaggaaaccagatatggtccttcttcttgggactctcctgacctaggaaaagagacagatgaatgcagataactgagtctatatacagggactgccacaagctcacactttactgaatgttcagacctagtcatacatcctaagggcattgttggaagcttctggaactaagtctctggggatttgaatcaactcagaagactgactcattcacttggctgtggaggctgttccagatattaggagctatgtatgtggagccccggatttgggccaaaagatgcatttgactggagagaagggattgagatttgagcagttgttggacaacacagaaatgaaacagccatagcaaacttgcctgccgtgatttctctgctgagataatgggacttttcagactccctgtaactgagatctagataaaaagagacgtctggaaaaaaactggtcccaattgtcgcttggctttgctttcataactatctgagtgtggcatatgtcagactttgaaatgctgggtctcttggaaatacaaataccatctgggtctggataattcccagaaacctaggctactcagtaggaaatgaggagctggaaacataataccgagaccaggggcttgtccttgggccaccctgtctcgtgtcctggacacagtcacatgactcgtacagaaaatgtcactgggaagacaccataaggctcatcttttcacgacacagtgacctctgttatggacatcttgatttctctttgagaagccatccctcccccagtgtgtatagtctagcagccaagtccgccttgcctctggccaagggcagcctgaaactcaaacagggcccatcccttatccctggatggaaatcttgagcagagtgcctgacgggactgaagatggctgaaattccagcaagcagacagtggttctctgaagaggctcccctccgcccacacccatgagtgtctgctccccagatgctccaatcctacttctccagctttaccttctgttccataagctgcttcattttctntctccaaatccctcttttgctggttggacaaagattgtttctgttgcctgcaatcaaataacccaaaaggatgaacaggtgaaatcataaacatacttttaagtgcctggaatatgcctgcttctgtccatctttcaacccacttgcatcagaagcccccttggaggatgagagcctgtcctgtgaaccatggtggttcagagtggaacacagcagagtgtggaacaccaggaatttagagcaatcagtgaaatatgatgtaggcctctatgtcagaaaaattactaataagcagttgattattagtaatcaataatagccttcccattttatatcgagcacagcagtcagcatgttaaaaacaaggactgctggacaccagctgcgatgaaatgctttatcagaggacggcccttgatgtctatgtccatttgcaagtgcggcattaattacaaggctggtttaagtataatcagtaagtttatatgctggatgctcaagatgatttctggctaaacatggaatttctatttctattttccttatgttaaaagccggaacagcaaaatgtattcctaatgtcactattatgacatttacatcccgaaaagttgcagtaactgatcaatacaatagtggaatgcctggaaacctgttccttttttgctaaaaaaaggagggcactttttatgtctttgatgtgaagttcatgttctttgacagtgattgatggaatatgctacagaaaaggctgattacattttactagagaagtaaaaaagaaatgcaggagaatcccacagctctgggattgaatggaaagcaaaggaggagctcctctagggggctatgggatgcctctgtgtagctattgaatctctggggccatggatgagaatttgcttggtcagtaggtcagcattcaagagtatgggctggatgcagagtaaacgacctgctgagagtaatggccactgctttacttctgtcttcaaaatcctgaacaagctcctcttttggccaactctaacctggaaccatgcagattaggaagagaaagagaagtggattgtgagaaagattttagcttggtcaagttgataacgggatgattcagaagaatgcaacccttatcaactaggtatatctcttttttcctacatttattgtccaaataaagcaaaatcatgctttcacctgcctg

SEQ ID NO: 222905 - DNA, 420 bp, Homo sapiens
gatgtcgacactggacatccttcccagggaggtagttcattcagtcatggaacatttcaaggtgggaagaaggtgttcatcacatggctatgatcatgtacccattgcagaccaccctgtcctgggggcatgaggagttcatctcctaaatcagtggttctcaacagggacagtcctccctccccagaggacatttggcaatgactggaggagttgctactggcatctcctgggtggaggccaggcagggctgctgctgaacatccctgtctagtgcacaggacagcctccaccacaaagaatcatccagccccaaatgtcaacagcaccgaggttgagaactctgttctaagccctgaaattatcatttgacaagcgcaattataatgcaatgtctttttgatgcaccaaaggcattaa

SEQ ID NO: 222906 - DNA, 464 bp, Homo sapiens
gttctaactttttggttggcaatgaatcactttttaaagtatgtgttggccaaataaaatagatatccagtcacccgcatgtgattcttaattgtatttttaagataaaccaagcaggagacatttaaaaatcttctgtcacttacatgtctctggctacacatgttgtcttataccaaccaggaaaggacaacggatcatttcctggtcgtgctacccctttacccacgtgctcattcataccctgtgatgcatgcaaatggcaccactggcctgcatcctacttcgtgatagctggttcttgctcagaaatccaagagaacttaggcatcagttatcttgtaggtgatatggccagatggtttggaataagtgtgcctcccatttctaattagagctcatccctgtgttctgcactgggattgctgttgactcctgttatttcttgctaatccaagctggaa

SEQ ID NO: 222907 - DNA, 720 bp, Homo sapiens
tttaagatttcttaaaatctttcagtgtctagaaaaagtaaattaagagttttaaaatagttataattaaaaatttgaaatgttcacaaatacctgcttttaatttcatacccaaggaggcttactgatttccagttctaaggcttaaaactatacatttcaaaattcactgtagcatatctctctcacaaaaggaagactaggcagttctacactacaatgaaatttattgccagaacagtcaggaaccctgcaaagaatacagtcagtgatggtaatgaagaaataaaaagccatgaacaagacccaggtttcccctttcttctaattcatatagaagtcatccggctctgcaaatatttcatggatatgttttatcttagagaaagaaacaacttacacaatatgcccctgtaccaaacctgcacccctgaatcttaaatagaaatggaaattgaaaaaaaacttaagctctagattcctcctctctctgggcagggcatctctgaaagaaaggcagcagctccagtcaggggcttatagataaaacttccatctccctgggacagagcaccttggggaaagggtggctgtgggtgcagcttcagcagacaaacattcctgcctgccagctctgaagagagcagcagatctctcagcacagcgcttgagctctgctaagggacagactgcttcctcaaatgggtccctgacccctcg

SEQ ID NO: 222908 - DNA, 545 bp, Homo sapiens
gcctgtaatcccagttaacttgagatgctgaggcaggagaatcgcttgaacttgggaagcagaggttgcagtgaaccgatatcacaccgttgcattccaaggcaagactcaatcacacacacacacaaatcatggggagaaagatgaaacctgtgttcccctttttttggtagtgcccacatctggtgccccatttttaataaccacaggatatttctttagattgatattctcacaaagaagaaatagaatataggctgggcgtggtgtgtcacacctgtaatcccagcacttacggaggccgaagccagcggatcaccagaggtcaggagttcgagaccagcctgaccaacatgatgaaaccctgtctctactaaaaatacaaaaattagccaggcatggtggcatgcacttgtaatcccagctactcgggaggctgagacaggagaatcgcttgaacctgggaggcagaggttgcagtaagccaagatcgcaccattgcactacagcctgggcaacaagaggagcgaaactctgtctcaaaa

SEQ ID NO: 222909 - DNA, 747 bp, Homo sapiens
gcagtggctcacgcctgtaatcctagcactttgggaggccgaggcaagagcatcacttgagctcaggagtttgcaaccagcctgggcaacatagtgagacctcatctctatgtatacaaaaattttttttggaaagtttttcagaaagttaaaactattcttagtttgcagattgtacagacacaggtggcaggccatacttgacctacaggctggactcctgggtgagatgaagcgattcactttctacatggttggggggcaaaaataccaaaagaagactatttcatgacatgtgaaatcccagtttccagcattaagtcttactggcacacagccagctccctggtttatgctgtccgtggctgctcccgtgttgcgacggcagagctgagatgctgtgacagagatggtgctcggcccactgccgaagtcagccccagagtgaggacttgagttgccctcttggcctgcaatgcctccaatattcacctggccccttacagccagtttacctgccctagacctggcccaacccctagcccagagactttttaatgccgtggaaactgaggcccagaacaaacttcccaggttctcacagagcattcgtgacagagcagaggtctcttctgagtgttctagcagaggcagccagaagacaaaggaaaaagggaatgagatagaatgcaggagagacgacagtggcctgtgacctggtggacatcacccctgcaccaaggggtg

SEQ ID NO: 222910 - DNA, 355 bp, Homo sapiens
ggaacaaactcttgatacatgcaacaccatggatgatactcaatggaattatataatgaaaactctttttttgtctggcttctttaactgagcatgatgactatgcttatttaaattctacttatttagaattctataaattgcaaatcaatttgtagttgcagaaaacaaactatggttacctagagatggcggggggagggaggttggaggggctgtgaaggtttagaagggctcttttgagactgatagaaatgtacacttccttgattgttatggtggttgcttgcatgcatacaaatgtcaaaactcatctaatggtacattttaaatatatgcagtttattgttcatga

SEQ ID NO: 222911 - DNA, 362 bp, Homo sapiens
ttgaaacagtctcactctgtcaccaggctggagtgcagtggtgcgatctcaactcactgcaacctccacttcccgggttcaagcgattctcctgcctcagcctcccaagtagctgaaatgagaggatctcttgggcccagaaggtagaggctgcagtgagctacaatcacaccactgcactgcagcctgggcaacacagtaagatcttgcctttaaaaactaaacaaataaatcaacttttttaaaaaacaattttttcccttaacggtattttctagcacctaatattaaatacacatggtggttatttcatgttttctaggaaacaagtaactaacataaaaacaaaaaataaataaaat

SEQ ID NO: 222912 - DNA, 315 bp, Homo sapiens
attcaattaaatatttcctgaagatattaactccttagaattctattcccagttctctgctcttattctgcaggcctcatatagattaataggtaactccacctacactatgactttaactatcattgatatgctaatgactccccaaatctaaatctagagccattactctttggttcaagaaccacatatgggctggtatagtggttcattcccataatcccagtggtttggcagctcgaggctggaagattgcttgattctaggagttcaagactagcctgggcaacatagtgaggccctcccatctctaaa

SEQ ID NO: 222913 - DNA, 404 bp, Homo sapiens
gtaggattgttatgagctttaaatgatctagtccatgtaaagacatagatgagggcttggcacagagagaacactattgtttaaaaatagggtgacttaatgtgtgtaataagtaactggttcattgcagtgtacaaacatgaagtgttttctttttattcagctgacctctatcaactactcctttcgtatctcaatatcttgggcccagccaataagtaactgggcactttgattttcaaactcagtccagcccagcttaaactttccacctcccaaacttgcaagaggtggtctctggcttcttctgagctcttgctcctccagtgtggtgggtgagggggaggaagggagaaaagtaaagtctcttcactggccatgatgatgaggatggtgagaggaga

SEQ ID NO: 222914 - DNA, 600 bp, Homo sapiens
tataatgaagttattgagtacttatcacatgcaagacactgagctaagaaatcttaaaactcaaagatacataatatgtagtacctgcatgcaaaattctaccagtctgatagggaaaagacaatgtgtataactgatacacaataaaaggcagaaagtcatgtgaaaaaagagaggaagagaggctttcttatgaaaatccaaaagaggtcaggtgcggtagctcatgcctgtaatcccagtactttgggaggccaaggcgggcagatcacttgagcccaggagtccaagaccagcctgggccacatggcaaaaccctgtgtctattatacaaaaacataagaattagccaggcatggtggtgcatgactgtaatccagctacttgggaggctgagataggagaatcacctgagcctggggggatggaggctgcagtgagctgtgatcatgccactacattccagcctggctgacagagcaagaccccgtctccgaaagaaaaaggaaagaaagagagaagaaccaaaagaggaagaatatctttgcctctatttacactttgaaacccttactttcttttagaccaagcttaactcct

SEQ ID NO: 222915 - DNA, 574 bp, Homo sapiens
ctgacgccaccaatcaaccatagataagttacttagccaacttgtgacttaagtttcctcatttttaagaagtggagataacaatatcagcaataacaataatcaaaacaataatgtcagcaagccattaacacattagttccacccagtagagacacatttctaagtgtatgttagacacttactgtttcacccatctggcatttctatcactccatttgccatggaaatggattccatgagaagagaaaaaaagaggagcttctctccaatactttcaacagaggagacaggaagagggagaaaaaaattttccagtacaatatccaaagcccagccaaactgtgaatgcctacaaaccactcagagaagtttcttacgtcacctttgtaatgggtaaagtggtagtaatattatctcaaatggcaggtggacagattttggaagtagtgagttaaataaggcagctttgtcgtagactcatacatttccactcatagccctgccctccggcacccccttgaccctctggagttccttggaggacatgaaaatgtgaactcacagccccagg

SEQ ID NO: 222916 - DNA, 317 bp, Homo sapiens
caggatttgtcaccaccttcagtgtgtgctaatgtgtgtgtgaatctctgcagaggaggtagtgggaggatagattgtagcagtgagtatttaccaatttcatttgactaacaggtccccttttctacagagagccccacccatctttttatccttattttataaataaagagacttagaacttgttcaaagtagcttgtcccagattaccaagctagcaagaggtggacttgggattcaaatccagaaccctctgtctctctctctctctctctctctctctcagacaggttctcattctgtcgccacgtcgacgc

SEQ ID NO: 222917 - DNA, 436 bp, Homo sapiens
acacacacaccattaaacaaacaaaggccagtgggtctcttggctaaggattctatggtgcatatgcaagaaatgctactgataaggaatgttatatcaagtttctcaagagtggataaagctgaccaatctagctgctatacttggagaggataatatggatggtgtaaattagaattgtatataagcaataagttagaatatggacagtcttttttttcccccttttttttttttttaaagaaaatggacattctttcatgattcatcaaaagaatcattggagaaactgatttatcatgtgacctcaagtgtttcttggaaaccttttggaggaaaaagaaattaaacatgctgaactggctgaaaaaaatatagaagaagcactttcagatcatattaaatatatacaaactggaaagaatctatgcacaca

SEQ ID NO: 222918 - DNA, 355 bp, Homo sapiens
gtcattcttgaatgtatctctcattgatatgatcagtgtcagtatgttttagatgaattattagatttcaggtaattttggagctgtgaagctctgaaagctgcaaagctctgaacttctctgaaagaaaagctctgaacttctctgaaagaaaaatgtatacgttgaagccaggaggcatactttttttcttgctggaacacccaataagatgatgagcattaaaaacaagtttactgccttaacaagatatagaataaaataatgaaacaataattaaagtttaaacagattggtgatacatttctacagtgtttactctgtgagaagggaaggtagaggtcaagagaagaaa

SEQ ID NO: 222919 - DNA, 423 bp, Homo sapiens
caccgtgcccagcctataacagaatttgaataaagttctagatgaacaatgaaggagcaactaattttgcctgatgaggttcagaagatttccctgaggaagtgacaagtgtagctgggtcttgaaggataagtaggagtttgccacgtaaaaaagactagaaaggcaatttcaggtgaaaggaaacaaacctaagtgcatttcctactgaggagaggggcttaattcagtatgatggaaatcagcaagggttgagtctggaaaaataaaattgggtcaaattagggaaggccttaatgtcttgttcaggactttgacttttatcctgtagggcaggcctatcattctcacaagtgtgatccgcagaccacctgcatcagaatcacctggagtgctttattaaaaatctcacctcacactcta

SEQ ID NO: 222920 - DNA, 454 bp, Homo sapiens
gtatcgacgtgagattttgcaaatttgaaccataggttatatttgtaagattgttctctcagttattaagagtttgaaattggggttgaactgtgtctaaagctatggtttatgtgtatgtttagtttatgtagttgctgtgtgcataacatttggcaggggaaaatgtttttactttcaaacaaactgacaagaaattgttccatcttgaatttgtgtaagaacgtttcagaactaaaacaaacttaccaaaactaggtcttgtccattaaatgagataatgcgtgtaatgtgtctagcaagtacttggaaattattattgttaagactgtcttatagtctaacttatcaactacaatgatgcctcttctgaatttcctaatttcttgcctttatctttttttttttttaattatactttaagttctgagatacatgtgcggaatgtgcaggt

SEQ ID NO: 222921 - DNA, 434 bp, Homo sapiens
tacagtcagtcagacctggtcttgagtgtcagctcttggctctgcctgttattatttgtataactttgagctatatactttctctaagcctcatttttcattttttttgaattttaatattcttaatatttttaaattttgtttcaagttctagggtacacgtgcggtatgtgcaggtttgtttcataggtaaacgtgtgccatagtggtttgctgcatctatcaacccatggacacagggagggcaacatcacacactggggcctgttgcggggtgggggtctagaggagggatagcattaggagaaatacctaatgtaaatgatgagttgatgggtgcagcaaaccaacatggcacatgtatacctatgtaacaaacctgcatgttgtgcacatgtaccctagaacttaaagtataataataaaaaaattca

SEQ ID NO: 222922 - DNA, 552 bp, Homo sapiens
tcatgttcactttgaaggcttcagaaccattgcttcgacttagtattttatcagcgaggtgcagaggaggccagaacatagaagtgcccatcaggatggaaagactttagaacttttcatccctttaatctttgtaaatgcaaaatgtgttgtgtcaaaggaacgtagatcttatactattatcatcaaaagatttgaagttatttttcttctcaaaaggaatctgtgatatcaacagttgcatattgtttttctgttgtaaatcaaacagcttggaagaaaaatgttgccatgttttttgaaagggcagcacaaactatgatcattatggataaatttgagagttcatcctcatgaacttttaatgtttcaactgagtggcagttgcaaataaaagcgatgtaagatcaaagtgtttaatattatacacacatacacacacactatattcaagattttaccatttgtattggaatagattgtttaaagaaattttatagttgaagcattgattgatttttccaagagtttcttttgatttacaagcttgta

SEQ ID NO: 222923 - DNA, 213 bp, Homo sapiens
agtatgaacccctaggaggccttgttggccacaaagtccaagatttttttccagtttacagattagtttcaaattccgtactaccggtactccactactacccaagagtgagccctcagtaacctcattggagtctttcctcattggaaactagattatctttacaaacccaacaattgctccagttttttgctagaacataaaccttaacta

SEQ ID NO: 222924 - DNA, 494 bp, Homo sapiens
atgttgtgtactgaaaggatcgattaaatttgaagtcttctatttcatggatagaacaatttttaaagcatttgcaatgaattcctggattctggtttgcagaaatattcattatttgccaaatgggtaatttgcactaaaaccaaagttgatgttacttcagtgcccccttaaaggaatgtgatgttttatcaggcttagaaaaactgctaccgaaatagacataaatcccttctatctgtgaccttctatggcaaaggtttgtactctttaatctgtaataatacaagtacttggcatattttaggtgcccagtaaataaatgaatcactggaaagactataccccttacactcctgccttaagctatgttaaaaatttactgggaggctgaggcaggagaatcacttgaacccgggaaggcggaggttgcagtgagccgagatcgtgccactgcactccagcctgggcaacaagagtgagactccatctaa

SEQ ID NO: 222925 - DNA, 434 bp, Homo sapiens
ggggctatgctccatctccctgccccggttgttatgtgtatacccctacaagaatactcacctcttgccttcaggtggcatttttcaactccgctggagccaatgcccaggaggagcaaagggtgtgctgccagcccctggctcacccagtggcctcgtcccagaaaaagccagaggtagcggccccagccccagagagtgggggtgagtctgtgtttggggagacccaccgggccctgcagggggccatggagaagctgcaggtgagtaggtcctggcatgggccaacaaggggggcgggggggcaggacaaggcaggtgactcctgacatgtgaccccattattttggctccacagcgactttatggaaggagaaggtggacctgaaggagcgggtagagaaactagagcttcaattcatccacctctcagg

SEQ ID NO: 222926 - DNA, 571 bp, Homo sapiens
tcaaagtcaggagtttcaataattggtgtgtagggatagggatatgtgatttgggcccttcttaaagtggtcctgtgttgtctgtatctgcctctacttatctttatgtctcacattgaattgtgtgttctcattccagcataaggaatacctgacactagcctcaatgaatgatgtttattctgtgagtattagatgcgtatctaaaccagttattggactctattctgtacagcactcaggagaaagaatgatgtactatgcaacatgtgggttcatcaggtgctcacttatatatgggaaaagtgtcaccatgtggtcagtgtgagagccacattcctaaaagcagctgaatcactaggaccctataaaatgtatttgctgtttctgctgccaaacacaatatgtggcattcaaacttcttgggatttcctagaaatacgtaagttcaaagaatgactgaatataagggtgcatatgaaggtggagtgcacaataaaagtaataacagggatgaaaggagaagttaccatccatggtaaatagtgtgccagacactggaaactagtat

SEQ ID NO: 222927 - DNA, 460 bp, Homo sapiens
tgaacctgggaggtggagcttgcagtgagctgagatcgtgccgctgtactccagcctgggcaacagagcgagactctgtctcaaaaaaaaaaagaatgaagtcacttaggcaaaatgtagaagatacatactctatgctttcactgaaagtctaagcacctgaatgtgacttacaagtagggtgaccataatttctgatttgctgagaatagcctggtttatatctgttgtccctacctaagtattaatattgcctggtttcactctcagtaaagtctccatttgtacaataaatttatattgttattctttttagaaggcccttccagatctagcatcttcctatatctttatcatcactgccctatcttagactccatttgccagccaggtggacataccttcatttctcatatgcactcttaacttcaaggttttttttgccaaggtactgcctacc

SEQ ID NO: 222928 - DNA, 1009 bp, Homo sapiens
ccaatctgggcagaatgtgagataaactattaaaactgccaacatttttctttccacatcaaatccaccaaagtcactgaataaaatatttaagcatctcaagacggaagagctctgcagataacttcagtataacctggttctacagaaacatgttcctactaacttgcgaaaatctggccagtagaagttgccttcttttatacttaccactttctatctcccttctagtttcctgatgatgtagaatataaaggaaagaaaaaataagccacttgcataagccaagttatggcttttgtcttagttttatttctaaatatccatggtgtataaggctttgtaagtcaaaaaatactgggaaaggcattcaaattcaaatcaaaacaattatggtgtaattttcacaataagtaatgtcttaaaactctgtttgtattcatagaaatgacataccaattagtttttcttctcagtcaacaagacaaagaggtaagcataatcagttatattataaactaaaggcaaacattttcctcaccataaacacaggtgttgatatattaaaatctgagacaaatatttcatttgagtattcaaaatattttaaatatacatataacactatacaagctgctttagacatcttcagtatttagccaaaagtggatataacaacgaattatagaactgttgcttctgtgggctgattcaagttcaaattattttgtccaggagcacaagtctctaataatttcatgcattaagcaacagaatatttaaatctgaaaatcaaactcaactgggttcaaggtacaattattttaaagggaattgaattatctctgccgaattcaagagtatatgttctacataaaggtatcctaaattaaaataatgaccaaaagaacatatctgtgataagtctggtgcttagatagacaaattatgttacttaagtgaagatttaaataacttctacgaccatgagttaatcattattttttca

SEQ ID NO: 222929 - DNA, 427 bp, Homo sapiens
atttattatcagcatcaatggaaaccagaagttaatggaataatacctttcaagtgccaaaagataatggtcaactagaattatgtacttgcccagactaccttttaagaagagtgaaatagagacatttaaagataagtgataattgagagtttagctcagagatatgcacaaaactcctaaatgacatatagtcatgcactacatgacaaagttttggtcaataacagaccgcatatacaatggtggtcccataagattatattggctgagtattgctaatccaaaaatccaaaatccaaaatactccaaaatttgaaactttttgagtgccaacatgatactcaaaggaaaggttccttggaacatttctttggattttcaggttagggatgctcaacactaagtatcatgcaaatattccaaa

SEQ ID NO: 222930 - DNA, 352 bp, Homo sapiens
cgtcgacttttctcgctgctgtatgtaccagactagcctgcctagactagcttcgtgagaattctttgttcagttttgagccccattttttaatggggttgtttgattttctgaagtccaccttcttgagttctttatatatgttggatattagtcccctatctgatttaggataggtaaagatcctttcccaatctgttggtggtctttttgtcttattgacggtgtcttttgccttgcagaagcctaaaaggcacttttatgggagtaaaatggagcaatggagaaatgactcagaagtaaagagtatgactgctttttcagaggactgaagttctattcccgtcgacgc

SEQ ID NO: 222931 - DNA, 569 bp, Homo sapiens
cgtcgacttttctcgctgctgtatgtaccagactagcctgcctagactagcttcgtgagaattctttgttcagttttgagccccattttttaatggggttgtttgattttctgaagtccaccttcttgagttctttatatatgttggatattagtcccctatctgatttaggataggtaaagatcctttcccaatctgttggtggtctttttgtcttattgacggtgtcttttgccttgcagaaactttggagtttcattaggtcccatttgtcaattctcgatcttacagcacaagccattgctgttctgttcaggacccaacattctgctgcttacaggaaacccatctcagggaaaaagacagacactacctcagagtgaaaggctggaaaacaattttttcaagcaaatggactgaagatacaagctggagtagctattttaatatcagataaaaccgacttccaacccaaagttatcataaaagacaccgtcaataagacacaaagttgtatctatgtcgagcgatcgcgcgcccgtctacgcgttctccaatttattagttta

SEQ ID NO: 222932 - DNA, 367 bp, Homo sapiens
ttctcaaccttccacaccgcctctcatcacagagctctggtatgatggctctgttgggaaacttctctctccctggttggcttagctgacctccgttccagtgtcactgcttcaggacgcttcccccgatgctgtcagaccctgacggcaggcccctgcagtgctatgtgcttctctcccagcatgaacacaagctgcagctctatctctctgtgattcttggtcaatgttcaaatccttcgctggactgagcactccgtgagacaggaatcaggcctatttttactaaacattgtatccccagagtcaagccgggcatctggaagttggttggtgcctaagtataatttataaatggatggatgaa

SEQ ID NO: 222933 - DNA, 409 bp, Homo sapiens
atacagtggggatgatgcccacctgtgctgtgtacagatctgcttcctgtacaggcctagagacacatcacatatatgtgtttctatgcacaggtctatttctaagtgcatttctatttatattaaaattttatttaatttaatgttatctcttttcaacctgcctgtcttaatctcttcctttcattttccctctaaacacagccaaactgaaataaaatgcaaaacaagcttcatttctcctatccagcatttaatgtctttttgctaagatattacaggagaacacacaacacacgtgcattcacatggactcactctacaccacctttccctgccttttccagaaatgagcccactgtcacagggcctgctgcgttctcttaaaggtcatggggagctctgaatg

SEQ ID NO: 222934 - DNA, 412 bp, Homo sapiens
gaaattcttaagtgctgttccattagagatttttatgagactcaatactctttcgggaaagtctaatatttaggtcacctttccagtaagaaatttgtaacataaaggatgtgtacacacccaccttcccatttttttttaggaatcagagtgtgaagttagttgagactgacctccaacgaagaagcctgttttccaccagcactaaggcttttatatatttctgatccaagaaggtgacttttgcaggatagagactaagaacatttagcaaagtgtgtttgtaaaatagccaaaggtttatattgaagcaccctcttctctgtcccctaatgtgcaatctgaatgaatggaagtcaagaaagcaaactaaaactataattaaaaggcacaattactcatacaaactcca

SEQ ID NO: 222935 - DNA, 516 bp, Homo sapiens
cttaattgttcctgatttcgggaggggaaaatggaaatagcatttccgttgcatttttgtgaacaaaatttgagtgatcatgttctttgttgcatgtagtagatggagaggtgaatgaaagattcagctttcttcctgtacttgaggcatctgtgaattgggaattcagacaaacagataagcaactaattctggatataaaatttgtgatttaggctatgcattctactggggaatttcagatgtataggaatgtagttgaaatttaagtggtcagggaatgctatctagaggaagaaaattatgactagagacaagaataaatagtagtaacttaaaaaaatatatatcagggaagaaaaaatggatttttgttccaggaaagaaactaagtatgaacagatgatgaactatttcaggaactgtgtctgcaattcgttccttccagtgggttcttggtcttgctgacttcaagaatgaagccgtgcaccctggcagtgagtgttacagttctta

SEQ ID NO: 222936 - DNA, 388 bp, Homo sapiens
tgggccatagggaatttcccttttggaatcaaaatttaggagatgcaattctgagaacactgaagctaactgaaacttccatttggaagatcctattctcttgagtccttctgtgtgagctgcttcaggtttcatgctactttgccccactttgttgctatattttgtaacagcagaggaagggggaaaaaccctcatcttctgatgtttatttgactattgaggctaattgttcatttgctgaaaagaataaaagaccaagggtctctaaaatactacattgtctgtgtgtgtttgtgcacatgtgcatatatgagtatttttgcttgtacatgagtatattctttgtccgtgtgtgttagaaagtgagatgtgagcatcaagctta

SEQ ID NO: 222937 - DNA, 550 bp, Homo sapiens
gccctcggtagcctctggggtccaccccaactccacgtagccccccagaagcaaggaacgcaggctcagcatgccaggattaagcctgtgggtccaacagatgtgagctcaagtcctggctctgtcacttcctagctgtgcaacttagggcaagtgacttcacccttctgagcttccacctctgtcaatgtaaatatgaacctccctccccaggttcaaggatctgtccacttaggacatgaggcgctttgcatgggagttctgaacactgtcctctcctgcttcaaacagggtcttctcggtctccttgctcactgggccccagggccccaactttcctgaaggacctgtgcagggccctggagacacaaagatagatcctgcccagccctcccctcagggggcgctctatccagcgaaagacagacacatgggcattggcaggaaacagtcggagctcagagtcagaagcctctgctttcaccgttaaggacaggccaagacagcacagaagcagcccaggatggaaccgtgggaagccccgcaagta

SEQ ID NO: 222938 - DNA, 594 bp, Homo sapiens
tttttaaagtataatttgagttgttacttgatcgagagaaaaataggcatcatgatttgaaatactgccaggcattttttctagcgtcaatgtgaaggagggcataggattactatagtcagtcaaacatgagcttggtagttacgaagaagtataattatttcagcaagctttttttcccccttctgtttaagtagacccaattccagggcagatgtgtgtgtgagcgtttgttgaacgccaactattgtgcctagtgctttttcaagaaattttgtaattctcagtcatccagcactgaaactgacttgccctttggatccaggcagacatgggtccttgaaactcagcacagccatttactttttgtgggaccttggataaattaacctgtctgaacttcaatttcttgagtatgttcaaacaaatcttgcaatgcagagcacagtggcccatagtagtaaccttggacgtatccattaccactatttcctataggcctgcttttgccatcttttaattcttctaatgcttctcaaaaggttacatgtggtaattttataacaagaatgatcaaactcacaaacagcagcc

SEQ ID NO: 222939 - DNA, 513 bp, Homo sapiens
actaggtacttttattccaagattcaaggctgattttctaaatgttggcttagaggtgctactctcagatcagaggccagtgcattcctgaagaagcatgatgactgaatgtagagtgggatttctctcactaatagctagaaagtgttcgtctcactcagtgggctaaagagaatcaccaggtatgagaggttgtcacagagaaacttaaaaagccattttcttaaccttcttgttttggactaaagtgaattgagttacttgcctggggcatcaagttaaaaggaggtgtggaaaactgagatcaagatatataatattttaatgtagcaacttgtcctcacttgaatcaccctaatcttggccctgactgagatgctgacatgtctaaaatctcatttatggaaagatctaaagataaaacttccacaaatctcatttatggaaagatctaaagataaaacttccacaaatgtggacattcttactgacctatgcattggtgttactatt

SEQ ID NO: 222940 - DNA, 376 bp, Homo sapiens
ctgcacgagaagagaaggatgggactcattaatagaaatcaaattgcgaggaaccagaaaagtgagagccaggtagcattaacagtctgtgtttgagctaacccatgcctcttgttaggcaaaggaaagaacacagcagccagaaagtggcgaattggaactgtaaccagggcgcctgcagcatattcagaaacgattcctccgttgagaaatggctgtggtctcttgcgtcagaaaatgtaggaggcatagggtccagtgaagccttgtagagaaaagtttttgtatttgcatttgttttggtttttgtttacacatagagaaagtatttggccagacactgatatgtatttttctacgttgtgtgtatgtaggt

SEQ ID NO: 222941 - DNA, 542 bp, Homo sapiens
cctagtgccagagtcaaataggcaagcagagttgagggactattaagtgccattgtttcaagggaacaggtgctaaataccagtctgaagtagctctgccagcacacagccgctgctccaagccaaggggatgtaaacttagggggagtacagaagcataaggcctctggaataacaacagccccaaagtgtcccaaagcctcttttttctcaattctagagcttccttgactcttcatactcagccaatccacactggcttcagtgcctccatgtacactccttcctgtgggggttagctgggtttttccagacacgacctctgagtacaactgaggcaaagaatcccagagttctttgggaagcagtgtgttctgacttcaaaggcattcccggtgcatcagtcagaaaatgaaaaccacttatgccatggcttacatacaagccagctcattatggggggaaaacacgtggagaagaatgctcgctaggattgctctctgaatagcagctgtgggaagcaggccccagcacagaatgcc

SEQ ID NO: 222942 - DNA, 458 bp, Homo sapiens
actattattgtacacttatgtgtcaggtactgttttaaacacattgcataacaggttattcctcatagcaaccctatatattgtgatattattatatatatttttaagttttattattattattattattattacttttagagatggggtcttgctacgttgcccaggctggtcttgaactcctgggctcaagcagtcctcccgccttggcttcccaaagtgctgggattacaggcatgagccaccttgcccagctgatactataatgcctgttttgcagataaggaaactgaagctcagagaggttaagtaacttatgcaggatcacagcgagtatgtagtgaagctacttttgaaacccaaagtatctcagttatgctgtactacctctcttgaggataatgatgctcaaaaaagtgctttgcgaattgtaaaacacctaccaatagtgactaaaa

SEQ ID NO: 222943 - DNA, 323 bp, Homo sapiens
agtccccaccccaaaactttgcttgtgcccctccataatccctttctcttggcccttcacaggcaaccactggtttgctttctgtcactttggattaattttcctttattttttggtctggtgtctttcactcagcataattactttgagattctcccatgttgttgtatatataccaacagttcattccttttcattgctgagtagtattccatcaaatggatatgccataatttgtttattcattgacctattgatggccatttgggttgtttccagttttgggctattacaaataaagctgctatgaacatttgtgtcta

SEQ ID NO: 222944 - DNA, 285 bp, Homo sapiens
cagagctcaaccaggaacagataaatccctttgttgggctacaaataagttgtttataagtctcagtattcagaatggtcttctatcactcaagagagaaaccacagtagtcaagagagaaacaccaagaaaatgggcttatagatatcaacgtggatattttagtatttgtgtctgtaaaaatcatttttgtgcagacattgattttgctgttacatttttttaaacaattcagatgccattttcttttttcactcaataaagttttaaattatctaatacata

SEQ ID NO: 222945 - DNA, 644 bp, Homo sapiens
aggtaaggctttttttgcattgctataagagtgcaaccaggtcagaaaggtaaggtcagatgagagcgggaattaatttgcatcatccgaaggcagaaaattcctcctgtgatattttacctatgaagtagacaggaggcaccattgtgtgtgaaaatacgtactagccacagattgaaaagaatctaaaaccctaaagttagaggagactccaggattatatcaacatgttccctttccaaaacacagaattgcatcaactatagtcatagcacttattgtctataccactcatgtttcacttatataatagattattttcctctccaataataacagcccagagtagacctcatgttctcctttccctgagtgtcagggtgctcagagtccattcttgtggccaacaccaacgattatgtttatgtccgatattaactcttagaaggggcctgtttacttcttccatttgcatttgttctgatttcttatttcaatttcattcatcttatggtctgtataattgcttaagctcctcaagttctttttattaagagttgtaagtaaaatttaataaacaataacatagtctctgctattttgatccttgctctttgccatgctggtttacttattctttattg

SEQ ID NO: 222946 - DNA, 422 bp, Homo sapiens
gctttaaaaattgttattgtgaccaaaaatgcaggcaagtcttccaaaacaccaaagtgatgagttaatttattcaagagttactactcctacggcattaattcgtgaaagggatttttaacagagtacgcaaaccaagaagggccagattatcaaaatctaacagactctgccaagttacccatccacttctgaatggctgggccattcctaaagtgctacctggtcaaaacggacacagataccaaacagcgcaccatctgtgcccaagtgttcaaacacagctcaaaacatcacaacagcaacacagtctgtgaggaccaatctgctatggcagcatttctaaaaaggcattcacagtgccaggaagtattaaacaagcacctaggcactaatgaaagggatgaagccagtgtcatttc

SEQ ID NO: 222947 - DNA, 357 bp, Homo sapiens
gatcccttggcttgagccagttgattcttgtaagaatgttagtgcagtaatacagtaactaataaagaggaaagcagatgccagtgggtctggaggagccttcagacagcatgtgatttttaaggagatgtgggatgaggattgcttcttgttttgtatatggagtagtgatcaaagtctctcatattccagcccagggctggactatattagtggatagttggtatgtcaattgtactatattaaccataatgtaggcctggccagactagccactgtaggatctaggatttaaaactatctcactcttctgtcttacacaaaaataaattccaggtggattaaagagagacattt

SEQ ID NO: 222948 - DNA, 415 bp, Homo sapiens
ctgacagcacgggacatggaaacttgggtggatacattttggtgatgggtgggggtgagggaatcctgcagggaaataagtcaagtttactcatatctttggcatctgctgctcatccctaggcagccaaggccctgggataccagggattcccctgcagcccagggagtctgttgacttctttggggaaagagaagaggtggagacaggcaatagtagaattaatggtgccataggtatctcttggggcaggcagagagattacatttttaaaaaggaaaacattgaatctttctagctggtactcatctcctcctctcttgacatttttcatctctcctattaaaaattcattttctttggacttcaaacttgaacaaatcttgcctattttagaaaaacacacacatacaca

SEQ ID NO: 222949 - DNA, 520 bp, Homo sapiens
ctgagggcgtaccaactgcttgtgaccaggaactacctggccacagactgggataaaccatctacctcatgatgtcagcttatcacctgtttctggtgggttctctatgaactacctctccagggcacttcttccctcctcatccacatccggcctctaatgatgcctgttcacccctccacccagttatgctcccttacaaaattcagacacagctgaccacttccaactttttggagctggtagagttgtccatttggctcagttccgcacagaacaaaaccatttctgagatgtgtgccaccattcccgtacccatgggagggcagaccagcctccattgttaggggagtataacatttctgaataaatcagagtttcagagcaggaaatagccctcagaggttagccaaaccaacctcttgtggaacaggctatggcccaaaaacgagcaaggacttggtcaagattgctctggaaagctaacagcaaggcccagcataaacaacagctcttcaac

SEQ ID NO: 222950 - DNA, 480 bp, Homo sapiens
ctagcgggccctctgccgaccgcctgcttcacacccctcagcgctccctgttgcctgcggactccacggcccttcctggactggcccttgctcaactcccagccaccattgtccctaccactgaacccttgcacaggccacttcctcagacgagacaacctctcgttcactccctaaagccctcttcaggtgtcacctcctccaagaagccctcctcgccacccccagccgggtcagaggaccttcctctgtgctccctcggtcacctgtgctacctctaacaccactgaccacactgtatcgtgagtgtccattgacgtgaccaattgccctgccaggctgtgacggcctcaatggtaggggctgcatgtgattcgtctctgagccccctgtgcccacccagggcccggcacagagtcgatgctcaataaatgtgtgttgactgcaaaaaacaaaaaacaaacaaacaaacaaacaaac

SEQ ID NO: 222951 - DNA, 398 bp, Homo sapiens
ccgcacactccgtcagcacatattgggaagccaggcagaaagcgacaaggaaggtgaagtgaacaagagggaacccgaaagctgaaaacctgcccccctgagagttgcctagatgaccggccccggctgtgaatgaaggtgtctgggcagacgcttgtgagtatgggtggggatacgtgtacgggcctgcctcaggacctgtggaagcacagatgaagacaggaaacagttgagatgtgatgggagttaaaagttaaaaccgaggacctctgacactcacagtcccagtgccaaccctaaagacgcagtccagatcttcctgcattcttttcttctcgcgttctccctaggcaccgccagaggcgcaccctggtgcatgctacctacatatgaggaaa

SEQ ID NO: 222952 - DNA, 496 bp, Homo sapiens
tagaggctttctcaagaaaaacacacatatacaagtttttatacaatttcaaggggtttataacagttcattttagactccctgcaagtccaaacacctcaagttagaacccttccattatactttcactcagcatggaatggaagcagacaggcaaaactgttctgctgaaggtacagccctaatatatgggcaagggaagcatgaagcatgtattcagttcacttacgggcttactgtgtgccaggcactgttccaagccctagagattcagcagtgaacagaggactaaaaaagtatccctgcctttggagagcttatgctccagtaggggaagacagaaataaacaagataagtaaaatacagtgttaaatgctgataaatactatgaagaaaagggaaaatgggaaggacaaggagtgtacacatcagaggtggggtgttattaaaacaattttaaatatggcagccaggaaaggtctcactaaggtaata

SEQ ID NO: 222953 - DNA, 687 bp, Homo sapiens
ttccactgacagctggctgaaacaaggaatttatcctgtatagaaaaatacaagacttggttcaatggcctctttaaatctgtaagacattcaaaagagaaacctgcatacattttgaaataaatgactccacgattcttccactcctaaactgaggagatttgcagataactcacaacttcctaagctaagaggtatttttatttttctccaaccattccaataaatgtgatcaagatacagaattttttcaggagatcatttgctccatttttttctttaaatttgatatttgctttttgatttcttaaaaagactatcaagagagtaaaaataaaacccagagaatgggagaaaatatttgcaaatcatgtatctagtaacagactgggattgaaaatatattaactactacaattcaacaactaaaaaacaacccaactcaaaaacaaagaacttgaatagtcatttctccaaagatatacaaatagccaaaaagtacatataaagatactcgacatctctaattatcaaggaaatgctaatcaaaaccataataaggccaggtatagtggctcacacctgtaatcccaacactctgggaggccaaggtggatcacatgagcccaagagttcaagaccagcctggcaaacatggtgaaaccccatctctactaaaaatacaaa

SEQ ID NO: 222954 - DNA, 459 bp, Homo sapiens
cttatgttttgtggccatgtgtcatgaattgttccctggaaagggagatccataaaggaggaactgtagctgggtttgctgagcatattatctcctgtttgctcccctgacttgcacaactggcaagcggctttaaagccgacagcaaagaagctgcaaaatgaagatgacattagtgatatgaacacgcacaaaaaataaggaaatggccaggttgacactctgctcctttatataagctctctgtcaagcccatttcagggtaagaaagtcatgaggaaccccaagtctgcctagatgttggccaaaataaaactggaagtaatagaaaagttggaaatattaatatctgatatcattaacaatgtacctcatactaagtatattgtgccttggaatattagcttataagaataaatatatataatttaagaataaataaatatacatatattggga

SEQ ID NO: 222955 - DNA, 348 bp, Homo sapiens
  misc_feature (1)..(1): n is a, c, g, or t
ncggcctcccaaagtgctgggactacaggcgtgagccaccacgcccggcctaagatgcactttctttagtaaatgactattagattatcacctgcttccttaaagcaggactcagcacggcaaccaaggaatcaacaataagcaatgctctcagcttccagaatcgcatgtgtctctcccctctcgggcgggtggtgagtccccggaggacacctgactccagccttcgcaccagcagcttcactggctctcggtccattgtaacttattgggtgctggatttttttgcattttgtgttaacattctttgagctttgttttggtatacaataaagttacttaaaaaca

SEQ ID NO: 222956 - DNA, 348 bp, Homo sapiens
aaccacactgccacccggctcctcctctgccctcatgaagacagcaacagctgctgttgttactgttaccactgattaaaccagtgtcaggccccgctcaaggcattatatgcacatgatttcatcctcatgacaaccccatgaagcaggtatcactctctttctacagaaggaaacaggctcaggagaatctgtgatttgtccagcatcttcaaagctgaccagcgatgtgaccctgggatagtcatttaatctctctgtgctcattatcttatctgtaggtggggataatgatactgatttcaatagagtcaaagggaggataaaattcaatgagggaacatatga

SEQ ID NO: 222957 - DNA, 396 bp, Homo sapiens
gtctaggaaaggtgagattagctggctgtggggtaaatcacctgacacgaagagcccggggttaaccaatcaccgtgggagggctgccctggagcacacagcaggctgcacttgggaaaagtccatttgaacaagaatttcttcttgagaaggtctgagtagccaagggaccttgatctaggagtaggaactggtctcaggtcactgattgccagggtggcctgggcaaatcgtttctcctcttgggggctctgggtccccacctgtgcagtgagggcatgcatgctctgatgccttcatgagtggcagcacggcaccatgttaggcacgggggcttctgggcctagtcctttgtcttcctggccatggggaagtggaaaaggccttaccccacca

SEQ ID NO: 222958 - DNA, 244 bp, Homo sapiens
tcaaacgcctaggaatagaagtatacctaagaatggctgaaatgtcagactgttctcttcagcctcatgaacttatggaaaagccttcatagaggtttttggttttttggtttttggtttttgttttttggtttttttttgagacagagtcttgctctgtcgcccaggctggagtgaggtggcgaaatctcggctcactgcaactttccgcctcccaggctcaagcgattctcgtgcctcagcc

SEQ ID NO: 222959 - DNA, 560 bp, Homo sapiens
ggcgggtgtgcgggcgcgcgagccgagccctttgttcaggagaacattcctcagcgccagcctccccacctggagagcctgtggttcctgtttcaggctttgccttggagaaactctcgccgagtatgcagctctcaagcctggcttctggcgcatcctacttcatggccttcaacgggtcctttgacctccctgaacctcaattttctcacttgtagaatgggaaccaaaattctgacgtcgaatgatcgctgtgaaattaaattaaatgccaaaacacaaatgtagagtatctgcaggcataaggtgaatgttagatacttgcgtttggaagaccttcaccgaaagaagctaacatttttgtattgagttcaccctactcccccatcccgctttgtatgggcaatttgtagtcctcccaaatctttgaaatctcactttcttagtaaagactttccctgatttttggggcacaccctcatggagtcaccctctggcatatttccatagcatgctgtaacgtctattaaaatatttgcagttactttttttttaattga

SEQ ID NO: 222960 - DNA, 472 bp, Homo sapiens
ccaatgcttcatttctttttttgctgaataatgttctgtcatctggatgtgccacattttgttcacccattcctttgttgatggacgtttggattgtttccacctcttggcacttatgaacagtgctgctttgaacattggttacaggtttctggtgtggacgaacattttcttttatctcgggtataaatggaattgttggctgggcgcagtggctcacgcctgtaattccagcactttgcgaggccaaggtgggtggatcacctcagatcaggagttcaaggccagcacagctaaaacggtgaaaccccatctctactaaaaatatagaaattagccaagcgtggtggcacatgccacccagtgcggggaggctgaggcaggagaatcacttgaactcaggaggcagagattgcagtgagctaaggttgtgccactgtactccagcctgggtgacacagcaagactctgt

SEQ ID NO: 222961 - DNA, 541 bp, Homo sapiens
gtaggttagacattgtggaatgaaatatctgtgacactgaagacatagcaatagaaactgtcccaattaaagcagagagaaaggaaacaaaagaaacacagaaacacagagcctcagtcaccttaagatgatattaaaaactggagtcctcgaaaaggattaacggtgatgatttgaaggccaaaaacaagtcccaaatttcatgaaaattgtaaacgtatagcgccaagaagctcaacaaatccaaagtaggagaaaaacaaagcaaaccatatcaagcgaggcactttgtaattaaatcactgaaaaccagtaataagtagaaaaaaattaaaagcagaaagagaaaaaaagacacattttatacagggaacaaagacagatataattgcagacttctcttcagaaataatgcaaactagaacttaatgaaatcgcgtctttaaagtgataaaagaaaaagaaagcactgtcaatctagaattctatatccaccagaaatattctgtaaaattgaaggtaaaataaatgtttgtcagac

SEQ ID NO: 222962 - DNA, 221 bp, Homo sapiens
ttggggcgggggactctcgccccagttgagggccagagagcctatgactgttccaggcctgtttcccccgctatgcaaagggagaagtggaggaggtgggtgggaccgccctccacactggtgcctgctgcacccctttcctgattcaagtcccgcttagctggtggctctgggcaaatgacaacctcttggagcctcagtttccacctctgtagagccgg

SEQ ID NO: 222963 - DNA, 264 bp, Homo sapiens
ccagatgggcttagaagcacttaatgagaatttgccagaaataaatatagacttaacttacaaacagggacgattacaattcaggcccccttttgaagaaatccgggctaaatattatagagaaatgaagagattcatcggcattccaaatcagtttaagggagtgggtgaggcaggagatgaatctattttttctattatgattgatagaaatgcaagtggatttttgacgattttcagcaaagcagaagatctgtttagaag

SEQ ID NO: 222964 - DNA, 409 bp, Homo sapiens
tgatggaaatctggatctacctagggggatgaaggacaggaaatattgactacttggatatgtatacaagatatttttcttcatgtaaatctctaaaaagtatattgtctttatacaaaaataacatcaaatgtattgtgggttttataacatttaaaatatatgacaaacatagcctaaaaaggctgtgaaaaagaagtaaagtatatactattggaagatccatatatgtactatttctgaaaagtacactgcaaaagcttttataaacattgatgatcacagaaaatataaatggtctaaaacaccccatttaaagacagagatttcttgataagataaataaaaataagatccagtcatgctgcctacaaaggaaacatgttagattcaaagacagataaacaaa

SEQ ID NO: 222965 - DNA, 426 bp, Homo sapiens
actccttcttcccagtaccctagaatcacgtagtccttgagtggggagaaggccagcatgggatatttcattgtatatatttatgtatgtcatacacccctcatgggcagagccaggacctccaggatctgatcgtaaattgggcactgtgtgatattgggcaggtcgccctgtcctcagtttcccgatctatagccaggatctccccagctatgaaatcagtgaccagcactgtttctttgcctgtctgtgcaccgtggactcacatgcagagcagggctgttagattgtaaactccagacaccagacatctctgacaaaggagctctgtgcagatgacaagcatcgggcagacgcgtacttaatggtttttgacctgaaggtgataatggcttaataataaacggatggttttacccccaagaa

SEQ ID NO: 222966 - DNA, 480 bp, Homo sapiens
acagaaattactgaggccaggtgcggtggctcacgcctgtactcccagcactttggaattgagtgctgaggcaggatcacttgaggccaggagttcaagaccagtctgggcaacataggaagaccccaatttgtacaaaaaatacaaaacttagctggcctggccgcacggtgccagtagtcccagctattggggaggctgagatgggaggctcacttgagcctgggaggtagaggctgcagtgagctgtaatcgtgccaatgcactcctccaccacggatgacagtgaggtctgtctcactcagaaaaataacaaaaaattttaatttaaaacattactcagttgacattcactgaagtcctatgtgtctggcaacctgttcctgcagcagtggttctcaggctgagtgtggggagcagaagcacttgaacagcttcataaagcagatgccagtcctgatttagtagggctgggatcct

SEQ ID NO: 222967 - DNA, 417 bp, Homo sapiens
cttaccacgagcctggtattgtgctgggcccacagcacagtatctcttacaatcttcatctcagatctgcgagtgaagaattattattcctatcttcaggtaagggattaaaattatgtaactttcccaaggtcaatagtaagtgagagtgggaatatgaaatctggttagtccacgtataacataagtgtttgtccagtgtatgtctcactatgtctttcttccaacttaaaatcttccatgagtctggaacaagcctgggagtgtggcttagacctgtacttatcaaactctctttggctaagagccagattttttaaaaattttaatccattatggatcaaaattttttgtaaaatataaaaaaagaaatacttggaaaatgaaatgaaaatataataaagatatacaaaatac

SEQ ID NO: 222968 - DNA, 514 bp, Homo sapiens
gaactttggcacatgacttgacaaattcttaagaactgcctaggaaagaagagagtccaggcttcagctcttgtgagtatgtgctctctgtctgactactgcagatgaaacaagccttctgcccctaaggggtgttaggtaaaggggcttttccagttacttttgaactaggacatatttaattttgagcatcttataatatcttgctatgttttgttcaaaatttagtctgtggagtaaaagcaaaacacacatagacatatatgcctaaatatctgtatctttattcatgatctcctaattggcttagtttattggtcaaggcacatagactactcctgtgctgaactctgggtaaattaatttgtcccttttttgtgatattttccaaaatgactgttagtgccttttcactggtaaagagtatattcttaccacaaaaatcaaatacatgatccaaacacaaatgatgaaagcccataaatctaaaattgattacatttgagtagtgggt

SEQ ID NO: 222969 - DNA, 451 bp, Homo sapiens
gacttgtagctagaatgaatgtataagtcactcctataactcaaaaagacaacccagtctgaataaccatttctccaaagaagacatacaaatggccaacgagcatgagaatagctgctcaacatcatagccatcagagaaacgcaaaccaaaccacgagtccacacaacttcacacccactatcgtggctatcatcaaaaacacagaacatagcaagttttggtgaggattcagagaagctgcaacccgcatacactgctggtgggaatgtataatgctgcggctgctttggcaaacagtttggatgttcctcaaaaggttaaacagggttaccatacgacttaacaactccattcctacgtattcacatgagagccataaaaacatatgaccacacaaatgctgtgaggtcacactgtgagcagcactgtttccaacagccaaaaggtg

SEQ ID NO: 222970 - DNA, 483 bp, Homo sapiens
attcaaacacatataaataatcatgacccaataatagctaacatttcttgagcaagtaattatgtacgaagtactgaagtgttcggacactgtgatttagctcatttaatcctaacagtcctgtaagagggggtgcctttattgcatccgttttgcagataaggaaagtgaggaatggagaaattaaataactagttagtcttgcagctagtaagtgaaaaagcccgggtttgagcccaagccagtcacaggcctgtgacataaccaccgtgctattaatatattgcccaagaaaagaaagtgttgtagtgggtcaaagggagagctcaggtgtaaactgtggacgtcgaaaaagggtttgtggtgaccgggcgcggtggctcgcgactgtaaacccagcactttgggaggccaaggcgggcggatcacaaggtcaggagatcgagaccatcctggctaacacagtgaaatcccatctctact

SEQ ID NO: 222971 - DNA, 1341 bp, Homo sapiens
gcctcccaaaatgctgggattacaggcatgagccaccgctcccgaccagttgtttctaattcttatctattgtgaataatgctgcaatgaacacggaagggcaaatatcttccatgtcctgatttcagctcttttggataaatgcccagaagtgggattgctggatcaaatggtagtttttatttttaatttttctatcaatctctatgctgttttttttatagtggcaacatcattttatattcttaccagtagtgcacacggttcaaatttttccacatccttgccaacactttatttttttaatttttaattttttataatgaccatcataatgagtgtgagatgatacctcagtgtggttttgatttgcatttctctaatgattagtgaagaatgtcttttcatatgcctgtcggtcatttgtatctcctctttgaagatagttatttttatttttattttctgctattgagtttcttgtatatttttatattaaccccctgtcagatatatggtttacaaatattttctctcattctgtaggttgcttttgtactcggttgattatttccttcactatgcagaagatttttagtttctggctttttcatttgatgtaaatccatttgtctatttttgcttttgttacttgtgcttttggtgtcatatccaagaattaattgccaagacaaatgttatgaaaattttgccctatgttgccttcttggagttttataaattcatgtcttatgtttaagtctttaatctattttgagttgatttttgtgcatggtataaaataaggatccaattttattctttttgaatgtgaatatctagtttttccagcaccaattttttgatactatccttttcccattgtgtactcttggcatcctgtcaaagatcatttgactgtatatgtgtgggtttatttctggactctcagtattgttccattagcctatatgtctatctttattccagtaccatggtcttttgatgactatagctttgtaatatgttctaaagttaaaaagtttgaggcctccagttttgctctttttgtcaagattgtttaggctactttggggtcatttgtacttctgtacaatttttagaattgttttgtcaatttctgcaaaaaatgtcactatgactttaataggaattgcattaaatgtgtagactttgggtggtatggacatttgaacaatgtcttctaatccatgaacgtgggaagtctttccatttatttgtgtcttcttttctttttttaacttttttgagattatgttgtgctcttcattgccaaaaataaacacttttaaaaacaca

SEQ ID NO: 222972 - DNA, 467 bp, Homo sapiens
actcccgagcgtcctttagaaatgttcagaccaggtctggagttcgtgaaggcgaggcagtggtcaatgagcttgggaggtgggggaggtcatgagcacctggaagttgtttagaacactttgtgtatatgcatgtttctaggggaggggtatattatcagcttccaaagtggatctatcacttccctggaaacactaagaatattttaatagcttgggatgctggacctgtggcccagccaggctgctgattctgattttgtctccatttggcatataccaagtgccccagatgtaaatcctctcatggtcaatttgaggaatggtcttaagatagaagcagagagaaacgaaaagattgagccatagttagcaggaaaaaaaattaatttcatgaaaattgatttcctaatgagaatatgataaactggttttacaaaagcagcaaacaaaaccagcaaaaacca

SEQ ID NO: 222973 - DNA, 327 bp, Homo sapiens
ctttgatggcatggatttaaaaataagtagccaattcatataggatcattttcatacaaaaaaagcataaaagcgaaacattaaaacttccttttaaactcactggtcccttctacaatgactttctctgctacaatgactttaactttttttttctgaacactcattttctgttcaacatacctccctatattattctacaaaacgggataatggttagtcaaccaacagtcatcatggttagtcaaaaggcaggtgctttcttttttattttattttatttttcgctttgtttgttttccagattaagcatagaacagtaggata

SEQ ID NO: 222974 - DNA, 195 bp, Homo sapiens
ccatgcccggctaattttttgtagagtcagggtttcaccatgttgtccagacaggtcttgaactcctgggctcaagcaatcctccacctcagcctcccaaagtgctgggattacaggcatgacccactgtacctggccttcaaatgttcttcatttgctatttcttagaagtctttaaagcagaacgccgtacac

SEQ ID NO: 222975 - DNA, 441 bp, Homo sapiens
ccagcattatgtctgttgagaagtgaaatgcgtgctttgttcagaacacaaaatgatataagaagtgtcttagggaggctttgtactgtggtttttgtaggtacagagacatgtgtgaccttgatttatatgttggatatctatgaggcaagagattcgtggagttctgtactccaaaggcagaaactctgggtaagaaattgttgttcctgccattggcaagactagaaggccagatgattggcagtggtccatgagtctgtaaaggtgtgtggacgggctgattattagccaaggcatcctgggctaagattacttcctgaagttccgccaattgtgttaacctttggatcctctcctttttcaagaatgtcctggttagggatggaatgcagcagctttctagcaagccccatcacattgaatgtggttaagatctcg

SEQ ID NO: 222976 - DNA, 240 bp, Homo sapiens
cgaactcctgggtgcctactatgtgctaattaatgtctgtctcttttcttctctgccaaggcctggggaagggcttttcataactccctggcagctgaaagaagagcgtcattaagcagcacctaatagcaagatgatttccgttcttagctgctgagtggtaggctgcatgatgagagtggagagtgggcttggcgggcttctttgtcagtgggttgatgaggagacggcctcatgctg

SEQ ID NO: 222977 - DNA, 388 bp, Homo sapiens
caaaaaaaaaaaaaaaaaaagattgacctttgtttttttaagtgactgatgaaggtaggaattattagtgggctttgtttgtttattgtttagaaaagaaagaatttggccagtcacagtggctcacgcctgtaatcccagcactttgggaggccgaggtgggcggatcacttgaggtcaggagttcgagaccagcctgaccaacgtggtgaaaccctgtctctactaaaaatacaaaaattagctgggcatggtggcacacgcctataatcccaactgcttgggaagatgaggcatgagaatccattgaacccgggaggcggaggttgagatcacgccatgcactccagcctgggcgacagagtgagacactgtctcaaaaaaaaag

SEQ ID NO: 222978 - DNA, 976 bp, Homo sapiens
acggtgtttttcttccatatctataaatattacacttttcctgctggttcttgactttttacttttctacattatcacttttctttattaattattatttatcacttttatacattttcttagttcacatgtctcagaccttccctcctttctcaactcaataataattgatttactatttttagtttcattattggttgcctttttatacttggtctttatatcttcttttatcatctatagatactctcttctgacttccttatttgtaaactatcatttgaggtattttcttgagtctcttttctggaaaactccttcctggagccctttccctcctgctgcactctactgtttctacatcagccttttactcccaactgtcctttggggaacttccttttaccactttctttagttggacccactgtttcttggctcttgccctgccccccccttttttttaattatttttattttttctcttaatttactccttagttttgatggagtacattctcaagtaattttataagaaaagacacctgaaatgtaaatttgaacccttttatttctgaaaatggcttatttctgcctttatatttgctagtttatctccatatagaactcagttctttgtaatttgccttttctcttctctgaaagtttttcatttttttttcaattttctttatctcttttggattctaaaatttctatctggatttctgtctctaaagtattttgctgagacttgactgcaggtttttcaggatgaagacttaagttcttcagttcaggggaattatcctctgttaccactttgataatttcctcaactcaattttctggtttttttctttctagaactattctgtttgttgggtcttagacctcttgtttttctcttactttgtttttacttaattagacttttgggggtttacttacattttcaactcctcactatagtttt

SEQ ID NO: 222979 - DNA, 1603 bp, Homo sapiens
gatggcgctcttaggcagccgagcggagctggaagcggacgaggtacgatccgatggggattgcgggcccggcccctgaagccctggacaggagtccgggagagaagagtgagcccggctaggacggcgaggccccgcccccttggtcccctctctggggtgggctggcgggcgccgggtgggggcgcccggcttggtaggtctgtccccgctggagctaggagggtccctgcggcgcgcggagcggacgcagtgccgaggttcggagcgccggccccgcgagtcgtggggatggaggacccacgtcctgccagcacttggatgggcgtgagggcgcgggaccataggacccgcagctctgagctgttccgggccggcccagcgacgcctgggctttacgaagtctgaccctgaagtcctggcactggctctctgggtgttcgtggaatcatccctcgacctgggaatctcaccttctatggaagtttcctggtggcagaaccgaaaggcttacgattgatgaaaagagggggcagcctgaggaacaatgagtagaggggtacctgccgcgacagcagggcagggctgccaggggctggggctggagggctagagccgcagccaggctgtggtgcttccctcttccctccagggggcgggacacttcccctagcaggtcctcagagtcggtggtggccggagggaaaccactttgagaaccgactccggcctcctttggtttcaactgtgtttgagtaattagccactccttcagtcgtggcgcgcccgggcctgagcacccaggggctagcgcgccggacctgttgatttattgactattcatttcagcacctggcaactccagagacagcgctctccctgctcttgaagttgagaccgaggctccagcagcagccagcacccacagctgctgttcctgccatcttacctgacttgaattgtgcgagtcgctgcctttagaaggctttggtttcaaatgatgcaatagtggacgatctggaggaggcggttaagtttcccgtccatctctttagtgccaggaatctcctgacaaggaagactatactttaaatgtgctccgtaaaataaacaaaaaacaaaaactgaactacagctcctctgcatgacagagagacaagagggcaagccgggctgtccagacccttgcttacagcctgtcccttgcattgaggatcccaagactgtagaatgaaatatttgaatcccgatctgtttgtaggagatttgctgtgcttagaactatgtaattctctagattagggcattgttgaggcggtgctattattaattaacactgggataataggtgtaaactgggactgtttcggagatactttgacaaatggtcaccccagctatgctcactgcctactagatgaacggttgagatgcattagccgatgaggagggaagttaggtttctgtgggtgaaactctgggtggaagttaggtttcagagtagcagagagcctggcacacagatacttggtaaataaatatttgttgaatgaatgaaagactgcagaaaagatgttgcttaataacaactcagtttttgcca

SEQ ID NO: 222980 - DNA, 240 bp, Homo sapiens
tgccttgatggctgctttagcaaaacactaaaactgaaaaccaaaaacggcaggggggttataactggtcctctggtttctgtaacaattcagatgagtgttatgcataaagaacatgacctggtaaaccgccacactataagaaactaaacaagccatccaacacttctgttcaaaatacaaaaaattagccaggcgtggtggcgggcgcctgtagtcccagctactagggaggctgag

SEQ ID NO: 222981 - DNA, 580 bp, Homo sapiens
ctagtggggtcgtggctggtctaagtgcagcagtattgcaactagttgatcacaaccagttaacagatttttttttccttctccctttccactgcttcacttagcctttaaaatgtatattaaaataaaagactgggtgcggtggctcacgcctgtaatcccagaactttgggaggccgaggtgggcagatcacttgaggccaggagttcgagaccagcctggctaacatggtgaaaccccatctctactaaaattgcaaaaattaggtatggaggcgcatgcctataattccagctacttaggagactgaagcaggagaatcgctgaaacccaggaggtggaggttgcagtgagccaaggttgcgccaacgtactccggcctgggcaacagagcaagactgtttcaaagaaaaaaaagaggctgaggcaggagaattgcctcaacgtgggaggcggaggttgcagtgggcaaaaatggtgcccttgcactccagcctgggcaacaagcaaaactccgtctcaaaaaaaaagaaaaaagaaaaactagctggtcaagtggtagtaattgtaggtggtcat

SEQ ID NO: 222982 - DNA, 533 bp, Homo sapiens
taaaaaaataaataaaaggctcatagacccctgcagcacaccaaccagaggataacccaggatgcaggagtgggagtgagtgtcaatgaagactggaaactgacacagcaggacctgggaaatagatgcctggagagcagaaagccccacaggaaggtacaacagcctctcagtaaacactcagagcctttcaagagtttggggcaagactgaaacatacacccaactccatgagttccttgaaagaaataatagacatagaagaaaatgtccagcacctaaataccctcaaacttttcttgagaaatacaaagcagattttttaaagtacgaatatcattcatattagcaaaacccaaaattgatgatgatgaacattttttatattcgtctttttttttttttaaagaacattgtggatattgaacttttctctttaactacaagcctccatcttatttctgtttctttcccccaagggcattcactatcatgagtttatgcatctttccagaacatttttaatattttat

SEQ ID NO: 222983 - DNA, 382 bp, Homo sapiens
cgagattgcgccactgcagtccgcagtccggcctgggcgacagagcgagactccgtctcaaaaaaaaaaaaaaaaaacaatccccccttgaatcgtgaagctgtgctcgcctgcacaggggtgcagaggtccggtgtctccgcgttgatgctgccagcacctcaacagtattatgggatggtccagcagtcgatagaaacttaccaggatattttgcacaattccctgtcctcctggagtattggggatggtgactttaaaatgacagtactcattcatacacttctacattttctttaacttatatttttaataaggatctggaggcatttcagtttctccaaaagaaggatttagaatttgttcaaaggaaaaaaaaaca

SEQ ID NO: 222984 - DNA, 624 bp, Homo sapiens
caaaacaaaacgtggcctaatatcactataaattcaaaagtacgagacacacattttacataaggtcccgttttctgtttttacacaatgaccagcttaccatatggtatatggaatatctttaccaagtattagatgttctgcattaagattacaaaatcaaataacttgaatatatgcttattttgcgtcccatttccaaaatacagcaataatgaataaattaagtaacataatttcagttagcaaaaggagaagtaagcctaacttacctgcgaaataagtcacgattcactctttcttcttgccaccctacaaaccaactactaacatacagatttctaccaagcaaatgtaactaattagccccatgtcagggctcagtttctctgcttttaaaacaagactggtctgagtctatgtctcaggcataaagctaagcatctgacatacatcatctttttaggtcctcaaaataatcccaagatagatattatcagtgtcctaattttacagacaagaaatggcaattgaggaaggttaggttagcttgtcaggatgcaagcgcaggcagtgtggttcctgagctctggttcttaggcactgttgctttctatcctatct

SEQ ID NO: 222985 - DNA, 521 bp, Homo sapiens
gcattatctatttcattgtttttccaaagaaattgcttttgtaaatatttattctttataacacattttgttttctagtctgttaatttcagtttttactcttttatttcagtttttcactcttcctaattttgttgaatttttaaaaatttaaatttacatatggtaaagtttacttttttggtgtacatttccatgaatatttacacatgcatagattcttgtaatcaccacagacaggacacagaatgatttgaacaactccaggaattcccaagtgctgcccctttgtattcacactatcctgccaccctaacccctggcaaccactgatatgctttttgttcctttagttttgctttttccagaatctcatacatagacttaatgtagtatgtaaccttttaagacgggattttcagcctgggcaacaaagtgagacatctctacaaaaaattaaaaaaaaattagccgggcatggtggcacacatctgtagtcccagctacttgagtagctgagg

SEQ ID NO: 222986 - DNA, 441 bp, Homo sapiens
aatatttggtttcatcacacctcattaaataaaacctgtgctgaaaggagaacaggaagtgtttctaaaatcacatgcagttctgaaaacaaaatatgggtgaggagtctctagacatgatctccagagccaacttccctccagcaggctcaggccagagagtggctgccccaaaggcacagctggctctatttatgcttgctgtgaattgtctcttggtacagtaggtgcatgccgactcccctgacattctccactgcctccctgtgagcaggtgtgtttgttggagatcaggactattacctaagcactcaccatagagttaagtaacacaacatttcccacaagcagtcctgtgatagtcagtggagtatgggcagaaaatatagcccacccgaaaaggtcatctccctggactggggctccattcttaaaagatta

SEQ ID NO: 222987 - DNA, 499 bp, Homo sapiens
attgattggccgctttattacttaggctggagagttccttttatacatagacaacctagttatttattttaattgaggcttccagcctttgtatttcataattccataaggttaaagtttgaaagcaaaaattatttaatcttctctcacctccaaatttatagtccctgtgtttggccagatgatttctgatcattataataagagagtataagaccctacaacaacggtcaggaacaaataggatctaagacttttccttaagtattttcttaagacctaattttttttaatactgagagttctgaatatgttatattttgataattaaaaacattgaaaagcacagagaccaatattcacaaaacacctgggtgtagaatcttagtgaaagccacaaggagttgtgaaaacactgatagctgcatttttttcctctcagtttctccggtacaatgttattggtagtcatacagtctggtgcaaaggtacaacaaag

SEQ ID NO: 222988 - DNA, 378 bp, Homo sapiens
gtaacatctggacttcaaattggaactccctctcacttctcaaacatgacagttaatggtttaattatattccagaatttttctatgtatatacatatgtacatgctggtataggctacgtatttaaatatcacattacaatgctgttgctcattccgagctctgcttgaaatgtccactgaatgacagaagtttagagatttggtgcaaagaccaacagccagaactcgggttgcccaatgagctactgtcgagtgtttacgttcctgatttccacctcacatcagtaatgacaacacttcctaaacaccaccagctgtattttccaagtttgaaaactctaacctatgtgcactttgcaagtcagaaacctagagg

SEQ ID NO: 222989 - DNA, 692 bp, Homo sapiens
agtctttagtcggccttaaaagcaaacaaatcagagatggaataagagcggtaattgcagcaagaccgccttgattcttgcagtccagggagctgagcgcaccgcgcgcatccggcgaggacaggaggcgaccgcgggcgctgccaagggctgcgggactttggcttttcctcagtaaacaaatcttttgattactttgacactgtggaataaagaagcggggagaaggatcaggctcaccttcacccgcttcagggggattccagcttggatgtcagattcctgaaccgtctttgccatcggaggaggaaacacatccacacacgcgcgcgcacactcgcacgctcagggccacactcacacgccgccctccacgatcacacagcaccagacttcggttccctatgcccctggatggtgacggcggattggcatcttggaagcgatgcgagagcgataaggctggcgccggcccgcaaaagctgcaggagcatcgctaggtgttgccgccaccgggaagcggggctgcaggatgagtaagagatacttacagacagcacacaacggaaacactgctaatactcatatccatgtacaccttgtggggcacagttggatccacgctgccaaccctcataccagctcaccatggttaacaacggcgaactcggtgacggtgcgtggccctccac

SEQ ID NO: 222990 - DNA, 478 bp, Homo sapiens
agttggcccataaagtcatgtttctctccctttagaatagggaggggaagggatcaggtgtgttgtcctgggcctttcaaccttgcgggctgtgctgagttccagagagctgccggaattccaggtttgactctccagcacagagcagagctacacagaggtgacccacgttagtccactgagagttctgagtccaaagggtgtacgttgcataaggctagagaccgcttttcctcctttccccccaggctctttgtttccctccacccacccttccatatcctctggagcaggagacaatgtgggtgcccagaagtgccctgcgctttcaggcagtgtctctgttttcccaaggtgaaacttagatatcatggactgttgtccagcctcaatgcttcattttccccttgcatatcaactgccctaatctgactttttttaagtgcaaataaactgctataagacattttggttagta

SEQ ID NO: 222991 - DNA, 399 bp, Homo sapiens
cgatacgatcccccaaagatctttgagcatcacccacccctcaagagaaaagatgactctggggaaaaagaaatagctagtaagttaattgttagatcccaaggttgtaaaagatcgaaggatcttaggcttctggagcactgtgtaagagaactggcaaagagtaaatatgaacggtgtgcatacaactgttcaaaaattagcatcaaagtgtaaaatcacatttaaggaaacatttagaaatggtggtaacctacattaatttgcttagtgatgtgtatgtaaatagcaataagtaactgtagggtctgtactaggatataatcaacttcttgatttaaactaggctagcaaaacatctaaggaacagtttagtcccataaagcatctgaaacgaaa

SEQ ID NO: 222992 - DNA, 520 bp, Homo sapiens
gagctgatgccaagggctctgcaggccggctggatgcagcaacctggaccagctcccaggaaacggaaagacatggccccagattcctagaaggctccagatggaggtgattgaaatgagggagggactaggaaccaaacagatgtctataaaactgaccacaaagaaaacatcttagaactgaccactgatgtataagactaaaaatctcagtctatgccttctacttttattgaacattcagtgagcaaaagacagactgaagaactgttcagagtaaaagaggttaaaaagacttatcaactaagtgaaacgtatgatcctagatccttgatgtgggatcaggaaaaaaatgctaaaaaggacattattggtatgactggcaaatggactatattgtatactacatacatttcctgagcatgattatgaaagagaatgcctttacacttgttcttaggcgatccacactgaagtatctggtgttaatagaatgactgtaaattactcttaaatggtt

SEQ ID NO: 222993 - DNA, 439 bp, Homo sapiens
gcttggatccaagtggtggttaggtggctagatagtctataattagtgcattttccttaattttagtctcaagcttgttactggaaaatctcattaattttgagtctactaatttggaatctatgatccttcaggccaagaggctgaactgatgtttagaaaaataaacaaagcaaacaagttttcgaggcaggccctaccacccttcttgtgttggatttgtaagttcaacttgacaaaggtagttgtcctaaagcgctgggcctgcagttgagataacctgccaccaggtgggtgatgaggcctgccactggtgttttaagtagtcattgctcatggacagatgttttaaagattttatattcaatgattctttcttcctcttctccagagatgcaactccttaataaaacagtaagacaaacacagaaaagtggaa

SEQ ID NO: 222994 - DNA, 384 bp, Homo sapiens
actctgttgcccacgctggagtgcagtggtgcaatcaagactcactgcagcctcagcctcgtgggctcaagcagtcctcccatctcagttgcctgagtagctgagactagaaggctcatgctaccacacccagcttccaagccagattgctggtgacagaggctttcctgggaaatgtttacctttctgctgtgaaggagtcttttggaatgggaagatggcagccttctcctgtgagttttggtgatatgtatgaagcggccttctcccatggatttttggtgatatgtatgaagtgccacaagtgaacctcatgtacccttggaaatcttagccaaacaggcaggaagctatgaacagttgcaacagattatataattagca

SEQ ID NO: 222995 - DNA, 422 bp, Homo sapiens
cattagttttattttcatctctgattttatatggacatgtttcaatgcatacagacagttaatattcttttcctcctaattatctattatatatatcatcttcagtatcatcaccattcaaaaaactcttttatatgttctagataatgtggcctattttttacgttagactacctgataaggtgtcaactgaattggctgcctttatctacattctgaaccaaaatttaattctagagtttgtagtcagcgtttttccaaatgtgtaaaactgtaatccttcataaaatgtcatatgtaaaagagtaagcaattctgtgtgtactaaaaggtgagaaagttattactttagctttcactgggaagacttaaagtttatcaaaaaggattatagaaagaacagatttatagcaactgtctga

SEQ ID NO: 222996 - DNA, 450 bp, Homo sapiens
tagtggcgaaatctcactatgttttgcccaggctagccttgaactcctgggctcaaaggattctgaatagctaggactatgggcctgcaccactgcaccgggcttgacaattatggaactcattttatattgtcttgttgaatcttctcatccttggctcctaggcctctctagccatggacagcagacttagaaagtcttggtcagcagctgggctcacgcctgtaatcccagtactttgggaggccgaggtgggtggatcactttaggtcaggagtccgagaccagcctggccaacatggtgaaacccatctaaaaatacaaaaattagccaggtgtgatggtgtgtgcctgtaatcctagctgctcgggaggctgaggcaggaaaatcacttgaacccaggaggcggaggttgcagtgagatgagatcatcccactgcactccagct

SEQ ID NO: 222997 - DNA, 525 bp, Homo sapiens
tgcacagaactgggagtcaagagcttgggtgaagcttcaactcttcagtctgtttcttcttttgtaattatgctaataaaggttgaattaggtgccttctaaagtctccttcaactctatattcacaagacaatgagttattcaaaaattagattttattcaagccaaagaaaatgtattacattcctatgcgtattttatattgtcagtataagtgtatgtatatatatttaggcagactactttgaatcatgctatttgtatcccaaaacagtaaggatatagataaacacatgaaaactcactgtattctaagcagccaaaagttcattccattaagagcagccaaaaaataatctttccctcctctgaaattcttttaaacttgatctgtttctttcttatctttctccaccttttagatgtcttatttctcttaatagcccccttgaaggtgcttctgcagtgccttagacatatcaagtgctgtaagaaacacttgaaaaataaatgacaaagaaaaat

SEQ ID NO: 222998 - DNA, 288 bp, Homo sapiens
tgactttcccgcttgggattggtgattttgctatgtataggcaaatgtgatttccctagcaaagccctagcacatagtagacattcaaatgcctaatcatttgcaagttcctcctatactattatgattttacagtgagtctttaggcccatcctcagcaacagggctatttcctcagtaacaaaatgggaatgacatctgacatatatttcataggaacaaagtggctacacatataaacactctcttctgaataatatcttcaccttttaccaaaaaaaaaagcac

SEQ ID NO: 222999 - DNA, 578 bp, Homo sapiens
ttaaccttggtgaaggaaggggatataaaattacaatttggtgggatgtgatcacaacttcactgtcattctgtggaactaatttcttctgataagtatttataagctataaaagtctctgaaaaatagaaaaaaatagcccatcattcctagaagctcagatcttcttataggttgctgccatctttttcctttgagaactattgatccatcttcctcttaatgtgtttttgtcccaggattatagtaagtagagtgctgaagattgccaacttctctttctttgaactgagtctgcaaaggcaagtgttcaggaggctgccggagcaggaggtacacacgaaggagccgaccgtcatgttaacgtaggtggggccgcgctggtcgcagtcgaagcactttcggttgtgcgggaggccggtcatgtcccgcagcatcttcaggtgcttctcctcctgcttccgcttcgcgctggccgccatggccgcggcgccaagggaggaggccggcagggccgggagccgggcagcgctgcgccgggggcccgcggtcccacgggccgccctggccgcggccgc

SEQ ID NO: 223000 - DNA, 375 bp, Homo sapiens
tgcagtgagtggagatcgtgccactgcactccagcctgggtgacagagcaagactccttctcaaaaaataataataataataataaataaataagtaaatttttaagttgtgataaaatacacataacataaaatttaccatcttaaccatattcaagtgtacagttcagtaaagttaaatatattcacactgccatgcaaccagtgtccagaactttttcatcttgtaatactgaaactctacagccaccaaacaacagctccccttttcctcctccgccagttcctggcaacccccattccactctgtttctccatgaactttattgctctggacacctcatctaagtggtataatatggtgtttgtctcttt

SEQ ID NO: 223001 - DNA, 426 bp, Homo sapiens
gttctacctttaagtgaaaatgtaaaacttcttgaattggtaaggaaaggaaaaaaatatataccaaggatgctaagatctatgctaagaatgattcttctatccatgaaactgtgaattagaaaaaggaaatttgtgctagttttgctgttgtacctcaaattgcaaagttacagccacagtacatgataaggcttcggatggaaatcacattaaatttttgggcaagagacatgatcagaaacacattcttactgaaggcaattgagttcagttctacactgaaattcagttatccactagggggtcttggaatgtatccctcatgaatcaaggggaactattagattgtaaacacaatcacccagcttcttgcttcttatcaatggttgattaggaatattgaatacaggtccttttcatatc

SEQ ID NO: 223002 - DNA, 680 bp, Homo sapiens
aggctgcggcctggccatcactttcttcattagacaggactgagcacccactgctctctctccctggaggggagggactggcagccattgtttctttctaggagaacctgggcttctaatttcatcccgtgcgtaaactgtattgggcactggacaaagctctcagttagtacaagggatggtccaggtgagggctcatttgatcccatcacaaatccccgcagggtcctctcagcagcagggagcaggactgggcctctgacccccggtgactgtaggtcctcctttcctggatgctcagtgaggtggttccctggcaacagcacagcatcctagcagccccaaggcacatgaaccacagacagagggcagatgagacaaaagagtcttccgtgctcactgtgggcattgtgtcagtgtttaccctgggaagctcctggatgtgctgttgacccttctctctggagaactttagcctggcccctgcccaccccactggagccattactcagagctctgtgctacaaaggcccagagaaaggaccctggggaggaggctacatggaggctacattcattcattcattcactgattcattcaataggtatactttgtatctctactgtgtctatctattgagcccatctctgggaatattaagttggttgagatatgggtt

SEQ ID NO: 223003 - DNA, 174 bp, Homo sapiens
gccataaaatgaaatcagctttaagctatgctgctcttcttctgtttcctagacagtctgaaaatcagttcattgaataaacctggtgctattacctgacttctattcatattagttagattacagacttattaattttattaaattcaggaaagctaatatgcgtcatttgca

SEQ ID NO: 223004 - DNA, 637 bp, Homo sapiens
aaaaaaaatgtggatcctcatagttgaaagccaggccagtctgcactaaagtggtaaggatgttttcttttagaggtacaggtctaagaaagaaatctgaaggtggttacctcttatgcaagaatttaatttgatggattcaaggtgtgttggttaagagaaatggggaagggttgcttctcatgactgcggcacgattctactatactaaatttttcttttattaagcagcattgccttatgcaatgataggaaacatttgttatatgtgaaatcacttttatttttattttttaatctattcctattcttttcatttttttaacttttattttaggtttgtggggtacatgtgaaggtttattacataggcaaaccggtgtcacaggggtccgttttacattttatttcaccaccgaggtattaagccaactactcagtagttatcttttctgctcctctctctcctcccggcatctcttttaaaagaaaataatttttagcaattctttagaataagtcttggccacctaaaggtttccaggactctagttcagggagtatttatctaagtcagtagttcttaacctgatataatttcatccccagagaacatttgacagtatctcaagaaatt

SEQ ID NO: 223005 - DNA, 270 bp, Homo sapiens
tgttacttagcccaagtctggatgtctctccctcctgttgtctatactgccagcatcagagtcacctaagactctgtgtggctgctcctcgaaacaccaaatagttggccattcattcatttatccattcatttagaaatacacatgcaaggtgagcaacacaaactcagccatggctcttggggtgctttcatctagtcagggagaccttaatgaaaactacttaccccaataaacatctaattaggaattatggttagtgctagtaaa

SEQ ID NO: 223006 - DNA, 468 bp, Homo sapiens
acaggatcctatcaaaagagaacaaaaaagagaaatgagccaattgttgcagaggaaaagcatgcagagatctgcttcaagtttactctgaaccacagacgctccgggaattctacacaccaggagctgtctcactccaggaagtgggcacaacccaccatccacacaatggaaacaagaatggccaggaaatgtcaccgaagtgggacttccatatgcaggatcagcgttcacagtagcacaattctaaccaagttcaagggaaaacaaactctgtctcacacaaacatgggaatacaaaattgttgagccctagccatcactgtctcttaacattatttgctatcaaaaagacaaacgaaatttagtcacggacttttgggtgcctattcagctgcacccgattccaggggcagcttagtgtgctttttcattacaaaaaataaagacattaaaaatgcaaaacaa

SEQ ID NO: 223007 - DNA, 393 bp, Homo sapiens
gctggagatgagaattctcttcaactcagcaattctgttgcagaatgtatatagcctagaaaaattctctaaaatgaacctaagaagacatgcacaataaattcattgagactgggcacggtggctcacacctgtaatcccaacactttgggaggccgaggtaggaggattgcttgagcccaggagtttgagacagcctgagtgacatagtgagacgtcatctctacaaaaaagtaaaacaattagctgagcatggtggtgcacacatgtagtcccagctactggggaggctgaggtgaaaggatcacttgggcccggaagataaaggctgcattgtgttgtgattatgccactgcactccagccagggcaacagagtgagaccctgtgtcaa

SEQ ID NO: 223008 - DNA, 484 bp, Homo sapiens
ggtttcacatattttcaataatgattttatttaatactcatgcagtgggtaaaattaataccagttaattttactggtagaagattttaaatttaaaaagaaaaaatgaaacataatctggatttttgtatgaatccatgttaagctttgccatcagtaccagactggtccctctaccatttccactgcttccctttcagtcaggattgcatttgctctactgccttttagactatcctagaaaattgaggagattctaagtcatcccattcatgacgattactaaggtttttgtcagtctacataaaacttagtcgtgtgccacagataactttaaaaaacccaatgtatgcaaagattttgttttgtttgttgttcatatgtattctttctgttttgtttctgaaatatttcaatatgtaagaccaactattggcatcaggtctatatcactaaacataaatattaaatgttgtacttgaaa

SEQ ID NO: 223009 - DNA, 156 bp, Homo sapiens
tagaatcgtgtgcgttagctgacagatgagcattctcatggtggccccatcagccagccagtatcaccatcttttctgtgtaataatgctgtatgtataataatttggcaatttattaagattataaaataaataataaagatttaataagattga

SEQ ID NO: 223010 - DNA, 358 bp, Homo sapiens
gagatggtttgactagtgtcttttttgtaattaacattacataatttaaaacattgcaatttaagagtttaattgaagtcacagatgttttaatattatattacaattgttgaagctaactagaaatgtgtgtggttgtgttttaataaaactgtattcacaaaaacaggtggtgagttgtatttggcctgcagcctttagttgactgacccctgctttaaactattccctcagaatcacctcccttatcccaagttttacttactcctttgtagttagaagtactaatgtgaaaaagtatgaaaagcattcttcaacaattcaagtaataggaccagttttgcttagctcataaact

SEQ ID NO: 223011 - DNA, 397 bp, Homo sapiens
tctccaactgctgctccgtttatccgttatcctttgcagcaaacctgtgcttgctatctttatctcctaccattctctcttgaaggcattctagttaggctttcacccccacctggatatcaaaactgttcttgtcaccagagacctccaggaattcaagttcaatggccagttctctgctctcaccttaattgccttagcagcagcatctggcatgattgattactcccacctccttaatacactgtttattgccttccaggacaacacatactcctggttttccttctacctcactggtcactcctgattctccgctgtcttcttccctacctcaaacagggttcagtcgttggtccatttctctttaaatacttttatcctctatagactgata

SEQ ID NO: 223012 - DNA, 441 bp, Homo sapiens
aaaaaaaaaaaaaaaaaaaaaatcaaaatcgctaaaatgattagaaatacaatataagaaaaaaatgtaagaaaaagtgaacacaaaggtattgtgagacactctaacacaaatatcagtttttgatagataatatagatcatttatattgattatggtatatatataccatttataagtgagaatatgcagtatttggttttccgttcctgtgttagtttgctaaggataatggcctccagcttcatccatgttcccacaaaagacttgtccttgaggacggagggtggaaggagggaaaggagcagaaaaaataatgggtaccaggtgtagtacctgggtgacaaaataatctgtacaacaagcccccatgacacgagtttacctatataacaaacttgtttatgtgccccgaacctaaaagttaaaataaaatgtaaa

SEQ ID NO: 223013 - DNA, 413 bp, Homo sapiens
agtcgctgaaaagtatgaaagtcactgaaaagtatgaagtcactgaaaagtatgatttttcacacctacaaaaatggggttaattaccttcaggacctcacaagacaaatgattatgacatctgtgtaaatgttggtttgcttggattgagtcactgctctatgtgactttgtgcaagtgaattattagcctgagcaactgtggagggaaggatgaaatcaaatctggaatattttgagaacaaacaaaaaataaaaatatcaccgctgtgaagaaataatttaagaagctttattttaaaaggcaaaggccgagcaaagtcactcacctctttaatcccagacaggaggatttcttgaagccaggaatttgagacaagcctgggcatcatagtgagaccttatctcaacaaa

SEQ ID NO: 223014 - DNA, 395 bp, Homo sapiens
gagaccagagtaaagaagatatggagagggctgtggaccacaagtttaaaactttgccaaagtattttacttcgtgtccatgaaaatcttttattttcctctgagaaattaataggcttttttatgaaagacagtgcaaactatataatgaattttgttaattttagttttatgtcctaatttgtttttcctatgaaggccagattcaaatttgaagcttaattcttaatgaacttatttctgtatatttctaattgaaagtttctccttaatcacttatgttttcctaattttgatccacttagggttttccatcttttgttgagattattgttatctacttttcctgccttatagaataagataataaaataaatacatcatttaaaactcac

SEQ ID NO: 223015 - DNA, 251 bp, Homo sapiens
gacgggcaaagctctccatcacacaggacctgcttcttcaagcctacagtttctcaggccaggttctgtgcagcccagacacagttgttcagatctggggtgtggaccaggtggtgccagaggccctaagaatactctgtttactttgccttcctcatcagtctctttcattcctaactcactgagtttctccacaaaatccacattcagaagattttcagtaatttgactgactgtagcagcatacacag

SEQ ID NO: 223016 - DNA, 856 bp, Homo sapiens
ctagcctttcttgttttattattagaatacaaaaagacaaaaaaaatcaaagaaactttcacttgaggaatacaacaaataaaagtacattttaaaatcacagtagaaaggaacatagtattaaaaggaaggcaatctctaaaaggtgaatcatattgcatgcttgtacattgcttttgtgatgaatctcttcagtatacaaatggaaattctttttgcaatacttcagacaattcaaagaaaatcatatcattttacttatagaaaattgagcttgattatatagtgttattgtagaccaaataatttaggatagatgcagggttgaatttcttaaaaggtaacctggctttcagttgttttctggtacaagaatacccaagtaaaagtcacttgaacaataatatttctggttagctcagtggcccatgttctctgagattctccccatctttctcttacaggggcaagatggctgcagaagctccaggaatcttgtcctctcatgacattgtccaaaaccaaaaaaagggaaaacattttcttcacatttctctctccttttgacaggaagcaaaatgtccttagatgtactcagcacaatttccccaggtgtgggtatttaggccaggctctacccgaataagagactagaaatgggagtgtgtggaatttctagcctctatcctgggtgataggctctgccagtagtgagaagggaaagaaaggggactacgctgtgtcaaacagctactgataaatggtgtgtagcagagatgcttaaaaagaaaaaagttacattcttattaatatcaaattagtgtgaccctaaccagatgctgaaataaactatatt

SEQ ID NO: 223017 - DNA, 246 bp, Homo sapiens
gcaaatctacaccttggaaatagtagtaaatgacataagcatattaatatttatgatgtgatttatttttgttttcaagtcatatactggggaagattctcaaatattaaaacaatgtatctttacatttatgtatgtcgttcttgttctgttttagaaggcttgtatttgcatttttaacattccaaaaggtaaacctgtaatcataatgttttcatcaattcaataaaaccattacgtttgtaa

SEQ ID NO: 223018 - DNA, 638 bp, Homo sapiens
agggaatgcagaatcacactcaaaatggaagtaaatttctgatgaactggttataaggtaaatcgagaggaactggttttaaagactcgtttacgtgtaattttcatttttttgcttgcaataactatcaagggaactgtgacatctagtcagactaaagtgtgcaaactgcttctcacatgttccctgtgcctctttttctttcttgtcctatgattgtacaggactctcccagttggggttgcagcctccacggaaggggagtcattttgtattgtttggcttgggttttttgtttgtttgtttttttgaggttgctcaccgcaacctccgcatctcgggttcaagtgattctcctgcctcagcctcttgagtagctggaatctcaggcacccaccaccatgcccagcttattttttttgtatttttagtagagatggggtttcaccatgttgaccatctgtctggttggggtgcatgctaggtaggagaacctggccctcaggtggagcagagtctggaactcgcagtcatttttcaggaaagccgtggtggtggccgaagaggcaactaaatgtgatcaatcctagagacacagcacatacaggagatcacgtatttgagtgtgattctcggcg

SEQ ID NO: 223019 - DNA, 420 bp, Homo sapiens
ctcatgtgtgtccagggatacatcatttaatcaagaaacactaagaacaaaatcttgcggagaaggatctcagtaactggtgggtaaccaggactggtttcacaagtgtaggacttatacagtaacaccagtaacacagtccccaagcacctctccccgacctgccccacatccctacttggtttaatgctctactgtgctaaaaaaattcttaatacattttgaacaaggagttctgcattttcattttgtatcaggcaataagtttgtagccagtcctgaggttaacaatgtaagacctggattacagacctctcctttctgggaaatcccttctgtctgggcaccttattactagttgcaatatttgtcagatgtttttcaaaagggaacataattaaaataaactgctactcccta

SEQ ID NO: 223020 - DNA, 582 bp, Homo sapiens
caggaaggagccatttcactgaaaaggaaacgcaaatggtagtcaaaggcaaatttaaactttttttatcataaaaaaaaatttaaatgaccttgagaggatatgggagaaagaaatgctctcagtctcactggtgagagtgacaagtgacaattgcatcttccttcatccttaacacctactcagcatgtaagctgagcaatatgtagagtgtattaaaatacatttccaagaaaccaaagagtacaaggtaacacgggaggagactattatcttcacggcctttgatgcttaaaaggtatttgataatattcgacaagtattcctcaataaaatcctagaaaacaaggatccgaggaatactttcttaacattaaaaagctatcagtaattatacaggcaagtccaatgctgaatgcattacaattaaagtcaggataaaaaatagatacctgctttttctgtaattctagtataattacactaaaagaagaaatttaaaaaacattaaaacaaaagagacagcgtgccttttagcaaggtaatatgctatatacttgaagcacatgtaacaatccactg

SEQ ID NO: 223021 - DNA, 449 bp, Homo sapiens
aacagcatcgccttccacgccgccaaatgcacgctcatctcccgggaagacgtggaagcgctctacacctcctgcaaaaccgagcgcgtcctcaagaccaagcgcaggcgggtcggccgggccctggccacaaaggcgccgccgccagagcgcgccgctgccgccagcccccgcccgggattttggaaggacaagcaccaactttggcggggcctgagcggagccgcgcggcccctgccaatcagcgcgcagtcccagcgcccgggcgccgccgccgcgcgccccgccgcccatctacctcagatttttagcaaataccccggctcgcactacccggagatcgtgcgctcgccgtgcaaaccccctctaaactatgaaactgccccgctccagggaaactacgtcgccttcccctcggaccctgcttattttcggagcctgctgtgcag

SEQ ID NO: 223022 - DNA, 368 bp, Homo sapiens
caccatctcctgagctcaagcaatccacctgtctcagcctcccagagtgctaggattacaggcgtgagccaccacatctagacggtttcctttttttaaaatataggattttacagctagaaatttccctttaagttctcttttaccacatccatatatttggatatgttgtatcttcattttctttcatctcaaagtattttctaagctttttggtgatttattctttgactcactggtaattgaggagcgtgttgtttagttttcacatattttaattttccaaatttctttctgttattgatttcttacttcattctattgtggttggaaacatactttgtatgatttcactccttttaaattta

SEQ ID NO: 223023 - DNA, 485 bp, Homo sapiens
tagctatcacaaattaattcacttgaaaacaccccatttttaatacttaaacatacacaatcatatgtacacacacagacacatatatacaaaaaatggggtttgaaaaacttttgtgtctagtctcttctgatatgaagtttcaagtgattttgcccagcttttgctgctatcttataggtaaaattctccaagcaaaataaacttgccaaatcaaaacatagttatcaatcactatggaaaaaaagaacattgatacaatttattgatttatttatttactcattcattcactcatttaacatatatttaataaatacttgctaaaatgccagacaccaggctaagtgctagaggtaaaatgctgagcaacaaatgaaacatgatccatgctttcatagagcttacaaactaatgaggaagctagacattaacatattacacacaggccaggcgcgatggctcatgcctgtaatcccagcact

SEQ ID NO: 223024 - DNA, 555 bp, Homo sapiens
tgtttcatgaatatttagtttgtatgctatcttttgcctttgtcagtaatgctgttgcaatcaatatccttgtacacgtcaattcttacaagtaggagtataaatacaggatgaaattccaaacgtagatttgctgtgtcaaggggtgtgtacctttccaattgataaggtattgccaaatgtcttcccattgaggttgaaccaatttatatactcactagccttgttgctaacattataacacaagaagcattaaaattgatttttgaacaaaatcaatgtatatgcttttaagtgttctttctttttaaaaaatcattattggaaaatgcaagcaggaatacatggcaagcagagcccatgcaatggccagaattcctacagcagaaatgacttcaacatttgtttataaagattttctccaaatgatttgttgaaataacttgagtcttcaaggtttaattttccaaatgttggctcaaacctgcactgaaattctggcctacggtgtcctagcaaaaatctccctttgcaagatgctgaggtatattggca

SEQ ID NO: 223025 - DNA, 412 bp, Homo sapiens
ctggctgatggggacatggggattcttaatcctgttcacctacaacgtgccatccaaagggaacctcagaagtagtaattgcccacctttatgggttgtgcatgcatgactgccaagcagctttccacaggcatcacagactctggtgtcagacaagccttggagcaaaagctacagatccagtgtctgggctgaggcaaggtcaggttatgcctgtgtggaactgcttgccttcaccagtgactggggtaagtggccaggccaaaaggatgtgaaatggtgctcaagagttctggtcccctggaggccctgactggagccaagtgtcagcacacgaaacatcatcagctcattctggagcatttactttaactcaagtattaataaataaattggaagtcaattcacagat

SEQ ID NO: 223026 - DNA, 375 bp, Homo sapiens
taacactgttgtccaaagacatttcaccataatataagcaaccttgtttcatgaattggggatatcctggaactattccatgtaaatgaaatttttggaaatagcctcacttaaaaaaaaatcaacatactgagatatacatttcagtcatctcctaccccaaccactaaccctggacaagcactgaggtgttttctgctaggctaaactttggttttgcatttcaagtaaaggaataagacagaagatgttcctttgtttctgaactttaatttttgctaaaaattatttacattatatatttttagaaatgtttattttttgactaacaatttttagaaaaacttttaggttcaggggtacatgtgcaggttt

SEQ ID NO: 223027 - DNA, 395 bp, Homo sapiens
ctccagcctgggcggcagagcgggactttatctcaaaaaaagacacaaagaggttgagccaggtcaacccacaggaccatgaatatttaaaaagtggtattctaggccattacatatgtggttgttggcgacacagcaatagataactgaaacagttggtaatttaacacctacacagtcctctggggtagacgttattgttcccatttatcagaagaggaagtaaagcccagagagagatgtgactcagtaaggctcacctagccagctggaggcagcaggtagggtttgacctggcaggttcatctgaaaccagtttgttttctttacagagcacatgcctggctgcctgaagcagttgaccagaacttgcagccaaaccacgtggttttggt

SEQ ID NO: 223028 - DNA, 481 bp, Homo sapiens
aatctcaggccatgtaactgggttctgccacagggcctccacccagctgggccttcctctcgactatccacattcaacatctagcaaggggagtgcctggcactcgagtggattccatttccaagccagccatcacctctaatgatgtgcacatctcctgtgaacctggatgccttcctagataaacaacaaagtcttacaaacacaacttactcccaggcccagagagttcctaataagccaatgttggtgtgtgtgggtgtgatgagacccgcgagaagtccccagatggagattgaagaagtggaaattcggtgctaatgctaattcttcatttagcactgtttcagccatagttaaagcgtgcattggggccttaaaaaggttatgtttataaggaagaaggaagacagtccatgtctgacttgctgaacatgcaaaacgaaaacaacaacaaataaagtaaccctggaactcctcc

SEQ ID NO: 223029 - DNA, 339 bp, Homo sapiens
gcccagaggattaccaggctgagtacactggtgcaatcactattgctcacagcaacttcaacctcctaggctaaagcgatcctcccaccttagcctctccagtagctggaactacaggcgtgcatcaccatgtccagctgattttaattttaattttgtaaaggcagggtcttcctattttccccaggctgatctctaactcttggcctcaagcaatccttcctctttggcctcccaaaatgttgggattacagatgggagcccccatacccaccaatcacaaggatcttataagagaaggaggtaggagagtcagaattagagaaagtgatgtggtaa

SEQ ID NO: 223030 - DNA, 540 bp, Homo sapiens
cctgggcttaatgctgttactttccattagaaaaagatcaccttatcattcatcagacactctacagaatctcagaattatggttctgcacaatgtaagtgagggcatacatccacctacccaggaactgaagtggaatctcccccaccccacttgtggcatctccccacgattgctcttcagacaaatcctcatctgtttagttgtcattctgctggggacaatgcaatctaagttatttcatttagttattttcatccccttcccctctctcattgtatccttcaccacagacagctcttccagtttccaataattgtttatactccttatttctttttctttttttttgagatggagtctcgctctgtcacccaggctggagtgcagtggcgcgatctcggctcactgcaagctccacctcccgggttcatgctcttctcctgcctcaacctcctaagtagctgggactacaggcgcgtgccaccacgcctggctaattgttttgtattttttttttttttttttttttttttagta

SEQ ID NO: 223031 - DNA, 370 bp, Homo sapiens
tattcatagagttgtacagccaccatcataatgaattttagatcctttttatcaccccaaagaggaaattaatatccattaacagtcactccccatgtcccctgccctgactctcccagccctatgtaaccactaatctattttctacctctgtagtttccctgtactgggcattttatataaatggaatcatgtaatatttgctcttttgtaattggcttcttttacttagctagcattatgtttcaaagattcatccattttgtagcatgtatcagtacctcattcctttttattgccaagtaatagaatggacatttgggttgtttttgttttcggctgttataaaaaataaaaaattactctatga

SEQ ID NO: 223032 - DNA, 548 bp, Homo sapiens
tactaattttggatttggtttttacttggatttctagatccttgaggtgcatccttcgattgtttgtttgaaatctttctactcttttgatgtaggtgtttattgctctggacttccctgttagcactacttttgctctatcccacaggttttggtatgttgtatttcgatttttatttaaggcatttttatgttttctccttaatttcttccttcacccagtggtcattgaggagcatgttgtttaatttccatgtaattgtacagtttctagttgatttctagttttaaacattgtggtctgagaaagatacttgacatgatttcaatttttaaaaactttgttgagacttgttttgtgtcctaacctgtggcctatcctgaagaatggtctgtgtgctgagaaatgtgtattctgtagttgttggatgaaacgttctgtaactgtctgtttagtccattgtcctaacgtgcagtttaaatgtaatgtttgttcattttctgcctagatgatctgtctaacgatgggagtggggtgttgaagtcct

SEQ ID NO: 223033 - DNA, 666 bp, Homo sapiens
gcggcccacaataagaaaggctgaaggggcgggaagaaatctgagctctgtgatcctccagagcaagcctctgggacagggcccctcaggaggaagaactgcaggaaatgaaatcacagttgagctggatagggacacaggaaaggaaggatgagatgtagaccaatgtggggaagaggaacaaagacaggaactcctgaaagccatctcccacgttttttaacaccacacagaaacaagggagagttctgagcttagactttcctgagcctttcttatcaggaaaactcatctcacctaaaaataacagaaaagtatttgaagtgaaattgcatacagttgttatataagaaacaagaatatgcaaaataacctccctgcggacaatgagagcacattagaaagacatgcccacataaccgagccaagctgtaacctgctatttcaaatcaagccaggtgacattctaacaatacaaaacaagagagaatagtgtaaatcaactttttaaaaatcagaaataaggtgacagaactcaggaaagaattagaattaaaaatcatttcagaagtaaagaaagactaagacgaaatgcaagtgtcgatgaacacagcagatcctgcctgaaaaggataaacagtgtgaaaaaggaaacatttcaagagc

SEQ ID NO: 223034 - DNA, 442 bp, Homo sapiens
tgtggtttaatgtgcaaaaattttcttgactccaactaaatacagtcccctgtagcagtggctgtttagcccctcagttccatcccaaggaaagtctttctacctattaaagaacaaaaatagctttaggttgcggcaagataacccacactcggtaggagtgtaaagtgatacagtcttttgctacagtaacttggaaatatattaccacagggcaaaaaaaaatcttatttttaactctttgaacaggcctttatttcatgttgtggtcactatcccaaaggaaataataagctaagtgaataatgaaaattcatgtgaatttatctgtggggtttaataaaatctccgtttgttgtgagtatgcattagcaagccaaatagtgtctttcacctaaagaaaatgtatcccactatctccactacaaacactgaaaagttc

SEQ ID NO: 223035 - DNA, 441 bp, Homo sapiens
acatccctatttcccacaatagcctatagcattttgaaagaacaagatttattcatcttttttctttggtaccaagtagttgatagggactcaataaatgtttattgaataaatctgtcacaactcacaagacagatctaaaaatccatgaatatcctatttaattattttaagataaattatgttattataccataagatattcaataagacataaatattttagttattaattattgtttaaaaaaaaagagccagaagggaaaagccacctaacagcacaaaaaatctgtaagactcctttaaggtttttatgttttgatgacaaacagaaaccaatcacctttaaaaggaaatgaacacaagaggcagcagataaaaagttaaaaactacagcttatattaataatcaacaacttttacagcaattcattaattaga

SEQ ID NO: 223036 - DNA, 390 bp, Homo sapiens
cctgcattttcatctcacacagtcaccattattctgccatatccttaaattttcttctgcaacatagtctctaacccgattccattgtttcatgtaactgactccttttctttaaaatgcttaattgtggtaaagcacacataaaatgtaccatcttcaccatttgtacgtgtgcggcttagtagcatgaattatatttcacactgttgggcaactaatctccagaatttttcatcttgcaaaactgaaaaccaattcctgcctgacgtttgggcttcttacattaaagaaatatttttagcaatgttttaataagcgtctttgtagctaagtaatgggaaccacctgaacctgcttcagtggctttcaggatacattcttagaagtggg

SEQ ID NO: 223037 - DNA, 471 bp, Homo sapiens
gaaccagggaggtggaggttgcagtgagccgagatcacgccattgcactccagcctgggtgacagagcaaaactgtgtctcaaaaaaaaaaaaaaagaaaaagaaaagaaattaaatgacaacccacaaaatgggagaaaacatttacaaatcctacatctgattaaagacttctatcaagaacatataagtaactctcacaactcgatgaaaatatgacaaataaccaattaaaaataggcaaagaatataaatagacatttctcctaagaagatgtacaaatgttcaatatgcacatataaaatggtcaacatctagacccaaagtaaatacaaataggaacctaatgcgataccaatttacacctgctaggatggctataatcaaaaagacagaaaataaaaagtgtttgtaaggacggggagaaattagaaccctcttacactgtccatggaaacgggaaatagtgc

SEQ ID NO: 223038 - DNA, 442 bp, Homo sapiens
gcacgagctagaaaggactgtctactataacaaggttcttctgttaaacatgactttcttaaactacaatgtgccttgttcgtgagtaaacaaaagcatacaaaatagtgcctaattgccagcaactgagatgggtaggactgtgtagaaagcactaacatctggctgggcgtgttggctcgtgcctgtaattccagcactttgggaggccgaggcaggcagatcatgaggtcaggagttcgagaccagcctggccaacatagtgaaaccctgtctttactaaaaatacaaaaattagccaggcatggtagtacacacctgtagtcccagctacttgggaggctgaggcaagagaatcgcttgaacgtgggagatggaggttgtggtgagctgagatcacaccactgcactccagcctggaaaacaaagcgagactatctca

SEQ ID NO: 223039 - DNA, 680 bp, Homo sapiens
atagaaatgaagaataggtttttatgttaactttttaaaataatttatgtttatataattccaaacttgtagaaaaattgcaagaaagtacaaactcctatatgccccagttaacattttgttctgtttgttccctctccctcactatatatttatgtgcttgtgtatatataaatatctatatccattatcattattctttttctgatccatttgagagcaaatcgtgaacataatgcctcctcacctctcaatactccagaatttatatccgccatgcaagattactcccttacctagctatccaaatcaggaaatcaacatcagcagatactaccatccaaaccacagacccaatacacatttttacgagatgttccaaaaatatcttttttatttctgacttgagatccaatccaggatcatttattaaatctagttgccatgtctctttagtctccttcaatctagaagagttcctcagtttttttccttttatgactttgacagttttaaagagtagagtccttggaaccaacccaaatgtccaacaatgatagactggattaagaaaatgtggcacatatacaccatggaatactatgcagccataaaaaatgatgagttcatgtcctttatagggacatggatgaaactggaaaccatcattctcagtaaac

SEQ ID NO: 223040 - DNA, 734 bp, Homo sapiens
tcaaactccagacctcaagtgatctgcctggctccgcctcccaatgtgctgggattacaggcatgagccaccacacccggccaaatttgcatgttattaaaagtaggtataaatgtggctgccagactgcccggagctgctcctgtctgcctacagggtaaacctgctctgcaggagcagtcacagggttgtaacactaccgcttcaataaagctgttttcttttaccttcagcttgcccttgaattctttcctgggcaaagccaagaagtctcatgggctcagccctactttggggcttgcctgctctgtatcagattgatctgtgcttgaagccaagcccaccttttttgtttttgagactctcttgctctgtcaccgaggctggagagcactggtgtgatctctgcttactgcaacctccacctcccaggctcaagcgatcctcccacctcagccttctgagtagctgggactacaggcgtgccacagtgcccagctaatttttatatttttagtagagatggggttttgccacattgctcaggctggtcttgaactccgggactcaagcagtctgcccacctcggcctctgaaagtgctgagattacaggtgtgagccaccgcgcctggcctgcggttcctggttctatgagccagtggattcctttttctcttcagcttgtgcgagctggatttctgtcatttttaactgaaagataggttttctaaca

SEQ ID NO: 223041 - DNA, 338 bp, Homo sapiens
atcatagtctgctggtgtcgttattttaccagttggagtgaagagtagaaatctcacctccatttatgccctcacatttagaattatcttaaatatttcctttacatacatttagaaccatatcagacagtgttataatttttgtttcagccaccaaacatgattaagaaaacttgctcgggagtgttggctcatgcctgtaatcccaggactttgggatgccaaggcaggaggattgcttgagcccaggaggttgaggctgcagtgatccatgtacgcaccactgatcaatgtatgtgcactccagcctgggtgacaaagcaagaccctgtctcaaa

SEQ ID NO: 223042 - DNA, 426 bp, Homo sapiens
tccgcgcctaagctgccctcggggtctcctactgcgggaagggcacagcaggtggcagcccctgtcccagccgtgggattccttccccgaaattgtggggggagaacacaaggggtagtgtcaccaagcggccagtaggagaccctcccaccctcctgcgactgctggttcgggtccaccccgggcggagggggaaggggccaccggagcgcaggtggtctcggcgcagcctcctggggctgggacccaggggcgctgatggggtaccccgaggcgtaggccgcgcccccctaaaagctgagcatatctgggctcccgagtaatgctccaagcgcagagctcggtgtgacactgaccaaattgttacctcagatattaattacggacagatattaattacggaacaataaaacggtgagaaagcac

SEQ ID NO: 223043 - DNA, 514 bp, Homo sapiens
gattccaacatactttaaagaatatttatctaataatattcttaaagaatagaacacatattccgattagcattgaatgtttcttaatgaataatattacaagaaatgaaataagactattattcatggttaaccaataacaagagtgtgtttttctttcttcacaacttaaagttataaagtggaaagtgagtataagtttagaaatttttaaatattttggtagccataaaatctagaagtaagaacaaaagttgttcatagagtattataatgggaataaacagctatgtgaaaggaaaaaaatataaactttttttcattttaatgtaaaggtgtgtacctatctaaaattcttaacacttatttagtcccccaaattatttctttgtatttccttgtaggtctccttgggaaacttgttccaattcaactattagacatattgttattaacattaacttactttcttaccctgtaaatataactttttttcagtagttttatcatctgt

SEQ ID NO: 223044 - DNA, 415 bp, Homo sapiens
gatatctagaatcactataaataatgatctactgacagtaactgctttgatatttccaggtcagattggctttcttgcctctcaggaggagatagacttttactctaacaaagtgatgacctgggggtttcagggcatgcttcctgaggaagtgacattcagacctgaaggatgagtaaagctagtcaggggaaagtatgagggaggggataaggagatgacggagaaagaataactacactctgggaactgaaagaagcttcatctagatggctgaatgttgtcatctgaaattgattgcttaatcctgttaatccttttgattttaattcttcatggaagtgatctattaacattcctttatagcaacaattgaatagaatttattaacatctttttttccttatctagcaca

SEQ ID NO: 223045 - DNA, 534 bp, Homo sapiens
aaggtctgggtagacattttcgtttaatacttgccaacgttgttaggctggtgttagcaacacttaggaatgttggaattaaggcttagagaacttaaatttcctaaagagatagtaaatgacaaaacctttcagtgatgccatatcgtcactgtataatgtgaatttagtactactgttagccatttatatggtggttatttatcaagtatttattaaatgggcatatgtatagctcatatcgtaaactatgcgtatgagctccctgtcctgaagaaattaggggtttccatgagaaagtaaatggcagtataaaacaacttaaggtacaagaggtgttacaaggtaccatctgctcatgcctggacaattgcagtagccgtgagcatagctttctgcattccctttatttctctacatagttgcattcagcagctggagtgatcccattagaacctgaatatgccactcctctgtgcagaaccttttagcggtttaccattttactcagattaaagttcaaaattcttaccc

SEQ ID NO: 223046 - DNA, 270 bp, Homo sapiens
gacatacgaaacagttgccaacaacccgtggtccagttgtgcctcctttgtttgctgctttgtcagagtctcactgtatgcttttttttttggcctttggcgctgtgagcagagtcacctcatcctcctttccgtggccaactcaaagacttacaacctttctccctcattcctatgtatctacagaacactcactagttgctaactagtggatacatgtgaattatgttttgatgccatagggctgtctagtggaggatacaaacatta

SEQ ID NO: 223047 - DNA, 298 bp, Homo sapiens
tctatccttggaattgtgaagaaggaaaaagatatttgctagttttgctgttgcacctcaaactgcaaaagttaccaccacggttcatgcaaagtgcttagttaagatggaaaaggagttacatttgtgggtgcaagacatgaacagagaggcattccaatcaatagcaatcaggttcagggggtaccttcctcagtttcaggcatccacagggggtcttggaaagtattccccatggaggggggcggggagggctactgtactccatacttgttctaataaaactttttagaaatct

SEQ ID NO: 223048 - DNA, 431 bp, Homo sapiens
agagactgactgttgcaggttgaactgtgtcctccaaaaagatatgttgagtccctaatctccagtacctgtgtatgtgaccctatccggaaatagagtttttgtggatgtaatcatactggatttggatgaaccctaatcgaagatgaccagggtccttctaagaagagaatagatgcatgtgcgcgcaagcgcgcgcgcgcacacacacacacacacacacacacacacacacacacagaggaccatgtgacagctgagagattggagtgacgtgtctgcaagcaaaaaatgccaaggattgccagcaaccacctatggtctcctcccctagatcatctagagagaacacagccatgctgacatcatcatttcaggcctctatcctctggaactgcaatataataaacttctgtagttttaagccactc

SEQ ID NO: 223049 - DNA, 440 bp, Homo sapiens
agccagtttgacattttaagttatttgcaattcctacaaaagtgctcatactcagaaagtctctcttctaaatattcagctaaaatattttaaaatataaaaatatttcataatttacccttaaatatgccgaaatgtaactcaaagataatctaacttttcttatttaggaatatgtatatattcctaagtgtgctacaaaggagaaaagagagaaaataattttaaattaaatatgtattagatatgtagatgctcacgtacttctacacttgaagttaaaatagtcacttgtactcacacatagaaaactatagatacaacatctacacttgcaaactgtagagtggtgtgctgataactttaatgcaatgagctttattgtcatttgtgagataactgtcttaactggtgaacaattcttccttatgttgtggaaa

SEQ ID NO: 223050 - DNA, 546 bp, Homo sapiens
gagcagaccatatggatccttgacagacctgtggcttttattcagtgagatgtgaagccactggacagtttttaggagaaaagtagcatgatctgatgaacattttaaagaaagtgatcatataatttatcactaaaacaggtacaccttggtgagtgaggaagggtgatattaacagttaccttaggacagtattaataagacctaattttttgttgttattgttgttgagacagagtctctccctgtcgcccaggccttatttactattattttttaagacagggtcttgctctgttgcccaggctggggtgcagtggcaccatcacagctttcactttccagattcaggccattctcctgcctcagcctctcaagtagctaggactacaggcgcccgccaccacgcccggctaattttttgtatttttagtagagactgggtttcaccgtgttagccaggatgctctcgatctcctgaccttgtgatccgcccgcctcggcctcccaaagtgctgggattacaggcgtgagccaccacgcccg

SEQ ID NO: 223051 - DNA, 960 bp, Homo sapiens
ccgcaaaagagtcttctaaagaccactctcagccctcaagggtccttgcaagtcagtgacaccacaggaaatgggaaccttgccaagaattagggaaattcaggtgtctgcaagtccctaaaccctagggccaaaaaaaaggatttggcagatgtttgtgtgtcctggaggcagatggatgaaagtatcagtaggctccgtggcttaagtgctagtcagtgctcgccattggtcttttgcagtcttgtcacttctgtctggaggcattcagagagctgaaaggtacacagtgcagtggtaacatctggaattgacccctggctccatcttcatgattagtaaagtcactaagcccctttgagagcaagatcaaggcagtcacagtcacaggggcattatgagtatcacgtaaagtcatgtattcatatatgggaatgctttgtaaatagaacatttctgtataaatcttgctttcagttagtgagtttgtgtattttttgagttggtctctctgtaaatgtgccttctttccctagtacatttattattactgagtccaggtacgttcgtgtattagttaaggtataggctaaggtactataatagaccccagaatatcacagtttaaacatggtagaaatttgtttctccatgtaacagtctagagctgcaccatccagtgcggtggccactaagcacatttgattatttaaatgtaattcgagcaaaataaaaagttaactgcctcagttgcactggccgcatttcaagtgcttagtagcctcttggctagaggttactgtattggacagcacagataaaacatttccatcattggttgggtgtggtcatcctatgtgcttatgcgtatcagcactttgggaggccaaggtgggcagatcacttgaggtcaggagtttgagaccagcctggtcaacatggtgaaaccccatctctaca

SEQ ID NO: 223052 - DNA, 104 bp, Homo sapiens
ataaggagcataaggggatgaagagattgggtagaggggtattttatataggatggtcaagtggtcaagaaaggcccccctgtggaggtgatatgtaagcagaa

SEQ ID NO: 223053 - DNA, 430 bp, Homo sapiens
cactggctagaagcccaagtgtggaagtcagaggtgtgagtgctgtcagattctggacccgggaaaggccaaggcgcacagccggttgggggcgcacagccagtgggggacccactgctgttcttcctgtgaggcttgggtgtgagctactgtggggctcactgcaggagaggtgggggcagatgagctttgaaccccccatcctcggagacacaggagaatagagttgggaaagccaaggcactgattgaactgaaacctgggacagacaagttcctcaggtaacaagcgtcagaaaaaggatgggtaaggccagacatggtagcttgtgccagtaatctcagcattttgggaggctgaggggggaggatcgattgaggccaggaggtcaagaccagtctgggtaacttagtgagccctcctctctgcc

SEQ ID NO: 223054 - DNA, 429 bp, Homo sapiens
gaactgtgagaaataaaattctgtttttcagaagccaacaaaaaattttttttctcctctgtgctatctagtgggacagtccctagccagggtcgctgttgagcatttgagatgtggggagtgtgactgaggaactgaattttaaattttacttaatatgattttaaatttagatggtcacttgtggctagtggttcggctgttgggtagtgcagatctgaagcatacacaggtgaccctggaacacctcggggcatggggacactgtccccccatgcagtggaaaatctacagaggacttttgactcccccaaaacttaaacactaatagcctgctgtggacccaaagccttaccaataacatcaacagttgattcacacatattttatataaatattatatactgtgtttttacaataaagtaagct

SEQ ID NO: 223055 - DNA, 314 bp, Homo sapiens
ctcacttattaacattactttgcttaattcttgcgtcctccttctcactatccctatagttagttgcttctaatctgcttaggaaatcagctaagtaagcttgttagatttgtttccaaagggtaagtaaaaagacaagcagcctcctaaagttcggtttaaaaagccctacattggctgctcagtatgccctttcctccttctcttttttatttgaaacggagtctcgctctgtcacccacgctggagggcagtgagccaagattgcgccactgcactccagcctgggcaacagagtgagactccatctcaga

SEQ ID NO: 223056 - DNA, 430 bp, Homo sapiens
tgtctgacagtgttagtcgtgcagttgacgctggttggttggttgattgaatgaaagactataaggcagtgtgtactgtttaatgagttctgttaggcacttaggaagtgctagaggagttcagttagggttgtagttctcgccctggctgtgcatcagaattacctagagtgtgcttttgaaatatgaaggcccaagctccactttcatgtgcttatcttggtcttagtagaacctaagtgtgtttatataacatttaaaagatgaccataatgtacacccaggtttaagaatcattgccttagaaaaatcaggtttgggctggaggcctataatcctagcattttgggaggccaagacaagagaattgcttgagctcaggagttcaaaaccagcctgggcaacataatgagaccttatctctacaaaa

SEQ ID NO: 223057 - DNA, 629 bp, Homo sapiens
tgacaaggtatctctgttgcccaagctgaagtgtagtggcacgatcatagctcactgtaaccttgaactcatgggctcctgcttcagcctcctgagtagctaggactacagaaatgcacaactatacttggctagatttttgtttttaaagtgttttgtagagatggggtctcattgtgttgcccgggctggtcttcagctcctggcctcaagtgatccttccactttggcctcccaaagtgctgggactacaggcagaaactaccacaccgaacctactaactctacattttacatgatgagttcagattttaaaaggattagtttgctaataaagtgtcgtgagcaaagtgaaaaatcaaaagattacttgaagtatttacatgatgatccaaatttaaagcgacctcaacaagcaaaatttactgtttacaaaaaactgtatcacggtttacgaataggaacacatatattatatataatgggtataatgcgaatgcattttatcaatggaaagtacaaaacagcttgctgatgaaagaggaaggaaaaagctcacagtgaacttggaagcagatccttcagccccagtcaacccttcagatgtccgcagccactgccgacatcct

SEQ ID NO: 223058 - DNA, 369 bp, Homo sapiens
tctggagtgcagtggcacaatcctggctcactgcaacctccacctcctgggttcaagcaattatcctgcctcagcctctcgagtagctgggattacaggtgcgtgctaccatggccagctaatttttgcatttttagtagagacggggtttcaccatgttggccaggctggtctcgaacccctgacctcaagtgatctgcccgccttggccttccaaagggctgggattacaggcgtgagtcaccatgcccggcctctaccttcttctaaaaaagatttggggtggtctgtaattaaacacacacacacacatacaacaaaatagttcagactgacatcggattgtagaattgtttttaaaagcaaaaa

SEQ ID NO: 223059 - DNA, 458 bp, Homo sapiens
cctgtgtcccatcctcttcccatctgtatatgccaccagtaagctttaggaaacgccccacgaaatcagtcagcgctcccctcccatcttgctcagtggaggtggcaaagcccctctttttcctcctctgtccccaggtgctctcctctagcagcacaggaaccttctttgttcttgtgtgtcactgggtttctcaccaaggttgctttagggcccagaagtggcacagagaacatggccagtctcttactgggctgcatctaagctgagccctctccaggggtttcccagaatagtaaaccaggcacacacaggcagaaaagtctgagaagcagagaagtaggaatgcagaagaggagttggggagacctaggggtggaggtgcaagcctgggtcacggggggcggtggtaggggggtctgcttgttggtattaaaggaacaggacagtaaaccaaa

SEQ ID NO: 223060 - DNA, 236 bp, Homo sapiens
tggtgaaacccaaggtgattttttagtcctcatggcaatggtggaaactgttaactgttccctctttgttgtaacaatattattctactgctttggaattttaggctaggtattcatcttctcactgtatactcattggggatgtaaaaatctttaatacctttaattaccaattctttacctttcctctcaattccaaatctaatagcctacctcacatttctactttgtgtgtt

SEQ ID NO: 223061 - DNA, 307 bp, Homo sapiens
ctggtattagctagtcaatttaaagatgcacataacctgtgcaattccactcttaggtaatatcttacagcaatatctctaaacaggaacaggagtattcttagcattgcaggagattaggtatttagctactgaccattactaccagtagcaatgcttcccaactccccatcactgtgacaaaaagaaacatccacacacacttccaaattggagcagggggaagatacacagctccgagtgaggtccactgccctagagaagggtgtttctctacttgagtactactgacattctgaactgaata

SEQ ID NO: 223062 - DNA, 446 bp, Homo sapiens
gtggaggaagcgcatggctgcacggatggcttggagcaggtcaggatgaataggcatgcgcatgtatgcatgtgccaatacctgtatcgaaatgttttctacattaacgtctggttttagattttgaaatatacaggcataacaataaaaagaagaggccttggaaaaagcagcacccacctgctgggaacccctccctggccgcacagaagggaaagggcacttgtttgggtcctgtggtcttccctctacctctctagggaaggagatttgaaactcctacacagtagggtggaatgttaaatgcttgcttttccttctctctaataaatctctctaaaatgagaaaatctattctaatataaattctgggttggttggtttgttttaaatttttagagataaggtcttgcttccagcctgggtgacagtaagactccgtctcc

SEQ ID NO: 223063 - DNA, 512 bp, Homo sapiens
tggcagcagtgaggataaagaaaatgcatctgagaaatatttagaatggaaaaccacctaggcatgattttgtactaagggtgggtggaacagtagctaaaagagtcagatggttttatctctaactttgttttcaccaaacaagacaaaagaagagctggtttcgataggggttgatgatggggaaagaaatgtttcaattttggatatactgagtttaaaatacctgagaagaatatccacatgtaaatttatacatgaagttgcccattctggcctgcagttcagggaagaagtcacgataaatttcattctgctgaatttatcagagctgaagacatgtaaagaatgtacggggacgaagggcagaaaggcacgttgttagaagcttggagcagatagagcaaaaggccttggtgaaaacattttgtgtctaatttctctcgaccctgtccagtattgcacataacatacaacagagtgaaatatatgaatgaataaatttatgttat

SEQ ID NO: 223064 - DNA, 452 bp, Homo sapiens
aaatgtatgaggcttttctccgtcactaaaccttcatcgagacaggctggaagttcagtattccaatcacacacactagcagcaatctctttgtcttcaacatttcagaaatcctcaacttaatgttctcatactcaatttcgggtaacgaagaggagaagtcaataaagggtcagaaaataagttgtcagagaactaagtagagagacaggaagaaatctcaaggggaatttggtctcagtgaatatattttgagcacttactatttctcaggggctgtggtccataattcatagacattttcgctaaacacttacagcccaacgacatcaatcttatggggcctgttaatgatgaggagatggaagtcatgaacagttcaaggtctcgttcaaagtgccagactgaggacacaattgagccagctcaaagctaggccctgtgaatctaag

SEQ ID NO: 223065 - DNA, 1326 bp, Homo sapiens
caggcccatcgtccccagctgatgtcgccctgtctgcacgatgcctgggcgcctactccacactcctcactggcctcaggccccaccagccctgcctcgagctagcccctccacccgtcatcactcctgccagactccagatgtcgaaggtgctccttggctcccacaagctctcctccgcctctcaagtaaggcacaccaccatacctcactgttttcccagtagctcacattctaaacatacaggaagggttctcaaccccattttgcacatgagtttaaatgacctgcttgaggtcacacagtcatgagtgatggaacttgactgccatatgctcatgcctcccatctggacaccatgttgtatagattaggaacaatgcaaagtttaaatcaaagcagtcccttctaaattttagcccttttcaaaaaaatcctcttaaatatatcttattcttctgtgtcttatgataagccttgcaatacccattttacttgagacagatgctgataaggggagaagggaatggaggaacggtttagggcatgtggccaaatagtgatattgaagcccggagggtaggccctgtggtaaatggaaaatctgcacggtgccaactgaagcaagcccagcttccctccttttctcaggcctgcaaggagctggggctacacaagaaaccaactgaatggcccctgaagcttgttcctcaacaccgagctgtagggccttgtctccttaaacatcccctgtgctttcctctggccagctgctcaggccaactgcccaaatcatttccttgaaggttcctgtattaccaaactgcactgacaacccttgagtaatctgggaggccttgctgagagtccagaaaggtccaggtgcggtggctgcttcctcagcagatttggctccagctgtctggactctagggcttttgggtgactgcagggcttttgggtgactgcagggcttttgggtgactctagggcttttgagtgactctagggctttggggtgactctagggctttggggtgactctagggcttttgagtgactctagggcttttgagtgactctagggcttttgagtgactctagggctttggggtgactctagggcttttgggtgactctagggcttctgtcaacagggtcagaactgcctcagtgactctgagcagcccctttcaagagactgcagaagaaaagatccactcaaatctggagtaggagcaaggaggtggcgcaccatgaacaggaggatagctgacagagaggcagagggaagaagagaactgaatgagcctggggcaaaaaaaa

SEQ ID NO: 223066 - DNA, 463 bp, Homo sapiens
agttccagatactgctgctggatttactcaaggcccacttctattcctggtgccatacaagctgaaacattctgtgactctccatcaaatgaagcatgagcagtaaacacaacaatccaagtcttttgccaatgatatcgtggctctctctagtctcattttcccttgtttgtatcctaagcttcatccaacgtagacacattcttcttaaatatgtccttgattttcctccctccacagtatttcttctacctgttccacctccctttccacttgcagagtcctcaatcttctcctttaggacccatctgaaatgtctactccttaatgaaaacttttctgatctctctaatggcatgagatttctctatcctaaatactcattagccctttctttatatttcattgtactagatccagctatttaactgtaaatatttttttatcatccctaagaagtaaa

SEQ ID NO: 223067 - DNA, 518 bp, Homo sapiens
cagctcagatgtgctgtcgacccacaaagactctctcacttagacacgaagacacccgtatttgcacagacaccgggggaagagacacaggagggagagcagggtggaggttgtggctttgcgcctgcacacccatgaagaaggagtggactcgaggcacagttttgagaacatggtccgtctctttctctaggaaactcacaagccctgcacaggtgactcctgagtctccacacacacacactgacagccattcgggggtgtgaggttccgtctagaaaactaccactgccaacacctgcagcaaggggcccgttaacgcagatcacaggtggagggaggcgcagcccaaggccttccactgcgcaggaaacaaccgtgttattctgagctttccttccagattgctaattcctgtttctgaaaatcttcctgattcttcgagtgctaagaagcacttacctcatgcctccatctgttcctttatcctggctcctctttttggatcacacggccgc

SEQ ID NO: 223068 - DNA, 849 bp, Homo sapiens
ctcgatgctttactatactttgccttgccaagcgcgctcaccacatgcctgcggactgagcatgggacatcctgtccttggacaaggtaagaaggaggttaagtacaatcttactaggaccatcagccctcctccttccgggtctctccagcatctggcccggacgacctgtgccctctgctgggcactccctctctcccagatgtgctgtgaggctcttccttgtctgaagctgaactttctcaggcccagagcccttgcctctctgcgggcactcctcgtgtgctctggattcccaggctctgcataccatcagtagctgatgaccggtacactggggccatctgcctctcttccgagctccaggctctgacaacagactgactgctcgatgcctccacatggctctccatttggcatctcaaactcaacttctccaaatcagagctggatctcttccctaagtctcctagatgtcccctttgcagtaaatggcaccgtggttcaccctgcaccctcctggatccctttcctcattaagtccaccagctagttctgcccttcagtttccagcactcacctgcatggctaccccagcccaacccaaggcaccccacagggtctctgccttctgcaatctactttccctgacaaccacatgcttggagcctatggctgggatggctggttgctgtagctgaaagaaaacccaagttccttgctgtggtcttcagccctgggggtgtctggccccactgacctccctcacttctttatgagcactctttctttccccagccatgcttagtgtctcctcctcctcctcctcctcctcttccttccccctcc

SEQ ID NO: 223069 - DNA, 547 bp, Homo sapiens
ggaggctcttataacatgagagattatgagaccttgaaataaaatagtggttgtagcattggggaagaagaatttacttgagagatatttagaaggcagggttgaaagaacctactgactgggtagcagacagagaatttaaagtaactgagatttctactttaggcaactaaacagatgatgacaccattaattgggaaggtaaacataggagagaaaagttcttaaattgtaggggtagggcaataaggcattttctttggaatgtcaagtctgaagtacttgtgggacctctgggtagggaatgacgttcaagaggcaagaccatgctggtagtaaaaactgtgaagcctgttcacctaggcagctgtgaagaatcagatatgtagcttcaaaacagttaagggcaaaataaacagcacttcctaccagttaacaccagtttctctattctaggaaaaaaacagtcacttacatgccccatgatacaaggtaccctccccttgaactaattctatatctgactttccacctgtctagactaaag

SEQ ID NO: 223070 - DNA, 510 bp, Homo sapiens
tttgcgcatctgtgtcaatgagctgaaaggtaatttgatgttgataaaaagcagaagtcagagaatgatccactaaggtcttagcactgtgctgcaaggagggtgtgcttgcttagacatgtcgaggcatataaggtgttctatatttagtggcattagatggtttttttagtggttagcattctgtttgctcctttttgaatcatataaataaccataatcattgcttacatctcttctctggaatcttggctctcaaacggtttgtaccacaacttgacagataacaacactactgttttttaatagagctctgagcttcatttccttatgtacttataagcagattttacacagatttcaatctacgtagaggcccatgaatcatgcatattagttgggccatgggaaaggatatctgattcagatacagagtttgcttatgaaactgagatttttcttatttactggaaatgattctctgcattttattgaactctcagaaaacat

SEQ ID NO: 223071 - DNA, 494 bp, Homo sapiens
aacacgtaaggagaccgaggcaggcgaatcacttaagcccagcagtttgagaccagcctgggcaacatagtgagaccccatctctactataaataaaaaattagccaggcatgatggtgcatgcctgtagtcccagctacttggtaggctgaggtaggagaatcactcaagcccaggaggatgaggctgcggtgagctatgattatgccactacactccagcctgggtgacagagcaagacccagtctcaaaaaaaaaagtaaataaaataaaatataattttctcattgtttctggtatatagacttgccattgatttttttttttcttaaaactcctatgacagattattgcagttgattttgagatattgattttatatccccccaccttgcttaactcttatttattctgacgtcttgtagattcttttggatgtggggtcatccaacttgatcatatcattgatgaataaagatactttttggttgtaa

SEQ ID NO: 223072 - DNA, 787 bp, Homo sapiens
tgacaattgtatcatcaagagcaaatactcagctttgagaccttggatctaaaaagctaaaactctgcatttctgttaaacatgtattgatctggcagttgacagcaggttgtcaaagtgccttatggtggaagttgtaatagatgatatctacgtcctcctctaatgagtgagtctaccaaagaccatggagaggaaaatgtgcctcttattgcctgactcctgatgaataagacttcagtgaagtgcagaaaacaggcctctgctaggtctatccatgacaggcaagttacccaaatgaaaaccttgggctctgtctcagctgtcaccctaactttcaagtgacagcagctagcctttcaaagttctaagcacctttgaagagtttctgataacacatttaaaagtattatcacagatgaaagagaattcattatgtcagacctacctcaaaagttttaagtttgttcttaagtcctttcagagaaattaacaatccaggaataaatcttttaatttaccctacctattgtggttactagtacaaggcacctttctgataatgaaacagaaatcctttcattcctggaatttcctgttgggagtgtagagttttctgagcaatatgtaacgttggttagttacgcaatatgttggattttactgccagctttgtttaaaaagggtgtgagaggctttgaccaacaggaatgtgaagtcaaagttaagtatggcatcatcttaccacctgtcacatgaataaacccggattcataagcaaatatgt

SEQ ID NO: 223073 - DNA, 397 bp, Homo sapiens
cctaaacattgtgtttaggtttgttattagttgctttaaatatatacacatctgtaaacattgaacttttttgatgcctcatctgtgttgcttatagatcattttccatcataattattttaaagtccttttaagaagtttaaggcctatctcatatatgtaatatattaatagtagataatcaggcctttggaagcataaatgatgtaagtaagttgggttgcagttttttcttatcaagaatctgcgtgtgtttaagtggcagtggagataatatttttatttgcgttgttatagtgttatctttatcatttagtttatattttctgccatttaaagataaaaaggttttatcttttatagctatagagtcatcttctgagccttaaaacacttg

SEQ ID NO: 223074 - DNA, 388 bp, Homo sapiens
ttttattatgcacaaactattactctatacttacatatttcatgttcttatcaggtattataagggttaagagataaactaaaattgaatcaagtatatttactctccacctgcacatcacaactatcaagttagaggaataaaattaaaaagcaattcacaagtcatattacactgatgacatacatgtatatgtacacgcatttgcatatatttataatttgaagagaaagtttatatacttaacagccaacagatttagaaaaaactatttgtcctactgaataacagtatatatgaattatcagaattcttcattactagtattcaataatgagctttttatgcaataaatttacaaatcatttgcccctattttcagaaaaaa

SEQ ID NO: 223075 - DNA, 403 bp, Homo sapiens
tcgcagcagaacttttttgaaaaaagcacttgacccatgctttatttttgtcattcattcactttcacccaattactggctttcatctcccccatcctattgaaactccatgatttgactgttgcattcaatcagcacttttcagtgattttgacctctctgccacatttgttaagagttgactgttgcacaagcattgaaattctgcttccctgaactcgattccacctctctccttttgttctcctcctacttctttgctgtccctagtcaatctgtagactcattcatccttaagtgtggttctcttggcatcttccttgccatttttttccttatcacactatacaatctttctagatgatctcatatactcatataaatgacaccaggtgagtacctt

SEQ ID NO: 223076 - DNA, 368 bp, Homo sapiens
ccagattcatgtcttagctttacatgaccaagatcctcaatctctcacagttcccctaggaaacttctagaagaacagtaatatgtacctcccaacattgttagggaaaaaatatgtaaagccctaatacggcatcaacatataatagtgggagttattgtcactttattggctcactatagaaagacctttcaaaaactttaacaatttgccttcagcttttattcagaattcataccctccccaacacccacaagctgtatttatgtatcttcatcctttgtactattattaattacctaatcctctttacagaaatatccttacactatactccctcttagaattttgtcctagaagaataaaga

SEQ ID NO: 223077 - DNA, 432 bp, Homo sapiens
ccagaagcccccaggtggcctttcttctagctcagggttcacagtctggctgtacagggcggtcacctggggagatgtttaaatctttaagactgtaccccacacaaattaaatcagaacctctcagagaggggatttcaagctcccagttggggtctcatgtgcagccaagggcagagcctcactgcctgggtcgcagaaacgagggtgtccaaggggctcccgatcaaaaggaggcagctgaggagagcagccagggagctttgaaacctttgtcctttttaggctgggtgcccatttgccttgaatatctcttctttgggttgtatggaacagctataattcatcccaaattcaggtgggcaaaaattagaactttattttttgcagtaacttcatttctgactctcagccctcattctggcatattga

SEQ ID NO: 223078 - DNA, 338 bp, Homo sapiens
taaattcgcggccgcgtcgactgttcttgtttttttttgagacagggtcttgttctgctgtccaggctggagtacagtggcacaataatggctcactgcagccttgatctcctgggctcaagtgatcctcctgcctcagcctcccaagtatccaagactacaggaaccaaagaaagatcttgcattttctaatgaattctgagcccacagtacaactcatctttggaaatcactgctccagaatccaaagcatggtgctcaggaactccaggtacaacgttgaataaaggtggtgagaatagacatccttgccttgttcccaatgttggtaagttcag

SEQ ID NO: 223079 - DNA, 549 bp, Homo sapiens
tcacccagaccaacttccagtcctccaagcttcattcatggtaactgccctatacaggtgcaccatttttttcttttgtatcatatttttactgtaccatgtttagatatgttgatacacaaatacagttacagttacctacagtatccaggtacagtcacatgctgtacaggtttacaatacaggaggaataggctatatcatatagcctaggtgtgtggtaggttataccatattggtttgcgtaagagcactctatggtgtttgtacacaatgaaatcacctaacgatgcattcatcagaacctatccctgtgattaaatgacacatgactgtatttactaaaaacccatcagaggccaggtgcagtggttcacacctatagtcctagcactttgggaggccgaggtgagaagaccgcttgagcccaggagtttgagacacgcctgtgcaacatagtgagttctcatctcaaaaaacaaaaacaaaaaccaaacccattagaacccatcagggtctcaaacaaggtgaaggtttaacaaatattat

SEQ ID NO: 223080 - DNA, 599 bp, Homo sapiens
ggtagaaaggttaatttccactggattctgaattgggcagaaaatggaaacattaacactttttgcataacgccattttacatcccctgcagcagtgtaaagatttgatcagttaattcccatgggaagcatgggaaagcaagggagccttatagacacgggtgttatttttaacaatgcttagaggatgtaacaatgactgataagcatcaaaggaagaccctgtttccttaagggtcaccatgatttatgtcatacttttattttatcattatttcttttaaaatattagttatcttttataggctccaagagtagagctgaaaaggaaggaaaatgtgatagaagtgtggcattgcagccactgttttaatgaggaaagcattgttttttggaaatactgtggtagaaactattttaaaatatcatgccttcccagccgtatacatctatatgctcttcacatacaggccattatatattaggagccttgactgaaatcaaggaaccaagaatgccttgacctcagtggccatcatgctaatgtaactggctgattggtttttttcttcagatagtggcactttaaaattcacgca

SEQ ID NO: 223081 - DNA, 5111 bp, Homo sapiens
cacacacacacggaccgcttactccgctctgcctgctcgctcccactgtccccaagcccgccccgcccgcggcaagtgcgtgcccaggcgcagccaccggcgagatcaggagcgcagcgcccgcagcctgagggaaccggcgcagggcagcagcggctgcagctggattcgcgcgccccagcgctcagtggcggcggccgggacaccctgggcagcaccccgcaccgcagcaccccagactacgagcaatcgtgcccgtccccgccggggctggagggcgcagggccgccaccctgcaagttcgtgggcccccggccacccttatgagagaaggcgaagccgggcgaaggagcaggacgctcggcagcaggactcctccgcaagccccgcgggccctctgttcccgcgccccccgggcgcccaagaagcaaaatgcaaccaccgcgctacagctgagaggggaaggggccagcgccatccgctcgcccggaatccggtccccgcggcggctgcgcgtcccggccgcggcccctccggcccgggagtgagcagcagcaggaggagaggcagcggcccggggttggccggggctggggaggagggacgggacggagggagggcgcgggggcggggagggggccccggcggataaagatggcaatgtctctcatccaagcgtgctgcagtctggctctctcaacatggctgctttccttttgtttcgtgcatctgctctgcctggactttaccgtggccgagaaggaggaatggtacaccgccttcgtgaacatcacctacgccgagcccgcgccggaccccggggccggggcggcgggcggcggcggcgcggagctgcacacggagaagacggagtgcgggcgctacggagagcactcgcccaagcaggacgcccgcggggaggtggtcatggccagctcggcccacgaccgcctggcctgcgaccccaacaccaagttcgccgccccgacccgcggcaagaactggatagccctcatccccaagggcaactgcacgtacagggataagatccggaacgcgttcctgcagaacgcctcagccgtggtcatcttcaacgtgggctccaacaccaacgagaccatcaccatgccccacgcgggtgtagaagacatcgtggccataatgattcctgagccaaaagggaaggagatagtaagcctgctggaaagaaacatcaccgtgacaatgtacatcaccatcggaacccggaacttgcagaaatatcgccgactgggggatgcagcaaagaaagccatcagcaaactccagatcaggaccatcaagaagggtgacaaggaaacagagtctgattttgacaactgtgcagtttgtattgaagggtacaagcccaatgacgttgtccggatcctgccctgccggcatcttttccacaagtcctgtgttgacccctggcttctagaccatcgtacctgtcccatgtgcaagatgaacattcttaaagccctagggatcccgcccaatgccgactgcatggacgacttgcccactgacttcgagggctctctgggaggtccacccaccaaccagatcacaggtgccagcgacacaacagtgaatgaaagttcagtcactttggaccctgctgtccggactgtgggagccttgcaggtggtccaggatacagaccccatcccccaggagggagacgtcatctttactactaacagtgagcaggagccagctgtaagcagtgattctgacatttccttgatcatggcaatggaggttggactgtctgatgtagaactttccactgaccaggactgtgaagaagtgaaatcttgaaacgacaaatccagaagcaaagagatagtaggacccaagggaaaggaagggaagagtgctccaagacttggaccaggcacacacacacctccagatcaccttggcaactccagggcgctccgttcaagaatgctgacgaaaagcaatatccaaagtcttgtcaatcaggatgcagtttctccatcggtatggcagtctgtggccttggcagctgggaagttgaaagctgatttccactcctatgtccatgtagacatacacttcagaagctcctaaaacagagactgaaaggccacctttaggatttcttagtttcatttcaattctttccatgtctcatcattcttgtttttggcatgttgtttgatttctttggcaatttttttaaagattatttgtagtttactttccatctattcctttgtttttcctttgatgcactccagcttttgtataggtttctgtttagaagcaccagttcctgctatgatcagtttgtattccatctctgagatatgtggtcttgacctcccagcatgaagtgtgcatggctttgagaagtgcctcagcaccctgaaatggactaaggccagctttcattaagaatctaagttcttctaagtgggccttagtgctccaagacttggaccaggcacacacacacctccagatcaccttggcaactccagggcgctccgttcaagaatgctgacgaaaagcaatatccaaagtcttgtcaatcaggatgcagtttctccatcggtatggcagtctgtggccttggcagctgggaagttgaaagctgatttccactcctatgtccatgtagacatacacttcagaagctcctaaaacagagactgaaaggccacctttaggatttcttagtttcatttcaattctttccatgtctcatcattcttgtttttggcatgttgtttgatttctttggcaatttttttaaagattatttgtagtttactttccatctattcctttgtttttcctttgatgcactccagcttttgtataggtttctgtttagaagcaccagttcctgctatgatcagtttgtattccatctctgagatatgtggtcttgacctcccagcatgaagtgtgcatggctttgagaagtgcctcagcaccctgaaatggactaaggccagctttcattaagaatctaagttcttctaagtgggcctttaaaaaccccagctgccagagaccccaacactaagccctaaatctgctgaggccactgctggttattttaagccacatcacacttgcttccacttgccgggcttgattaagggcccacgtgacatgagaagggagctctagggaagccgtttcattcttctgggtcttacagtctttggctgaaattctgaactcagaagtcccctccaaggcatccagtctttggtggttgtagggctggttttaaaaccagataccacattttcttcctattgaaaacaaaatgccagttgcattggtttcccctgggctagaacagtttttttcttacctctgtaagtgggttctgtaaaaaatggaggctttagagaaaagccaatcatttttaagtccaatggcaaacatagtgggggctgcagtagcacctagcttttaccttaatttcgacacacttctgttgaatctcaccagaccatgtgggaggatttaggtgaatccctagcagattgcttcccagggctccctgagtgtgtccagataccaagtgaggaatgaggtgtgatttgctgtatcatttgaaccaaaaagtatgcagcatgagaatttgctagatcgtttatcctgactgaaatagacaaagtaagagggaaaggaaaagaggtatcaagtaaatactgaaacccaatggtgtttttaaactgtttctgtttttattcatcttttgtaactatgacagaaatgtgctattttttcagtgggcaattttgtaatatattcagactatccagatacagagatgactaaggtcattgatagcgtctctgaacaatcagacggatcaccttatctctacacagctggcaaacaccaggctgcggcttggattaaccaggaaagaaagcttttctcactgagttgtttttatgtattgatggggacttttccacctcattagactaatactcattcaaaaagagtttggttctgctgtaaatccttgccgcctgctgaaacatggtgtgcaggtcaacggagaatactagctgctcctttttcaccacctttaccaatttcctatttgatggtttgtaagtagacagtaaggcaaggcagatgattattaccctcagaaaggttgcatctccctaggagtccaatgcttcctgtaatgaaatccactctctatgtgtgggaaaagaggcagggaggaatgaagagagctctgaatcgagaatcctagatgaaccacacgctttactaagcctcggcttcttcatctataatgtgaagggtttaataacatgagtccccaagctcctctggctgtgggaccacagatgagtctttcagaggcaggatccatttttgcagatagctatgacttgtggcaatcaggcttcgtagcttggggaggtagagttacttgacatgtatcatgtaataacagcctttgagacttggcacaactatggtgctgagaatgaaaatctaaatgattgaagttttaagtccaagtaggagttggtttgttttgccttgtttaaaaattgctgttagtcacagagtttgcaatctctggataccttcaaatcctagctctcactgtgggattcttgatctcagaggtgtttatttttcacagtcagcataggcttgcgccactgactcctccttcagtcggctttgcccaaaacaaattttagtattactggtattaagtttagtccagtggaattagaaggataattcaatagcaacagaaatataaattatattccattcccagagagagaatgcgctttggattgtttagtcctctgattaacgagtattttctcttcctgccaagaactaggtgaatcaggaattgattgcatatgcaagccctggccacagctgcacttacaggatgcctcatagacgatgaggggtctgaaaggccaacccgaggctggcagatctgaccccaaggaggtcctgctgcaaaccccctgagcctttgccattcactacttaccaaagtttgtttctggaggattttcctgtagctttgatagttt

SEQ ID NO: 223082 - DNA, 800 bp, Homo sapiens
gttttatgttactgggactctctccttaagcccgatcaaggacagaattcttcaatgggtctgaaatatgagagagtttcctggaagcagagaaaccacacaaatttacttcacactgtgtagaagacatcgtggccataatgattcctgagccaaaagggaaggagatagtaagcctgctggaaagaaacatcaccgtgacaatgtacatcaccatcggaacccggaacttgcagaaatatgtgagccgcacttcggttgtgtttgtctccatctccttcattgtcctgatgatcatttccctcgcatggctcgtcttttattacatccagaggtttcgatatgcaaatgccagggataggaaccagcgccgactgggggatgcagcaaagaaagccatcagcaaactccagatcaggaccatcaagaagggtgacaaggaaacagagtctgattttgacaactgtgcagtttgtattgaagggtacaagcccaatgacgttgtccggatcctgccctgccggctgactcatccacagagttctttgcatcttcttggcataaaaactgtttcaaaaaatgttccagtttatcatctcccttcactcacactttttctgtggcctcataactgctgacattcttggtgcatctcttcactattgttttcatttagaatgtctttccaaattatactcttgtgtcacaactttttcaaaatcattttatcgcttgtctctttctgagacccatgaacaaattatgatgaattattaataaatgccttcctctctttattt

SEQ ID NO: 223083 - DNA, 910 bp, Homo sapiens
gttttatgttactgggactctctccttaagcccgatcaaggacagaattcttcaatgggtctgaaatatgagagagtttcctggaagcagagaaaccacacaaatttacttcacactgtgtagaagacatcgtggccataatgattcctgagccaaaagggaaggagatagtaagcctgctggaaagaaacatcaccgtgacaatgtacatcaccatcggaacccggaacttgcagaaatatgtgagccgcacttcggttgtgtttgtctccatctccttcattgtcctgatgatcatttccctcgcatggctcgtcttttattacatccagaggtttcgatatgcaaatgccagggataggaaccagcgccgactgggggatgcagcaaagaaagccatcagcaaactccagatcaggaccatcaagaagggtgacaaggaaacagagtctgattttgacaactgtgcagtttgtattgaagggtacaagcccaatgacgttgtccggatcctgccctgccggcatcttttccacaagtcctgtgttgacccctggcttctagaccatcgtacctgtcccatgtgcaagatgaacattcttaaagccctagggatcccgcccaatgccgactgcatggacgacttgcccactgacttcgagggctctctgggaggtccacccaccaaccagatcacaggtgccagcgacacaacagtgaatgaaagttcagtcactttggaccctgctgtccggactgtgggagccttgcaggtggtccaggatacagaccccatcccccaggagggagacgtcatctttactactaacagtgagttctgccatacttaaagtgacatagccagaaggactgttgccttgtaggaattggaaaaaaatacctttcctca

SEQ ID NO: 223084 - DNA, 599 bp, Homo sapiens
acaattatcacgtatccctggttccagaactcctcggttattctgttgttaaacaagaaagatcttccagaggagaaaatcatgtattcccatctagtcgactacttcccagaatatgatggaccccagagagatgcccaggcagcccgagaattcattctgaagatgttcgtggacctgaacccagtgaccaaattatctactcccacttcacatgcgccacagacaccgagaatatccgctttgtgtttgctgccgtcaaggacaccatcctccagttgaacctgaaggattacaatctggtctagttgtgcctcctagacacccgccctgcccttccatggtgggctattgaagatacacaagagggactgtatttctgtggaaaacaatttgcataatactaatttattgccgtcctggactctgtgtgagcgtgtccacagagtttgtagtaaacattatgattttatttaaactattcagaggaaaaacagaggatgctgaagtacagtcccagcacatttcctctctatcttttttttaggcaaaaccttgtgactcggtgtattttaaattctcagtcatgcactcacaaa

SEQ ID NO: 223085 - DNA, 779 bp, Homo sapiens
agaaaagatgcacttacgaatagacttttgttataatataaaatgtgcttcttgaattaacagcgtttttcatattaggacttagcacagtgcctaacacatagtaggcacatagttaatatttgttgaatgaatgaatgttaataaatcatagtttgtatttagctttattctgttaattagatgtttgctaacttaaagggttttttctgcaataacttcagagataaatgaatcaaaactttaaggtgacaatgacattttataccagtgttaaaaccaaagtatgagatctatcgagtattcattggaagtcacttatttataaaccactaagattataaacctctataggctatagcttactctaacatgttgcaagtatacacttgaaaaataattttttaataaatattcttgatagccatgagtgtgatgtttttgtttaatagatgaaaataaggtcatggaattcttattaaaattttttgttataaataatttatttttaatagaaaagttgggaaatgcagaatctagaaaacaaaaactttctacaaatcagagataatcactgttaatgttttattatactttcttgcagccttttttcttcttttacatttgtatatattttgttttcaagaaaattgagagcattttgtacgctccttttctgatcttctttttccactcaagattgtatggaaagcatttttctgtattgttttctccagaagtgtagtgtcaaagtcaaataaaatagagacaaatctctg

SEQ ID NO: 223086 - DNA, 683 bp, Homo sapiens
gcacgagcttataccctacatctgtagattttaaagatatatgtgtttgcaatgcatatttactgaaatttatgctgctggtatcaggcggagggaagttgagggagagtaaggaaatatgtaccatattaaatcaaatctaggataccattgagtgtaagatatagtattattttccatattgctcgggcaaaactgtcaattaagttatggcctaatgctttcatatcacttagaatttttatttgatatttattgaaagagctcaccgagacctatttaatgttggatttttaaaatcttgagttatttttatatacatacaacaaaattaccagtgaaatataatggctaaggtattcccaacacttcttcacattcagagaccatgactgtaagaaacattcctatttcagacatattaagatgtaaagaataattagtttgtaaagggattcacgtgataaaagcaaatatgctgtggaaaacaaacatctgatgagtttgcgaggacttgaggaaaggctgcagatttcaaatatcctgaaacaaaggaaggaaaatagcagacgttttagtcacaaacaactgtagaaaatttgagttagaaaaaaaacctttatggaagtttactatcacttctgccatctagtagcagaagttgtcacctggaagtcaggaaa

SEQ ID NO: 223087 - DNA, 565 bp, Homo sapiens
tcagtatctatcaagaaggtcttgcttcagtaatgggggataattagccctatactaggcactgctaaatctgtctagcaaattgtaaaagaaagacccaaaaggatcaaactgtttgcaaataacctaaccatcctaaaacaaagcttaaggaaatttatagtactataaaaatatccagcatccaatacaataacattcacagtatctggcatccaatcaaattcaccaagcatgcaaagagatgaaaacatggcccatagtgaggacggtaataatgatttgaaactcatccaaacttaacatagatattattattagcagaggaggatagtaaaacattagttataactgtatttcgtattgctaagaaggtaagtacagcaatagaaagtattaaaaaaaattgagattctagggagaaaacctatattgcctgaaatgaaaatataccaggttaacagaagattagatttccagaagaaaagttgggtgaacttgaaggcatagcagtaaaactatccaaaatgaaatgcagagagaaaaaagaaaccagaaaaaaaat

SEQ ID NO: 223088 - DNA, 452 bp, Homo sapiens
gggatcataatggatgttgtgcccgtgctggaggtgcccaaactcaaggtgtgtgcattgcatgtgagcagcagatctacagccgcatcctcaagcctgggcaaaaccctcacctttgcccagctggccctggccttcccaaggcctgtggcttcagcctgctctcccatacttacaagggccaaggtgtacaggcatttcggccaggcctggggaaccccacacagccacaccaaaccctatgtccaccccaagggccagccccagctaaaaaaaaactaaccctgggtcatcctctcttatttaaatattttaggaccagaggcaatggttcattccagtaatctcagcactttggtatgctggggtgagagtatcacttgaggtcagaagtttgagatcagcctgggcaacatagcaagacctcgtctctatgtctctactaaaaatta

SEQ ID NO: 223089 - DNA, 548 bp, Homo sapiens
ctcatttcctgagtcagatgtgggcattctttcttggcatgggtacactgccgtggcttgtgctgaaggctgcataagaaacagaggttggaaactcacagtggaatttattgctgagatgacgttaagctgttcgcattccacccaggacctccacaggagaagcccagagaggatgactctcagactccagatccaggaaatccatgcctctctggagcaatggatgtcttacagacactgtgactcttcaaactgattattttcttctttgtgcttggactccaggacacttagaacccaatttgcatctaaccactagcagtttggtgacagcatgtcacagtttgtatttctgtgcaccagctttatacacatttttttttctgccctaacttaccctttggtctaatttctttatctgtttttctatcctgttgtattgtatgtatttttataagcggtctcaaatcttttctggaaacactaggaaatgaatatataaacaaatacaagcaggacagcatttctgaaagagcctgatatac

SEQ ID NO: 223090 - DNA, 641 bp, Homo sapiens
aacagctttcccagagacattgcgggatgagaggagtgtccagaaaccaaggagcagcaagctgggactccctcgggtctgcattgttgatattcccacctgactatgctaggggctatggacagacacagccaccccagagtagatcaaaagcacagttgtgtcccttggacaaatctgagtttttctgttgtgccttgccccagagccggaggagaggaacctccaaaatgcagacattcttggtggctgggattctgtgtgatattcagcgttaaatgctgctgctctgaggctgctggaaacgcgttagtattaatatctgtgtacttctctcacatttacttttgctggaaaagcttgggaaatgacttaacgaagatgcgtaaaccttaatttgtttatatgctccttattagccactgaataccacattgctttctgcttccccttcttctttactgataatctgaccatttccactatgcactttgaaagtcttgctggagtatggagaatagtcagaaatctctggtaagatgctgccccgcgcatctctcagaggagtcactattcatagcctgcatcagagttcacaatgaaccaaagttcaccccacctcccctgtcttcagggactta

SEQ ID NO: 223091 - DNA, 514 bp, Homo sapiens
gctggacaacccctgagagattcatctgagtgagagagcactctccagccccatcggagtgggtttgcagggaaatcataaggaagaaatccttatctttccaacactgagatgcttctgccgaagagtagaatgggagtgaggggacacgcaaaacgggctgctgccggaggaagaggaacagtgttgtggctcatgccatatgaatgggctcactggcctggcccagaccctgactgcccacaggatctttgacagagaaacggaggcacagagaaggaagcggcagttaaagctgcgaagaacctaacaaatttcaagattgtaagtgccttttcccaggatgccagcaagtactgagcctgtattttgagctgcatcaaaccctgttggaataaaaaaggacatttctaggagatcagtcttcgagattggccccagtttccccagagtaggaagaggcaggaagccagagcacatgttctctccagaaataaagttgttgcagtggcct

SEQ ID NO: 223092 - DNA, 484 bp, Homo sapiens
gtattgtataaagatgtttataacatttgtcaagccttcattataaaaagtagtctaacaaagcaatgatgtcgtctaccttcctgtttatgcatgaatatgtattatgtttgcattttaacagtggcagcccatgactgatttgtggccactgatgagtcattttcttgactaattacattaggtctgtttatgatatgaacaataaaactatgatggatagctgaattctacaatttaagtgcagatgttaagagtttgctttcagcctattgaaagaagtaaccagatagtaatttcactatgctgtctttttacactattgccttctaaatgttcagatgcactgaaaaatgttgctttttttgtatgaccagtttagttaaatttcaatcaatcaaatgaaaatttgagtataaaaggctctctttccagagacttccatattacaaaatgaaaatataacttaagtcataatgttgtc

SEQ ID NO: 223093 - DNA, 423 bp, Homo sapiens
cagccccctacttaaaccttagagcttttataaataatattgagaagtatatccttatattcgttattttacacattcttcagtacatctgtagaataaacttctatgtttatatgtacatttaaatattgggagcctaactgttggtctgtgtaaagctagattttgaacatctattgtatgaatgaccagtctttttacagaatttaacttgattaacatggtttctatcctgcttgcatttgtgaaaaagtgcagatcaaatagatcacattctatttaaacattttctcctaaaattaaggcattttagccaaattttatttcagagaagtacagtttaatcattaattaagcctcttccacactttgacagatacagcacatccttttttttttttcttaactttttttttttttttt

SEQ ID NO: 223094 - DNA, 454 bp, Homo sapiens
cagaatagagaaccaagaagtaaagccacatgcatacatctgactgaacttcgacagaaccaacaaaaataaactacggggaaaggacaccctattcagtaaatggtgcttggcagattggctagccatgtgaagaagaatgaaactgcacccctgtctctcactatacacagaaattaagatggattaaagacttaaatgtaagatcgaaaactataaaaatccgtgaagaaaacctaggaaaaactcttctggacattggcttaggcaaaagatttatgagtaagacctcaaaagtaaatgcaacaaatcaaaaatagataaatgggacttaattaagcttttgcacagcagaagaaacaacagagtaaacagacaacctacagaatgtgagaaaatatttccaaaccatgcatctgaaaaatgaccagtattcagaatttacaaggaactc

SEQ ID NO: 223095 - DNA, 118 bp, Homo sapiens
tcatgaaacaactaattccaagcagacgaaatacaaatagccacatctaggcacacagtgatgaaaccattgaatgtcaaataaaatattaaaagtaatcagagataaaaagacaaat

SEQ ID NO: 223096 - DNA, 423 bp, Homo sapiens
ttctgagccaagggccctgcaactacacaagttgcacgctcctgaagtcaatccaggtgggaggctgagaaccctattactcatcttccttcgtcaagcgaataattgaatccgcagcaaaaaaaaacttgaacggcctccatttttgacccattgggactttcttctcctctaagcaagtcccactctgtgaaaatccaccacttcctggtgacgctatcacagctttgaggggagaattcatctgctgatctcttcactgaagccgtggcttagagcccaagccttgcagatgaagcatgggttccaatccccacccaccactttcaagcttggtcccatccaggagataccctgactgatctgtacttaggtttcaccacctgaaagtaataaaatatatttggtttgattcatgaataa

SEQ ID NO: 223097 - DNA, 474 bp, Homo sapiens
gaatatgagctttcaggaccaatgttacaattaaaaaagggaacaagctttaagccctgctcatacctgaatttggagactaggacttccttttttcgaacgaattctttcacatgatgattacactaatagcagtgacaactataccctctgcttgcacaataatgttactgataccgtcctgatttgtactacgcacccctatatacttctgtttgggcaaggtgttcctaacatacagcagaatcaatcttttatagtattaataataattagtaattaataatccttttatagtctcttccagtcgttggtatgctacatgcttgtctcatcgaaatattatacagttaaatataacctatgtcataatcttaaaatggcatacagaattgtggctccctgtaaattttaccaggaactgggaagggattccaccctgcagttatttagaaaagcactgtctcatactca

SEQ ID NO: 223098 - DNA, 478 bp, Homo sapiens
atctaacagatttccctgcctataagcttatcacctccaacccactggctttacaacttctgtattgcttgaccatgctagtctttttcttgaaattttcagtgactctccactccccattgttaatattgtctaggctctttagaagaaaagcatagtcctccatgattgtacctttacctatgttatctcttgctgacacccctcaacagagcctgtattttggcagtcccattacatggagtttcccagaggtgcctgtttcactcttttctgcttttgaacagtatattccctctgcccaaaatgaaatttctccaattatctacatgatgaacactattcattgatcaacacccagtcttttttttctttttttttttttttttttttttttttgggaaccacaaaaaatttttccccccatgtacaattttgcccagtggaatggggcttggggaattaccccgccaacttg

SEQ ID NO: 223099 - DNA, 464 bp, Homo sapiens
catgcttgtaattccagcactttgggaggccgaggtgggcgatcacctgaggtcaggagttagagaccagcctggtcaacatggtgaaaccccgtctctactaaaaatacaaaaataaaccaggcatggtgacacatgcctgtaatcccagctactcgggaggctgaggcaggagaatggctcgaacctgggaggcggaggttgcagtgagccaagattgcaccactgcactccagcctgggcgacagagcaaggctccgactaaaaaacaaacaaacaaacaaacaaacaaaccaaagaggtagaagaaacttggctgactatattctcaaaaacattaaataaataatgaattctatcaatgaataaaaaagacatctgaaaagaagggagagtataaggaaagaaatggcagcacagaagcatttaaattagaagcagcagcagagaaatgaatttatact

SEQ ID NO: 223100 - DNA, 483 bp, Homo sapiens
agcagtctgcaacccagaagaggaccctcactggaacccaggaatgttggcactctgaacttagattttccagcctctagaatgccttatgcaaatcctggaagatatcaattctgagggctggggtgtatcttgatcacctttggaatctaccactgcatggagcacagcacttaccacctagtagttctgtttgtttccaagtttggaagaaacataattgaatcattttgaggaattccaatccctgacaagatgccagtgctattttacagcaagagtagacgaggaaggctatactacgtggtcctgggcaagttatttaaattctctgtgcctcagttttctgaaccgtaagatgggaagaataatagtaactacctctggaggctgttgtaaaagttaaatgatctgatctatgtaaagcacttagaacagtacctggtatataagtgtgtgataaataaaatccaatatgaagaa

SEQ ID NO: 223101 - DNA, 244 bp, Homo sapiens
ctgtggggtctgtattaactccaggtcttcagtgtcagaattgaactgaattgcagaacacccagctagtgtctggagatatggagaattggttggtatgaggacaaaagacacatatttgggggtcagaaatgctgtgagtaaaagagttcagacctatccttgtggactcacattctagctgaggaaggtaaataataataaagactgtgaaacatataatgaagcctgacatgtgagaaaa

SEQ ID NO: 223102 - DNA, 411 bp, Homo sapiens
cttagcatgctgtcctgcatagacaaggcccacgacagcatttgctaaataaaagaatgactataaataaaatcttagtaaacaaaagccacagtgcatctaatcaattctcagaattctttaaaatttaactgtcagaatgttacatacactttgaatgccttcaataaatattgcaagaaaatagcacaaacatgttactccacccttacaagtacacacagacagtggttgttatgtcattattttctaaagacttgcctattgggtagtagaaactaaatgttggttatggtataaaatacatttctaattaccagtgagaatgactttttccatctatttacctaggtagttctgtgtcacactgtttgcaaaattttctattatcatgcctggatttttctctcc

SEQ ID NO: 223103 - DNA, 498 bp, Homo sapiens
caaacaggcaggagaagttgggtgtcccctactttttccttccttccgcacagataactctgtagattagtggggccccggcgcctcagtgacgttgtcgcctcttactgcgctggggcctgggcttctcggctgagaccctgaaactcctttccttttatcctctcagctttctccattccttcctttactctacgtctctgtacacagagtgtgatgtgagggttcaccccgggcgcccgcagatcccccacgttccccagcacgcttgggatgcatctcccgagtgcgctaggaatgggcagccccgtgtcccccgcgcgagtgccgagcggaccggcgggggcagaggtgaattgcacgcctggggggcgggccggggcggggagccgaggttgctgggagctgggtctggagtccgaggacggggagggggcatggtcgccccccgccctgtgaactgtgaagtgcgcggctccggccgagccggtggtttcc

SEQ ID NO: 223104 - DNA, 512 bp, Homo sapiens
gcgatggctcacgcctgtaatcccagcattttgggaggccgaggtaggtggatcacaaggtcaagagatcgagaccatcctggccaacatggtgaaaccctgtctctactaaaaatacaaaaattagctgggtgtggtagcacgcgcctgtaatcccagctactcgggaggctgaggcaggagaattgcttgaacccaggaggtggaggttgcagttagccgagatcacaccactgcactccagcctgggtgacagagcaagactccatctcaaaaaaaaaaaaaaaaagtttaaaaaataaggaaatcttcagttttatggtacctataggatccaggaaagctcaggagaggacctgcaggtagaactcctaggctgaacggtggctttaggaatcacccagcgaggacaatgacacagagtaaaataagtccctcagggataatcacttgccttttttccatgaaaggaaaaggttttggatttgttgtgatttatggacaatgctaag

SEQ ID NO: 223105 - DNA, 264 bp, Homo sapiens
tgcttgatgtactgcaacggggagaataccccctaagcccagggggctggacgctacagaagctgtgtttagcttcagagtttgtaccttaacctaagcttgcctttactcccatgattcaaaacactatcatacaggaaaccatttgttttaaaggagaaaggagcacgattattttaatccagaaaactattaaaatacattctccactgtagacatttaagaggcagatgggacagacaaaagtatttgggaattcacaca

SEQ ID NO: 223106 - DNA, 474 bp, Homo sapiens
tgttgccaccagcacccagaggaacaaagaccatgacattgagctggtgccagacattctcccaggaccccaccttcacccctagtcctgctcaggtgcccaatcctataaagactagccccatccttaaggttcatcatgaggagggggtgacagggggacacttactccagcctcatattcataagaagacttcaacatatttacaaatgaccacatgagtataaaaccacagagatgcactgacactgtcaaaggaaggtgtttgttttccacgttgaaacctgtgcccatcaccagcccacatgcttagagaacacgaggcatttttgtttgtttgtttgtttttaaatagagatgagtctgggcttctatttcgaccgcgatgatgtggctctggaaggcgtgagccacttcttccgcgaactggccgaggagaagcgcgagggctacgagcgtctcctgaagatgcaa

SEQ ID NO: 223107 - DNA, 338 bp, Homo sapiens
cagggcacaatggcagatataagaaaaaactgtaacttctgcatgataaccattaacatcgatagattatttttaaaaagtctgaaatttcatatgaactcttcagcaatgtaagaattatgtataatctgtgtgagggcatttcagctgattgtacagctggagcttcctgatatcaccaaaaggaagaaaacaatactaaagtatagacagagttgtactccatctttcacatctatgcaagcttaaagaaactgtaagatcagagagtttatgagaatattgcagctcattagaaaacttgtctgactcaacagcatggaaaataattcaaatac

SEQ ID NO: 223108 - DNA, 1339 bp, Homo sapiens
catgtaagccctttctaatttctcccccattctaaattacactttgataaacatctttgatttttacttttttctttgttattctagttcatctagtcattctgatgcattttataatgaaaaaaattatctcaaatccttttgattgttatagaaactatattaagtccatgaattattttgggaaatttgatgtattttacaatatccatcattgaaaaacatggattatcttcccaagaatttaaatttttatctagatatatacatgagattttggtagttttcttcaaatgaatgctacaactgaaagaaataaatgacattaacttgaaattatgactttttttagagaatgcttactatgtgacctagatttaattaaaaataaataaattacatttgagggcccaagctagtctcaaactcccgagcccaagtaatccgccaccccagcctcccaaagtgctgagattataggcgtgaggcaccacacccagtccaaagaagaaatcttaacagaaattttaaaatatattgaactaaatgaaaataaaaatacaactatcaaaatctatgcaatgtagctaatgcagtgcttagaggaaaatttatagtatgaatgcatatattagaaacaaaaaatctaaaatgaatacgcttccactttaggaaagtagaaaaagaagagcaaattaaatccgaaacaagcagaaaaaaattataaaaattagagcagaaatagatgaaactgaaaataggaaatagagggaaaaaaatcaagaaaatcaaaagctgtttctttgaaaatatcaataaaataagcaagcctctaccactgggcagggggaaatgcagagttgttcgaacatgagtttcagtttcagttttgcaagatgaaaaagttctagagatctgttgtacaacaatgtcaatatagtttgcactactaaaatggacacttaaaaattgttgctctctcctctgctcgcattttcactctgccatgccctgctctgaagagacacccaccgttacccacagcaaacaggctggtttgcagaggaaggcagcatgcagctccgttttgccccattctctgagcaggccacaaccctgactcagggatccacacaggccacaggctatgacctcaacggtgcctatgatgatacaataccacctatggagaaagctctagggaaaatggacattcagatagctcttccttctggatgttacagaagagtagctccatggtttggattagctgcaaaacactttattgatagatgaagattactgaggaaatgttggtgctgtactgtttaattttggc

SEQ ID NO: 223109 - DNA, 264 bp, Homo sapiens
catcatgtagaagcaactgaaacaagttgactaggtgcatctttcatctcaagttgacaaagatggccctgagagctgtaaagaaaatatcgagtgggtctctttaaagtagttcaaatgcccagacccaggttctgaaagtgattgaaatgggaaaaaacattagggtattactgattcctaaaagggcaaatgtgggtagcttttgtaaacaaaaaataggtagacttagtgtcaacctttgaaagaaaagacgaaaaaaaa

SEQ ID NO: 223110 - DNA, 412 bp, Homo sapiens
aatggagtggtcagaaagggaaatctcattttaattcagaattcacattccaattttcttttgcaagaggactctcacatattttggcatgaatttacataagatgctttttgggagctgtttcacatgaggacctttttcataacagaaaatgaaagagaaggaaacaagtgggaagtgggacagccgttaatctgtaagttagggaactgctgccaatgtttaggtggaaggtgaccgggatgaggtgagtgtgggtggacctgtggctagccttgttgaaacaaacaaacagctagaatgtcaccttgccctccctgggcctctgcagcagtgaccacaatgacagcagaggcaggtcaaggcaggacagcagcagaagcaagctccctcccttcagtcgtcagtcatc

SEQ ID NO: 223111 - DNA, 346 bp, Homo sapiens
tagggacctcatataagtggaatcacacagtatccgcctttagggactggcgtaattcacttagcataatgtcctccaggttcatctgtgttggagcatgtgccaggatttccttcccttttaaggctccctcgtgacttttgatctggatggaacctcatccaattctgaacgggggaagaatatcatccatccatacagttaaggcaacctgccagatccccatggtttctgtctctggttggcatagactagaatccaggtttggaaactgggccagaaaagaaaggggaaaccccctacagatttggggatgagggaaataaagccaagttcatgcggaata

SEQ ID NO: 223112 - DNA, 410 bp, Homo sapiens
ttaaaacagcaatgtgtaaatttttgttgtgttccacaagtaaaattttggggcttatttaactgctgcaactagggttaccctcactaatgtgtggagaatagaggtaccgttaaaagttgatgaaatggctgggtgtggtagctcacgcctgtaatcccagcactttcggaggctgaggcgggtggatcacttgagctcaggagttggagaccagcctaggcaacatggcgaaaccccatctctactaaaaatacaaaaattagcctgacgtggtagcgggtgcctgtaatcccagctacttggcaggctgaggcacgagaattgcttgaacctgggaggtggaggttgcagtgagcccctgtcctccagcctgggtgacagagggagattgtctcaaaaaaacaaac

SEQ ID NO: 223113 - DNA, 522 bp, Homo sapiens
gctacagaagaaagataagtcaattactacaagaaagggccataagaaataaggcaggtgttatggaagcatggtttaatgactgcatcactccactttccccctaactactatcaatttcctccatgatccaacacttccattgttttttcactatgatcatcattttccccgtcaatcacaaatcttccctgaaagactccaaccatggttgtggaaaaaagagatgtagaaagcaatgagttcacatgctgagcagaagtagaaagggaaggctttaggatatagccaaggaagggaataatgaagcaagaacccccaggagacaggtgaagatggaattcaaagaacacatagaagaggctgatgcaggtggaagaaaacccatacgtgagagaagaggaaacagaaaggggttcttatctggtggtctcaaatatttcaataaaatgcaatgtcatatgctaaacatgggagggcactgagagaattaagaggaaacatgaattttgaatgaaatta

SEQ ID NO: 223114 - DNA, 521 bp, Homo sapiens
gcacgagtatgaagttaatctaattagaatttatttcattcagtagttacacactttctttttgatttttattttctatgctaatctcccattgaggaaatgactcaaaccacttggaataatgctataacacattttccagggatgcttttcaattgggtccctataatttctaatttattaaactgtattcttgatattaaagataaaatgattatattaatcccctgaacaaaagaccagtattaagacatttttcctagtgactcctataagctttcaatttaattatgtattatgacttatttaattttgttagcatcttctaaaatgaactttgatatattaatattacatatgatatagaaaagtacatttaaatttccttgataatctgattatcttgccactaaaaaatcttatgatggtaagttttatgcttattactttgaaagacaaaatcaatcaaaagtgaacagctactaaggaacaaagcatgcctgctaagacatggggtttaa

SEQ ID NO: 223115 - DNA, 647 bp, Homo sapiens
gtcaggagtttgagaccagcctagccaacatggcgaaaccttgtctctactaaaaatacaaaattagctgggtgtggtggcatgtgcctgtaatcccagctactcgggaggctgaggcaggagaatcacttgaacccgggaggtggaggctgcagtgagctgagattgtgctgttgcactccagcctgcaagggcggggggaaaaaaacaaccacacacaacacacacacacctttttaaagtgtgcagttcagtggtttttagtatattcacagagttgtgcaaccattaccactctctgtttagaaaattttcatcccccacacccaaaacaaactctgaacctattaaaaggtcactccctgttccctcctccttccagcccctggcaaccactaatcttctttctgtctgtaaggatttttctattctggacacatcacataaatgatcctttgtgtctggcatcttctatttagcacaatgtttttaaggtttattcatgttgtagcaaggtacgcaattgtttttcatttaaagaaaaagtctcaatgctattacaattttccatattctttgcacctgtggtctgtctccctaaatatagcccctttatgaaggaggaatgcaaagctgatccaactaga

SEQ ID NO: 223116 - DNA, 283 bp, Homo sapiens
tgaatacagataagtattatctgtatactatctgtctttccccagagccttacatttctttctctcttttaaaaataattatttattgaaacctttttgtgggccaggctctgttatatatgctgggctcgcaaaagtcaactagatagataaggcttgccctcactgagctgactaacattttagtgggagacagacaggaaaaaaagtaaagagatttgcttttaattcttaaagtgtatagattctttcttcttgaaacgtttaaaaatgatattagtat

SEQ ID NO: 223117 - DNA, 213 bp, Homo sapiens
gcatgtacttttatgaagaaatgatgtcagaaaactgaaggatgataataaatacgaaaagtaacaggcatgtgaaaaggtcttccgattgagaactataaggtttgatttcgttttcagataatgggttcctagctcttgtgtcgtccttttacatattctacatcaatggaagttgtagcacggtgtcagaataaagtagagtgtatttca

SEQ ID NO: 223118 - DNA, 507 bp, Homo sapiens
gggccatactagaaaaacacaggacagtcagaagacctctgctacgtcttgttacgatgaaggctatgacctccagcctacgttttgttgtaaccgggctgtgcaactatgggcaagtcatatccattctggtgcctgtcaaattagaaggaaggaaggtgaagaagagagcagctggggtccctcccagctggagtattctgtactcttggggtgctatacaggcggggagccctagagaaagaagcatttagccatagtgacaaagcagcagattctagaacgaacaccctcacattctgccaggtgatacgatcgcagaggtctggccccaccagctctcacaagcgctgccagctaccccaggtccagtcaccagtgaagactttatcagggcttcccctggctaccctctcttgctaccaccaccctcctttctctccaatcagcccaggacaagggggtgccttgtgacagctgcagctgtggcgaatgggctggctccct

SEQ ID NO: 223119 - DNA, 399 bp, Homo sapiens
caggcaacagtgcgagactctttctcaaaaaaaaaaaaaaagtgtcaaggaaatagaagacaaagactaaggatctcttacagactccagaagactaaagaaaaataactaaatacagtatggggtcctggatagaatccaggaacaggaaaagacatagtggaaaaactgtaaaatttgaataatgtctataggtaatagtattgccaatgttaatttcctggttttgataattttgctatggttatgtaagatgttaataataagggaagctggatgagggataaatagaaagtctgtgtactacttttgcaacatttctgtaagtctaaagttagttcaaagtaaaaaattaaaaaataaataaaagtcctactgccaaaaaaaaaaatggtaggg

SEQ ID NO: 223120 - DNA, 448 bp, Homo sapiens
ttaaaaattattaattagcatagactactagttcctctcatagacctagtttttaggacaccttgtttatctccctgtttcctttagtctcaacccaattacaagcaccttgcaattatatcagtatctaattttgtagcagtcttatttaagaattaaaaacgcggtcaggtgtggtggctcatgcctgtaatcccagcactttgggaggctgaggtgggtggattacttgagatcaggagttcaagactagcctgggcaacatggtgaaaccccgtatctacaaaaatacaacagccaggcacagtggtgcatgcctgtaatcccagctacttgggaggctgaggcagaagaattgcctgaacccaggaggccaaggttgcagtgaggcgagatggcaccactacactccagcctgggagacaaagcaaggctctgtctcaaaaaa

SEQ ID NO: 223121 - DNA, 1253 bp, Homo sapiens
acgtagagacagggttttgccatgttgcccaggctggtctcgaactcctggactcaagtgatcctcccaccttggcctcccaaaatgctgggattataggcatgagccactgtatccagtgacagtagacctttagtttgctcagtgccacattgctttttgaataattcctgcctgtgtgacctttaaaattctgggagagagaaacatatatatggaaggagctcagaattacagttgattgggcttggtcataagcatccttgctgaggcaatacccttccagatccctctttctcaaatagttggagtgcagtattgctatttcatgggcactttgagacaaaagctagctctgatttaactagaatctagtcgtgcaagtctttaaagttgaagctttagaaaaattgcatcatttttggctgcattgcatgagctagcctgcatgttcagcagctgtggaagctgttacaagttgctatgtgttaagaacaagtctagttgtgaggcagaagctctgctgtggttgtgccttgtgccattacctgcctttgacaagcccagggacagcagtgctttgcatgtcctcatgttgaagtctcacttgcaggtagttaccttagaatgccagatacgctgtcgggttgatccagttataaaaggctcatatcacagacgtttatattgaactgtatgttattatgaataaggaattcttatgatagctagaaatcacatgctttggaactaaaaatagaggacttcctctcacgttccctccctgggcctgtgctgcgtcgtcgtgctgcgtatttggatactatccttcggagcgccacactcgagtgatgttgctcaggcagtgtctgaccttggtgagaggagagttgctgttcttgctgctctgtttagagaaaggtgccttccatgctgatattagaatgcttcctataggtggaatgcacgcttcctgtttatcttctaatagccacttaggatatgagcatctaggatctcggcacagagggattcagcgtggtgggagatgcgggaagaaatccgtaatgacagactgttgtcattactgttggaacctccccaggaccaactgaaacttgaagggaaaataagagtttaggttggggagggtatttgaggcagaatgaattccctgtgggctaacctactatgtccaaggcaaacgtgcaggttattgtgaggatgggtgctgtggcagccgggtgtgggta

SEQ ID NO: 223122 - DNA, 214 bp, Homo sapiens
gggaatttttcacttaatgtattatattccaccaatatacaaatatttgtattattttagggcagttagaatagaaaatacattttcagtagaatcgttaataaatgaatagaaaaatgagaactcattggtgaggtagagagcaaacacacactaagggagtgacttgtaattgagcagaaatttcctttgagtttcctaatagccaaagcaa

SEQ ID NO: 223123 - DNA, 406 bp, Homo sapiens
gaggtggagttttacttttgttgcctaggctggagtgcaaaggtgcaatcttggcttaccacaacctccgcctctcaggttccagcgattctcctgcctcagcctccggagtagctgggattacaggcatgcgccaccacacccaactaattttggatttttagtagaggtggggtttctccatgttggtcaggctggtctttaactcctgacctcaggtgatacgcccgccttggcctcccaaagtgctgggattacaggcgtgagccaccacgcccggccttcagggctctctctccctttcagcatcaatgtcaacatgtcagggatggtctttattttgcagtttccttctgagacaaactccttgaacgtgtagacttcagtcccccttctttctcatctc

SEQ ID NO: 223124 - DNA, 279 bp, Homo sapiens
gcaatacatgctaatccctttgagcaaatccacatggccagtttctgtgctcaggggtgagaatagctgggctgtgattggggcagggggagcactaagtgggagggacttcctgtctccggtccctgccatcttgactgacatgctgcagcccttgccaaaacccatgggtcagaatgaaagtaaagtgccgttgaaaaccttgcaatccacctttaaaactgccgggtgtagtaaaacaattgcttgccccaaataaatgacttatcattgctaaaa

SEQ ID NO: 223125 - DNA, 474 bp, Homo sapiens
  misc_feature (21)..(21): n is a, c, g, or t
tgcttgatgtactgcatatantgtaatacctaccaagtccaaccaaggtttaaagtgttatcagcttgggccgggtgtggtagctcacggcaacaaatattttctgggaaaatatatgaatgattgaatattgaacaagatctgtaagggtgtcatgtttggtaaagccatacagaaaaaaagaatagcgataaaaatcttaggaatatttataagaataacaacaatgggcaagacctatgtgaagaaaaattatgcaggttactgaaaatataaaagaatatctaaataaatggagaagggctgggcgtggtggctcatgcctgtaatctcagcattttgggataccgaggtgggaggatgacttgaggtcgggagttcaagatcaggctggccaacatgacaaaaccccatctctactaaaaatacaaaaattagccgagagtggtggtatgtgcctgtaattccagctac

SEQ ID NO: 223126 - DNA, 261 bp, Homo sapiens
gagttccttcctcaggaaaggacccccaggcctctcaaaaagtatcaaagaactgaaactcaccagatcgtagaattcagacagtgagacaccaggcctctcattcatcagattacttccttagccctcccaacttcctgttttcccatacattgttacatttcttctctgctgtaaaaactcctaattttaatcagggagatggatttgagactgatccttggctacagtgcctgattaaagcatttttccttggcaata

SEQ ID NO: 223127 - DNA, 461 bp, Homo sapiens
accagagagagatgacccaggatgttcattgtggcagtgtctgtaacagaaacaagctaaaggtcacggacagaagagataaattgtgggatattcctcccatgaatactatccagaactgaaaacaaagtaactgtttctatgggtgtgggttcacctcataaaccatattaaatgataaagcaagccacagaatgatacattcaacaaaaaacaatttatacgaagtctaaaatcatgtaaaacaaagggattttaaaaactttgtaacagtataaaggcattcaccaaattcaagacatccgccactccccactggcagtccttgctttactcagtacagtatcgactgaaacacatacataacagaactgtggaaaatcagggctatctgcatatatttctattattttctatgtatactacatatagccaataatattaaaatgttacaaattgac

SEQ ID NO: 223128 - DNA, 407 bp, Homo sapiens
agtgctgggattacaggcatgagccaccatgccccaccaagacaaacaaaacaaaacaaaacaaaacaaaacaaaacaaaaacagtatagatgaaaggcagccagcctgggttcaaatcctaccgttgctacttattattaaataaacgtaagaatcttatggacgttactttacctctctagcaccttgactttcaaatctgcaaaacaggataataacacctatttctttataacattgttataaggattaagtaggttaatatatgtgaaatacttagagtaatgtctggtacacagtaggcactaaataagtgttagcagccaggtgcggtggctcacaaggtcaggagtttgtgaccacactggccaacatagtgaaaccctgtctctactaaaaatataaa

SEQ ID NO: 223129 - DNA, 442 bp, Homo sapiens
ttgtcaggtctccttaacgggtctttctgtatcagtctcaccactgtcatttcattaaccataaaaacagcacatttttacacacacacaaaatctatctcaatcaaaatctcagtaggttttgttgtgtgaaaaaacaagcagattcaccgagtgtggtggctcacgcctgtaatcccagcacttagggaggctgaggcaggcaaatcacttgagcccaggagttcgagaccagcttgggcaacacggcaaaaccccatctctataaaaaatacaaaaattagctgggcatagtggttcgcatctgtagtcccagctactcgggaggttgaggtgagaggatcacctgagcccagggaggtcgaggctgcagtgggccaagattgcaccactgcactccagcctgggcaacagagtgagacactgtctcaaaaaaaaaaaa

SEQ ID NO: 223130 - DNA, 359 bp, Homo sapiens
aatccaggggcagaagccaggtctcatgactccagcttcagtgttttctgctgtgaaactaagacttgtaagaagactccacaacacaacttatttccatgccatgttcactgcttgagcgtgtcatacgtgactagtattgtcttgcccctgggtaatgctatgtttctcaaagctggggacacttaagatctgtggtaacaagagagttttaggaggtgctcagggactaacattttaaattttggtaattctgttatctatttattttagtgttcattagaaaaaatatacctattacatcatactgttggtttcatcatattattgtttaggatgagactaaattaatataatag

SEQ ID NO: 223131 - DNA, 395 bp, Homo sapiens
agacctgggcactggtcccagctcgccaccagctcttagttggaccttggacaatccttggacacattggatcttcgtttttcctctgtgaagtggcaggattagactagaagctgatacagtgaaggtgctcagtaaacagctgatgaatggatgcatgcatgaatgaatgaatggcccgtctaagacagatcaagtctttaaggccccacgcttctcagggtgtcacaaagccaagtttgaaaaccactggattgagaaactaccttttgggtaaccatgctcactatctgggtgacgggatcaatcataccccatacctcagcgtcacacaatatactcatataatgaacctgcacatgtaccccttgaatctaaaataaaagtagaaatta

SEQ ID NO: 223132 - DNA, 202 bp, Homo sapiens
cagagtgaagaagataaataggtcattactttgactgtagtatttgcatggagacttgagccaccaggaagccattagtgctcttgaaatgaaaaccaatctattatgaactacagagaaggagggtctgggacactgagagtaggagagtcaaaccccatcagggccagtttgactcttaggaacctccatagttcactgg

SEQ ID NO: 223133 - DNA, 692 bp, Homo sapiens
ctgaatggacccctcttctctgtcaaggggattccaaagaaacctgaaactagttcagaccatgaccagcagtggaggactgagtgcacctcctagttcagactgtgaccagcagtggaggactgggcgcgcttcctagttcagaccgtgaccagcagtggagaactgggcgtgcctcatgatactcctctccttttggggttagacagactcaccagcattaacattaaaatagagatcttggctgggcgaggtggctcacgcctgtaatcccagcacttggggacgccaaggcaggcagatcacttgaggtcaagagatcgagactagctggccaacatggggaaaccccatcactactaataatacaaaaattagccaggcgtgcacccataattccaaccacctgggagtctgaggcacaagaattactcgaatccagcaggtggaggttgtagtgagccgacatcacaccactgcactccagcctggtggcagggtgaaactttgtctcaaaaataaaatagaggttttaagactgacagaacagactctgtagcaataagataccaactccaactgactctggcgtaatatcacatggcagataaggaaatcaagataattacccccaaatttgtttatttttcatatctggaaatggcctgcaaagctgtcttttgtggggcgga

SEQ ID NO: 223134 - DNA, 435 bp, Homo sapiens
catttatggttaattcattctgacaggggactaagttcaatgggaaaatagtgtctccaaatggtactgggacaactggaaattcccatgccaaagaatgtagttgtgccccttccttccactctatacaaaaagtgaactcaaaatgggtggtagacatagatgtaagagctaaaactatagatctcttcaaaataagatataggagtaaatctttgtgaccttggattaggcagtagtttcttagatatgacaccaaacacataagcagcaaaggaaggaaataaactagacttcatcaaaattgaaaacttttgagctataaagagtaatatcaagaaattgaggctagacgtggtggctgacgcttgtaatcctagtactttgggaggccaaagtgggaggatgcttgaggccaggagttcgtcgacaaaa

SEQ ID NO: 223135 - DNA, 409 bp, Homo sapiens
tacctcaccagaaatacagataatattattatctgcctgactataattcatatattattcatctaatacagcaaataaacctatttattcctttgcattttactataggacatattcttgtcattaaataattactagtgttcattttacaattattaaaactaggaggtttgtaaagagtaaaactttaaagtaggaaaagttaaatatttattttagctaactgatatctcataattccttttggtttaaaatattaatattccttttttgtaatcataatgaaatctgtttaaagaaatctactgccctatgtttttgttgttgttattgttgttgagacagagtgtcccccatcacccactgcagtccgcagtccggcctgggcgacagagtgagactccgtttc

SEQ ID NO: 223136 - DNA, 643 bp, Homo sapiens
agagggcaggagggagcagagggagtccgcactttctgctgtgatgctctaaggatctggtgcgtgggggaaagaggaaagatatgtacatggattttggatcagaccaagtttcctgaaacgggctttgggtgggtggcatttaggggacccaaagagaggacggagggtgctctaggaaagggattgcgttgaataaaagtctggtttatgggaagaggaggaggaagactcatgtggccagcactttaaagtttacaaaggttggttgtggacatccacctctttggtgctctcaacagccctgccagagagatgcgttagacccagtctacagaaggggactctgaggcccagagggagtgaagccacttgtctgaatcctcacagtgagctggtggtggggagtagaaggggctcttcaggttgcctcgctgacccatcttgtcagtccctggatcagcccagcacttcctctgaggccccatctggcctcatccaggcactcttggtatacaggtcccacccgtctgtattcttttttagtccattcactaatgcacaatgagccatggtctgtgctattttgttttttgccttttctgtttccttttgtataataaatgtttacacggaattgttt

SEQ ID NO: 223137 - DNA, 373 bp, Homo sapiens
agctgatgagttcaggtatgtctccctgtggcaattatcctaaccagatagatgaatcaagtgttcatgaccccacgttgccttacctgttctgcctgtggtcatctgtccactgaaagaaatttcaaggaaaacaacatgatctggaacatgaaagataaaatgtttctagaaaatgttatgtgtatcgcttctcagccttttggcgaagatcaaatgaaaatactatgtgctttgtagttaaggaaattagtagcttctgtttattaagcatttactatgggccagttactctaataaaagtcctttatatgccttatctacttcaatcttcatatcaacctctggaatgtgggttctattacctccattt

SEQ ID NO: 223138 - DNA, 386 bp, Homo sapiens
gagtaagtgagataatggacacacagtgcccagcacagagcctgacctagagtatgcccttgcgtgagtcaaggtaggctagttgtgtcgttatgacaatcaatgcagggtttaagtatctttaaaacataaacatttatttatttatttttacctaatgttggccgtcagtctgggagattcctccaaggagtggctcaatgataaaggctgcttcgacctcatggcaccccgtctcaatacatacatctgtggttgtgatgtaggtgggacagatggagggtctcactgatagtgagtgctttggcctggaaacgactcacatcactgccactcacagccaattggccagaaatagtcatatgatcccaaagcaaaaaaaaaaa

SEQ ID NO: 223139 - DNA, 445 bp, Homo sapiens
tgatgatcccctgcttgattgtactgccttaaaaacaaacaacaggctgggtacggtggctcacacttgtaatcccagcaccttgggaggccaaagggggcagatcacctgaagtcaggggtttgagaccagcctgaccaacatggtgaaatatcgtctctactgaaaatacaaaaattaaccaggcgtggtggcacatgcctgtagtccagtttcttgggtggctggggcagaaggatcccttgaacccgggagatcagggttgcagtgggctgtgatcgcacctctgtactccagcctggagtacactgggcaacagagtgagacccttgttctcttaaaaaaaattaaaaataaaaaatgggatcaatttctgtataagtcattgtttgcactcaccttgttggtaaactgggagcagctgcggctgcgggacatcaaggca

SEQ ID NO: 223140 - DNA, 444 bp, Homo sapiens
gcccctgcctgatttcatttcagcaagctttactgtgaagtgtttatgtgccaggtaccatgtgtagaagcgctggcccagagatgaagatgaagtttctatccttaaggcatgcaatgtgggagatgaacagagacaggcaagatgagccacagaagagaaagtgatgtgaagacagaagcagggattggagtgatccatctacaagccaagaaataccaatggttgctgccagccaccaggatctaggagagtggcatggaacagattttcccttagagcttccagaaagaactaaccctgtcaacactgtgattctggacagtgagagagaaatttctattgttttaagccatcaagtttgtggtaatttgttatggcaaccgtaggaaacatcacccagtaaatccaaattaaatattatcccaatttttgcttgatacc

SEQ ID NO: 223141 - DNA, 398 bp, Homo sapiens
ggcctctggtcctcagcccagtaagaacacttccttcttcttgggccccaatcccctccaccatggtttcaaatgtgtaagcaaggaaaaagctgcatggagatcaccgtgtgtgcctcccttattcagtgatagtaacgccttcactcttgcctgatttggtttctccccatgctttcaaagactttgaccaattttaataattgtttttggtgagaaggttagtcatagctggaactggaagtgctgtaaaaccactaagaaaaaacagcttaattattatctcgtgaaattgaacatttatggactccatgaccttggaattttatttctctgactatgcttaaaagaaatatttgtgtacatatactagaaaatataaataaggatgttcatag

SEQ ID NO: 223142 - DNA, 578 bp, Homo sapiens
gcgttctagagtatccctcatgtcgctggtggggaagtcaggcagagcttttagatgttgaacaagaacaggaaattgtgtgcgtttttagagagccagctgtcttgagagggaccacgttggggagtgctgagacaggaccctcatgctcaggggctcacagtgttgtgagctaagtggataaacaaccagtcaaggtgctgcaataagaactctgacactggtgcagaggaatgatttgatatgatgtgagatgctatcatatgatgtaattgacgtgacgcaatatacattacaatacatgcagaccgctcatctaagtgcctagcatataataagtacttagtaaatgtcatacactttcttttggggcaggaaacagagaatagtataaacaaggtgaaaggcaagaaataatgtggtgaattccaggaatgctgactagaccagtccagtggaagagaaacattagggaacttgggggcatttttactgactgtctgggaagattgcattctatcttgatctctacttccagataaatctttctaaaacactaccttgatgataaagctccc

SEQ ID NO: 223143 - DNA, 416 bp, Homo sapiens
gtcagctgtgcttttgaggcagggggacagcaaggcctggccaaccccagctccagcctccccagaaagttacagttcacaggacacaccctcaggcacagctcctgtctaatttatatagcaactggcataaggtcagtctcctagaactaactgactttttttaggggagcattattacaagacctgtgttttggagaaggcttgttggactaggatctgaccatctcagacatgctacagattaaggtcaatgccaggtgctatatgaattagacaggagctgtgcctgtcctggaagcccacacacagcccagggccagcgatgcatgcagctgggggcgggactctgaatctgttctgaaaacaggaagttaggtgtgcagggctctcgcccacatcgggaacagtctctg

SEQ ID NO: 223144 - DNA, 328 bp, Homo sapiens
catgaatatttcgcaaaaagaaaataatttttttaaccattaaaattcctggtagtgacttcctctggcaagtaaaaaactctcattttccttaaaaaatgagagttttttacttgcaataggaaaacttgccaatttttcaagttatttttattcttgatgattctcaatgagacataattaaaatacacatagaaaaaacaaccgtaggccaggtgcagtggctcacaccagtaatcccaacactttgggaagtcaaggtgggaggatcactagagaccaggagtttgagatgagcctgggcaacatattgagacactgtctcctc

SEQ ID NO: 223145 - DNA, 308 bp, Homo sapiens
gttcactatttcccaccatctcatctctactagtcatgaacattgtcttagaaattctctattgtcttatcaaattctatgaattttttcttttctttctctttctttctttctctctttctttctttttgtctttcttttctttcatctctctctctctttatttctttttttttttgacggagtctcattctgtccccaggctggagtgtagtggtgcaatcttggctcactgcaacctctgcctcccgggttcaagcgattctcctgcctcagtctcccaagtagctgggactacaggtaggaga

SEQ ID NO: 223146 - DNA, 471 bp, Homo sapiens
gtaattttggaaacctctttgatgtctggcttatagaagacacctgggttcttatatctgcttctgaattcgatctattgtaatgtgttattttggctgaagtatgtgaagaaaatactaccttacaaagatatgtattttcaaaaggaaatacatatcagaaagtttaacaaagccagtaggtgatactaaagttgtcaggataaatgatgtctatctggagagctggcaagaaacaaccaagccccttgaacgctccttacagagcaagaactatgattgatattttcttactcacttgtaaattgcgtgattttagctctatttcaataactttttcagaagactgtagatattcttctttgatactacatcagaactttgcaagtaacttcaagtagtaatttcgtaatattctttttaataatgtgtacttttcctatcctattacagtaaaagccctttatataa

SEQ ID NO: 223147 - DNA, 974 bp, Homo sapiens
ttcccagcactttgggaggccaaagcaggcagatcacctgaactgaggaggtcgagaccagcctggtcaacatggtgaaagctgtctctactaaaaatacaaaaaattagctgggcgtggtggcacatgactgtaatcccagctactggggaggctgaagcaggagaattacttgaacctgggaggtggaagttgcagtgagccaagattgctccattcgactccagcctaggcaacagagtgagactctgtctcaaaaaaaaagaaaagaaaaggcacatttaatttcttgtctttcacaggggtaaggtcaataaatactatatttataatgctagtgagaatttgaggctaaaaatattttaatgtaaccaatagtagaaatgaatgcataattatgaagtactagaaggaaaaaaggacacaaagaaaaggaaatgacaaaaaaaattgtctcccaaaaacatgatgacaaaggtaacagaaagaaggccagacacatgcattattcccaaaaaaagaggacagactgaacagcctaactaaaagactaccagttgggtacaaatatcaaaaattcaatcataagctatttacagagggatgccccacagaaaattgatgaggggagaattcaagacaaagggattttttttttttttagtgttcaatttccactttatcttctttcattacctcttttataattaacgattcatttgcagttttgctgaataaaaaaattatacaaatattctcagacaaaaaaaattaatgccaaacttaaaggtgattactagaaaaatagtacttttaagtactaccaaggaaactctgtataatgtttgaagtgacaatttgaaatgcttaaacaaaaagaaaagaagaaaattaaatgctgacttcaaatgctattaaaattaaaattttttacacaggccgggcacggtggctaatgcctgtaatctcagcac

SEQ ID NO: 223148 - DNA, 144 bp, Homo sapiens
taaacggtagaaccagaatttgtagcacttaaaagtgcaggctctgaggctcaaatatctgggctgatggtgagaatttaatgacgcaatacacgtaaagcaccatgcccagcacagagcgttgacgcggccgcgaatttagta

SEQ ID NO: 223149 - DNA, 974 bp, Homo sapiens
gagatgagtgatgtggttgcacagaaaacaggagacccatgaggagacgtctttggtgtgctggggagagataataaaggcctgcagcaagcaggggaagcaggaatggagacgggcagggtggaagacatgcgaaggaagtggagcggtcaggactccattgtttaattggtgatgacaggaagagaaagagaaagagtagactgtgtgagagagagcagaagagaaggaaagattggtcattgttactccctggttcttggctggggtaactaggtatatgatgtgtgtgtatttgctgagatgtgggacacataaggactagaagagttgcttggtttttgataaccaagtctgaggtgcttttgggaatcatggcccacttaactttccactccttttcatctgtgaaagctctgatgtctgagaaaggtcaaagggctccttggtagagaactataagcaagtacgatccaacttaaaaataacttactgaacattcactatgtgccagacacagtgtggtccacgctaatctccgagggggcagggactctgacttgttcacgtttgcattccagtgcctcatacagaggctgacacacagtggacattcaattaatatttgttgaatggatgacaagacatgaatgaatataacggttaatgggcagtaggaatatagtaatgagaatctcctgatgcctccttttgggagcaagctgtctggttggggcgacaaatgtatagacaaccagtgtccaaagagcatattaaatacttgaatagaggttggatgtaagggcaatggggactgaagagaaaggaggagtgactgagccctcgtgttggatttttaaggatatgtacaagttttctaggcaaagaggaaaagaaatcccaggaagaaggaatagaccatatcaaggcttagaggggtgtaaatgtgtggcatggttctcagaataacaaaa

SEQ ID NO: 223150 - DNA, 509 bp, Homo sapiens
cccttgttacagatggggaatccgaggactggagtgagaagtggtatatccaagatctcagggcaggttagtggtgggactaggctggaatccctgtctccagggtcccttagccagcaggatggtgggttgctgaatgccctatgttccagcaccagactcagttgggtctctgaaggagctcagttggagttcttggtggcccagggaacattttcccagatattcccagcaagaaattcagcgtagtgggaaaaggggaccagctcatcttgatccttccagccctcccctggcacagacagaaccactctgcagagatttcccaaaaagggccatcccactatctgctactgtgcctcgtggactgttccaatgcctctcacactagccaccaggaagctttactctatgtctaacctaggccctgatcattaaaatcacacctttaaaagaataaacatatatcaagaacttagaacagttcctgctatataataagtactcta

SEQ ID NO: 223151 - DNA, 366 bp, Homo sapiens
ccccatgcctcaatgtcctcatgtttcaaatgaggataataacagtatctgggccaggtacagtggctcacgcttgtaatcccagcactttgagaggccaaggcgggcagatcacgaggtcaagagatcgagaccatcctggccaacatggtgaaacctgtctctactaaaaatacaaaacttagccaggcgcggtggctcacgcctgtaatcccagcactttgggaggccaaggtgggcggatcacctgaggtcgggagttcaagaccagcctgaccaacatggaaaaaccccatctctactaaaaatacaaaattagctggggtggtggcgcatgcctgtaatcccagctacttgggaggctaa

SEQ ID NO: 223152 - DNA, 452 bp, Homo sapiens
caactagaataatatgttacaaaatatctggataccatggcctagttaagttgacagatacaattaactatcacagtagacattctaatttgtctatataaaagatttaaaaagggacaataagattctctgaattgctggcagaattatgtctatattttagctattttattataaaaataacacatggaaaattggaaacaacctaaatgtctatccataaaggattaagtgagtaagttataatattctataaaatactactattcagtcattaaaatagtatgtagaagcatagaaaaggtctggcaggttttagaccaaaggggaagaaaaggactttgactttttacttcatatatattgttttaattatttacaagaaagatgtatatgttcaaaattaaacaattttaaaaatagcaatattcagaaatttccagaaaattata

SEQ ID NO: 223153 - DNA, 470 bp, Homo sapiens
agtacaggtgtgagccaccaccatacccagcctgatttcatcaaaatatttacaaaaatcttcctctgcttttcattctttctttctgtaatgaaagaacctgattttatgcactcagtttttttgctgttagataatacttattcttgacttcccatctacctcctacttgaagcattcttgctacaaatacatacctcagtgcttatataatctgcctaaacagcttccaggaactagaaagtgagggggaagatgctgtaataagacttctttttttcctactattttcaatatgttcctttttttttttagtttacttgctgctttattggaaagtgttctggcatcagctctttttaaatcatgcagattagaaagatttctcacaatgttttaatttgatcaaaactcggaaacactcacctttaatgtcctatgaagtttaggtagagagtcttgatgtaaca

SEQ ID NO: 223154 - DNA, 465 bp, Homo sapiens
aaaataggctttaatagtctgtttacaaacaattcatcaagctgaactctgctacatcctgagcccatctccagccatctttccttccaactttaaagatatgctaccttacaatcttggaattttgtaaagaatgggagggattctgcaatatggaagctccctggatacactaacatcaaaaaagaaatagtccattgtgaacataatagctattgaggcaatgtggaacagaataagtatgaataatctgtctacagcctcgtattggccaaactgcactttgaaagccaaagcatcaaaactggctcctgtttctttcattgcccctgaggcttttttctctggaaacacaagcatttgcaaagtaagggggaagcaggagaaggaaggaatggagaccactttgaagtagtatcccacagccaggaagtagtgtttgtgcattttccacatttgtgaatg

SEQ ID NO: 223155 - DNA, 434 bp, Homo sapiens
agccaattttcagaataaagaaacattctccccaggctccagacaccttgcaaataggaaagtggacctctgatggtgattcataagcatttcaatctcattctctaagtcttgtgactggccattccataactccaaatgcctttggctttgaaatttcctcccagggtgcctgcctggcatgtagaaacttcatttagcatagcgcaggtggtcttgtgctggcccagggcttggtaaaaactccctttgctcaccggaatgtttgcctgcaccaagcctgtacacaaagagctcaccctgagaattcgcacagctctttccatcactcaaaaagagcatcagaagagcaagagaagatggcaatcacctgaggtcgtgagttcgagaccagcctgaccaacatggtgaaaccccatccctaataaaaatac

SEQ ID NO: 223156 - DNA, 352 bp, Homo sapiens
aatatatcgtctaaaaggtttgaaatttaattttagaaagccctttaatggcatctattctacagcacctatgttggagggggtatatgagagtagaaggaggaggagtggagtatcctgatggcttcaccagccatgtcaatatttggttacagttcagatcaagtgagacttagaaaaacatccttctatattcctgtatcattttgctttcctatctatccattggttgatcaatccatgtattcatcaatccatgcattcatccaatgtttattgatcatttactttgtgccttgattctctaaagaaacaataaaaactgttggattttcaatttataaaatcgtgt

SEQ ID NO: 223157 - DNA, 528 bp, Homo sapiens
gttgacagctgctaatgagcgtgttggtgttttgctcggcagcttggatcctagcatgactatacattgtgacatggtcattacatatggattagaccaactggagaattgccagacttgtggtaccgattatatcatctcagtcttgaatttactcacgctggtatgtgaattattcttttcctttttaatgtgttggtttattcaggcccttaaatggatatgtaagaaattaagggctttgtctgggtatggtggctcatgcttgtaatcccagcgctttgggaggccaaagcagaagggttgcttgcatccaggaattctggcacagcttgggcaatgtagtgagaccccatctgtacaaaaagtcaaaaattagcttggtgtagtggtgtgcacctgcggtcctagctactcgggaggctgatggaggaggatcgattaagcccaggaacttgaggttgaagtgagctctgattgtgccactgcactcagccaaggtgacaaaaaaggccctgtctccaaaaa

SEQ ID NO: 223158 - DNA, 384 bp, Homo sapiens
tcccaggtggagtggggcttataggggtcaggaacagaggctgggaggccctggggatgtggacacagttgtctgaaagagagctggggaggccgggcgtggtggctcacgcctataatcatcctagcactttgggaggccaaggtgggtggatcatttgaggtcaggagttcgagaccagcctggccaacatgatgaaaccctgtctctactaaaaatacaaaaattagccgggcatggtggcgggtgcctgtaatcccagctactctggaggctgaggtgaaaggatcgcttgaacctaggaggtagaggttgcagtgagctgagatcgtgccactgccctccagcctgggtgacagggcgagactccatctcaaaaagaac

SEQ ID NO: 223159 - DNA, 683 bp, Homo sapiens
aacgcagatagtactcagtgaatctcatctgtaagtcctctacataccctgagcggtgaaatggaaaacaacttatccaaacagcattataagagaaggactaccggtctgacaaaattctgcctctaaggaacgtggtgaatattctgggattatgaaagccaacttggcatattacgaacactgacttttataaataacagatctttataagtgctaatagtacacgtttaatttggtaaacaacaacaacaacaggcatttccagcattaaacagaattaaacaatttggatgtgaaaatacataggaactatgtttcttggctcaataatttttaagtactagtctcacaaggaactgaagtgtagtaattacttatgttcaacagatggcgacctttacattgtagtcagcaaaacagtatttgcataaaacagtatactcaaccagcagaaaatcaaagatcaattacaaatattccatattttgcaagagacaaaaattacttgatcatatacaccattttttgacaggtggtttttttacaggttggcaaacatattttgtgggaatgtatcttgctgttctattttttggggcaagtccaattgctaattcttatctcatgaaaatatgtgcaaatatcaggctagggaataattcctgctttctttgcatagc

SEQ ID NO: 223160 - DNA, 578 bp, Homo sapiens
gcatttctgatgatgtggaaagagcgctagatactgggtctggcatgtgtaaattccagtgccagctccacctcatgtaatatggtgaccaccggcaattctctctccacatctgaccccaagtccctcatctataaaatgaggacagtcattgccttctctttcttacacattgttatgcggatagatgacacagtgcatctgctgctcttactgtttccttgactatcacttttcctcccaccgccccatctccacccccaatcatcccctccccagacccctcatgtatacatcatagagctcccaaatcactccccaggcctgtggtctttccatgcataatttccaccttgtgctccttcctcatgttctgtaggaattcctggagttggtcttctggattatgaattcgttttttaccatgccgctattcctcatctcgattaggcttttcttcttagttttctccaccttgcttttcctttccctgagctctctgttctctaattgcttgcttttcacagcaggctcctcattgtttgctcatgcttcctaatggggacctaaactcaccg

SEQ ID NO: 223161 - DNA, 449 bp, Homo sapiens
gtgaactatttttatttggtttacttactggctttctggatgactaggtagagctttaactaaagaacacttctgctgtggtctgtgatgatgaattttcccgtagtgtcatttctataatggaataggcaaactgaccatttagaatgtgatattcctaaatcacattcaaatcagtcttatcagagacttctaatcaataaaaataaagcaccagatggctagaggtagtttttgacctcagcttgggcctcagcaaagattttttgtgttttttttaactacattaaaacatcagagtttaagacacttttctttgagcatcagaaatactctcagctgaatttagagttgaactatccggaagaaccctggagaaggagggtgatttattttcaactttctgatttaccaccgacttaaatcaaccaatgagttctttctttgac

SEQ ID NO: 223162 - DNA, 150 bp, Homo sapiens
attttacataattaccagcatgtctttacttttcatttaaaataacctcatttacatccttatttattcatctgtcaaatcaaagctattaagtttttagaaacagtgaggaaagaagaggtagaagagaggtctcttcctaacctcccc

SEQ ID NO: 223163 - DNA, 490 bp, Homo sapiens
cagctagattcaaagattttctgattggcaattggttgaaaagttactgactaaagacttaggaatgtctttagagaataaaggggttgtggagaccaaggttttagtgagaatgggataattggtgtggaaaacacaatttggtgtcagaagtgttgtgaatacatagttttccaattgagtttctggatgagattaacatttcaattggtagactgagtatagtacattgtcttccccaatgtgggtgggcctcagccaatcgaccgaagacagaatagaacaaaaaggctgacctcccaggagtaagagggagctcctacagccaaacagcttgagctggaacacttttccagccttgggctcagactgggactgcacatcagtttgcttgcatctccagcttgtcaactgcagatcctgagacttctcagccttcataattgtacgggcaaattccttataataaatcttttatacacacactccc

SEQ ID NO: 223164 - DNA, 195 bp, Homo sapiens
aggccttgggagacagaagggttctatcatgttataagttctagttaccggtttacatttttcctccaactttttattttccaaaatttcaaacctaaagaaaagttgaaagaatgaattttatagttcatataataatcaaatatatactataatagtataatagtctttatccacatcactaatttattaaca

SEQ ID NO: 223165 - DNA, 354 bp, Homo sapiens
ctaggtgttgggataggataagaattattggtagccagagggatttgctaccgggcagcggtggtgaaggtcatcttagtacaaacgaattgtctcctggtttagagtctggcaggaaacttggaatgagtggggaagttgaaagtacagatgcttcttcttctgtgcatttcagtctcatcaaaggctctgcagtgatgagctgcgtctgggtgtagaagcgtgttttcattcctgagatcaggctgttctttttaaatgagaacaaccttgtacctttggatgtattttgcttgatggttgcacaggcatttagtataaaataattattaaaaaaagactcttctctgcccc

SEQ ID NO: 223166 - DNA, 443 bp, Homo sapiens
agcgccccctcctctgctttctgcggggacacttctgccctcgagctgcagtggggacctcctcccctgctctggccctatagccccctccccggccttcagagccttacatcaggctcctaagtacgtggccttggggtcctgcgggccccttctgcttgccgtccctgcccctggtcacgcctgggaaaggttgcagctctgaactggggagaagcttatagtctccagcacgaatgaggcttgaggggcacgaggcagaggcctggacaccccacccacctggagccagtgaccctcacccagtgcctcctttaagacaccactgcaggctgggtacggtggctcacgcctgtaatcccagcactttgggaggcaggcggatcactaggtcgggagtttgcgaccagcctggacaatatggtgaaaccccatctctacta

SEQ ID NO: 223167 - DNA, 306 bp, Homo sapiens
aaaggaattgaagggggtggggggcccttgtagggttccccagagagactgaggctgtgcaataaaaggaagcaggtagacagtctgatcaaatatgcagcgcaaatgatgactgccctttgaggaatgccacactgggaccccagactgttcccctgagatgcatagtccaggccgaggttcttttattccctcctgtcagtcacttaaccctgtccttcaattgtctactaaaacactcaatcatccctgctgcttggaggcgatagagagcatggggcgtccatcatatatgccccatgcttg

SEQ ID NO: 223168 - DNA, 444 bp, Homo sapiens
ggttcattagttcattcgaagagtttttcatttgtaccacacattctgctaggcactggaaacacaatcactgcccttgtggaacataagctaatgggaaacacagaaaataagtaaacatataaatacgaagttatgaattgcgacgggttccgctataccaaaatgaactggatgcactgagaagagaaacatggaggccttggatacaggatgtcaggaggcctttcaggcagaagctaaaggttgaggagtgagaaatttgaaaagtagaacataccaggccgagagaacaacatgtgctgctttcatgcaggaaaatgagcccaagatgaggcaggggccagttcataggcaccgggacccatggaagacttttaagcaggggatggtactgatttctgttgtataaaggtcacctggccagagtacggagactgaatt

SEQ ID NO: 223169 - DNA, 321 bp, Homo sapiens
ccgcacccggccagtgctggagatttgagtccatggtgagatcaaggccaaagagaccaatgcctcggtctttcctttttcccttttatatttaccgaatgtctgtgtcccagcaaccagtaggctttatttttcactgtgaaaagccgtgggttcactgctcagaggaagtgtcgggaaggggtggaagcagctttgcctctctgaccacgcgccccacatgggtgactcaggtagcgtcctctgtcactcatcagctgtctttgtccttcctggcagaaatgcattcgatttaacccggatgccacagtgtgggttgca

SEQ ID NO: 223170 - DNA, 374 bp, Homo sapiens
gtaagcaaacagtataggtatttgtaccccttttttttctttataaaaaagtagcaaactgtgtgtgcttatttatagcttgctttttccttttaaacttaatatatcctggtggtcaccttatagcaatatgtaaagatctttgttattttttcaggagatggatagtactccattgtttgtatccactatatgttcaatcatttctgtatagtaggatatgtgaaatgttatcagtcttttgctacctgaattagtgcttcaacaaatagccttatgcatatatcatttcatatatttgtcattatgcctttgggagatcataggaggtttttgatcagcaaaatgttataaaagcattgttaggaagatta

SEQ ID NO: 223171 - DNA, 539 bp, Homo sapiens
ggtatgaagaaagtctattaaaagtaagctactcttacctacctgagataggggatctatacaagaaaagttttcaactacagcctagatttctatttctgcctaaaaccacatcagaccctacccacaaccagtaatactgctgaatactaaaatactatgactgaagatatatacatgaggatacttccaacatgagcaacataaaacctttcagagtttcagagtaaaatggcacagccgctatggaaaatggcatgtagtgctagctactttggagtccaaggagggaggatctcctgagcccaagagttcactgcatcctcaaactcctgggttccagctatcctactgccccaaccttccaagtagctagtactacaggtgcatgccaccatatccaactagatggtatgatcttatatctagaaatgaattcaagatgtaagatcaacatacaaaaatcagtacatttctatataccaataactagttgaccccaaaatcaagaaggcaatcccacttataatagctaaaaa

SEQ ID NO: 223172 - DNA, 475 bp, Homo sapiens
cagtttattaacttatatttatgggttcataaaaatagaacatgaatacgtattttaatgaaaaaaatcacacttttataaaatttataatgagcctttttttattgtgctttttacattatcactgttttaaaatgagctgattcaaaagactataaagactccctgaaaaacagtacaggaaactcaagaatttactttcccaaaaacagcttttaagacatgaacatgaactgcctaatgaatctcatagttaggcttgtgaaaaggaccaacttgcacctttcagaggtttctccctctttttaaaaattcccatacagtaaaacctgctgacactttttttttttttttttttacaagacccagggaggggggtggaatcttgccacatggtggggggcggggatttgaaatatttgtgagaatttttatacgctggattcccctctccagtgtttagacaagcaaaaaa

SEQ ID NO: 223173 - DNA, 548 bp, Homo sapiens
gttggcaaccatgtatagggttatttattgatgactttgctcattggcagtataaagggcgtgtcacttgtcattagcagtaacaatttcaccacattatgttctctttttattttctctggtggcaacatgtgtctgaacagggccactggctgtgggtcaagaggtcagtctttgaggttaagagtggatggggtcatttgctattaacctaagattagcagctaaggttttttttttctttctttctttctttcgttttaacagatttcctccatttgtataacatgccaaattaatcttgcccaattttagaagaatttctcctttccaatctgcattttatttgcttagatttatcattaaggtattttttttctattcagatttctttctagcccccatcctagtcctcaaaacaatgttaactttttctaaaatttaaaaatgttcctgtctttaacattcatcttccagtgtacaaatgcagctaatattttctctgctcttgaacttttgagggaaaaacaaatacatggcagaattgt

SEQ ID NO: 223174 - DNA, 512 bp, Homo sapiens
ataaaaacatttatcagatgaaagattaagataatttgctgctagcagatctaccataaaagaatggttagaggaagctctctaaatagaaagaaaacaattaaaaagaaggaatcttgaaacattgggaaagaaaaaaggacatggtatgcaaaaatatgggtaaatacaataggctttccttttcctcttgagttttctaaattatgtttgatggttaaaaaaaaatcattataacactggctgatgtggttctaaatatatgtggaggaaatatctgagccaattataaataggggagggcaaaaacacatctagggagataaggtgtcttgaactagtaaaatattgacacgagaagaccatgaagagttaagtatgtattacgtgatgcctacagcaatcatttaaaaagctatacaaatagatacactaaaaaatactacagataaactgaaatggaaatcttttaaaatgttaaagtaacccacaggaagataaagaaaaaaaag

SEQ ID NO: 223175 - DNA, 451 bp, Homo sapiens
gtcctgtcttgccttttcacatttttctgcttgccttatgttcactggaagatgattaaattatgcacactagattaagtgcagatgtgccttccccagcccactgactcaaatgttaatctcttttggcaaaacccaacagacacacccaggattaatagtttgtgtgcttcagtccaatgaaattgacattcagtattaaccatcacaacaaacgtgcatttacattgcatagtgaatgtccttgaacttgttcagtccagtttcaggtgtcttatttcttgggggtagaataagaaaagcagagagaagtcttcttttcccttggagcactggttctcagatacttttattttctagcctcttatggggtaataataattaaaatggagaaaaataaaataatagtaaaatttgaaacaatgcaaaaaatgtaaaaacgaaattactg

SEQ ID NO: 223176 - DNA, 531 bp, Homo sapiens
tagatgtattcttaaatcccaaatatttatttatgacgacagtgatcagctttggctattttagcacttggctagttacgatttggtgaaaatacatatttgatatataaagtaaaaaaaagaaaatcctgattcacagccacctccttccatgaccaaaagtcagctctcctaatagacctctatgtctcattctgaaatatttgcatgcctagaccaggtctaaaaacacacacatttaatttttccatgtcttactaagttaatatgatacacgctatcagtgcaacttgcttcttttcatttactattgcacatcatttcacatcagtatgtcatatcgacttactctttttcatggccaagtaaggaatgggttcagtaatttatgcacatccatacagtgaaatatttcagccttaacaaccgcgttgtgggtatgtaatgatatgaaacaggtgatcgaaattaccgtacatgcaagaaagtagtcaatagggaggcagtgcagtatttggcaaaaaaaaaaaa

SEQ ID NO: 223177 - DNA, 630 bp, Homo sapiens
ctgacactctctgagcttccctttccttcagccaccacctaggaacgtcacacaggctgacggggttactaaatgagacagtgtgtgtggaaggtggaccatcaatattggcccccagtcctccctccatcacatcaagtatgggttttgctctttgtcaacggtggtactttacacctacagacatacacgtgaggtctcagccttttcatctgagtctactggtagaaggttttctgaatggaaatggacaattcaaagaatcggaagaggagcaagtgtttccaccctctgctgagatttcagtccttcttgcacttaagcactgctctaaatgtgaagcgacaattcctcatctgtggcacgaggaagacaaggcttagtaaacggacttaccctgtgcaaggaatggaactggacgggaacccaggtctgaacgtcgaagtctgtgctctttcctgcctcttgctcccctagggtgggtggaaaagagtcttgggtttacacctgcctggccctctcagagcaccatttgcgagccagttctgccaagtccgactgtacttttcctctaccccttctcctttcagttcccctgtgagggaagcacccacaatcttcctcttccct

SEQ ID NO: 223178 - DNA, 647 bp, Homo sapiens
gctgcagttcacctctttctttgtgcatcttcctctacatgtatggatttttttttagacttctggtttagatgtaaaattgttgcttgacaggacatgcatatttacatttctgaaagttctgataatgacaatttatgcaccaaaaaggttgtatcaagctgtatactagccctaaaatcctgtactgttagtcttgtaatttttttctgtttgcaaacctgatgtaggaaaaatatcctgttttcttttttttcatgtttattagccaactgaatttcttcagtcaatcgtctgtctgactctgtactcatttttctaacgggttactcgtattttccttatggatttttaggagttctttacatgtgctagatattaatcgtttgtgtcatgcagcttcaactgttttttaatcccttgattatgtttctggtctctttttccaaaagaacgttgttctctttatgttgttaaaccttttagtacttttcttcatggcttttgggttttatgtcttatttagtctccctaatattctgttattaaaggataggtgggcatggtggctcacacctggaatcccagcactttgggaggccgaggcgggcagatcacctgaggtcaggagtttgagaccagcctgg

SEQ ID NO: 223179 - DNA, 238 bp, Homo sapiens
acaaaaggggccttacagcctatcgaggccaagtgtaaatgttgccaggtttatttctatgtaactacagtgccttaaaaaaaataactggcctagcaacatgttgtatacatcagcagagacatttaagaggtagcaacagttaccacgaatccaagttttcctttcccttatcttgaataactagagacttttaacagcataaaaaagcccaaatacacacaaagacgtattattc

SEQ ID NO: 223180 - DNA, 720 bp, Homo sapiens
gcagtaggtttatttacaccagcatcaccacaggcatgtgagtaatgctttgtgctacaacatcatgaaagctgtgttactaggctgtagggatttttcagctccatcatagtcttaacgggactgccgtggaatatggggtacgttcttgaccaaaacatccttatgtggcacattactatattagtttatatcatatatgtgtgtatagtttataagttgatacatacttagtttatattatatattttaaagatatatgtgtatattatatatgtatatattttatatatatacatgtgtgcatataagtgtatgtatgtatatgtacgtatgtatgtatgtatgtatgtataaagcctgaccagcaaacttgaaaacattctgtacacagaaacacctagcctggggctgggtgcaatggctcatatctgtaatctctgcactttgggaggctgaggcacgcgaatctcctgaggttgagaccagcctggccaacttggtcaaaccctatctctactaaaaatacaaaaattagccaggcctggtggcaggcacctgtagtcccagctactcaggaggctgaggcaggagaatcgcttgaacctgagaggtggaggttgcagtgagctgagatcatgctattgcactccagcctgcatgacaagagcaaaactctgtctcaaaaaaaaaaaaaaaaagaaaaaagaaaagaaacaa

SEQ ID NO: 223181 - DNA, 825 bp, Homo sapiens
ataaataatcatctgataacagccatgatacaaattagtaagaaagtgtggcaggagcacagcagatgtacaatagggaccctgagccttggggatctaggacatttgagctgaggcctgaaagacaagtaggaagtaaccacatggtgaagttggaggagagctccaggcagagggcacggcatgggcaaaggccctgcggtaggagggaacaagtagatttccaggaagggcacaggggcctgcagggtaatgtaagtgaaatgagaaagctggagatgcagctggagcaggacagtacaggccacagaggctttgcgactttatccctgggcaaaaagaggagatgatgaaggattctgagcacaggacacaagccagtatgtatttagacgcgatcctgccctgtggctgagcctcttctgagaagtgcaggccctgtgtcacgtcaccctgaacctcagtcatcagggttttggatgtgagtttccatatccctcttcctaggccaagctctcaaaggcaaggctgacctctggtcttcagcttcatcctcatcagccaggccagtgcccagcacaaggagctgctccaaaaacatacgtgggttgaaccagtgaccaggacaagacgcttatcagcatttccctgcgaaggagcagggctgcctgtaaagccttccacattctctagaaattacaaagttcaagggttttagtgaggccacgactcagggagcccttgagagccaagctggcatcccactgctgtgcacacccagcctgggcacacagtatgaccctgcccaggcatctgcctgcggcc

SEQ ID NO: 223182 - DNA, 405 bp, Homo sapiens
atgaaacccctgctcttggcagagtgaagagagggccttctttgagtggaaaaacctatccatcatgatggttggttggtcagacatgattccctattactgtttcatgttgcagctaatcttctgtcttctgctcctcatcacattagtgttacgcatggtcttccaaatttggaaacaacattgaacaacttaacttcaggagatgaaagattttcaaacttagtggatatctgcaactttcagaagaagagaacaaagaatgcactcaaagggaaaaggacatgtacttcattaccattgtcttttggaacataataactgactggtttcattcacagaaccatggatctccatgtcatttgggatacaagcagaaaacataaagatacagcaaatttcctg

SEQ ID NO: 223183 - DNA, 414 bp, Homo sapiens
ggcattaagccatccatgagggatccaccccatgatccaatacctcccactaggccccacctccaacactggggattacatcctaacatgagatttggagggggacacacatccaaactacacagtgactaacagcaaagtggtttctgttgagtcattccttcagtaatttctaaaatgctaaaaaaggagaaaagtaaagtgtctgtgcatgagaaactcagaatccagtgattcaggaaaactgtttacagggagtagagcaccatgtctatgatatgactgtggtgatgtcatcccggaagctcccttgacactctccagctctgcccacttaggttaggatggttgagagatacttggcattttgtcctcatgggaattgttcgaacagagatggaatgactgcttgtc

SEQ ID NO: 223184 - DNA, 463 bp, Homo sapiens
gaaaaaaaaaaacaagttataatctaaaatgtgtatacatatgtacattatttggggccaggagcagtggctcatgcctgtaatcccagcactttgggaggctgggtctacacagggtcaggatcataaatatcactcacttttgctcatcttgtcccacaggaaggtcttcaggggcaataacactcatggaactgtcatcttctgtgataacaatgccttcttttggaacaccttctgaaggattttcctgaggctgttttgcagttaatctttcttatttcttttaaataagcaggagtacaatctaaaataatgacaaaaaggatagtatagtgaatacataaaccagtaacatagtcatttattatgattatcaaggattatgtattatacttaattgtatcttctggactttttaaaggctagtagtacaatagtttgtttacatgggcatcaccag

SEQ ID NO: 223185 - DNA, 1024 bp, Homo sapiens
acaaaaatgaacatgagaggtttctgctaagataaaatattggataagggaataatatctttgtttggaactggtaaatattacctactcctggagtaatacatttaaggaaactagagaacagatcagagataatatttaaaagtttaaggaactaacaaatttatagtgacagaaagcagataagtgcttgctggggaaagacgggggcaaggagagacaagaagtagaaattacaaaggggcatgaggaaactattgggtgtgacagatatgttctttttttattatagtgattgtttcacaggtgtttacaagtgtcaaatttatcaaattgtacattttaaatatgtacagtgtatgtcattgcatgtcatttaggtcattgtatgtcattttaatgtatgtcatttataactcaataaagctgttttaaaaaatcaagaggctgggtgtggtgactcacacttgtaatttcaacattttgggaggccaaggcaggaggatcagttgaggccaggagttcaagaccaacctgggcaacacagtgagacccttggaaatagtgagaccctgcaaaggaaagaaggaagggaagaaggaaagaaggagaaaggaaaagagggaaagaaaaaaagaaaagaaagaaactcctggagtaacacatttaaacttaccagttcactgttaaaaaaaaaacttgaaggtttaatcattacagtgacttacagcatatcttactccaaacgtgtgatgttaactatggtccatctatttctagaaatttaaggcaaaggatgattttagtaatgaagtttccaataatgccatcttaaacttgttttaggtttccaaatataaaaatacttcatgaacacagacaggaagggcaataagaattaaacgagataagatacatttgataaatgttagcccagcaactacttttgttgtcactatttctgctactacagttattataatcaaaaacttcattcattcctgagaggtatgagaaaaaaaaa

SEQ ID NO: 223186 - DNA, 546 bp, Homo sapiens
caggctttctgggccctgtcattccttcttctatcttctgggttgagcaacatgcaatctccccttgtgcagaagcccaaatagctactgaaaatgtgtcctctctgactttccccatttcttgaactctgagagactttttctagtatcagttctgaggagcattgctgttttccttcctatcatctggaagacctagactttaaaactcaaaacctgagaaaaacttccttttttttctctcttttgtctggatcatcactaccttgaaatactaaattagcaaagtcctaactagaaactgaattggctaaagagtcaaggagcaacaggtaattccaagaaaaacaacagcaaacttacatcagttaacatttcaaagctattttcctttgcaattttgtgtatctgtttttatggaatgcaagagataataggctaaatgctattttgcatatgtgttacattggatttctcacatattctactacttaactcaagatgttgagtaaataaatgagttaataaactggaatttctatatca

SEQ ID NO: 223187 - DNA, 466 bp, Homo sapiens
gttttgttttatagattcctctggattttctacataaacaatcatgtcatctgcaatgggaacagtttcatttcttcctctacgatctatctgctttttttcctccttgcctcatcacagtagctagaacatccagtactgtgtgaaataacagtggtgatgcaaatatcttttccttgttcccaaactcagagggaaaacattcagtctttcaccattaagtatagtattagctatagggtttttgcagattttttttagcgaattgagggagttcctctctgctcctagtttgcttaggttttgcttcttatgaattgttattggattttgtcaaaagctttttctgcatcaattgatataattatatttttcttctttaacctgttgatatggtagattgtattgatttatttttaaatattggaccagccttatatacctggaataaatcctacttgatcat

SEQ ID NO: 223188 - DNA, 461 bp, Homo sapiens
cggatcccttgacggaaggggagattggctccagcctcagagagggctgcagaaccctggatggatgggaagtctggagtctccaggattcatggatgggaaaccctacttggctgtgcttcctgctaacacgaggccctgcgattgctgagaacaacagccccgagactgcgcggctccgggggaaaaaaacctggccccctttcaagccttgacagaaaacctttcagagccctgaactcccaccagcccgaggacggctccgatagctctgacaaatgagccgggactgtgcccagggctcccaggctgggaggggaccccggctcccttgttccttcctaaggtcggaaaaaaaagcgcgtgtcccttcctccaccacagaggaacagagaagtgtttgcattggtggatttttaaatacttgtttatttttattaaagtgcaattcacatgaaatt

SEQ ID NO: 223189 - DNA, 495 bp, Homo sapiens
agaaatttcaactatagtcaaactatgcaactgacatgacccattacagactgtgaagaataacttcaatttgtacccaaatcaaggaaagcggtgagatttgacaaacatttcctccaaatagtcactccgtgccatttttagtgagtaaacgagatgttcctgaaggcccagaagcaatttgaaatgtgaagaaataagaactgggacctaggtgcaccacggaaaaattaagaaatacaccctggggttcattttcagacgttaaggaaggtaggactgaagaagagaagatgtatcttgcatttttatttattttcaggactcagtttgctgacccatgactgaaaattgggaagtgaagggaggctgaagggttaacagtgacctgcaaggcagacctgcaaccgttgaccaaagtaaactgagcagagtaaataagcactagaagattaaaatcctatgacaggccagacctcctgacactctcaaact

SEQ ID NO: 223190 - DNA, 506 bp, Homo sapiens
cctccaactcctgggctcaagccaaccttccacttcagccaatcaagtagctaggactcccggcatgtgccaccatgcccagataatttttggagtttttttgagacagggtctcactcttgtcacccaggctggagtgcagtggcatgatcttagctcactgcaacccatgcctcccaagctcaaaaaatcctcccatctcagcctcctgagtagctgaaactacagacacatgtcaccatgcctggctaatttttttttttcttttttactggtagagacggggtttcaccatgttgcccaggctggtcttaaactcctgggctcaagtgatccacctgtctcagcctcccaaagtgctgggattacaggtgtgagccatcacacccagccttttcaaatattttgtagagatggggtctcacttcgttgcccaggctgctctcaaactcctgacttcaggtgatactcctacctatatccccctttatactaataatcttata

SEQ ID NO: 223191 - DNA, 414 bp, Homo sapiens
ttttttaaccgactgtcgctctattgccaggctggagtgcagtggcgcgatctcggctcactgcaatctccgcctcccaggttcaagcaattctcctgcctcagcctcctgagtagctgggactacaggtgcaagctgccacacctggctaaattttttagtatttttagtagagatggggtttcaccacgttggccaggaaggtctcgatctcttgacctcatgatctgcccaccttggcctcccaaagtgctgggattaaaggcgcgcccggccaagaatctccatttttaacacactgctggtgattccaatcaggcaagttaaagatataacggtatacaataaagacgaggaaatgaacgtaaatataattatttcaagttagcatcagttgtaaagttgtttcaagaa

SEQ ID NO: 223192 - DNA, 761 bp, Homo sapiens
agagaaaggctaagaggtaacatatataggaaagaggaaagtatagctcaagcataggaaaagtaatcaatagaaactatccataagaaaactcaggtgttggactaactagataaagactttaaatcagctgttataaatatgttccaagaactaaaggaaattatatctaaagaatagaaggacagacataggaatgatgtctaaccaaatagaaaacatcaatagaggtataaattatttaaaaagtgtgaagaaaaatgaagagaatctaaaaagctccatggggtaccatcaagggcaccaacatacacatgatcatagttctaaaaggagatgagggagagaaggggacggaaagaatatttaaagaaataattccagcaaattccaaaatttgatggaaaacaattatacacatcaaacaagttcaatgaactccaagtaggataaactcagcgatccatccctagaaagaccataatcaatctgttgaagacatctttttttttaaaaaaaaagatgcatcacaaataaagtaatcctcaataaaactaatagctgatttctcattataaaccatggagacttcaggcagtgggatggcatactcaaagcgtagaaagaaaatgactgtcaaacaacaattgcatatccagcaaagttatcctccaaaagtgaaggaaaattaagacattcccagataaacagatatggagaggattaatcactagcagacctgctctatgagatatgataaa

SEQ ID NO: 223193 - DNA, 603 bp, Homo sapiens
atctgattcagctgaaaaacaatgcaggtcagtcaagcaagtgacaaggaaataggctgactggtttgaatgaggaaagggtgtcttttctctactctggactattggatgggaaacaacatacatattgcccaatgaaactcttttgccatattttagtttctctaaaagagaacactgtgcaattagtagggcaaactttattattattcttaaaaatcatatatattgaaaaccagcctattggattagtgcctcaccctcatggcctcatttaatcttaattccctccttatggaccctgtctccaaatgtagtcactctaagggtttgggcttcagcatatgaattttgggggaacactattcagttcataacactgctaataagcaagaagctcagaattttagcccaagtagtcacattactagtagatactctctcaacctctagtctctggtgcatcactgagagtagacgagcaaaatgtacccactgtggaatgtcaggagtatatcataagatcaggattttcactgcagtagtagaacaaacaaaagtaatgttaaaattgaggggaatatgtttttagattagccattt

SEQ ID NO: 223194 - DNA, 631 bp, Homo sapiens
atattatagatatataatagatatagatatatataatatagatatagatataatatatatacactcaccctaccactttatacatgtaaatatatatattatacatatatttacctagataaacatttaccttttttaataagaacatttaatgcctagttcaccagctgtgtgacctctggtaagttattcaaccttgctacacatcattaggactattgtgagaatcatgagatgtaattgtacaaatatatactcgataactattagctataataatattttgttttaggggtagagtttgggcaggtataaaacactataacaagctgataagaacctatgttgtaagatgtgcaccttcctgtgtttgttggtattctaataccaaggaagctgttcctactgagacagaaagtcaagaaacttacatcctaatcttacctctactggaaattcacttaatctctctggatcagttatttgctactgattctcagttttcccatttgtaatgagggttggggatgttagtaccagtctctttttggggtgttgtgaggtgaagtgagctaaacggaattagagcccttaggaaaaaaaaatgctaatattaactgaaggaagctgg

SEQ ID NO: 223195 - DNA, 290 bp, Homo sapiens
ccggcccacatctcatctgctaggaacactgaatctggtaccacagcttcttctagttgcctttatatctggtgagtagagttaggctatcacaattgtttctaaaccttctttgtgtcattgctcaccacttaaatcagcaacagaaagatagcttccattatcacttctgctttacaaatctcataagaggctgtctaactagcagaaccttgtttgcatttccaatactaactgtaaaggaaagtctgggaaatgtagcttttttttttttttttggttggggggac

SEQ ID NO: 223196 - DNA, 483 bp, Homo sapiens
ttctgatattcaataattgtttaagtgaattgtggtatatacataccttggaaaaccatgcaaccatcaagatactctgatatattaaatgaataaattacattataaagtagtaagtaccgcatgatctcatttttgttaaaaatgtttgtatatatacatacaaaatagaccagtaggaaatatattttagaaaagtggaattataagtgatttctattttcttcctttccatgtttatattttctaaatttttattttattttattttattttatttttgagacgaagtcttgctctgttgcccaggctggagtacagtggcacaatctcagctcactacaacctctgcctccctggttcaagcaattcttctgtctcagcctcccaagtagctgggactataggcgcatgccaccacacctggctcatttttgtatttttagtagagatggggtttcatcatgttgtccaggctggtct

SEQ ID NO: 223197 - DNA, 421 bp, Homo sapiens
ggtcatttttatgaatatcagtgtgctgtatttgtaacatggtgatacctccaagtgctgtgaagtattcgcatgtttgtttgtttgtttgttttgagacggagtcttgctctgtcgcccaggtggagtgcagtggcgcgatctcggctcactgcaagctccgcctcccgggttcacgccattctcctgcctcagcctccagagtagctgggactacaggtgcccgccaccacgctcggctaatttttttgtatttttagtagagatggggtttcaccgtgttagccgggatggtcccgatctcctgacctcgtgatccacccgtctcagcctcccaaagtgctaggattacaggcgtgagccaccgcgcctggccacatgttcgtttttatagtcattagtcatatcttcaattcacgca

SEQ ID NO: 223198 - DNA, 626 bp, Homo sapiens
tctctgctcaaaaccctgcaacctttcatcatttcaccagaataaaagcaagtccttacaacgggctgcaagtccccatatgatccactcctccccacatacccgttacctctttgacctgatctggtactatcctccctcactcactctgccccagccacagtggccttcttgctctttttcaaacagaccaggcatggtcttggccttagagtctttgcacagacaattccctttactaggtgtcaccatagctaccatcttcatctccttcaaatgttgctttggcattgaggcttaccctcacttccttatttaaaattacaaccagctgggcgtgggtggctcacatctgtaatccccagcaattcttggaggccaaggtgggcagatcccttgagctcaggagttagagaccagcctgggcaacatggcaaaaccccgtctctgtaaaaaatacagaaaaagcttagctgggtaatggtggcacacacctgtagtcccagctatttgggaggctgagacgggagaatcgcttgagcccaggagatcccagctgcggtgagtcaagatcgcaccactgcattaccaggctgggtgacaaagcgggaccctgtatcaaaaaa

SEQ ID NO: 223199 - DNA, 449 bp, Homo sapiens
ctaaataggtagtagtaaagctactctattaaattacacagtcacatgcaatgtatttatacaaataaacataccatatatttctatctcccagactcagaattgacagacactattttggcttctttaattaaaaaaaaaacactaatatttgaattactagcaatgtcatattataatatgaactcaaattgtacactttggccagggtcaccaaaatgaataatttcaaacaccaacaatgacccagcaattcatcctcaagggaaacatgtgtctgcacaaaaacttaaacatgaatatttatagaagcattattcatcatagccaaggagttggaacaacccaactgtgtaatgtggtatgtccatacagtgaaatactatttgacaataaaaatgaataaagctctaatacgtggcaaactgtagaaaaactgcaacagtcat

SEQ ID NO: 223200 - DNA, 332 bp, Homo sapiens
tcatgcccttctcccccatccttttccttctgctttccttcacccatagaaagtaccttggaatagtatagtcagtccttgcatgtgcacaagctatcatttcagtaaaggtatacatggagtaaaaatcatatgaaggatcagattcaacttatattttctattttttcttcttcctctcccttcccccaccttctgctgggcagaattatatcttaatcaaatgtgtatcctgtgtcacatatggaaatgtgcaacatatggtatttgttaatgtttgttaattacatttgcttttttattgcagagcaaaaataaaattagaagcaata

SEQ ID NO: 223201 - DNA, 239 bp, Homo sapiens
aagagggagctaagcctggagagctgggttaagtcagacagacccaaaatctcttacactgagtctcaacttattgtcccttgtgactccaaggtcaacttcccttccctgttggctgaggatccaggtgtggagccagtcagccaagatgggccctggagggcctctcctcacccagggaaggggagtggtttaaggagtttggctgtataatcaatcagacctgagttcaagtcctt

SEQ ID NO: 223202 - DNA, 306 bp, Homo sapiens
cctttcctgatttctgctcctcacccacgaccacttgaccactcctcctgtttctcactcacggcacccctatgcacatacctatgaccacagctatcggaagggctagtgttgcctcaggattaagctgtgcaaccttgggcaagttacctctgtgtatcttggtttttgcattttaaatggcagtaataatagggtggtgaggagtgagtgtgaaggacttagaacactataggacaaggtaactatttagtaaatatggcagtcctgtgtaggacagactctctttgactccctaggatttac

SEQ ID NO: 223203 - DNA, 541 bp, Homo sapiens
ggctaaccatgcaaaggtcagaaggtagagtcttgccagaaggtacagcaaggactagaaagaacttgcatgttgtagaaaccaaaagatagccagtgcggctgaaacatgtggcaaagagtggaaagagattaggctgggtgttctaagacactttctgtttttagtgtggatattgagatgtaggtgatcacttctacctgtttcgtactcttcataaaggttcttccattacagaatctctaagactctatatacttatgtacctgccctacccagcaatttggcaagagtacaaaggaaataaggtatcccaatttatctaatgaatgagatcctttcctcttccatgcacttgtgccttttgttccctgtactaacacttacttatataatgctatattctggagtaatggttacaagtactgtttagtgctctgtgcattctcatttgtcctccaacagtaggtactactatcctcatttatggatgggaagattgaggctccgagaggttaaggatcatgctctagagggatgg

SEQ ID NO: 223204 - DNA, 486 bp, Homo sapiens
cttttagatgcgattgtaaatggaattgctttcttaatttcattttctgattgttcgttgctggtacagtagtcccttcttatccacagtattgccttacgtggttttacttacctgcgtcacccgtggtccaaaaatattgaatggaagattatataaataaacatttcatgagttttaaattgcaaacaggtctgaataacatgataaaaatctcacggcctcctgctccgtcctacccaggacacgaatcatccctttgtccaacatattcatgctgtatgtgctccccacccgctagttacatactagccatctcagttatcagatcagttgttggagtattgcagtgcttgtgttcaagtaacctttattttatttaaaatggcaccaaagagcaagaatagtgatgctggcagttcacatatgccagagagaagccatatagtgcttcctttaagtgaagaggtgagtttttgacttagg

SEQ ID NO: 223205 - DNA, 442 bp, Homo sapiens
tctatcagactaactggggatttttaaaaatacatatagcaaaaatattacaggtcaggagacaatagaatgatatattcaaagtgattaaaaaaaaaactgtcaacccagaatacaatacccagcaaagttgtccttcataaatgaaagaaaaataaaatctttcccaaacaagcagaaactgagggaattcatcactgctagaccagacctacaagaaatgatcaagggcattctatacctggaaacaaaagaatgatatctaccatcatgaaaacacatgaaagtataaaactcactggtaaagcaaacccacaaataaggaagagaaagaacccaaatgttatcactacagagaaacaccaaaccacaatgataaacaacaaaagagaaagaaagaaaggaaaaaagaaaggaaaaagatagaaaacaaccagaagat

SEQ ID NO: 223206 - DNA, 391 bp, Homo sapiens
tgtttatcattccctttcccctttcagaggacattttcacagagattcatgaaataaaagtttggttaatgacagaagtgggaaaccttagtaggatggaagaaaagaaagaaagactgaggcttttgtgccatggtaagatggtaaaacaataaaaataacatctgcattttattgagaacatactctgtgtgtacaggcactgtgtttaagccgtttccatgcaacaagcttaatagttggagaatcttgctcataagcacctaccctgcacagccagaaccactatggataacttcgacaaacatctcctgagatttttgagaattcccgtttgcaaagtctgctgaagttgttcccataaactgcaataaagtgtaatttcacgaga

SEQ ID NO: 223207 - DNA, 406 bp, Homo sapiens
gtcccctctggtttggcatgccaagagcagcttgcctatggcccagctgtggtgtctgggagccctgattcccagaagcccacatgagcctgtgtcagccgagcacacgtgtgacattcatgtttaagaggaagcatggtctttaaaaatgtctaggtacaaagaagagccacccatgggttctgctggcacaggaagcacagggtctttattagttctaatgttctaagataaacagggcagtaagaagcagttgccagcactgtgacatcggaaacatcacctccatcctcagcacctcggttcccacatcgatgcaaacttagcagtaaggtctaaccagcccccctttctaagaatgttgtgagattagaggaggctcaggaagctgagagtgaaattcata

SEQ ID NO: 223208 - DNA, 406 bp, Homo sapiens
cctcagaggattctaccctgaatcacaccctcgcttggcttcttgcctttccctgttctacttcttgccacgctgtaagcagtttttcttggaagcccttccttaagaaacccccgcttgtttgtctgggcgctatggctcatgcctataatcccagcactttgggaggctgaggcaggcagatcacctgaggtcaggagttctagaccagcctggccagcatggcaaaatgctgtctgtactaaaaatagaaaaattagctgggcgtggtagcaggcacctgtaatcccaaccactagggtggctgaggtaggagaattgcttgaacccaggggttggagattgtagtgagctgagatcttgcccactgcactccagcctgggcgacagagcaacactctgtctc

SEQ ID NO: 223209 - DNA, 205 bp, Homo sapiens
gtgttgtttttgcttagcattatgtctgtaaaatttgtctatattgttagctgcagtttgtcattctcattctcattgctgtgtggttctctgttgtttaaaagtaccagtggtaaaattatcatttatgtggtttatctctgatggacattagaggtatggtggtaccactgataggcaccaaaatcaagtttaataaccactg

SEQ ID NO: 223210 - DNA, 297 bp, Homo sapiens
cactccctctcactcttccatcctcatccccacctccgccccagctccatggtccagagagatttcacgcttgcagaggcatcagcacggctgccttgaaggacaggctgcagcccgtggtttgagatcaggccttttctctgtggggtgttcagggcctacagggccttattcatccacaacggtggccttagcctcctttatctgagggccccagagtccccttgaaaggtaagctcctgcagaccgtttgcaatcaccactaggtggcgcctcagccaaagggaggagcggccg

SEQ ID NO: 223211 - DNA, 515 bp, Homo sapiens
agtccttgctgagagcttttaggagggagtactctctaatgaataatactaataaaaataataacaataatagatccttactatgccagacctattctaagacttttgcatttagttctcacaaaaaatcctaatattactattcagtttttacttatctttctttccttttattatcttatcctgtatctatatgcaagtagtttgttggtcagcattgaacaaactatttttggtccccaaaacactttgctcacccaagagtcttcttttagtcacagaccactctgaactactgaatctagtttcatcgtcatgttatagttagggctgaagaattcctatgtagtctactcactaaggggtgtcctacctctccttccaaattgctgccttcactgcaatttctggttaggttttcagcagcttcctctgatcagcctcctttttcctgctcccaccaagaagaactcttcccattccagacacagccttgtgttttactgactgcaaga

SEQ ID NO: 223212 - DNA, 298 bp, Homo sapiens
tctccctccctccctccctccctcctctctctctctccctcttgaaagggtaaatattgattggctggctttacattttatgctccatgccatatttccttccctccctcacttcatcgttgatttttctcttgccctcctgtgatgtttgagtgtagtaaaaccataataagccatttttggaaaggcggtggttacactctttattaaaaactgacatctgttgggagagcaattagaggcatcagaaggcggggttgttgcatgtgatttgggggaataaaactttggaaaatta

SEQ ID NO: 223213 - DNA, 329 bp, Homo sapiens
tgtcctctctaatgttctacctttcagtttctaaagtgagtcttcctccctctcctacaaaacttttcaattttttgatgtaactcatctacaaatactgtttcttaccccagttgacttgcctttgtcagatttcttcttgttccacactatagcaatcaatttctcttcttccttacaagaaagggaacgagaaattgtagcaacctctcaaggattatatgcagctagttagttttctgcctgtgaaattaggtctggctcctaaataattttaaagaaccatcagcacttctaactctctggacaggtgcctctttgtccaagct

SEQ ID NO: 223214 - DNA, 541 bp, Homo sapiens
gtctacatgatgtttggtgaacattcttgggttatttgtggttaacggaagtaaattctgtcttcacagcatttgtcccaaagtttgggacctaaaatttatccatctattcatccatccactttttaaatatatgtggttaataatacattttaggctgggtttggggctcccgcctgtaatcccagcactttgggaagctgaggaaggtggatcacatgaggtcaggggttcgagaccagcctggccaacatggtgaaaccctgtctctactaaaaatacaaaaaattagccgggtgtggtggtgggagcctgtaatcccagctacttgggaggctgaggcagtaaaattgcttgaaccgggaaagcagaggttgcagtgagtcgagatcgcgccactgcacccaacagcctgggtgacagagcgtgactctgtcttaaaaaataaataggctgggtgcagtggctcacgcctgtgatcccagcactttgggaggctgaggcgggcagatcacgaagtcaggagatcgagaccatcctg

SEQ ID NO: 223215 - DNA, 478 bp, Homo sapiens
accccggaaaatgcccggcggctttccgcgcctttttcctgtggggttccaacgcgacccccggcccaggttttcaaccttgtacagatatacagatttccctgctgaaatcttgaagatcaccttttcttcattgtttgggactaggtcctaaatcgaaaaatcgcggtcttgggttccaaaagaatttggatttggttcattgagagggaaaattgcctgtccagtgatctccgaagccattcacaaagctgcgtgagtagccagtgaacacgagaaaaatgctcaaccagcctcatacctaagtaatgcctgtggtgcgagcgccacggcccgcgcctggagttccatctactcccgaggcctaggcaggaggatcgctggagcccaggagtttgagaccagcctgggcaacatagcaagaccttgtctccaaaaaaaaaatttttttaataaagaaatgcctgttacaatgaca

SEQ ID NO: 223216 - DNA, 518 bp, Homo sapiens
ctgtgctcccattttacagctgagggcaagggcactgtgaggtgagggagaatctggcccatctgcagcccaggcccccgggggcgcgcgccgctctttaggaaggagcagctttgtttcccaccagccctgcactgtggcgagcgggccggggctgccgggcgacgcccggtcgccgtcgccgccgccgccagtgatccatagcgtgagcaggacgaccagcgccccggtgcccagcgcccccacgaagccggtgaggaggccgagcgccagcggccccgcccaacccatggggctccgctcgtacaggggctgcggcaggcgctccacgatcagctgcagggcgtcccagtccggcgcggggaccgcggcgcgccgggggcgcggggccggggcaaagggcacgcgggcggcggcgccgggccgcggcaggaagcgctgcccgaacttgcgcagctgcagcgtcgcctgctggtggaggttcttgcccagctccctggccacgtccgggcggccgc

SEQ ID NO: 223217 - DNA, 441 bp, Homo sapiens
ccacaacctttttctatcgcactcctcctccccctgaccaagcaaccctgacatctaaacctgtcctttgatgccacccagcccggaaggagatggctggagtctagaaacctagtgcaagattaaaatctgctctgccacaggtttatactgtgatcttggggaagccactctctccctctgggcctcagcttccccacatgtcagaagggggatgggataggatgattgctgaaagccctcccaactctgacccatttaacttaagttagatagtcatgagttcaaatctgacctctgaaagtcactagctgtgtaccattgggcaaaccacttcacctctctgagctttaatttggtcatctataaaacagagaaaataatatacttcatagagtaattgggagataaagtatataaagcattaaaattgtacatagc

SEQ ID NO: 223218 - DNA, 725 bp, Homo sapiens
tgtgtacttcccattttgttacacacactaatattgaaagaacatgcattcaaaaggggagttttcataaaatgaataattttatcgcttcatcaagaatattcttaaactagcatttaattttttttttttaacttcaagcacgtggtagtgaagaatacaatcatatcagtacagtttgtttccatggccttcgggtccataagttttacccaccactgtttttgcaccatcatcgtaaatgtcaacatagtaaaaaagtcaagtaacatctcaatattatgataaaaatagttttgacctcatggacaccttgaaatggtctctgggccctgaggggtctatttactgtgttaagaaacactgatataagtctagccgattcaagtaaatttaaagaattagaaaataacaaactcctaagacaggggtaaagttttgttttgatattccctatcacagtgctacttacaaataggtactaaaacatattcttttctgcttagtgataaaaattggtaattattatataaaatatcactaaaatgatcagtttatttcacaaatctaaggtactactaacactgcaataaccaaaatagatgtaaaaataactaataagctagaatacaatcacgctcatgcctagtatccagaaggtcaacaataaaaaagacaacttaaggaataaatccttaaccatcataacctcagaaacgatactg

SEQ ID NO: 223219 - DNA, 476 bp, Homo sapiens
aaattttgtccaagttatcaattttatctaatggaatttaactaaattagaaagaaacctaagtccttcagtcactaacccatagatttaatacttgggactcagacatatgaacattgttgttcttgatggccatattttctgggtcatctcccagaaatagcatattcttatgctaatttgagtgctactaaacccagaagggcccacattcaccccacccctcattcccccatggttcagtaggcctcaagtctcaattttccaattatctaataaattgaaggcttccattgggagtaggatgaggatggaatcttaaggaaattgaaagtgccatttcagagtcaatatagttttagtaggttttagggatgaacctggtacctaaccactaaatataaggcttttaaaggaatctatgtccatgtccctaaaaaaacaatttaaaacccagtctctactgaaaatagtaa

SEQ ID NO: 223220 - DNA, 472 bp, Homo sapiens
ttctcctggtgcatttataacaggtttctttaaaatgtgcactttcccgagagtatcaggaaacaatttttgttaaaaaattaaaaagaaaaaagtccctgccggaaaccttgtcatatttggagactcaatcgtagagaaagaataaggagaaacatgtttaattggatgagtattttctactttagtgggaagtttttctctacttaactaacacttcgtttcccagcgtgatgaccactagcactccccatcccgtcctctctggccctcaggccctggggtagccccatggcctgtctttccagaaattatggaatttgaagagaacctggggtcatggaagatgagggacttcaccggggcaggctgtgcttgcatccaggttgtaatagctgttagctttgtactttggacacagatgtaattatctaacatatgcaacagactttcaaaagtactacttacacca

SEQ ID NO: 223221 - DNA, 669 bp, Homo sapiens
gctgcagtgagccaagattgtgccactacacttcagcctgggcaacagagtgagactctgtctaaaaaaaaaaaaaaaacactaagcatgtagtttctatataactagaagcataggatattctgatctgcaatccatcaatcagtgccaattatgcacttacagatctatagtcaaaaggcctaatttattgctatggactaaattgagtccctttataaatttatatgttgaagccttaaccccaaagtgatagtatgtgtatatggggcctttgagaagtgattaagcctagatgaggtcataaggatggagccctcatgatggtactagtgaccttataagaaaagacacttagtgggcttgctccctccccacacacaccatgtaaggacacagtgagagggtggctatctacaagtcaggaagacagtcctcagcagaatcctacagtgctaacaccctgatctcggacttccattctcaatctataagaaaataaatctctgttatttaaggcactcagtccttgtatttttgttatggtgatccagactgtataatacattcattttttaaaaaatgtactaaatactccccaaagtgagaggtattgctttgggtgctattttcagaaatgtggagtaagatttggaggtggatagggaa

SEQ ID NO: 223222 - DNA, 333 bp, Homo sapiens
aaaggaatgaatgagggggatgggggaactgcaagactaagtgaaggagtttggattttattctgagtgtgaaaaccctttggaaagttttaggccaggagggacatgatccccaagcaccggtctctgtgatcagaggatgtgggggtgtgaccaagggcaggtggtcagcagaaaacttcaggttctgtctctttcaaccctaattcctggtctggtgcagtggcatatgcctgtagtcccagcattttgggaagccaaggcaggcagattgcttgagcttaggagtttgagaccagcctgggccacatggtgaacctcgtctctacaaaa

SEQ ID NO: 223223 - DNA, 334 bp, Homo sapiens
tcaatattatttggctgttttctcagtctcatgtctttctgacgctccacttacacacacaatgtttgatgttgtctatcagttgacatctgctcttttctgtttgtctacttttttacttacaaatttggtgtcagtttggatattttttatggacctatgccaaaggttacacaagcacacacccacagtttgctttttaagtttcctgttgagtaattctaacaaatatgtcattttaataacataattttatttctggtttaaaaataactatttaataaataatatataaattcataattatacataataaaaaattttggtgccgcat

SEQ ID NO: 223224 - DNA, 565 bp, Homo sapiens
acagacaaacccagtcgaatttacagatgcttgtggaaaggttagagaatttgaaagaaataaaaaagagttgggagtgaatatgtgtgtcttactgcttcggttttgtttcctagcatttattggttcaaatagatttgttgctttgctgactctctgctatcttcataaaagataagaaaacctctcagcgtccctctatagtgtgagaaacatgatttataataacattatttcataattgaaagtattgtttcgttgtctgggaaaatgagcgcatcagaattaacttgtagttttagaggccagtgggttgctataacaaccagaaaaacaatggtgtaataacacctctccctgaaagctggagaactcactaaatgacgagagctacagatgcaagcgtttgtcatatgaattcaaacaagaaccaaatacattcatttatttctttcatgagcactgactccatgcctggcactatgctaggaactggtgaaatagacgtggtccctcctgtgatggagtgaacaatctaatggagaagaccgataataaacagttt

SEQ ID NO: 223225 - DNA, 843 bp, Homo sapiens
gcaggttttctttcctttgttctaccacagttctctgatgtggaaagttccagatgagaggaggatctggggctttgtgcaagagtatgtcgggaattgcagtggggagcagctgtaaggagagaattccttgggtcagcagactgaggtagcagtttcaggtaacccttactcataaggaaaacaatgtttaccctttctttgtacaattcaagttggatcatattattcctctgctgaaaactatttagagaccttccatttcagtctgaatcaaaaccaccatcctcactgtggccaacacagcccaaaagattggcatctccatttcttcccagactttcctctcactaccttcctggttgctccttcggctccagccacgctgcctccttgctgttaggcacactccaagcccggtcctacctcagggccatccatctccctcctctgcctagccactcttgcccctgattttcttgcccacatgtcacccctcagtgaggcctcagcttcttctccagaggtgtagggccccagcactgcctgttatctttccccacttgacttgcatctctgggctctgttacctccatttgtgaaatggggttcatagttcctgcctttaggattattgaggggattagatgaatgaatacatgtaaagtacttagcataacgccagacacaaaattagccctcagtccatcagatgtcactgtctcagtgctgctgctttgggaaacgtcatgggatgctttatgtttctatggtgttgctgctgtggtcccagagggacacttaacattagatcctggccttattttcctttcctgcctcttt

SEQ ID NO: 223226 - DNA, 542 bp, Homo sapiens
attagatgccattttagttgagcctcaccataggtgctgtggtatgaagtgaagtatgtgggctatagagacgacctaggttcaggcctgccacctactgcctctgattagccatatagttttaatcctcttttagctttagcatcttcatctttggaaatgttacttacctgttagcaccattgaccactgtgaagatttaaaatggaatgtgttatgtatctcctatttttaaggctatttgtagtaaatatgttaagtgtgggctaatctttgagtttagggagaccccattaatataaattttttttttttttttttttttgagccggagtcttgctttgttacccaggcgggagtgcagtggcgcgatcttggttcattgcaagctccacctcccaggttcatgccattctcctgcctcaacctcccgagtagctgggactacaggtgcccgccaccatgcctggctaatttttttatagtttttagtagagatgggttttcaccgtattagccaggatctttggtgccttctttgc

SEQ ID NO: 223227 - DNA, 734 bp, Homo sapiens
aatgtatcctaaatgaaaaaagcaaaatgatatatgggtgaacatgtttgttgcatttgtctataatggcaaatcttggaaacaaactaattgtgcaataatgagagaatataaattgtgttacacgaacatgagaatataaagtagccataaaatgttaggtaggaagacatgggaaattcctaacaggatattaagaattcacaccactgaaatgctatgaagggattacacaatttaaattttcattttctttgtgtagtgacattaagggtaattttttaaattaaattttgtccttgacagttattttgtcttttcaattactcccaatctcttgaagaaacaacttaatcttttatctaactgtggtattgtctatcatcagtatgtaatgatagtgactattatagtgacctaaatatgtataatgtgcatgtaaatatgtaaataatatatactatatgtgtgtatatataatggtaacatgtatatatattatatatacacacaaagtattggttcatcatttattttatagctattataaagcatttgctatgacctaaaaggccacataatattcttatttaagattttattacgagctgtagagccagatagttctcttttgtttcagtctagttccgtaaccacctattttggctgcctctttggaaaaccaatgtaaagttacaattatgcagaagacacttgggacagtcgttgagagc

SEQ ID NO: 223228 - DNA, 498 bp, Homo sapiens
tatttgttgtttctttttttctttttcaaatgtgtatgtgtgtgtgtgtgtgtgtgtgtgtatatatatatacacacacacatatatatttgagacagggtttccatatgttgcccaggctggtcttcaacttctgggctcaagtgatcctcccacctgggcctcccaaagtgttgggattgcaggtgtgaaccaccactcccagcctgttgtttcttaagcttctaaccaccaatctcccctttcactctacacgtgccctaactaatctcagctactcctgagcttcaacttctacctgcacactgataatctcagtctgtctctctcttgcttgcctatttctcctgaaggccagtccagtacatccaaaaacttactgaaaatttccaccgggattatctaaaagcaccctaaacatctaaaatggaatctgttatctttgttacatcataatctcacaaattcttctaaatttcctattcacaaatagcagca

SEQ ID NO: 223229 - DNA, 1017 bp, Homo sapiens
aatagtatataaatgtataaagatcaatttctgtatattctaataggaattgtatataagcaaaaatgaattttagaaattatcctattattcatgtaattatgtcattcatgttatttaaaggaaaccacaatgcagacaggttaagtacctagtgtgaaggtatgtaaccaattaatggagctgtgcgacatacatctgagtaataaagactacagagaaagtatcttgttaggtactatctgatacaaagtttagaaacatgtcaaacaattctatgtatagttggtgaaagtgtaataacatggctgagacttaataccagatgaagttcagtggtttcagggggaggaaataatttttaaaacgatgtcgataacacttcacatttaaaatcatcataataattctaattctagaattgtgtctaattctaatactgtttctagctttgcttgaataaacagaaatgtagtagggaagagacagaatgtttagcttgcagtatctaattactcatttgggtatctgggaagatagctctccatggccccactgtcactgacctataatgcttctcctgacgtcttcggtaaaatccaacagattacaaagaaactggaatgccttgaagaaatagagctttttgtgtgatgtcagattcaatagacctctaatccttagtaaaacagtacaaaacagtagaataatttttagtgttttctaatatcaactgaggttttatttgggagattaaccagaggtttgcacaaaaacaaaagtgaagaccattagtctttaaagaaactaagactctaggtttggatcccatttgtggagccctacattccaagtcatctaatgttcttgtctagttagcttgtaaaagtctatacaatggaggaaaaccccttttttccccttagtataagtgtattatatgttgatagaaaggatagaaagttaaataacagttcaataaatgtacttctaaatgaaatttaaaagtactttaaa

SEQ ID NO: 223230 - DNA, 617 bp, Homo sapiens
ctaccagttgcctcactcctcctccattttcacatcctttaaaaaggcaggggttttattgtggtggttgtttttgccttttgcctggtcaagtaatctgtctcagagaccagaaatcacctttcctagtagttacattctcctcctccatacaggtaagcattcagctccttagtagaggagcctgaatttttttttgttttgttttgctgtagttgcttgttgtgatttttcaaattaggaaaatgttttcatgtgttctgatgaaactgtattgtgaaacacattgtatttaacataccaagtagtagtaagaataaaggacaactaaaaagcttgaaaatatggatttcagggtctcagtcccagaaagtcgaactgtgtgggtgtgggacaagcaccaggaatctgtaactgagtgcacgtggttttcaccacagtaaaatacgttgatgtacggtaatcaactcacaatattgacctcctaggatatcacctcctaaaggatacagcttttgttacaaaataacatgatatatcagcattaagtataaaggataaatgtattcaatcttaaaaatccacaatatcccatattctaagtcacatacttcaca

SEQ ID NO: 223231 - DNA, 417 bp, Homo sapiens
aacatcctggcttggcaaataatgtatttgatgatgctcacgatggcaaatttgggaacttggaaaggggacatgccttgatttcctctgactctgtaatgagccagcccctttcagctgcccctgggaacagtcaacgattaagtgccaggaagacaaggcacgaagaaccgggaagctatgggaagtagagcgccggcatctgtgcatgtagagggaaggaactcaactctacacccccagcaggcctctaagcccagggatgtgggtctacctgcatgtcccctcctggagggccagccccgccaagcatgacacaaccctctgcctcggatgttgctcctggggttcccctgcttaatggcacagcctgaaactttgtgctccttctacagcgtccccgccccagagtggaag

SEQ ID NO: 223232 - DNA, 674 bp, Homo sapiens
caattcaagatgagatttgggtggggacacagcgaaaccatatcaaaaaataactatctttttaaaaaataaggtgacaaaagtacctcccatgcccagatgtttgggggctgtcgtgtgagcctctggaaccataaatactcagcagcagtgctgcgcggccctcactggggacactttggccctgccggagaagggcctgaactgcacacacagcccatacattcagctcctctcacctgatctaaagatggcaaggaagacaaaaatagcctaccgagaaaattgcccttggctgattttaaaggaaaacgcctgtaactgctcagaaagcatagtgtacatatttttatatataaatcccccaccttaatacatatgtgcaaacatatcctgtgtacagtagctttcagtaagaatttaagtataatttatagtactatttaattttattgcctatttttgactgtttatagattaattaagtttatatgatgggaccccactcactgtttaggaatataacattcatttcattgaagtttatcatttattcagatgtagcaccattgacatgaatctgatcttcttaattaccagagatattccaggtggtttcgtatataatcacaatcagctgtctgttatctaggggcaggttgtcctctctgagg

SEQ ID NO: 223233 - DNA, 518 bp, Homo sapiens
tatggcgatggtgacaaggacgttgactctctacttgggattcaagaagcctggtcacatctggaaaggtaggtcctgtccaggttgacaatctaggaagggaagaggagttcatgcttcatgtggtacacctccaactctcctctgaaggaaagaagtaaattgttataacaaagaacaccagcgaagtcttgtcaacatcactttctgatggcaaagcccggtaaagttgaatacatggtaccttccaatattaatggctacaattgacagagcaattactatgacccagctataacagagatgcacacatattgactcactgtaccctcacacacaatctctgcaaggtagatgccatcatcatcccaattttaagatgaaggacatgaggtgcaggtaggaagtggcagtgctggcatttgaaccttggtaatatatctcaagtctctgtgctctgcatcactggactatgttgacctttatatttgttactaaattttatctcaattggtaaa

SEQ ID NO: 223234 - DNA, 441 bp, Homo sapiens
ctttagattcaaagacacaaataatagagtgaaagtgaaaagatataccatgcaatcaagaatcacaagagagcaggaatagctatatgaacaacagtcaacatggcctttttccccaagttcttcctgcatacatttaactcagcatagactttaatagtagtattaatattagaaacataaaggaacattttatgatgataatggctatatcaatacattatgaagatttagccattataaatatatacactgctaacattagtctcaaaaacagaattgaaaggaaaaatatacaattgaaaatccatgataggcccagtacagtggctcaacgcctgtaatccccgcactttgggaggccgaggcaggcagatcacttgaggtgaggagttcgagaccagcctagccaacataatgaaatgctgtctctactaaaaa

SEQ ID NO: 223235 - DNA, 360 bp, Homo sapiens
gaagagaacagcagatgcaaaggccctgtggcagaaacaatcttggtatgctggaggaataggaaggcagccagtgcagctggagcaggataggttaagggaggatcaaggtgatgagggcctggaaagaggggctggggtcgaatcaccagatcctgttggttgcaatggaagagcctggagtttattctcagagcagtgagaagccactggaaagttgtttttttgtttttctgtttttgagacagagtctagctctgtcacccaggcagactgcagtggtgcaatcttggctcactgcaacctctgcctcccaggttcaagcgattctcccgcctcaggctccccagtagctgggat

SEQ ID NO: 223236 - DNA, 278 bp, Homo sapiens
gaagagaacagcagatgcaaaggccctgtggcagaaacaatcttggtatgctggaggaataggaaggcagccagtgcagctggagcaggataggttaagggaggatcaaggtgatgagggcctggaaagaggggctggggtcgaatcaccagatcctgttggttgcaatggaagagcctggagtttgagacagcctgggcaacatagtagctcgtaagctgtcatcctggagggtgagctggaaaggtcaccgcaaaaggaaaaggcaccgcaaaagc

SEQ ID NO: 223237 - DNA, 570 bp, Homo sapiens
tgtaactagtttagtacatcagattgattgcagctattttctgaaatagtttctgcctttacaactcagttgtttgaagggtttttgttttggtgggtgactgagtcacatatattgagaggtatcctgtttgtacgttttctttgtaattataaagtctttaggcagtttatttctgtttattaaaataaatcagaagaaaatgtgtcatagtttactatatgttatatgaagagaaagttcttttggggatcatagttttatcatagtaataaaaaattatcagcagtaaaaaagatagtcttatctcacttttattatagtttatagcattacgacatactgttagtttttttagtaggtaaatactacatagattgctttaacatatgctttgcaattgttgaaatactgctcatttaagttccttcttagatgtgattcagaagtgtactttaatgtatttaagttatattttcctagttcagttatattgagctttttttttttttaaactgtcaaggcaatttaaaatactcttgccttcagtgacttgaaattgaactctgc

SEQ ID NO: 223238 - DNA, 505 bp, Homo sapiens
agcagcagcaggtcttgcggcagcaggtgcatcagcagcaggatctggcggtacagctcattctggctcagcagcaatatgccctgcagctcccagggcccctggggcggcactctgcctgccagcagcccccgcactgcacaggctgggggcggagggtccattatgaggaaggagccgttcccttcaccactgcacacacatcccacctcggcctccagaagtgctgggatcacaggcatgaggcaccgcgcccagcccccaaagcttcttaagctgataagcaacttcagcaaagtctcaagttacaaaattaatgtgcaaaaattgttatagcatttctatacaccaacaacaatcgagctgagagccagatcatgagtgagctcccactcacaattgctacaagaagaataaggtacctggcaattcaggtaacaagggaagtgaaggacctttacaaagagaacaacaaaccactgctcaaagaaatcagagaggatac

SEQ ID NO: 223239 - DNA, 356 bp, Homo sapiens
gaagttcagcttctcagcctggtcagtagatcttattagtatttatgaagtaatttgaattttaaaaattcccagccaggtgcagtggttcatgcccgtaatgccagcagtgtgggaggctggggcaggctgatcacttgaggtcaggagtttgagaccagcctgcccagcatagtgaaaccccaccactactaaaaatacacaaaatagcttggcgtggtggcaggtgcctgtaaccccagctacttgggaggctgaggcaggagaatcgcttgatccagggaggcagaagttgcagcgagtcaaaatcatgccattgcactccagcctgggtgacacagcaagactccgtctca

SEQ ID NO: 223240 - DNA, 577 bp, Homo sapiens
cagaagtccatcttcaggcaagtccaagtgaaaccaccgcacacaagcctgtgtgtttatgaggatgtgcacatatgtcagtcaagccatgctcactctcagctcagtctcagcaatgaggttgcctcatctgtcgttatacacttagaattgtccacaccccggagtgaccctaatggatcccaatccctgtctcagtcccactgcacaaaagttacaaagggagaaaaataatttattaaacaaaatgtacatgagtccattaagcaggctttccttcagatccaagtgcaaagaagacattggaggttctctggaagctctatggggaattttgtctgttacttcagagacagttgccatggcaactacatttccaaatgcatcttagacaaggcttctctaaagctgtgttacctgatgactcacttcagtacaagcagcaagcaaaaaaaaaacctatctgaaaaaattttttcttcttgtatctatttcatacttaaacgatatattatacatgttacattacagagcatgtgaacatttacatacaataaaatatctttacatatatgtc

SEQ ID NO: 223241 - DNA, 337 bp, Homo sapiens
ctgtatgaggattaatgaaattatgtcccttataaaacatttgagttttttttttggtagaatgccagtatgtgagaataaaggaggatattcaccagtgtcttctaacatttaaaatgttaggagaagcagatcatatttgaaaatgaaatttagtctgtggttaatagtttatttcctcttaaaattgttatcaacttccataaatgtaaattatatatttttattttcatattttttgatagtcaatacttgtttccaacatggacaatattaaactgtaaagtttctgaagtactccaggtttctcaaatactcttatttccaggtaagaata

SEQ ID NO: 223242 - DNA, 437 bp, Homo sapiens
tttgatgatggtagaaaaaaatacttacctcacatgtaagtaaattaaaccaaagtacattaagtagtttattctgtacttgtaaacaaattgtccttagaaaaacagtatatatagggtttaatataaatgaaagtaacattttaagtgaaaaagtagcttggcaagtaacttgcttttaaaataggtgattcaaatcactgtgtactattccaacaaatgtaactataatattctcaaatgtgatttacaatatttaaacataggaccgggataaagaattgaggaaaattggtttttttgtctgttttgttatcaaaaactcccaatcgaaaaaaatgttacatttcagtatgtgccaacaattctaaaatacatactaaagtcaagtcttgtttcttatacaatgccaaaaaataataataaataaaaagaga

SEQ ID NO: 223243 - DNA, 233 bp, Homo sapiens
ataattgtttttaaacatagttctgtccaaacaggagatgtctgcgactctactctagcccatatacctaggtaaagctggctcggggggcaagtggtcagcaatttgagagtcagaaaatccttcagaaagataaggctttcctacattcatcattccgaggttagtttaaggataagtataatgtataaaaacaacaacaacagcaacaacaaaaaaacagaagacttcaa

SEQ ID NO: 223244 - DNA, 398 bp, Homo sapiens
cagtaaaaatactaaaagggattcaatttctttctggttcaatcttggaagggcgtatgtgtccaggaatttatccatttcttctagatttgctagtttatgtgcatagaggtattcataatattccctgagggttgtaacagactaataatgaggtctgaaattgagacagtaataaatagcctacccaccaaaaaaaaaaaaaaaaaaaaacaaaacaaaacaaaaaaaaaacacccaggaccatacagattcacagatgtacaaagaggatgtacaaagaagagctggtatcactcctactgaaactactccaaaaaattgagacaggactcctccctgactcattctgtgaggcccgtatcattctgatacccaaacctagcaaaaagaacatt

SEQ ID NO: 223245 - DNA, 459 bp, Homo sapiens
tttgtacttttaaataatggaatcacactgtgtgtattcttctatgtcaggcttcttctgctcaaaactatgtttgtgagcttcattaatattgtgtgtagttgtttattttcattgctgtgtatacttgattatgtgaatataccgatatttatttacccattctactgctgacaggctgctatgaacattctagtatatgtcttttagggaacatatttatgcatttctgttgagtatatacccaggggcaggattgctgggtcatattattcagcttcagtagatactgccaaatacttttccaaaacagttgtatgtaccaatgtatagtctcactagcagtatctgaaaaatctagttcttaattttaatctatgttaatgtatcattttttctttatgtttagtactttctatagcatgtaataaatctgtgcctatattaaggttgtaaaaa

SEQ ID NO: 223246 - DNA, 412 bp, Homo sapiens
cctgggtctcctgggggtggcaggtctcctgggtctcctgggtttcctgggggtggcaggtctcctgggtctcctggcacatggagtggttacatttctacaagtgtcccagtggcgctgggcaggactgccaggctggcctcaggccccagaccccagcagacaaacactggccctcagcaggtgtctgaggtgccagcgctgggcagcctgctggcattcccgcccccgaagtcaggacgagggactaaacccgcactgttcctctacgagtgctcaggtccacacctagccatgaacaggggcgtcggctgggagacaggctaatcctttccccttgttttccacatctctatgacatgttttacaaggtgctatagcaagtaggcaaataacaataatagaattgtca

SEQ ID NO: 223247 - DNA, 556 bp, Homo sapiens
  misc_feature (18)..(18): n is a, c, g, or t
ggggtgtctagaggtccncttcgacggtgttctgaagaatgagggtgcaacttccaaagatgcacagaacaaagtaatgaccttctgccttagtgactaaagcacacacaatcatgtgggcaaagggactagggccattagaatcctaaacttcaaagccatgctcattaaaccatttaaagtctacacacatccagaaatgggagaaagggagaattacctttcagaattttacttacacaggagagctgttcacaccttgtgtgagtgattgctgtttttctctagcaccacactcccactcagggtcctgagaggattttaactacagcccttattcgtggatgaattcaacacccatgtctgactttaacacgttcccatcagaactaaagcacatgggcacaatgtgtaggaagttgttctgacagtactcaagaataaaaactcaaacattttcctgaagtcctatttaccctctttgcattatactgagagtgaaattctttcttttttttttttttttttgagacagtttcactcctgttgcccaggc

SEQ ID NO: 223248 - DNA, 89 bp, Homo sapiens
tccctcccttcttccctttctttcctattgctaagaatacaaagaacccctgcttattaaaagttactttgagggaaaaatgtgatatt

SEQ ID NO: 223249 - DNA, 801 bp, Homo sapiens
atgcacaatataaaaatattagaagaaaacacatattgtcatatattgtgctactaattcattgtacatggtttataaaattgctttgtagtgtttttcagcttaaaagaacttgtaagttagaaagccattcaagaaatcagaaaaatcactgagaaaataaatcttgccttattcattgttttcttaagcataatctccacacagaagaattgaataaaccagaaaatgaatatttttttccttttctctctttcctacaaagcattattatgctgtttcccagctagacatgcatgtgaacagcgtgattgtgaatgggactaaaataaaacacttagtgcttgattaatattaggtatgcctcttgggatttgtttagtcactgattccttgacacacacctccagtaactttataaaaagaacaaaccacactttctgtataagatgcagtaacacattacttattccagaactacttccatggcaacctctactacagaacacaactaagaacttggacacaagccaagtgtctcctgagcacccaaaatagatgtcactgtgtctatgtcctttggcacatgcacgtttctcataagagaatctcttggaccctcagataaagttattgcctcttattcgtccataattttttataaacttgttcattttctggtgttcttgctcccagcacaaaataatcatgaagaggttgttgaggttgaaggaagttattagagatatgcaaactgtctacaccagtaagtaaagaagtcactcttcaatatggaaggtg

SEQ ID NO: 223250 - DNA, 1191 bp, Homo sapiens
  misc_feature (21)..(21): n is a, c, g, or t
  misc_feature (64)..(64): n is a, c, g, or t
tctcatctgcacatctcgccnttctggacctgcactgggagaaatcaggacaggagtgaactcnaggccatgaactcactggatttccatttttaggcacccatagggatgtttttaggatgtaagtttctgaggagaaagctagctctagcatgaagcttttttggattggcttctccatcgtgttggggtaacattttttttaattttttttgagacacagtcttactctgtctcagctcactgcaacctccacctcccaggttcaagcaattctcctgcctcagcctcccgagtagctgggattacaggcgtgagctactgtggccggccacatttcccttctggtgcgcgtcctcctgtagctgtgggatcaggggaggtagagatgtcttgtaactgactcaagtttggctgcttgccgcaggagaagcgaggtgtggtgaaaggaaagcaacttttattcagatgctagcaggtgggagagtggccaggctcaaggctctaaggaaccatctcagctttttggactgcgtgaagggctttaggaaggagaactcggtgtgggagacatgtgggagtagggcagtggtgcaggtgtcttgagtaattgcccatccggaggtctagttggcatcatcttgaccttggtctggtggtggtggactcattgttcataactcccctagacaggaggattccacagctgggttctatgcctggtttatttaaaaatgagcccctggcatttctaagcaggcacagaatgagataagtgagcactgtggctggtgggaaagggagggaaacaggtttaaagtatgtttcaaggctgcattctgagactaggagggaaaggaagaaaaactttaaaattcttctcaaggctgagatatttgactacagtctcatgcccaaaatgtttctattctacactgagacctgatagataatttggctgcatacctggagtccagtgtgtgcacctgcccctcccatcccatactcgcagccagtggaaaagtctgcaaaaggaagccagctgggagtgcccaccagagtcaaagtctggggcaggctggtggactcaagaggagtcttaaatattggaaatgtcatcacaaaccatctgggaagccccctcctcttaaaaaggacataaagtcaaagtgaacaggtgtgctcactcca

SEQ ID NO: 223251 - DNA, 668 bp, Homo sapiens
cgatgtctcaagtttcacaggatgaaagcattatggagaggatggtggtgatggccacacaacactatgaatgtatctaataccactcaactgtatgctgaaaatgtctaagatggtacattttatgtatattttaccacagtaaaaacattttagaaaaaaacaaaaaactggtatctcagcttccactcttgccctacaatctactgccacacagcagccagactggacctctgcatcagagtcgagttatagccccccaccccacaaactatccagtggcttcccatcacacctggaataaatcttgtgtcacctgccctgactccactgtagcagcactggcctcctggcctctcacactccagcatcttccccctcaaggcctgggcacctgctactcctctgtccaggtgctcttctctacccagctgctgggttccctcaagtctctactcagagagatgttccctgaaccacacgatctaaacactgctctcatcactccccttcatcttagccagctctacttttcttcaaagctttatgttacttcctaacatatttatttatttgcttatttgttgtttatttctcccactaaaatgtaagttccatgggggtaaggacactatctcttcattatctgttttgttcgcttctatatc

SEQ ID NO: 223252 - DNA, 446 bp, Homo sapiens
ggttttaattgacttgggttatgaaaggctctaataatagagcctgccactttaagaaaatgccatagcccactggcatatgcagaagctccttgtgcaagggaggcgtgcctacagctgatgtcatagcccagccttctaatgccatttgcataaagagtattcgattgcatgattatataaagtgaggtttactggtattttcttgtttagttcttgaaagtctaattataggcctaagggaataaatctaccacttgaagaggattgttgtggctactgtcagattccagggagaagacagattaaaagcaaaaatttgaatttcaaagaaaatactttaatgcaccaacacaatgaagtgaagtttatgtcaaaatatagaggtttgcctttcttgtattctaaactggttcttcattaaaataactttatctaaagaaaaa

SEQ ID NO: 223253 - DNA, 422 bp, Homo sapiens
atgatacaaagcattaatgatacatttgttctttatgccccaaaattagaagactgatacaccatcaaggaaaacccccagaaaagggaaaagccttacaatagcaaataaaaagagccctacaaaactagcctttaccaagttctagggactgtctaaggatatcacatatactaccttgtttaattctcacaggcgcctacaagatgcatcctttcattatcctcaatttgtaggagaaagaactcagagaggctgaggaaacttgctcaaggttatatcactagttagcggtggagctggggtgtgaactcagaccactgttcctaacccttgacactacactgtcttgtgagatggacaattcataaaagataacaacatgagtttttttcccttaaaactaaaaattgcttccttga

SEQ ID NO: 223254 - DNA, 396 bp, Homo sapiens
attcaaaaaggtaaacaaattcattttaactgccactgatatttatagacttcctccaaaatattaaaagctcttaaactgggcagattaagaaatacataaatggccaggtgtggtgcctgtaatcccggcactttgggaggccaaggtgggaggttcacctgagatcaggagttcaagaccagcctgaccaagattgcaaaaccttgtctccactaaaaatacaaaaattagccggtagtggtggcacatgcctgtacttccagctactcaggaggctaaggctggagaattacttgaatccaggaggcagaggttgcagtgaaccaagattgtgccactgcactccagcctaagcaacacagtgagactccatctcaaacaaaaaaaaaccaa

SEQ ID NO: 223255 - DNA, 325 bp, Homo sapiens
gagctgaataagtcaaaaaattaataaattgataagtcctagctgaatctcttacaaagtagatacctacttttgagtagttatcaaacaacaacaacatccaaaacaaacagtcctctttcttttcctcctcactaaactggtcaaagactctcaaaagacaccagtgctcagttgtacctaacagtgggagaaaaggcagattaatcaatagtcttattatgtagtgcaataaatatacaacagtcttttccttgagacttgtggtttaagcaaagctgggaaatgcaaaatggcatgtaaaataaaagactcatctaaatgg

SEQ ID NO: 223256 - DNA, 454 bp, Homo sapiens
gcattttagtgagcaatcattgcatatgaatgtttatgggaaaaatcaatgtgtgctaaatcattgtattccagtaaatagattggacttaaaacttgatacagaagttgcaaataagtgggattgagtttgattattatatagaaaataattacatgattcatttaagaataataatatccaccatttattgagcacttactatgagcctgtgtgccaaacatttcatgcatttctcatttaattctcacaataatcctgtgaggtagaagctattaggttgaatcatatgaacttgccaatatatgataatttctaagagttgggaatttttgaggatgtgaatggtaccactttgaattcctaagatgtaatataatatctaacacatagcaggcacttgattcattattttaaattgaaagaataaagatttttttaaagctttccaata

SEQ ID NO: 223257 - DNA, 358 bp, Homo sapiens
  misc_feature (111)..(111): n is a, c, g, or t
tggggattagaggatccgatcagtgcattgtggtatgaagtgggctagggcatttttaatcttagagcgaaagctataatcactggccctgtcataaggggatggtcatgngtaggtttatagatacgtgggtggttggtgtaaatgagtgaggcaggagtccgaggaggtagaagctattaggttgaatcatatgaacttgccaatatatgataatttctaagagttgggaatttttgaggatgtgaatggtaccactttgaattcctaagatgtaatataatatctaacacatagcaggcacttgattcattattttaaattgaaagaataaagatttttttaaagctttccaata

SEQ ID NO: 223258 - DNA, 625 bp, Homo sapiens
tagtggcttatgcctgtaatcccagcactttgggaggctaaggtgggtggatcacctgaggtcaggagattaagaccatcctggccaacatggtgaaaccccgtctcgactaaaaacacaaaaaaactggcgtggtggcacacacctgtagtcccagctactctggaggctgaggcaggagaatcacttgaacccgggaagcggaggttgcagtgagccgaaattgcaccactgcactccagcctggtgacagagcaggactctgcctcaaaaaaaaaaaaaaataaaataaaataaaatcataatcataataatatcgctaaaggaaatgatgccaaatataaaaaaagatgaattcttcttgcttcttaatttatataaaagacaaacgactgttaaaaacaaaaatagtatgttgtgagctgtataatctaaggatgagtgaaatctatgacaaaaatagcacgaagaatgagactacacagaagcagattgttgcaagggcgaaggatcaaagaagaaatcacaagggaaattagaaaatattttgaattaaatgacagtaaaaacctaacaaatgaaaacttgtgggatgcaaccaaagcagtgactggggagaaattta

SEQ ID NO: 223259 - DNA, 663 bp, Homo sapiens
gaagtccaatttcgctatttgctgcatttgcttttcaacaaaaattgtatttagtattttcactaaactatgtaagagcacttagctcgttgataactttcatcaccattgtgaagctatacaagttataaactattttaaggcttttcccatcccaatttaggccttaattattactgtgcagaaaacattttgctgcagcaactgttcttagatgtctctaaatcaaaacagaagtcaggattcaggtgacagcaaataaaatttccaaaataataaaatatcaggtaaatataatctctcatctctcatcttctctccatctccctatgtccctttccttctctctctctctctctctctcacacacacacacacacagtcataaaaactcacatgctctttaacggctctagtgagatataatttacatgccataaaagttcacccgtttaaaaaaaagtgtgcaatccaatggtttctagtatattttacagaattgtgtaatcaccataatctaattttagaacattttcatcatccgcaaatgaaaccttgaatcattaacagtcactcctcattcctccaccccctcttccccaggcccaagcaaacactaatctgctttctgtctatagatctataactctgcctgttctggac

SEQ ID NO: 223260 - DNA, 577 bp, Homo sapiens
ggactagtttatgaataatgaagttaacattcttagaattgaaataatagtttcttttacatgaatagaccatctatttatatatggctgcacaaataaattgagtaaaatatgagttcatagatttcttggctcttttaatgtgaaaataattccaactgtagagtcacccagctcctcaggtaccttgtaatgatccctgaagtttagagtccttattcattggaggaagctattagtacacattcaacagataagtggcaaagatacacgtattgtacttgtagagccagggtggttatcatgtgagtgagaattgggaatgttttcgctacaatatgtctttttgagtgtggccactaatcagtatgggttaatagactgatcgaataatacatcattatttttgtgttttacatcttaccccaatgctagctactctcaggacaaagttaacataaccactgaagcagtgagtggagataagtgtagtttaacaattttttttcatagcaaatgtgttgtgcgcagatgactgtcttctcatatcctgaataaatccaacactatgctatta

SEQ ID NO: 223261 - DNA, 458 bp, Homo sapiens
agacatgaatcttcctctccgcagaacaataaaatgcttctacatgagtgcttcttcccacccaaagaaaccaaaagaaaaagcaaagagtttacagtcaagatagaaaaaaaggacacaaccaaggagcttttccattgtgcatggtggactgagatttccaatccaaaaggcaacatctctgggaatgaccttttcagcgttttgtactctaccagaggcaccatggggcctctgggtggagagaacttgtcctcaaaaatagaggtgggccaataaacatatgcaaaaaaaaaaaaagagcatcggcaggacagagcagctacgtctggtaagacgaggggcggggctgtgtgtttgtttgtcaataactgctggtgtgcgatgtcgaatattaaagaagtctcaaggtattgcttgcctgaggtagagtacctgatgataagctgtgtcgacgc

SEQ ID NO: 223262 - DNA, 256 bp, Homo sapiens
taagtcaaatcagttgagaatggagaggaccacaaattattttcagtccagcaagtgttataaacattaattctataaaaagaaaacaattgaaactaatttcttattatattgcatggcaccaaactccccccacttcctttttgaggatcatgagttgtctgtcattgtttctttttattgatatcaattggttaaatataatctggaattggaataaaagaaaaactattataggctttttccagaccatgta

SEQ ID NO: 223263 - DNA, 657 bp, Homo sapiens
tcatgtggcagtatcactcgtcttcagaaaaggaaagacaagacccctcttgactccacagtgccctctagctatcttgtttctctgctctttttcatagcaaagtaccttgagttgtctatagtgttctattgcctcacctccagttcacccttatttttctttactttttttgaaatacacatacaagacagcatatataattcgtagaatattaccaatgtttttaacactttgtgcatcctttcccaatagtgtgcccttacctccactgcttaagtaaccactctctcaaatttttgccatcatttacttgcttttcttttttcttttttcttttttttttgagacagagtctcactctgatgcccaggctggagtacagtggtgcagtcttggctcactacaacctctgcctcccaggttgaagcaattcttatgcctcagcctcccaagtagctgggactacaggtgcctgccacaacgcctggctaatttttttgtattttagtagaggcagggtttcaccatgttggccaggctggtcttgaactccagagctcaggcaatccacccacttcagcctcccacagtgctagaattacaggcgtgagccactgcacctgacccccacttgttttttgtttgtttttgttt

SEQ ID NO: 223264 - DNA, 535 bp, Homo sapiens
caggaacacaggtgatggccatcatttattgttattgccacacagcaggtcctgattccggctcagatagcgaaagcctggcaccatgctgctgtgtaattccttcagctccttttgaaaagtctccagctgaatcatagaagtgttaaggaaaaggaagctgacatatgttaagcaccattatgtgcactaagcgtttgatatttctgtcgggaggcaagagagcatagagccgtgtgtggactggcggcagcacctagacatttcttagaaatgtacattctcaaggcccaccccacaccgactgaatcagaacttgggggcaggagcctgggttttagcgagcactccaggtggtcctggtgcaggccatggtttgagtaccactggcaccaaggttaaagaggatggacttggccgggcgccatggctcgtacctgtaatcccagcactttgggaagccgaaataggaggattgctggagcccaggagtttgggaccagcctgggcaacatagtgagacccctgtctctat

SEQ ID NO: 223265 - DNA, 442 bp, Homo sapiens
cacgggggctagagaaaacacagcacattcaatgaactacaagtagtttagtgaagttacagcgaaggctgaactttgctttgcttttggtaaaacggggattggctaatggggagacctgaagggcagaggccatgacatggcaagccttgtataccatgttaagaagtcttaattttattctgaaaacattggggaaattttaaagcaagggaataggcaatgagaattattcttcagatttgacaagtgagttaatggtaaaattggcaagagttgtttcaataggagaataatgcaaacttttaaatatagtaaaggtaataataaatgagcattaatttactatatctagttctgcagtttctgttcacacacaaacctagttctatctatgcatgattggtctgacaggaatgagaggatgtaggggatgttggca

SEQ ID NO: 223266 - DNA, 679 bp, Homo sapiens
taaataagcaaatacatgtaaatcatactaaatgcaacagggagtctcctagctcctgaggtcttctttctaaaggcaaatcttgttaatcgtagttccttgcatattcttgcagagatggtatatgtatgtgtattttatatatatataattacagaacctgtatttatatatatatatatatatatatatatataaaatcagagtatatactacataatacacacacatatataaaatgtataaatacataaagtgtgtattaagtatacacaagtatgtatatctatctttttcctacaaaagatagcatattatattgttttgtacatttttttacttgatatgggacaatgtcccatatcagttcatacaaatgctcgtcattctttttaaccaggtctacttttgtatcagattttatttagccaagcttttactggtcagacatttgggttgtttccagttttatgctattaaaaaagatgttgcaacaaatatccactgtgtatagttgtaggaatatttatagagtaatttcctaaaagtggaagtaatcggttaaagagtatgcacataataaattttaatgatatcaccaaattgtttccacaaagaggctcaacaatttctctttctacctacaatgtgggccatgccctctcatgccctccataac

SEQ ID NO: 223267 - DNA, 369 bp, Homo sapiens
tgcctcttttccaaaatgagaacatctcagacaatgaaacttggattgagctaatgtggacctggagggctaggaatatttgttaatacctctcaaggttgtttcagaatggattgttttgctagtggaatgctgaaatagatcagaggtcttctaattttcataagtactaaaaataatatgtatcagcctgaaaaagcgtgactgagaaattaagcctgatttcttttcccacttccttctacgattgcccttctcttacacttcacaaaaaaggggcacccttttcttctatcttgtgttgcaaccattgttgaattgtcttatagtgtagaaaccctactctcagtattaaataaaatgacaatt

SEQ ID NO: 223268 - DNA, 1205 bp, Homo sapiens
gggggcttgagcctctcctcactcctctctgattggtccaaatttgctcagtctgggccaatcagagtctttctcctgggatgcagagagattagcccaggtggatgatgagggagtggcaaaccgaagtctatgcataagcagagaaagccagtctttgaagggaaagaggacagagcgtctgcctcaagaataacaagagagacagtgtcctttgaaagcagagaaggaactcagccatgacattcccattgcagtccagatgaactgggtagtccataagatgttgcaccttgttcaaccctgcgcatcctttctccagacccttggagaaatacctcccaccccgtgttgccaccgcctagggaaatccaaaatccagctgtacaatgtctgtacatttccaggggcttccatcctcaagtcttctctgctcctaggcttggttccttgagtcctgtacctccatccaactgaatatgaaactcagatgcttcactggtttccataacaacagaataaaacaatgccctatcctactcccacaggtcatttgaggagcaatacaatgaggatcacaaaaagggtgtcattgatctcttcacagcagacagcttaaaaaccatgaccagtgacaatcgtctcctggctcaccatgtaactgtccctccagccccagaggactagccccagccacagccctgcaaagaccttgattttttttttaattgcaaaaaaaaaaaaaaaaagaaaaaaaaaaaagaaaaggccaggcgcggtggctcacgtctgtaatcctagcactttgggaggccaaggcgaaaccctgtctctactaagaaatacagaaattagctgggtgtggaggtacatgcctgtaatcccagctattagggaggctgaggctggagaatcccttgaacccgggaggaagacgttgcagtgagccgagattgtgccactacactccagcctgggcaagagagtgagactctgtcttaaaaaaaaagtcaatgttccagtaaagggcatcgtggtatccatatggccataactaggagaactagaaatccacatttgacattcctggttaacaagatctttttcaccaccctgtgccataaggcagtggggtggtttcctttttcttggccttttccacacacggggtccagtttcatcacctctttttctcttctccttta

SEQ ID NO: 223269 - DNA, 361 bp, Homo sapiens
gagtactaagccagtttcccgcttggaccccctatgggatgagatgtagacattcccgtaaagatacagaggccacgtccagtttgtgagccttcataggcctccttctttggctttcatgagagaacctaataacaagggttttaatgctgttcatttcaaggcacaggttagatcgatgtcataatttaccttttctgtgagtagcagagataagctgacagctattagccatgttagcctcatgcttctgtagaaacgtgttaaaagtttattttcaagaaagaaggctctaagtcttccggtcggaattttgtggtgttcagttatttgggtaaccaccagttctagtgtctttttt

SEQ ID NO: 223270 - DNA, 430 bp, Homo sapiens
aatggcgtgaacccaggaggcggagcttgcagtgagccgagatcgcgccactgcactccagcctgggggacagagcaagactctgtcccggaaaaaaagaaaaaaaaaagaaacagggtctcactctcttgtccaggctggagcacagtggcatgaccatagctcactgcagcctcgaactcaaagaactcccagcctctactgatccttccacctcagcctcccaagtagctgcaccaccatgtccagctatttttttttttttttaacttgtagagacagggttgtgacttgttgttcaggctggtcttaaactcctgagctcaagcaatcttcccaccttggcctttcaaagtgctgggaatacgagtgtgagccaccgcgctgggactcatttaattttataaagaacatatattctaccacccta

SEQ ID NO: 223271 - DNA, 723 bp, Homo sapiens
aggatcctaactttaattgaagctgccaaaaacatgcatttataaagccagctttctaaataatacctatcatttgaataggattttctgttttcaaagtgctttgacatgcattgtccatgtggctacacggaaaaagtaccaggtaaagtggtaccatttcattcacagtgagcagaaaaatgatcagacctgtatgcacagcagttctagaatagattgggctggggaagaacttagtggtgtcagcctaggctctttgaccaggctatcatcggttcaaatcctagctcactcagttgctggctgagagatttattgagaaaataaattttctcaaatttctcaaaaattttaccctctctgagtctgtttattctcatctaaaatggccttaatcctacttgtcccacagggcttttttgaaaaagatgatgatgatcataataacagacgcttatctagtactatgtgccaggctctgttccgttgaaatgttaagctgaacccaaggcatgggacataattggagatttcctagatattttaaaaattaagattttatttttttagagccgttttaggttcacagcaaaattgaaaggaaggtgcagagatatgccatatactccctgtccctgcacatgtttagcctctcctgttatcagtatgccccagatttcctagattttcaacaatggatataacctattttccgacctt

SEQ ID NO: 223272 - DNA, 880 bp, Homo sapiens
ctcactccacacccagactgtttcctgactcaattccgtacctacttacagaccctctcagcttgctgacacccccctgtctgtgggactccctattccctagagccagggactgatgcgtctccacagacaaggacttggctcgctggagctctgctgagccgagagaggagggggtagaaaacattcacacttcctatgctctgtcagcaggacagggagcaaaaacgtccccaggcaacgccctcgcctctgggactttctgcctgtcctaaggcctccccaggtaccaaccccgtagctatctgggtctgtttggcactgtggattctcaagggcctagaacccttgcctctgaaactggtccgctggtgcagccctgctgtctgcagctcctgcccatacccccagcccacaccaggccaggcccactccgggctcaccaccctctgcagccttgtggggctctcccagcccctccagaagcccaccccacttctcgccaacccccgatctctaaatgaggcctgagcgtcaccctagttctgcccctttttagctgtgtagacttggacgagacatttgacttccctttctccttgtctataaaatgtggacagtggacgtctgtcacccaagagagttgtgggagacaagatcacagctatgagcacctcgcacggtgtccaggatgcacagcacaatccatgatgcgttttctccccttacgcactttgaaacccatgctagaaaagtgaatacatctgactgtgctccactccaacctccagcctggatgtccctgtctgggccctttttctgttttttattctatgttcagcaccactggcaccaaatacattttaattcaccgaaagca

SEQ ID NO: 223273 - DNA, 550 bp, Homo sapiens
aaacaaaatatatccagaaagaaacaatccataccaaggcttatcattataaaatttcagtatatgaacaatagacagaaggtcttcaaggattccagggtgggggcattacatgagaataaaaggctcctacattcctagaaaaaaactaaagagtcagtaaagtggtacaaaggtagcaaccagaacagattttaaaacttctgatcaagaaatgacagttttttgggtcatggttaacaaagctactataactgatttaaatgattttaatcaactaataacaatttgcctcagaggatatgcttctacaaactaaccaactaatgagggttccttacttctgaaactcaggcaatcaaaaatggcctgttaaacagacacatcccaaagccaaccaatcaacaactgtcttcacttgagtgacagtgcttctatagctaacattaacctgctcctgtctttgaaagtttgccaaccatggaacttcctaattccccaaaatcctgtaagaccagcagtctagcaaggttggggaaattaaaaaaaa

SEQ ID NO: 223274 - DNA, 284 bp, Homo sapiens
gggctgcatttgaatttcagctctgtcactttttttgcaggtgactgagcaggtcactccttttctctgggcctcagtttccccctctggaaaaatgggaataatgaagcaccctcctggccggtttcgcaatgctcaaatgcaatatggttgtgctgagtgcaaagcgtggtcctgagagggcactcaatacacatgaacgattcagccctaagttctcgaaatatgttcaaggtacccgctgcgggtctagctctgtcctagacacaggagatccagcagca

SEQ ID NO: 223275 - DNA, 442 bp, Homo sapiens
aaagcatggctctgaaaatttatccttttgtaaaataaatttacatgtatatattaataaagcaaacaagggatgcaggcagacggtttctctgaggtccttttatttgaatctaggaaagattaactcacaggaaaagaagactaaagacaggtttgacacttttaaaggtctgacagagaaactattaccacaggttaccatctactctttttgagggctattacctgatagaccttctctgcacaatgaaacaacagcctttgttcacagtgcattcttccccttacccttccataacctgtcaccacagcctccaggagcttcaggcctctttttctttctgtatcatataaaaaccttaggcccttctttgagtcctgtattttgtgtagctccctgtgcacgtgcatgtaataaatttgtatgctttttcctgtga

SEQ ID NO: 223276 - DNA, 280 bp, Homo sapiens
accatctacaataacactcagtagaaaacattcttgctaatttgaacaatcgaaagattcctttggtgtaaagatacttatataatttataatagagttatatgaaaaaattcctgtgtagtttgcaaatgtggctaacaaccatttaaaaatgttggtttaggctgggtgcagtggctcatgcctgtaatcccagcactttgggaggctgagacaggcggatcacctgaggtcgggagttcaagaccagcctgactaacatggagaaaccccatctcta

SEQ ID NO: 223277 - DNA, 533 bp, Homo sapiens
agatggagaacaaagaactgaacatatcgacatactgattctttcaagagaaacttagaactcactgtatttatcagttctttgcagtgcaagccctggcaatggctttagaggaatagtttgaattctgggtttgaatctttgctttgctacttactgccttacaagtcatctttctaaacctttttattttctttcctacaggatcacaaacactataaaggcagagacaatgcttgatttattgaccaatgtgtagccagcacttctcatagagctcaatatttaataggtgctaaataaatatgaatgagtgaatgaacgtgtcatacgtgaccttcttaactttatgatcctaagttatcctcatctataaaatgagaatattaattgcatctattttgtagggctattgtagggtttaagtgaaataatctatgtaaaatatttagcatgcagtgagaatgcactaaatgttggttattgttattattggtcaatccatgaattacatgtcaaatgaggcaaaaaaa

SEQ ID NO: 223278 - DNA, 356 bp, Homo sapiens
tccaaaacataagtaaaagctaaacaagaatgctgaaaatcaagcacaggaactaggaagaagcaaagacattaaagaaaaaggaaaagctaaccacatatacactctctagaattacctgttttgtctttgatgggattcatggattagttcctttgttcataattccataattatttttgagcacctgttgtgtcttaggtagcagtctaggtgctagggctcagtgatgcacaggggagcagagttcttgcccttaaggagcttacagttgagtggaggaggctataaatgagcattcatcataggaatgacaaatgctgtgattgcagaagtataggatgctatagaattac

SEQ ID NO: 223279 - DNA, 142 bp, Homo sapiens
acccagagcctgtagttttctaggctctgcatgagatcccgtgtgttggcagatagaagagaatgtctctcctgcagctcatgcactgtgcctggcacagggttggccttctgtaaatgttcaccaaataaacaatgggcca

SEQ ID NO: 223280 - DNA, 186 bp, Homo sapiens
ggtacttccactcatctccccactttctacttccctcctatccaggttggattccatggtccattaccccaactactctcggattccgtggtccattactccaactactctcttgcaaatactctaaactcccttggcccctccttgtacctttgctcttttgaaaatatttactttaggccgggc

SEQ ID NO: 223281 - DNA, 585 bp, Homo sapiens
gttatcagtgaggacatacagatggctgcaaaatatgaactgttcactttctccagggaaatgcaaattaaaagaatattttattcatcaaattgaaaccacctttgcaaaaattatatcagcaagaaaattatggcagcaggggagatctgatctagccaacccccctcttgactttagccttaaagctgccttaattattcttgggattagactgggccgactttgggagacatttagtttatggtttaaatggtaatagctcttccccaaactcaactgccttcgtaaagctaatgagagaccatcaggcgaggaggacagagaagcctgatttctactatctgtaaatataaacaattgccagccattattctggaggtcacaagatatgcaatttctccaattactcctgcaggtaacatcattatcgtagaacctaagattgaccttttgagatgtcttttccacacctggctctgcctggacctgccagctgctcctgtggccacacccagaattgactcagcacaagaagatagcttcagctccctaggattttttttttttcttcgagacagagtt

SEQ ID NO: 223282 - DNA, 421 bp, Homo sapiens
ggcaatctttcaaattcaagacagttttatacacaacagaaaaacatttatttggaaaattgcctgcccttgcaaccatctgagatgtgtattgacagtgtggctttctgagttgtggattaggatttgttataagaatttttggtgggatgcagtggctcgccctgtaatcctaacactttaggggccaaggtgggaggatcgcttgagtctaggagtttgagaccagtctggggaacatagcaagaccccattctacaaaagaattttaaaaattagttgggcatgatgacgcatccatagtcccaactacttggaaggctgaggctgaggattgcttgagtctgggaggtctaggctgcagtgatctatgattgtgccactgcacttcagcctggttgcaaagtacgactctcaaaaa

SEQ ID NO: 223283 - DNA, 416 bp, Homo sapiens
taaaattaaccgtaacatcttccttgtttattttccaaaacttcgtgggtgactattagcaaatgtttttaaatggacattttcctgtctgaagaataaagaaaacaatcacatttataattgcaacaaaaacaattaaatacttaggaataaattaaccgaggaggtaaaagattttacattaaaaactataaaacactgatgaaagaaataaagacacaaataaatggaaagatatctgtgataatgagtcagaattcatattgtttaagtattcatactacccaaagtagtctatagattccatgcaatccctctcaaaatttaaatggcatttttcacaaatagagaaaaaagttctaaaattcatgtaaaactacaaaagactccaaaatagccaaagtaatcttgagtta

SEQ ID NO: 223284 - DNA, 657 bp, Homo sapiens
cagcagcatagatattaccgagataaccctgtacgaactctgccaattcactggactgggaaagatgtacgagaacctaccagtgacaggtctggatgatgacgttccaacaaaggctatagaggttaaaatgagagtggaggtgaggaggtgacagaagtaaaggtggcttcaagagaaatttacggaagtagactcttgagggtccccagaagagataggctgtagggaatgacggaaagggaagaattgggatattaggggcatgtggcgaaatgtttaggttgaatttggggaaggctataccacggctgctagaaataatttcctggggcaaggattgtttgatttgtctctgaacccccgtacccagcacaaaccaggtacacagaaacattctagaaaaatgttgagtaaatgacaagaagctttggtgtccctatcagatggaatcctgggttgagggactccttgggactagaggccatgtgggagtttcatactctgtgtgtgtatgtgtatgtgcctgtgtctgtgtgtgtctgtgtctatgtgtgtgtatgtctgtgtctgtgtgtctgtgtatgtgtgcctgtgtgtgtgtccatgtgtatgcctgtgtgtgtgtctgtctgtgcctgtgtatctgtatgtgtg

SEQ ID NO: 223285 - DNA, 504 bp, Homo sapiens
gcctggctaatttttggtattctttgtagagactgggtctcacccaggctggtctcaaactcatgagctcaaggcgatccatccgccccaacctcccaaagagctgggttacaggcataagtcaccacacccagccataaatgataggtatttcttatgctgtaagctatgcaaaattaaaaactcgtaaccttctatcagttccctttttttcctttaacatcttggtctttaaaacaaaatttaaaaaagaaagaaagaaagaaagaaaactgttgccttagtccttgagagtcagtggctcaaaatgtatcccgtttatctttacataaacttactgcaagtgaagaatctgaattcaaacttcttggatgttattttggtcttcatttaaactatgtgagtataaataacagaatgcacagtatcctccagaaaacaggttatcttcatttcattttacaaatggttgtccataagatagttctagaattgttagaattg

SEQ ID NO: 223286 - DNA, 507 bp, Homo sapiens
atagaagataatcactagccaacataatctgtgttgctaatgagatggagaaaactagagggttttgtgcgaaggaataacatgatctgacattctactagtgatttatgtactaaattatataatacatgaagaacacacaattaaagaataataatagaaaacccactcttattaataaattaaggaacaaaatatttttggtatcacacacctgtttgccacttcatgtctcctctcctctatgtaaaaggtcctatttgatgaaaaggattttgtagactttctttatcatttcatcaccaaagtttgcatctactagcaatataaggtgttgattttctttctaaggtctccatgaatggaatcaaactatatgcactttttgagccctgtatctttcactcagtattatttgtgagatttatccacctttttccatgtggttgttattagttcattttcattgttgtgtaataattccattaaaagactggacttcaattt

SEQ ID NO: 223287 - DNA, 418 bp, Homo sapiens
tgagcttgaatgtgatggctgaaactccagcagccatatcatatcatgtggacaaggtttgtgccttaggggtgaaggaatggtgagcagagagtccaggtcccaacttcatggaattgctatactaatcttgcactacctccctctcaaattcttctatggcagtggttcttaaatcacctggagggcttattaaacagatttctgtgccacaccccacagtttctattttagtaggtctggtttggagcccaagagtttacatttctaacaatttcccaggtgatatggatcatcctggttcaaggaccatattttgaaagccagcattttatgtgttagagaaataaacttctcttttgtttaagctactgctattttgtgctattctgttattaaagatgaatttaatacatta

SEQ ID NO: 223288 - DNA, 406 bp, Homo sapiens
gtggcgacagaaggaacattgtatataaggaaaaatggtatgaacaatggcctagggaaagaaatgtgcctgaggagatcggattggtaaatggcctgacccatctgctgtagatgtagtagcaggacataaaggcaagatctataacgctcaatactgattattcatttgagacagtaaatctcagcctacaatggtgatactctccagttagaggagaagctctttcaactggaattgattataaccctcagttggccatcaaatcaaaggattgtatttaaatggggtatcacaacatttggtatattaaaaattatattataacttcatccataaaattgtaaatcttttaactcaaggccaaggcctttgagtacagactcactgactggatttccacaac

SEQ ID NO: 223289 - DNA, 351 bp, Homo sapiens
gcacgagatagtttcattttcataccacaccccaaaatgtattctggataggctaaaatttttaatattaaaaatgaaagcatatgccggacgcggtggctcacgcctgtaatcccaacactttgggaggccgaggtgggcggatcacctgagatcaggcgttcaagaccagcctgaccaacatggtgaaaccccatctatatttaaaaaaacaacaaaattagccaaggatggtggcgggcacctgtaatctcagctactcaggaagctgagacaggagaatcacttgaacctgggaggcggaggttgcatttagccgagatcacaccattgcactccggcctgggcaac

SEQ ID NO: 223290 - DNA, 432 bp, Homo sapiens
caaaaaatgagttgcgtttgatcttgggtaaattacttaatgtaagtatcatttgcttagctgtaaaacaaggatggtaatatctatgccacacagacatatggcacagagtcagtgtccaaaaatggtagctgtaagaattctgtcaggctgggcgtggtggctcacgcctgtattcccggcactttgggaggccgaggtgggcagatcatgaggtcaggagttcgagaccagtctggccaacatggtgaaacgctgtctctactaaaaatacaaaaattagccgggcgtggtggtgggtgcctgtaatcccaactacttgggaagctgaggcaggagaatagcttgaacccgggaggtggaggttgcagtgaacagagatcacaccactgcactccagcctgggtgacaaagcaagactccgtctcaaaa

SEQ ID NO: 223291 - DNA, 172 bp, Homo sapiens
ccagtgtgcataaattcattaggtttgcttttctgactttgattttattggattgctaattttgaaaatggtattaatccacaagtatattatgatataaatatgttattactgtcactttcaccctgatttctgtggatttcagatgctttttttttttaagtttcatagt

SEQ ID NO: 223292 - DNA, 448 bp, Homo sapiens
tgttaacacggccaaagggacatttaatatttgcagtgtctcagcaccaaacaagtatacaacttcccgtgacagggcaggtaagaccttggagagactgtagacaggtcatttgaaccaattctctggggtaagatgtaggaaatggagcttttgccatctttcattggttccaagatatacatttttggatcgctgaagtcaggaggcatctcccagatgatggtatcatattcttactgttggcccggacagaaggcaggtgctccgggagaggatagtactgtttttgccagccatccagggccacccagcctcagactgttggacattacactctctgcttgatgttcttttggatcacactgatagtgcaaattcagaaagcaaacctgcatgagtaccaccggcttgggactcctgttctcagggaaggatttttcacccc

SEQ ID NO: 223293 - DNA, 431 bp, Homo sapiens
aaggatacttgccaaagtgtaaaagcatttatctctgggaggtgagatttggagcaattatattttctttttgcatatctgtaacttctaattttccacaatgagcatgtagtgtctgtaaaatttttcagggaataaacaatgatgttcacaatatatattaaatgaaaaacacatgttataaaacagtatgtatagtatgacacaatatttgtaaaaaagaaaattatatataaatatatctatgtatgtatatatatgcataagaaagctagaaggacatacactaaaatgttaatagtagttatgggtagtgggattatgggtgattattttttctttttgcttttctgtgttttctaatttttctacaatgaacatgtattacttgtgtaataaaaactaataataaaagttttaaaaaatgaata

SEQ ID NO: 223294 - DNA, 443 bp, Homo sapiens
tggctcttcctatgtgatctctgcatggtggctctccttggacttaggccatgaatgaaagcagcaaaaggccctgaccagaagccaaacagatactgtcatgcttcttgtacagtctgcagaactgtgagccacataaacctcttcactttatgaattacccagccttaaataactaataagtaaataaaaatgtttaaaaagatttcaagtgccgggcacagtggctcacacctgtaatgctaacactttgggaggtcaaggcaagagggttgcttgagctcaggagttggagaccagcctgggcaacatagtgagtcccaattatataaataaaaaacatttataaataaaaataaatacattacccagtcacaagaagatcacttgagcccaggagttcaagacaaggctgggcaacatagtgcgacttcctttccact

SEQ ID NO: 223295 - DNA, 474 bp, Homo sapiens
atctggcctgctgctccccaggtacatggctgaagctgtccagctgcagagagtggtggggcctgactggacatccatgccgaatctgcaccctccaatgtccccctctgctctcaaccccccagccccaacctctgggtccctacaaagcagggaagggacccccggggcgtggtgaggctgcagctctccaggagttccacacgggcccagtgctgcccctgctgctgcaggagcccccaggctaggttcggccttcctctcgcccctgtgcacccggagatgcccacagcaccagcacctgagctcacctccgaacccgcctcctgaacccgcctcctgaacctgcctccttacctcccacttcctgagccctgagtggaagcctttctgtgccttgccctttgcccactcccctggtgggactgccaagaccctcaatgcccattaaatactcttgcctgcctcttacaa

SEQ ID NO: 223296 - DNA, 487 bp, Homo sapiens
aaaacaaacatcaaagtataatttcctggagatattcactggatgagaatcaaagatctggggggcaaaagacagcatctctctgagggtctgtggtccagccctgcatggaaggctggctgaggctgggcttggcagtgcaggccctgggttcctgggggcaggctgtgggcctataggacatgtgggagggagatgctcaggatccatccggcctcctttggctctgccctttaccaatctcctaggacatactgataggcattcacacctggcacaagggatgcagacataaacatcaagtgctaagtgaagaagccacatggtagggtgaaaattgttcaagctttgcagtcagacatagctcggtttgaatctgagctctctcattttctagctgtgtgatcttggcaggcttctttaaatcctggtttcctctcctgcaattaagaataatgcagcctctacagagattattctgggtttg

SEQ ID NO: 223297 - DNA, 521 bp, Homo sapiens
tagatagaaaaaaattattttgaacaattgctgcttttattaggaaaaacacatcagccatttgtggtcactttatttcttggcattttaggtgggatactggagatacttatcaaaaggaggttagcttttgacaatgtaaattaaaaccaagtttatttgaagtcactttatgagcaaggtctctcttttttggtgaaatgtggttgaaacgcaaagtcaaactagcagaggccaaaaggaatctgtgttggaagagaggttcacgtgattctgagatggcaagagcacacccggggctcacagaccaggaatcagagattcagacacagcctggaatcttctctcttcatctcttgtttctcttgcactggcttcttcctaggaactacgccacaaacaaacctaatgtcccccgtctctgttggtcctagaaaacgaataagcctcttgcgccagctctggtttttcaaatcctgagaaatgaccctcactggcctagtgtgagtcatgtgcttacc

SEQ ID NO: 223298 - DNA, 561 bp, Homo sapiens
gggagattaggaaatggagcccaaaagaagagacaactgttacaagaaattggctatgaaaggaaggagagtgagttagaggcatgtaaaccaaaaagtatctgaggccaggtgtggtggcccacacctataatcccaaagtgctgggattacaggcgtgaggtgctgcacccagctgaagctaaggttcttgtcatgtagatgaagcctccggtagctggcttcagagagaattgatggtgaatgtctgttatctgaccttaaaaggtgtcagactttccagaaaagacttagtgtggggaagagatttctctacagaatgcaaatttccccccacaagagagttttgcagggccatttcaaaatatgtcaaagaaatatcttttggggtaaaatactttgatttcctttagggcctgctatctgtcatatggtgctataccagaatcagtttggaatttggtatcttattgctacagagagtttgttttgtcagtcttactatctgtgttttaatgttcatgctggtcagttgtgtctaaactccagaggatcaccagg

SEQ ID NO: 223299 - DNA, 241 bp, Homo sapiens
taggaagcctagattttagtttgggctctgacactaattctatggctggagcacatcccttaacctctccgagactccattttctttattataaaattagaatttggaccagttggcctctaaatgtcttccatctttgactctttgtcttttctgtgcacataaacatcagatctaatccttgttagtggcattattttgaaaacatgggacagaaacataggaacaatattctttattg

SEQ ID NO: 223300 - DNA, 519 bp, Homo sapiens
ggccgggcgcggtggctcacgcctataatcccagcactttaggaggccgaggcgggcggatcacgaggtcaggagatcgagaccatcctggctaacacggtgaaaccccatctctactaaaaataaaaacccaaaaatttagccaggcgtggtggcaggcacctgtagtcccagctacttgggaggctgaggcaggagaatggtgtgaacctgggaggtggagcttgcagtaagacgagatcgcaccactgcactccagcctgggctacagagcgagactctgtctcaaaaaaaaaaaaaaaaaaaaaaaaaaaaaaaaatcctgcattacacataggcacatgcaaacacacacatgtggaaatagatacaccatattataacactttattaaaggatagcttgttctcaaggattccttcttgcttgatttggaatcaagtattaatcatgtgttagccacaaggtgagtgattttgaaaagatagtcgagagatttttaaactatttccacaaagt

SEQ ID NO: 223301 - DNA, 464 bp, Homo sapiens
ctataaattgagatacatctccttgtttcttacaaaatctacctcaaagtgacaaaaagaaagctttttgttttttctcatttttttcttccttggccatgtgtatacaaaataaaacaatttgtcaagaaggtttgggggaaaaaaagtagagtcctccagagaaatgatgcgataactaactggttaatttcctgatttttaactttcatttaaatgtgtagggatggcctgactttttttttttagcccagcaaaaagtttttctatgataaattttacatttcctgttagaagaccatttggattcttttgaaaaaaactgttcaaagcatgaggatttgtactgccaatcacctatattaaaaacaataactttataaatatttaaaatcaaatactgtggtgtgtttgaataaactttaaatcctttgttgaaaacttccagaaagaaactattttaa

SEQ ID NO: 223302 - DNA, 200 bp, Homo sapiens
tgcacccagccagaatgatcatttttgcattgtcattgatcacacccacagagggaactttaaaaccgtacagatgcccaggctccacccccacctattgaatgggaaccccagggtatggtaggggcctgggcctctatacttctcaaaggatccatgagtgattccgatgttgtttttttttttttttttaaaaaaaa

SEQ ID NO: 223303 - DNA, 488 bp, Homo sapiens
ctacttaaaagaaatcttttttcatttaacagcttttcccatggggatagagttttcatgaataaagcaaagtcattaaatgaggtatatggtacatcttttaagagtcacagaaagaagcaacaacaatttacccaggcagagggtataagtttagaccttggttgcctgatttgtgggacaagttctttaattttttttctttatattttgacttttttttggactctctcctccccttccaggctccaggtcaaatacttgacacctgaatgatgttcaattatttaaaagatggattggccagctcagctcctgtctcagacagactgtctttaaatgtattttcaacatgtcttcagacagttatttttcctctgttcaattttgttcatcttcttacttaaccgttcaagtgctcctatttcctttttaaatgtagtattgagaagtgcaaacattattggaaaagagagtctcactagcat

SEQ ID NO: 223304 - DNA, 650 bp, Homo sapiens
tacatcggctatctcaattatcttggtgcttacactctagtgacggcaagagacaattcagcaaagacataaataatgagattggttaagaaaatatagaaagcggctgggcgcggtggctcactcctgtaatcccagcactttgggaggccgaggtgggcagatcacttgaggtcaggagttcgagaccaccctggccaacatggtgaaaccccgtctctactaaaaatacaaaaattagctgggcatggtggggcttgcctgtaatcccagctactcaggaggctgaggcaggagaatcgcttgaacctgggaggtgaagtttgcagtgagccgagatcgcgctgttgcactccagcctgggtgatagagcaagactccatctcaaaaaaataaataaataaataaagtgctgggctactctgacctgggtgctgtgtgtccctgcgctgatcgcttgacatttctgagccagtttcttcatctggggcctggagccctgccttcctcccttgcagggtggccttgggggtcagtgggagagacaagtgtggacaccccgggtgggtgtacaacaaggaggtgggtggggatttggggcatccaaaggcttcttttcttgaggtgggtcttgcctccttactcccggg

SEQ ID NO: 223305 - DNA, 744 bp, Homo sapiens
ataatagtagacttcaataacctaccttccgtaattgatagaacattcagacagaagatcaataaggaaacagtgtaactgaacactataaaacaaatagacctaacagattatacagaacattctacccaaaagctgaagaatacacattcttctcgaatgcacagagaacttttcccaggataaatcacacattaggtcacaaaacaaagcataacaaatttaagaagactgagatcagatcaagtatcttttctgaccacaatagaatgtaataagaaatcaatagcagaaagaaaattggaaaattcacaaatatgtgaaaattaaacaacacactcttgtacaatcattgggtcaaagaagaaataaaaaaagagtttagaaaataccataagacaaatgaaaacaaaaacacaaaatactaaaacttaaggaatacaacaaaggcagcactaagaggaaaatttatagtgataaaagcctgcattaaacaggaaggaagatctcaaacaaccaacctaactttatgcctcaagaaggtacaaacagaaaaataaactaagcccaaagttagcagaaggaaaaaaataacaaaaattacagcagatattaataaaatagaaaatagagaataatagaaaaacaacaaataagtgttgatttttcaaaaaattaaacaaaactgacaaacttttattaatagctagaataactgaaaaaggtaaaagactcacataaata

SEQ ID NO: 223306 - DNA, 348 bp, Homo sapiens
gaattacaggaggcaagaaccattaagggccaccttacaggctttcagccacactatgcttgatccaagccatttcctatggttgtgtttgcagtgagcaatcttgaggaatgaggtaacatctccctctgggacaaaaagcaatctcactgcttgttataatagcagtgggttccccaagattattgttgttcgtcagctgcaatgcaaacccactctctaggcccatgcatgtcgctcctgtggaactggggacttgggagcaagagaaactgatacaaacattctgatgggcatggcttttttttttttcctgtactgtgaataataaacttctttttctctggc

SEQ ID NO: 223307 - DNA, 460 bp, Homo sapiens
tagggtggctactctaaaaacaaaataaggcaaaaacagaaaataacatgttggtgaggatgcggaaaaattggaaccctcatgcactgttggtgggactgtaaaatggtgcaacttctatagaaaatagtataaagtgtcatcaaaacaattaaaaaaaagaactactgagatatggagccagccggacttcgtgggtcgagtggggacttggagaacttttctgtctagctagaggattgcaaatgcaccaatcagcactctgtctagctaaaggattgtaaatgcaccaatcagcactctgtaaaaatgaaccaatcagcactctgtaaaatggaccaatcagcgctctgtaaaatggaccaataggcaggaagtgggcggggccaaataagggaataaaagctggccactggagccagcagcagcaacccggtagggctgctgtctgtgatgtgca

SEQ ID NO: 223308 - DNA, 657 bp, Homo sapiens
tgagtgaggcggcgggaagggagcgagggaagagcggcagtgagaccggggagacaagggacttgaagactaggagggaagaaacagcgaggtgaggtgcgaagagcagtgccagaactttgtatcccaggcccatctccttcccccttcgttttcctcgtttgctattagagagaataatatttctcaccgcgtacctgtgcctggacccggaagggttgccgctggggacgggaattcgaactggcactggtggcctgtgaagggaaagatgtgatgagaaagaccaaaacctgtcttactgacagttaacttcttggaatgtgaatttttttagttaaataatcatgcagtctttgactagcactaagtgcatgagtgtttattccctgaggatcctaagggctgaaattcgaggtcaaatgtgactttgctccctgattggacaaacagttccctcttctgtaacagctttagaaggaacctcagagagtcccagagtcaaaaggtaaacaagagatgaagtaatctgcgtctctgccgaaaatcgtgctcctgagattcctcatcagaattgtcaataaaattgcaatcctaatttacttaggtagtcattataattggcactgagctgtgggatggatgagtgggattacc

SEQ ID NO: 223309 - DNA, 460 bp, Homo sapiens
gaatagaagctggaagaagtactggattctagtggtatagcaatgtttagataccagctagaggatttgatgactgaggatagtgttggtagcagtaacaacagcagtcatagcaacaactatgatttactggtttcttattctaaaccaatcagtattctaagcactttacactactttagaaaactcgtttaattgtcatgacagccatatgctgtgtgcactattatcactttcatttggcataaggggcaggtaaggtacaaaagagtaaagtgacttgtctgggttgaagaggttatttttccttgcatatttgtttaataagagagcaccagaacacatttgtgtgctattagaaatgatctggtatgtgatgttccccaccctgtgtccaagtgttctcattgttcaattcccacctatgagtgagaacatgcagtgtttggttttctttcct

SEQ ID NO: 223310 - DNA, 528 bp, Homo sapiens
gtttaaaatttattgatttttaactgggaagccaacacaggctagctctacctggctaatcctgaatctgcaaaaagtataaaatgtgtcagaactgctcctgagaagtgaaacagagcattttgattttaaagatgtatatggaattatcaagtaaacaatatgattgcacatggatttctaccagtagttaatatgtgaattacatttaattcttcagagtattaacctactaaagcatactctgaggataagcctgtctggcaaaatttcaggtaggtattgtgtttaaagataaagaattatgtttgaaaacttgtgagttttcatatcaagaatgtttcataagctcactttcagtatacagttaagaattttagaataaaaaatgaaactacagaaattgctttagcatttttgcactagaacagtttaattagaatgaatataacaaagagtaaaaccatttaagaacaggataaacacgtattcaaaatgctttctttaggagatgatacacaatcattt

SEQ ID NO: 223311 - DNA, 312 bp, Homo sapiens
ccctggagggtcacccaaggaaagagttcgttccaaagacaggtgctcctctgagttcctctggaatctggcaaggtgccgagcttggacgcaaggcttccatgaggctgtgaaggaggttgcacggaaactgaacctggtgtggagggccaggagaggcttcgggactgaagggcagagcagcagactccggggctcatgtaggaaggaacatgccttcagccaaagattatccacgctgcatggagactcttgctaaatatcactggggtaagactgaagaaaagaaataaactatgctacctgctctta

SEQ ID NO: 223312 - DNA, 464 bp, Homo sapiens
gtgttacgaagtattatataaatgtatacttgagtccttgtacacagtaggttctcaagaaatattcattgactgattttgacacagtcttagcttgttacatttaaggaccctaatcaatacacaggactaagacaatgacttgaaaagggtgaaattacatgttccatgggaggaagactctgaaacacactagaaggacacacccagggatatcaacttcactgaaaaaggtgggtgggactttttcaaccttgaaccttccgagctacaagagtctgttgagcccttagcttcccaacctcttgtgagacagagctgtgaatggccaccacactttgaggccatgaggctatgtaaagtatgttctcagacatagaagagaataattatgaagccaatgaatgatgcatgacagagttaatagaaattaaaataaatagaaactgcttttgctttgaaat

SEQ ID NO: 223313 - DNA, 666 bp, Homo sapiens
ccagtaaacgcctcagttatccagcaggccctctcgaggtagctgctcagaacttaaacacctggaagagtgggaaaggcctctgatgagtcagcatagctgctgctgaggctttgtgctaaagtccatgccctttcctgatggtaaagtgcccccaaatcccccagggtctctctgtcatgatttctaatttggtttttaaagctggaactacaagtcagaaagagatgaagctagtaggtattcattacatgtgtatatgtttttttaaaattcagaatgtcattgctgagtggtttgatttcccagcacacaatgggttagaaataacaatgtagaatagagaattgggatgagaaggctggagctagaagcaatgagaagggatggccaatagtagctggcaggtggaagaatcatagtctcttcctgagcagcccggagttctgtgcctgggaatccagaacagtataggactttcagaaccatgtgtgacctaagtggttgacttgtgggtttttatccaaaatgaaatggttgggcaccaaagagacagaaacaggttatcaggaaactagtcattgtggaacttcttggtccctaacaatgcttactggttgtgggacatgtccataacttttccatccttggtttcctcatctttat

SEQ ID NO: 223314 - DNA, 446 bp, Homo sapiens
ttcagcatgacacagctactcacagggaatagactctaacacttagcatcaaagaacatgactgccactttccttgaggatgtattaacaggataccaggttcgttaacatccatggccagaaacttcccttttccaagttctgtgattcaacagcaacacttaaggcactttgagactgactgagtggggtgggaagtccctggagttttccatgcgggtgttacatgataacagacacgtttttaaagcatcactatgcctacagtgtaggaaaatagaacaaagggcaaacatggatacaggaagacaattgaggtttcagagatgagaaacaaggatggcttgtgtagggtgtggacacaaaggatttggctcatggatttggcgtgtgttagcaacaggtgtagagtgaaggataacttattggtttgggcccaagtgaat

SEQ ID NO: 223315 - DNA, 446 bp, Homo sapiens
tcagcctcccgagtaactgggattacaggcgtgtgccaccacacctggctaattttgtattctttagtagagacaaggtttcgtcatgttggccaggctgatctcaaactcctgacctcaagtgatccacctgccttggcctcccactgtgttggggttacaggcatgagccaccacactcggccattctttccacctttaccatcaacattagtgatgaagtgtgtacactgtattgattgatgatgattctagtgcagtgaagatagtggtaaaattaatgcctaatcaatatgtacagttaatatcaaatacgccagactctagaattcaggtagatttttgttaagaaacactaaactaatgacaagagcaccaggctcagagcagctcaaagacctaagttaaagtgtcttcactgccacctccaacagcacttcagggca

SEQ ID NO: 223316 - DNA, 596 bp, Homo sapiens
gtaaacaccaaattagtacatcgcttccataccaattgtaataatctctaaattcttcatctgtttatcattcataacacagtaatcattcttcctattttcacaaaccatttcttatataaatttcctaaactttacatttcctttcactttaaatagctcagtaactttctaattttttcatccacctgaagttaccgggttactttcttcactgtctcattcttttcttttttaagacaggggctccctctgtagcccaggctggagtatggtggtgtgatactggctcgttgcaacctctgcttcccgggttcaagcgactctagtgcctcagccttccaagtagctgggactacaggtgcacgccatcatgacccactaattgttgtattttgagtaaatatctgtttattccatagtaaggatagatgctagacaggttatgatttgctttggttctactcccctactttggataggattttacctaggtggagcattggatcatgttcttgagctgtgtggactttgatttgcttatgtgcatgcttcacatctgctgccagccctctgttacttaccgcggtacgaga

SEQ ID NO: 223317 - DNA, 444 bp, Homo sapiens
ctagggaaatctaggccaagacagttggtgccaggcatggtgaaaatcctgacatgcagtagcatcccagtcctaagatcctcacctgtcttggaaagtgataaagtatgagcagaaggtggactatgaaattctgtgctctctgtgaaatgtgcacagccttaggaaacggtcattacaaatatggagttgaatgacttctgttaactgtttttgaaaaccttgaaaaaatgataaactcagattggataactatcaatccaaggtagctgtgaaaaccaggggctctctagggcagcatttgaggaggccttcatttccaacatggcagatagagcaaaaaaccaggccaaggatttcactttgagggtagaagggtggcaaaggagatgaaatgcacagtcttagcagggctcctatgcccaagtcaggattctgaaagaa

SEQ ID NO: 223318 - DNA, 381 bp, Homo sapiens
ccccggccctgcccccacctttgagagaggatcccctagccaggtgctgtttgtgcacccaggcttctcaccagaaacgtaggcatcccaccaggaggggagagtgtggcccaacactagctttgaaccctgctcggcttccgtgcactcgggaccctttcccctgcctgccagcagatggcaccagcgtcccactggccgtcctttccagccagagccgcgcctctaccaggctgtgtcttcctcctgaaatgttgctcttcactccgtaccactggtgttccttggttctccacctgcgtagggatttgcgcattagatgagagaatttcaagcaaaatactttgagttttacaaagatataaaacacctagtaattat

SEQ ID NO: 223319 - DNA, 633 bp, Homo sapiens
ttaatttataaatcagcaaatagaatggaatctctgacctcaccccaaatctgtatttggtggaagctgaatgtaaataaacagatgaaccagaagaacaaggaagcaaacaacattcatgatcaggaaagagagtgaaatcaactagagtatccacagaatccagcctgtaacatcagcctcattagcacagccccaagggcaggagaaattatgttttggggcaacaaggatgagataagaaacttgataatgaccatctgctgctgatgtcaggtctaccttaagcaagggagcagaagccctggcaatgggcacacacgcggatgtgttccatgtggtgtgagagtgtgtatgtgcgtttaaagtactgtgggtggtgcatttaatacggcacttttctgtccaagaaaatcatatcccctccaaagccctgaattattgaaatcttgaagtttctcacatctgttacgagccttgtatcaccatttccgcacgctattgggtgccatattctgtgtctgaggttacaggcatgccagaaccctcccactgccaagctgggagatcatttgttatttctgtagccataggcttgccaaaacctggggagcttgattctgaaaggagcca

SEQ ID NO: 223320 - DNA, 495 bp, Homo sapiens
gaaattccagctcctcggctcctgtgttctcataaaaaaatctaggcctttgggtcagagattcttttgaagaccaccctgctggcaatcctccaagcaagcacaggatcccgccagagacagtgcagcctcctctgccagccaactggcccctctcatcctcttctctccctcagtctttgttttttcttaatttaattaattaattaatttttgtttgtttgtttgagacagggtctcttgctctgtctcccaggctggagtgcagtggcatgatctcagctcactgcagcctccacctcccaggttcaaagtgattcctgcctcagcctcccatgaagctggaactacaggcacccaccaccatgcccagctaattttctcactttttacaaacatgcgggtcttgcccaggctggtcttgaactcctggcctcaagcgatcctaccttggcctcccaaagccctgggattacaggcgtcagctacaactta

SEQ ID NO: 223321 - DNA, 164 bp, Homo sapiens
agccctgtggccagagaaagcttgattcagctgaggaaatcagggccagggattgtagtgtggctctctctcgagagtgctgtcaaacatgagggcagaggaggcaggggcaagatcactcaaagcttgcaatccacatgtttgaaagatttcttcctttgctg

SEQ ID NO: 223322 - DNA, 509 bp, Homo sapiens
gtttcattaaagaaaagcatttcagtgagagaaattcctctaggacaggagtcagcaaacttctataaagagccaggtagtatgtatttcagatttgtgtgtcataccatctccattacagcttcttagctctttcactgtagcatgaaaacagcaatcaacaatacaagtaaacagatgtggctgtgttccaataaaactttatttataaaaacaggatttgtcctggtagacttgccttgaggaaaatagtttgctgacccctgctctcaggaggataaaacatgttctggcttcttactggcaaaaaagaccaatcttcagatttgaacataaaataaacaacaagtacttaaaggaaaataggcaatcaggtctatccaggataaaccgaagaattcgccagcatctgttgaattgcggcaggattgctgtacagccttccttgataattagaacatccacatctgcttcctcctcagtggtttacataatgaaggagaaaacag

SEQ ID NO: 223323 - DNA, 553 bp, Homo sapiens
atgaaatttggtgccgtgactcggatcgggggacctcccttgggagatcaatcccctgtactcctgttctttgctccgtgagaaagatccacctatgacctcaggtcctcagaccgaccagcccaaggaacatctcaccaattttaaatcaggacaccactgaaaatcggactgttcaactcacctggcagccactcccagagcccctggaactctggcccaaggctctctgactgactccttcccagattttctcagcttagcagctgaagactgacgctgccggatcgcctcggaagccccctagaccatcacggacgccgagcttccggtaactctcacagtggaagactcagcccgcctgcacccaggtgaaataaacggccatgttgctcacacaaagcctgtttggtggtctcttcacacggacgcgtgtgaaatttggtgccaaaacccgggtacatcttcctgaatcaggcttctgagaactgttccactttgcagtcctgttggatctatatcttgagaaataaattaaagagcttttccctcc

SEQ ID NO: 223324 - DNA, 366 bp, Homo sapiens
tcagataacaaatgccactcaaaatgagtttcccaaggccactggaaagatgttttaaatgtttgcaaaacagcattttacattacgcagattcttccttccaccattttgagctaagagttgtaattttttggctactgacgtcactttccaaatttttttttattgcacaaactacattaaaagataaaatttggggccaggcgcggtggctcacgcctgtaatcccagcactttgcgaggccgaggcgggcggatcacgtgaggtcaggagttcaagaccagcctgaccaacatggtgaaaccccatctctactaaaaatacaaaattagccgggcatggtggcacatgcctgtaatcccagc

SEQ ID NO: 223325 - DNA, 363 bp, Homo sapiens
tgatccaccacccgccttggcctcccgaagtgctgggattacaggcgtgagccaccgtgctcagccaggaaatgttttgaaattagttttgtaaagctccaaaaagaaataaaattattgatatggtaatgtgaactttgaatcttcaggaaaggaaaagtagtatggatcattttctaaacttttttgagcacagaacccttcttcctctgatcatttcataggaatacactgtgggaagtgctggatccaactaccgctaaaaatgaaattaaatcaacatggagttgggagtatgatggtgggaaataatttccgtttctctttacagatttcatggagggaaaaaaatttcagtaagac

SEQ ID NO: 223326 - DNA, 538 bp, Homo sapiens
ccctattggattgtaaactctgcgaagacaggaaccatgcctgccttgttgacagttgttttagcagagtgtctaacattgtaggaacttaaagttgaatgaattgagtgaatgcattcataagagaaggaaggaatctaacatttattgagcccctattttttgccaggtactataaaaagaattttgcacttttattatcaacactgtgattcaggtaaaaatgtccccctcctttacaaatgttgagtcttagacaggtggtataacttgcccagagccaaatagcaagtgtcagtaatagttggtttgtctaattccttttttatttagcatagtcataattaggacatttaaaataactttgtaatattttactttcttaagaaatctcttttgccgtcttgtttctgtcaccctttctttttgaagttatggaagtaaacttgaaatgatcacagaatgaatttttttatattcattcttgtattaaatattaagaaattttagtttatgaagtctgtgttattgaggatta

SEQ ID NO: 223327 - DNA, 437 bp, Homo sapiens
gtgcatatttgtatgtgtgactgtgtatatacattaatatgtgtgcttgttgtacgtatggctgtgcctgtgtatttctgaatgtccatgtgtattactggctgtgtgtgagttggtgagtttgaggatatttgtgtggaatggatcattctttccccaggccagaaggccaaggagatgctaccaagtgcttgaagacttgatgtcacattcttgactacacccacccccctagaacttcctggcatctcactgtgatgcacaggcatggcaaaggataacgcttaccttaccctggagagaacacactttctctagcctcagaaactaacccatcatacttctggctgcattatcaattttcaattaagacaccaatttctctgaccctctgaagacaacagcatggagcctgagtaataaagtggagtgggttc

SEQ ID NO: 223328 - DNA, 330 bp, Homo sapiens
cgactgtaaccatgctagcaaacttagtaccctttactgtaaccctgatatcttttctgctgttagtctgttctctgtgtaaacatctcaagaagatgcacctccatggcaaaggatctcaagatcccagtaccaaggtccacataaaagttttgcaaactgtgatctccttcctcttgttatgtgccatttactttgtgtctgtaataatatcaagtttggagttttaagaatctggaaaacaaacctgtcttcatgttctgccaagctattggattcagctgttcttcagcccacccgttcatcctgagccagaatcaaaaaaaaaaa

SEQ ID NO: 223329 - DNA, 586 bp, Homo sapiens
cacacttaatgtgattattttttgtcttcatagggtgacttcaagtcttttttaatgtgaaccttacagtggggtttgttctgaatatatttatttgcatttgatatagagaggctcaaaaaaggaaaactgacggacctaataaaataaaaaaatagtagttgaataaaaaaatttctggagggacacacaaataatggttactctctctgcatgccatgggagatagtggtgaagggaggagggacacttttgcaattcatttgatctcttccacagtatctgaattatttgcaagtatacgtattccatttgtaataaaaaagtaaagactagaaattctttttggaaaactgtacatactgtagaacatggctctgtgttgtttgtctctggatttccagtgactatcaaataggtgctcaagaaattggataattatgtgaatgaattcatgaattgaatgaatgaatgaacagactatgctgttctgtttgaaaataagtatggacttacaagaatgaaaagtcttcaacacttggaatatgttttcaataaagatcaggcctctcatctataataattc

SEQ ID NO: 223330 - DNA, 254 bp, Homo sapiens
tgcaagggcaatctctttgggataccaccattagggtaggtcagtgccatctaattttagttccaagattcaaattccagagacagctaactggcctagtgtgggttttatgaccaagccttgtttaaaagagagctgggtaaaatttacgcaaaatgatctgatataaacagacagactaagagatggattattgtatgtgatgcaataatcctgagtgtgaaacctgatagaaattgtagataaatcgaaag

SEQ ID NO: 223331 - DNA, 551 bp, Homo sapiens
  misc_feature (550)..(550): n is a, c, g, or t
tacttttcattctatggctatacttatttatcactgtctgataaaagcagagataagcaaactgctgcctgtgggccaaatccaactcatagcctctatttgtaaggtctgtgaatccaaaatggtttatttatctttaattagaaagaaaaaatatcatacaaaaaacattccgtgaagcatgagtagcatgtaaaattcaaacttcagtatccataaggaaagttttattagaacacaggcatgcccatttgtctatacctattatgctccaagagcaggcagtgttaggtagttttgacaaggacttcatgggtccacagagcccaacatttactatctgatctttcctgcctgagaccatctagagcaggctcttcagcactgggcgccaactatgagcagacaattaccagaacattcatgtctaaggtagaaaactaaagccaggtgcagtaatcccagcactttgggaggccaaggaggaaggattgtgtgagcccaggagtttgagaacagcctgggcaacataataagaactcatctctanc

SEQ ID NO: 223332 - DNA, 378 bp, Homo sapiens
taaaataactcacataagtgtcctttttgttcacaaggagcctctcttgaatacatctgagtttatgctaatgaagcgacttagggtggggccccaaaaaggcctcaggatcaagttggttaccagaaagtccaagtaattagaaggtggaaactttctgccccacccactcacctctgtatacaaacttgaataattagatttgatgagcctccaggtgaatacatcaaagtgctgggagggtagcacagctggagagggcatggaagctctgacccctccttcactgaattgtttgctttataataaacttgtaaatttaagtattgtttttctgagttttatgagatgttctaataaattattgaacccaaggag

SEQ ID NO: 223333 - DNA, 405 bp, Homo sapiens
tcaaaaattgcttcttttattgttttgttcattattatttagaaggaatttggaatctgattgagcaaaataaaggacaggcagctttccatttaaggctatggataatatccccctgtgaatgaaaatgtattcctgcatacagatttgtaggatggtgtttactcagtatcatacaaagcacttctacaatgtgggtcaataaacatgtgcagaacacttagcttgacagattttatgtaaatccagaaagaaacactggatgtcttatttcactaaaaggaaattaaagcaactgttttatatgcccaaaacttgtgtgtaattgatagactcacaatacaaatattttcacttggaatcaatgtaaaattatgcaaaattgcaataaaaactttaaatgaa

SEQ ID NO: 223334 - DNA, 444 bp, Homo sapiens
agattggaggataccagcacattgagggaataggtaccacactgaaaccaggtgaaagaatgattgcctgctgaattttgagacctgctacttcctgcctcccactagttctcagaatcctggcaactgagcatacaccctttagcatgtggaagaaccttccctgggaatctgaccacactaagaagagaaagagccttagaaaataataagccatatcttttgcctgaattataccataaggataggaaggtcttcgtgtaatgcaactcaggcaaaattgggggtcatgtaacaataatttcctcaatatctaatctataaaatatttttgctaaaatcatctacaagatccagatcataatcttgaggtgtttttctataacccatcttagatcactgactagagctgcatgagttgtctttcaaaaagaaaaaaacacc

SEQ ID NO: 223335 - DNA, 476 bp, Homo sapiens
aataacagtttaaaaacttgtcatctaataagaagtcaaacatgtttaggtatattgtttacgatgtaaaacaatttttctataaatgataattttctattttgattattgaaattcatacattatgcatttactagaattcatttaatcttatgatgaactgtgtattgcttgaagtggggctgggcacggtggatcactcctgtaatcccagtactttgggaggtggaagtgggtggatcacttgaggtcaggagttcgagaccagcctggccaaaatggcgaaaccccgtctctactaaaaatacaaaaattagctgggcgtgatggcatgtgcctgtagtcctagctaccaggagggtagggagccagggctgaggtaggaggatcacttgagcccaggaggcagagtttgcaatgagctgagattgcaccactgtactccagcctgggtggtagagtgagaccccatctca

SEQ ID NO: 223336 - DNA, 587 bp, Homo sapiens
  misc_feature (7)..(7): n is a, c, g, or t
  misc_feature (9)..(9): n is a, c, g, or t
  misc_feature (11)..(11): n is a, c, g, or t
ccaattngncntgcctttttggccggggctcccaaaatgagttttccaggagattaggtaaaagttccaaggtttcttatgacctagcctcagaagtcccagaacatcatttctatctcaatcaattggccaagtaagtcactaaacccagtccagattcaagggaaggagaattagactccacctctcaacaggagaaatagcaaagaatttatagcaatctctaccataatatttatacctattaaataagaaatgtaagaaattgtctcaaggcagttactcatgtgagttagaatagagttgacatttgtgggtgtttggctcttaatgggagacctatttctgccatgacaaatgattcctctggagatttgttttaatggtacatgggtcagccaatagaaaaactctaggcatttgaaattcaaatgctggatgttctctataaaatgctgtctagctatcatcttttaaaattccagctgaggttctcctgaaagtttggtaatgagacaccctgttcctaacagaaggaaagggctctccttccagttacctatcatccctcatctttaacctctcta

SEQ ID NO: 223337 - DNA, 460 bp, Homo sapiens
gaagattgtgttgaatgttttaaaggccagccctgtacaggctgcctgactagaatccagtgacatgactctaatctaattggtgagcatggagtcagtctttgccaaaagagaaaaaggcataaaagaagggattctactgctctccccaaatccttgaagacttgcactgcacatgtaccatcttggccaggagtgctggtgaaggggtttggatggggaggtaatgtcctcacagtgatgacttctcatcatctccactagacagtacacagagaagaaagactggggaaaaggtcaccatttcagccctggaagggagctcaggaagatgaacctctcactttaagctcaaaccaagttattttgctgcttcttcagaatctggaggaagagccaggcttgatgcaagaggctcctaactcctattgcctggcattaaagacttccttccatctgt

SEQ ID NO: 223338 - DNA, 350 bp, Homo sapiens
gctgcaaggaagcagcaggtttctgggacagcccaagggcatttcttatttcctcctgttcctccctgggatcaatctgtaggagtaaactgactgaagactgtgaacaccttcatgaactcctgtgactttggacttgttttccaaaaggccaaaattatagatatgtacatattttgattattaaaaatatgtgtttccttgtacattgttggtgagaatgcaaaatggtgaagctgctatggaaagcagtatggagtttccttaaaaaattaaaaatagaattaccatgtgatccaatcaataatcccacttctgggtatttattaaaaagaattgaaatcaggatc

SEQ ID NO: 223339 - DNA, 404 bp, Homo sapiens
atatttggtcatgaaaattcttagaaaactgtgaagcgtcaaaatagatgggaaatatgattatatagcatctaaatattagaaccaactagaaaagaatataggtatcctatttttaaatgttgttataataaatgggttcagagtctatcaaaattgcattttctttggtccttttacatgctgagaaaggatctgtaattggcagcagttccgtgatagtaagcaacaaagctacttgtgatttagacaaatctaacagaacagcaaacatatatacacattaatactttatatttttataacaaatatttcaatgtaataaaaccatttcatgtgctgatcaaaacaccttaccataatttgtcattttgaataaagcaattttatttaaattttaaaaa

SEQ ID NO: 223340 - DNA, 453 bp, Homo sapiens
tccagtcctagtaaacaaccacatgtttgttgtcacttcggctggctctgagctcatttttttggcccctttttctagctttctttggctttatgcagttacagtgtcattaaggcccataatattccctgcagtaatttaaaacagccagattataccctgggattaactgagtggtttttgagacatttattgtggtattctcccaggaggtttgtattattgttgtaaaatgttacatcccaaactaaataacccttctgcagggagaagaaccagattgcactgacttcttaggatcattaagtggaaaggaaaagtttttcttagaaaacttatgggacccagtcacctgtatggaatgtatatctcagacaagatgagagaaacagccatgtttctgtcacattgtttactgtcatattaaagatatctagttttaaaatattcagt

SEQ ID NO: 223341 - DNA, 509 bp, Homo sapiens
agaggtcactctggctttcttccctggggaagtcagacagagtcctgtgtgctctgagcagtaccgccaaggcttcacgaaaagagctggtgctggcaagggccctggaggatggctgggatttccccaggggcaattccaggggcacaaaatggcttgcttgggcgaagactttaagacaggacaggacaagggtgtatttgggaagtggatccagtgtgtggggacttcagaggttaggagacaagcccagaccatttccttcacttagactagcatttctctaagcatggttcagaaccctggggtcccaagaccaaaactatacaaagccaaaactatttttataataatactgagaaattatttgcctttttcagcgtcttgatatttgtataaataatgcaaaaacaatggtgggaagaactgctagcagtttagcataagtcaaacagtggcaacagtgggtattagtagtgtttgtgatttaaaaaaaaaaaacaatgaaa

SEQ ID NO: 223342 - DNA, 330 bp, Homo sapiens
cccagtggctcaggctaggggctttctctccaggcaaagctgtttgtgtcctggcttaataaagctccctggcattgctgccccaggggtacactcacccgaggaaaaagtccagactgacaagaggctctgggagacatggggggcaggggggctcatatctctgagctatacagcgaagccctgcagatgtttaatattggatcgttggctgggcatggtggctcacacctgtaatccaagtacattgggaggccgaggcgggtgaatcacctgaggtcaggagttcaagaccatcctggccaacatggtgaaacaccgtctctacta

SEQ ID NO: 223343 - DNA, 406 bp, Homo sapiens
ccaacatggtgaaaccccatttttactaaaaatacaaaaattaggcaggcatggtggcgggtgcctgtaatcccagctactcgggaggctcaggagactctcttgaacccaggaggcagaggttgcagtgagcctgagatcgcgccactgcactggcaatagagcaagactctatctcaaaaataaaataataaaataaaataaaataaaataaatccatccatgaccaaattaatgaaaactgcagtacagtggaaataagcttatgatacaatgtccatccaccaaattgcagctcagggcttaatttttctaagaaacttttcctggtacattacattaaggagatgctcacctcactttcatttaatatgtagaacttcctggcttgtccatgctctgtagt

SEQ ID NO: 223344 - DNA, 340 bp, Homo sapiens
gaaagataatgtgtccttgaataaggctggagaggaaaggagagactggagatacaaccaaaagataaaatcagaagaatgtggtgactggatgtggagcagtaatcaaggatgactcccacatttttgggtaactaggatgatatatgtgatttttaggatggtttccaacaggatatctttaactgtagatggtgaatacctgttgtctacatagtggttgacaaaaatggagcagtgttgttttagtttctctggaatataggattgaggcttgtctgggtaatttttacagaataatttaagtaggctgggcatggtggctcatatctgtaatccc

SEQ ID NO: 223345 - DNA, 540 bp, Homo sapiens
gtgtgtgtgtgtgtgtgtgtgtgtgtgtgtgagagagagagagagagagagaggagagagagagagcgaaagttgggggagagagaaaaattgattataaggaattatcttacgcagttatggggcttggaaaccagcaggctggagatccagggaagagttgatgttgcagcatgcgtctgaaaggcaatctgaaggtaggattttttttttttgaggcttccatacttttaaggccttcaaccaattgaaggcattatggaaggtaagtggctttactccatgtctgctgacttaaatgttaatcatatctaaaaaacaccttcacagtaatatgtttctttctgtattgggattatttcacatagcataatgtcctccaggcctattcacattgtggcaaatggcaatatctcattctttttcaggactaaataatactcctttgtgtatatgtaccacagtttattcatttgtctgttgatgaatacttagaaggaaaaaacattgcatgatctcacttatatatgtggaatctaa

SEQ ID NO: 223346 - DNA, 760 bp, Homo sapiens
ggtatcacacagaatttgcacaaaacaggcacttgtcaacgcttgttgcattaaattaagttcacgtagacgcataataatgctgtaaaacgtagatttaaaaaaaaaaaaaagtccccaaaacagagacttcttgactgaactatcataactgtagccatcccttaagtctttgtgcctttgtgctttgtgcctgtcagatttttaaaaatggaaatagcaatagccttatacttcagttggaagggcagctgggtgatggcaggaaggccacatcctcttgagtagcaagccttgcgattagatgccagcttgatcagacatagcctgtgtgattcagctcaaattacataacctcactgagacttcatctgaagataaaaagacctacatacctcctggtgtgaggaggtagttaatgagaaacaaaagacctgcctaacaccagtacccagtatgttcccagcaaacagtaattatgacctgaaagtgagaagaaagagcagctgcacagacctatgcatcttggttatattaaacgtcccaaatatcaatttctttttctgtaaaatgagaacattattttttaccttctagagaggtgttgaagagatgattaaatgaaataattaaataagagagctgtagaatcataaagctattgcaaacttaaatataaattcactccttcaaagcatatatattgaccccattccatgccagacattatcacgtatgaataaaaagtaccaagtggtgc

SEQ ID NO: 223347 - DNA, 500 bp, Homo sapiens
tagtatcttgcattaatcaaggcagtgggtccaaacagtactagtaattattatcttcttcaccaccatggacaggggagggagcatgaggaagatatttaagaatacttaagaatatccttcatgaagtagaaaaattattaattaaattttgacccttgggtacatatttttattatattttgtgtgacaaagtgggaaattctcaaaaagattagtgctacaaagtatgatggtttcccggtgaagagacacttaggtgattgtttgatttgcaaatgcaactaggcttttttcatgaaaggccatttggcacattttacctacataacaaacctgcacatcctgcacatatacctcagaacttaaaataaattaaaaaaagaagaagacatacatgcagtcatccggcagtgaaaaaagctcaatattaccgatcatttgagaaatgcaaatcaaaaccacaatgagataccatctcatggcagttagaatggcat

SEQ ID NO: 223348 - DNA, 478 bp, Homo sapiens
cttgaatagataaatggcaccttggtcattggaagtcttctgtgaagtgaaggtagtcacatggttgtgactctgctcatagagttaatattacctaaacattaaactaagctaaatttaaggcagtggtacaggtgacagatcctgatgcccacagatctattttctagtgttgaaatatgtttacttgattttaattttatattttaaataacatttactgttttaaaaaaccacttacctattatagaaaacttaagaaaaaactagcacagcacaaagactatcattaaaatcactcacaatcctaacacctaggcagagtgaaattggttattttttcagagaagtgaagcagattaggtttaacagcatttctagagtaacttctatgatatgccagaagggctcccacaagtgcagctgagtatctgtatgatgtggtctgagtggcaaatgactcaagagttccttcatt

SEQ ID NO: 223349 - DNA, 627 bp, Homo sapiens
atgcatcgtgcttagaagagacatgttttcatttaaaacagtctgctaattctttctcttgctttcattactccaaattatatgtctcttcttttaacagccaacaaatggctactctgattaaggaggcccttcattatccttcttcctctcacaccgttttataaggtcatttatatggtttctgtgcttacaaattcattgagcatttactcttatttataagtgcagtaggaaaaaaagaagggataaatttagaatgttaacacagaagtgttttttgtttttgtttttgttttcttgagacggagtcttgctctgtcgccaggctggagtgcagttgtgggatctcagctcactgcaacctccgcctcccgggttcaggtgattctcctgcctcagccttccgagtagctgggactacaggtgcacaccaccacacccagctattttttgtaattttagtggagacagggttttaccatgttgaccaggatggtctcgatctcttgacctcatgatctgcccacctcggcctcccagagtgctgggattacagacatgagccaccactcctggcaagaagtgttttttagatggctgacctgaactctggcaggtcacttt

SEQ ID NO: 223350 - DNA, 514 bp, Homo sapiens
caagatagcagctataaaaacgagatttcgatcgctctgctcccccacccctcttggtgaaagttgcagttacaaaggggtagttcttttttctttttattgtggtttgtttcttgttctcaaaagcttattacattgggtgcaaacaacaacaaaaatgccataaaaaggcaagaatcgtaatatgcttaagagctaaaaagacctatggtgttggtttaaccaatgaaaatattcctgcaggtattgtaaaatttatgtgccatatgaaaaacattaagggtgttgtttttttcacagaggaaaatgttcattgttgagccattttgtaaattattttaatgctgcatttctgcttaaacctcatgattttgatatataagccagtttaatgttttctatacagaccctggcttttcttaaattttatatattggaaagcccatgtttgtattggaaactgctggtttctttcatactgaaaatctgtctcgcgcggcgtgatgccatgtgg

SEQ ID NO: 223351 - DNA, 451 bp, Homo sapiens
cactgtgttagccaggatggtctcgatctcctgacctcgtgatccgcctgtcttggcctcccgaactgctgggattacaggcatgagccactgcgcccggcctctgtactttatattaatcttaattccttgaatatattgtcagagcctttggtggaaggccatatctgatatttattctgcttccccatcaccttctagcatgatttggagctgacaatagacattagtaaatattgttgatggagctatgacaataactgagcttgctagctccaacataaaacatagacatacataaagggaaaaaggaactcaaaaataaatatttttttaacaactagtcatgggaaaaatctaaaagatgctagcatcagctttataatcttttccaattgggaagatcaaattatatagcctgaatcagagtaatagctgagtcatcattttt

SEQ ID NO: 223352 - DNA, 441 bp, Homo sapiens
ccaatttaatggtgactacaagtcaaggggcatgcagtcttgaatgggggtccgttcagttgttttaaaggccaccatgccttcgtgacatttgtagaaatgtgaaaaatcagcaacaaaagcagatgctgagtggagggaaaagaaaattgtgtttgttgcatgtctttagttttgctgcacggaggtgagaagcatttggtggtgttttcataaggcttttagtttgttggaaagtgcataagaaaatggaagtttgcccagaattgggccaagccattttcaaaaatactctttggtttggtattttcataatttgaaatgtttgtattagaagatttgactcatatgtaccatagaaactgtgtttgagaagttcagcttttatttctcaaggtgtgttcaataatatattaaaaatctgtgtaccaagaactttca

SEQ ID NO: 223353 - DNA, 505 bp, Homo sapiens
ggtactacactgttatcatgttttattttggggagagaaggagaatgttatgggttgaattatatcctccaaaaagaaatattgaagccctaacccctaatacctcagaatgtggccgtatttggaaacagagtcattgtaggtgtgattagttgatacgaagtcatgctacagtagggtaggcccttaatccaatatgactgatattctaaaaaaagaaagagacacagggagaagaatgccacatggagagaaggagatacacagggagaagatggccctaaaacagtggaggcagattttggagtgatgcatctacaaaccaagagatgccaaggattgccagctgttagtccatccactttgtgttgctgtaaaggaatgttggctgggaatggaagctcatgactgtaatcacagcactctgggaggccgaggtgagaggattgcttgagggcaggagttcaaggcctgcctgaacagcatagtgagaccctgttcctaa

SEQ ID NO: 223354 - DNA, 480 bp, Homo sapiens
tacatattcttctaaatgcttctgtacatatataacataaacactttttttacataaacagaatcatgcataacataaatagaatcatgcataaaaaatagaatatttttaccataaatagaatcatacatacagttctgcacctcgtcttttttacttgaacaacattacaaggtgtcagtacctctagatttctcaatttttttttttaaatagctccatggtatttcagtatatggatgaactgaaattgttctctccagccttacatatatcctttatgcaagtaatttcttaggataaacttccagaagtagaactgctaagtcaagggtatgtacatttaaagttttgataaaaattgccagccgtccatttttggctcacatctgtaatcccagcactttgggaggctgaggcaggaggattgcccaggagttcaagaccagcctgggcaacatagtgagaaccccatctcta

SEQ ID NO: 223355 - DNA, 142 bp, Homo sapiens
aaggagtttcccatctagtagtggaaatggacctgaaataactaaacatttataaaatttgcaaaacatgtatcattacaaattgtgctgcatgctgaaaggaaaggaacagagaggaccctgtgcgatggctcaagcctgt

SEQ ID NO: 223356 - DNA, 404 bp, Homo sapiens
gtcaaagtctctcctagggtccatcttggggccagagttacctaacagcatgcacaggtcctgcagtccttagtcatgttaagcagggaaatgaaaacctgccaatatggaaagaacacaaatcaccccttctagaagattcagcagtgttttccaggaatagtcctctgacagtacctgataaacaatgctcttctcacctctctccttcccactgccaggccacctagagatgggaacaacccagctaagaactcctaaaactcgtttcctctccctctctgtgtatgacttgcccaaatggtgctcagggagagcttaggaacccaggccttcgggtcctcagatgaagcccttcaaggcctgggacgggctgtggggaggggctggctgctcaccatggc

SEQ ID NO: 223357 - DNA, 459 bp, Homo sapiens
ctttacttctctctgtaaaatgaggatataatctacaaatagggtaattaatattaaataaattaacattatatatatagtaggcactcaagtttgttaaatcatattacctgaacagaaatgtcaacttcaaagagtcaaaactgactgttttaaacccgcctgaggcctagaaggttggcctcaattctcaatgtttcagaatgggctacttacaacagaaccttgaattatgtatgagagctcatcaactgattgctgacttctgattcttcctgagctagaaactactcacatgtcctctgtaaaccatgacccgagaatttgcttggagcagtccaacttggactttttcctcttcttacctctttctcttcttgccctccccctaggccaggcatcatctcccttaaccagtctaatccacaatgaaaataaagtcactttcagcttctcaat

SEQ ID NO: 223358 - DNA, 342 bp, Homo sapiens
tggccctcgtagaggcggtgccctatagaaagccgtggctccaagctgcgcagagacagttcttactgttatgtccttgctcctcttccactgtccacataaaggccccatgaggtggttctcaatcccaggacccatcagatcccagaaaccttttatcgacttgttctcagtgatgtttaaagaattgcagggaaagggcactcactgggatgagaggagatgggaacacatcaaatacatcttgaactctgctgaaagccatggttcaccagaagcatgtgcagtggtaacacggccagcttcatgtgtgtgaggcggtccagggagcacacaggttta

SEQ ID NO: 223359 - DNA, 506 bp, Homo sapiens
tgcattttgctgatgttcagaaatcaagtagcagggaatataaaaaattctggcctcaactatgaaatgagttgccactcaggtcataataagtgacttttgagtatgacaaaattaaaaattaaaaacccagcatccttatgtgtatgaagcattaagtcagtgagctcttgaagtggttgaaaagaatgagttcttgtagaaatcatcgcatccacagggaactgtgagccagcttgagacacatcaaggtactgagtatggagattccacgatggcttcaccttggctggcctacaaatgttccatggaattaaatctggagcaagctcagttatgatgacatcaacccaagagttctggtctattatcaaagcaagtcattgaagtctctctattaatgggaaagagctcaccttctctgccaatggccctcccgcaatgagttcacatccgtgcagctctttgtaactctcaaaataaaataatttctttaacaatgcttg

SEQ ID NO: 223360 - DNA, 385 bp, Homo sapiens
gaggcaggtaggtcctgtttgtatggctagtatgttcattaaatatgaaagtaatggaaagatgtttatgacataaggagagaggaaccttcgcctgtcaggataatagaaattgaaagatttttatgacctggctcagcagaaaaaggagtatatgatgttagcaattttttagaattgatttttcagaagaaacatgcaaaacaaatgagaattaagtagctagaaagcctttttcccccctttattcagataaagtaactgaagacttttaatgagaagcctggtttctgtctttctacacggtgcactgggaatagtaagctgttagaagtcagtgcttagaagtacctaccatcctaaacacaggaaccaaaaacaaggg

SEQ ID NO: 223361 - DNA, 499 bp, Homo sapiens
caacaaggggtctctgactttttttcattgaattcaacgtgttgttctgggtctgtcagccagaagttagtcaataagaagttggcaaattttaaaattatgtaaactggtttcctagctgtcttgagagccagagatgtccaagaacctggtttctgctgtcaaaggccttcaatcgcattggaaaaagaagccccctgtgtgcagcacaagacagctactcaaaaacttgattacagttgcaggagcagtggattggacatcaggaggcctggtgtgctccatcactgaccagatgtgtgcccacagactcctctaagcttcagtttcccacaagaaaaatacgaggcttgagcgaaatcactagttcccaaacttgcctatttgtgagaatttcctaggaagattatgcaagcacctcatcccaggagattctggtttagtgggtatgagtgggacctagaattctatattttaagcaactactctagtgaattct

SEQ ID NO: 223362 - DNA, 373 bp, Homo sapiens
atatatccccataccacccagtgtgatatacacggccctccctccatagtctcacattggagtgtctgctccatggagacacaagccttgtctttcttgtacattatgtatccccagtgcctagcacagagcatggtgcatcatgggccctccttttgcatttgagaagctaacaaatgatcaacttgcctagcctcatttcttcatttcctgccatctccttcatcccctcactgaccacccgtcctctccccaccccagctgccatcctgttcctgccactctgaaccacagacgttttccttgatacagacaccatgctcttgtaactgagcctttgcatgagtctgctctgtccataaactcctcccca

SEQ ID NO: 223363 - DNA, 454 bp, Homo sapiens
tcatttggggaacctggtatgtgcttcagtgagaactgttggatagttaccagaatcaagtatttggtatgaaaagaccattacgtttcttaaaacagtgaagtaacatgaaattagtttcaggaagattcaactgttcatattttgtggcactacaaaaactaattgagcacttactgtgtactgagcactgtcctaaagggctttattcatttaatcctcacagcaaccctttgagacataggtagcccttatgttacagatgaacttgagtcacaggggggtgtacctattggcccaaggtcacgccgtaactgataatgccttggctatgaactggcagtctgattccagagcctatacacttaaccactacactgtgtccctgtgaaggtgaattagacaaagaagatgatccttgcacatagcagtgaaggaatggtaatggatcact

SEQ ID NO: 223364 - DNA, 589 bp, Homo sapiens
agatcatcctggctaacacggtgaaaccccgtctgtactaaaaatacaaaaagaaattagccgggtatggtggtggacgcctgtagtcccagctacttgggaggctgaggcaggagaatggcatgaacctgggaggtggagtttgcagtgagccaagatggcgccactgcactccagcctgggcaacagagcgagactctgtctcaaaaaacaaacaaacaaacaaacttctcctgtagcagtttgctttgagttgtgggtgccacctccctcactgtctttttctgagggtacataaataaattgcatcctagcttgagatcaggagcaatggtttttagttctctgtgtccaacacaattcttctacacagtgtcttgcccaatacatgtgttggtaatactgacaaacatagttaatcttcttctttgaagattatctgaagcaagattttgaccttaggtcagcttcccctgaagtatgtgattggaaactgaacgagttcagattttagtttaggtaaaaatataaccagagaagttgctaccaagcatagttgactttgagctgacctaacttttggattatg

SEQ ID NO: 223365 - DNA, 686 bp, Homo sapiens
ttgatattaagaaatctgaaaaactttgaataggtagtaaaagatgatgaattcttagagctttacctcagaatgtgtaattttcatgcttttcctttctagaaatctaggaaacctgacatgggacctttggtaaatacattattattcatacattttgatggaatataactaatatgtttattttctctaaaccatagtttcataagtacaagccagacctttgatttacctaccctatcttctttactgatgaagctgaaactactttgtgatgcctattgtcccagatctttctgttaattgcctaacaacaaaccagtttagaaacatcaactggaatcaatttgcatttgaaaattagatcagcacaaagacttgatattgtggaatgactagcaaacaagcaatgtcatctaacgaacaagaaaggctcttgtgttataatggggaagtccttgttttccagttgtctaaaggaaattttgcagataaagagcctacaaaaacacccatattacatgtcagaagaatggtatttgacagaggaacaaaagtatttgttcagaagtccactggattttttaccataaaggaagaaaactctcatttaaaaatcatgtgttgcaactgtgtgtcagatttcagaactggaattaacctcccttacattgtgatagaaaaaa

SEQ ID NO: 223366 - DNA, 538 bp, Homo sapiens
agatggataccgtatcgacgtggggcctccggtatgttgccgctgcgttgagtttcataagtacaagccagacctttgatttacctaccctatcttctttactgatgaagctgaaactactttgtgatgcctattgtcccagatctttctgttaattgcctaacaacaaaccagtttagaaacatcaactggaatcaatttgcatttgaaaattagatcagcacaaagacttgatattgtggaatgactagcaaacaagcaatgtcatctaacgaacaagaaaggctcttgtgttataatggggaagtccttgttttccagttgtctaaaggaaattttgcagataaagagcctacaaaaacacccatattacatgtcagaagaatggtatttgacagaggaacaaaagtatttgttcagaagtccactggattttttaccataaaggaagaaaactctcatttaaaaatcatgtgttgcaactgtgtgtcagatttcagaactggaattaacctcccttacattgtgatagaaaaaa

SEQ ID NO: 223367 - DNA, 249 bp, Homo sapiens
gcactgtggtgttttggaaagggcttagcacctgaggtttcagttaagatctgatatccagtaatttatttttcactttggacaagtttacctaacctttctgaatcctattgtttgtttgtaatttggttcaccagtaatacctattggagttgggagaataaaatgagatagtttatgtcaagcacctgctgcactgcctagttgttaaagaaatattattttccttctgtaaacatcctttactca

SEQ ID NO: 223368 - DNA, 381 bp, Homo sapiens
tatcctatttccacacatcttagctcactggtgatgttctcagtaactttgaaactctagttcatctgtctcatcagatccctcaaatcccggtctcctcatagtctagggctaaagctcattccttctgatacatggtatttgttcatttaatcaaatttgaaggacaaatacctggacaaagagctccctgatctgacaagggtgaagagtgattctatacatgtggcagagaggttttcagacagttaccaccatcatgtcctcaatgatgaaaagatttctgtattcttcgagcagtggcaccctgtactctcttgggtgttccacagactaaaccatccagctacttctctgaaataaaggattaccctaatttga

SEQ ID NO: 223369 - DNA, 1175 bp, Homo sapiens
acacgctgtagagaaaaactcattattaatcttggccaagtcataaaacaaacaaaaaaagggacaataacccctggcaggagagtatcagaaataaatgctgttacaatgtattatttaaaatgtccagttttaaacaggaaagtatggcttatctagtataaaaaaaaaaaatactcagtataaacagaagctatttccaagggttcccaaatgttggacttaacagacagacttcaaagcagccaataaaaatacatcttcaaagaacaaaagaaaaccgtgtttaatcaaagcatgaaaacaatgactaatcagagaacacttaataaagagatcaacattttttaaaaaatggaaattctggagttgaaaagtaactaaagtgaaagcttcattagagggacaacagcaaacttgaatgcagaaggaagaatcagtgaactcaaagataaatcaatacaaattacacaatctgaagaacagaagtgagaatgaaaaatgaaccaagtaggaaatctgtgggttacaatcaataccaacatatgcataatgggaatcccagaagaaaagaatagtgagggccatacaagttttgacatcttttgaagagtcatagaagtttttaatgtctgaaaacattccaaatttagtaagaagtataaatctgtatatccaagtatctcaataaaatccaagtagaataaacattaaaatatccacaccgatacacatcaaaatcttgaaagcagcaagagaaaaatggacttatcatgcacaggggaaccccagtaaaattagcagctgacttctcaaaagaaacaatgaaggccagaattaagtggtataacatactctactgtcaaacaagaattctaaatccagtaaaactatccttcaaaaaagaggacaaaaataaagatcttcccagatagacaaagagaatttgttgccaccaaaattttttttacaagatatgctaaagcaagtacttcaggctgaaaggaaacaccaccagatggtaacttgaatccacataaaaaattaaagtaccagtaaaagtaattatgtaggcaaatgtaaaaaatagaaaaaatactctttttaagttttcttctcttacttaaaagataattgcatggaaaaataatgaacccatatagttataaataata

SEQ ID NO: 223370 - DNA, 635 bp, Homo sapiens
taattaaaattaaaaattttagtttcaacattgatgttatagatgagtctgattctgttgattcctttattatttgcttgaattttttcccttgcttttatagggcatctcataattattgatcgaatgtcagacatcatatcatgcatagcaggagtccccaacccccgggctgtagaacggtaccggtctgtgacctgttaggaactgggccggacagcaggagttgagtggtgggcgagggagcattattgcctgagctccgcctcctgtcagatcagtgggggcattagattctcatagtagggtgaaccctattgtgaactgtgcatacgcaggatctaggttgcatgctccttgtgagaatctaaagcctgatgctctgaagtggaacaatttaatccccaagccatctccccaccctccaaccccccagccccacttttgtggaaaaattgtcttccacaaaacagctccctgttaccaaaaaggctggggaccacagatgcatagcataatagagactgaggtaaatatcatagtatttatgtctggaaacggggatgcctcttttctgctaagctattagcttggggtggggggttgagcttaggttggtttgaattccagattaa

SEQ ID NO: 223371 - DNA, 462 bp, Homo sapiens
atagatgttacggtctgtgggggagatgggcctcaagcaaatattctcacaagtcaatgcaaaattacactactgtgcatgctataaaaggaagatttgtgttactataatgcatgtaaactggacttaggaatatcgagagaggtgcccctgggaaagtgatgcttgaactgggctgtaaaggatgagtagccttgccaggcatagtggctcaggcctgtattctcagcactttgggaggccaaagcgggtggatcacttgagcctaggagttcgagaccggcctgggcaacatggcaaaactccacccctacaaaaaatacaaaaactatctggcatggtggcacacctgtagtatcagttactctagaggataacctgagcccagtaagtcaaggctgcagtgagctgtgatcatgccacagcactccagcctgggtgacagagtgagaccctgtttcc

SEQ ID NO: 223372 - DNA, 506 bp, Homo sapiens
tgtgaaaccatgaaactaatattcataatgaccttacaagataaagaacttgaaggaaaaacagcttctgtgtgcctggccgtcaccatcagggtgctccgtgaaaaacatggcatctcaccagagccacagacatcgtctccccaggagcctcagtgctggcggccctcagccccaccagccactatacttcattgttagtccttaattaatggtgcctttgtgcacctggtcatcccgatgccaagcccagaaccgaatggggcctctgacttctcttccacgtctaatcagacgccatttcagccaacatttaccaagtatcagcaggtccaggcctgggcctggtgcaaggagtgacagggtctctgtttgtgacatcctgtccctcacccccacccctttagtcccagcaaggttcagagtctcattccctgccctcatttcttttatttgttgattgacatataacataggtacagtaaagcacactaattttaagcata

SEQ ID NO: 223373 - DNA, 676 bp, Homo sapiens
gtatggtgaaatgaaaagtgctccggcctgggaacgataaggtctgaattacccgaattttattactgactctgccactaactatacgacatctttccataatttgtttcctctttctgagccatgatttctttgtatataaactgaggaagtctttttcccgttgcaaaacagcagtggttgttcaaacctaacaattgtgattctcaagttctttacttcctttttgtacttttcccgctcaatctcgagttctttacttcctttttggacttttcctgctcaacagaagacttagatctcttcatagaaaaaaaaacccagataattgtgcatttatctttaactacacttaatgattaggctctggagttaattgatatggaatatgaatgcctcctcagtcactatcaaggagtataaccttggcaagttgtttaacttttctaggctttggttttctcttctataaagtagtatttcctaggtttgttgtgatgattaactgcagtaattcatcaaacgtaggacctggctcataggaaatagtacatattaacttttgaccattaccttttgtatctacactgggaaaattaaaactcaacctctttcttcagatgtttaattcttatgtttcctttttgtattcatgtttctgagtttgaaaagacaa

SEQ ID NO: 223374 - DNA, 411 bp, Homo sapiens
gaattacaggctttgagaaccgggcccggccccagccaattttttaaaatattttgtagagacaaggtcttgctatgttgtccaggctgctctcaaactcctgggcttaagtgatgttcctgtctcggcctccccaagagcagagattacaggcatgagctacctctccaggctcaaatttccgaattttttaaggacaccagtcatgatggtttagggaccatcctactccagtatgaccccaactgattatatctgcaacgaccctacttccaggtaaggtcacattctaaagtacggtgggttaagacttcaatatgccaattttgggagtggacccaattcaacccataacaacatcattcaggctgggcgcggtggctcacgcctgtaatcccagcactttgggag

SEQ ID NO: 223375 - DNA, 1225 bp, Homo sapiens
ggacgctctaccggggtgggggttcccagaaaggagggggagaggagcccgagtaggggaatcctgccctctcaagtaaaaagctggatccccggcagcaggctgcagcccgtcctcgctaaggaaacgacgaggcagacagagggccttttgcgcggaaaggcagaaggcagacactttccgaggtccggacgcaagccgatcccccatcccccgagggaggcgaagggtgccccatgggtggctgaggggacgcccggcccgcgagggacaacccgaggaggagcagtttcatctgattaacacctgagtctcgtccagtgtgacattcttcagaattcatcctggaatcaatattatgccaaagaaaattttctgaaagtcttgctgtgtcagccaggctggaatgcagtggcaccatctcagttcactgcaacttctgtctcctgggctcaagtaattctcctgcctcagcctcccgagtagctgggattacagctacacagatcataccactgcaactcagccaaccagcacatcggacagtgggaggaggaattcttggctaagagtactgaggtaaactcttcatctacttggaaatgcttagaacagaaaagcctgtaccctgatttactgagaggaaaagttggctgactcttggtctgaattgaaatattcctcctttgaccaataccatgaataaaaaaagaaccagaccaaggacattactgtgagttttcagaacatcagagataaagagaaaaacctgagattccacagagaaacgaaggtcattttacaaaggatcagaaatgagaatgggattgaacttctcaaaaccagcagtggagagtacaagaaagtagagcattgccctcaatatactgcagggaaaacaactttcaacgtggaatttaatccagtgtaaggatagaatagagtgtttttagacagccatgtctcaaaaattgtactttttgtcttctgcagaggagatgattcagtgcaataaggaaataaaccaagacatgaaagatatggaggactgtgggcaggacagtgacaggagatcctagaaagacagctgggctccaggcccagagagcaactggtccaggttggagcagaactgagttggccagggctgaggtctccagggaaaaaaaaagaaccaatggtttatctatgtgctggacccagtagagcagagcactgaccactg

SEQ ID NO: 223376 - DNA, 792 bp, Homo sapiens
ggacgctctaccggggtgggggttcccagaaaggagggggagaggagcccgagtaggggaatcctgccctctcaagtaaaaagctggatccccggcagcaggctgcagcccgtcctcgctaaggaaacgacgaggcagacagagggccttttgcgcggaaaggcagaaggcagacactttccgaggtccggacgcaagccgatcccccatcccccgagggaggcgaagggtgccccatgggtggctgaggggacgcccggcccgcgagggacaacccgaggaggagcagtttcatctgattaacacctgagtctcgtccagtgtgacattcttcagaattcatcctggaatcaatattatgccaaagaaaattttctgaaagtcttgctgtgtcagccaggctggaatgcagtggcaccatctcagttcactgcaacttctgtctcctgggctcaagtaattctcctgcctcagcctcccgagtagctgggattacagctacacagatcataccactgcaactcagccaaccagcacatcggacagtgggaggaggaattcttggctaagagtactgagagatggggtttcaccatgttaaccaggattgtctcaatctcctgaccgcgtgatccacctgcctcagcctcccaaagtgctgggattacaggcgtgagccaccatgcctggccaaaattctgtatgtctttctaatctcacttcctaatggagataaaatagatctcaggcttatgtatttttctagaacattaaaatcttgttttttgtgta

SEQ ID NO: 223377 - DNA, 154 bp, Homo sapiens
gagggaagagggagtaaggagggaggaggggggaatacttccaaactcattttatgaagccaagcattactctgataccaaagccagaccaggacaacacaagaaaagaaaattatatgccaatagccctgatgagcacagatgcaaaaatcct

SEQ ID NO: 223378 - DNA, 407 bp, Homo sapiens
gtacaagatttctttatttctaccacctaacacatattattaagtaatctcattacatttttgctattgaagaacaggatctttttagatggttgtttctgaaattcatgggatagagttccattttgcatatcatctcagcctgtcatcctgcctgttttcttccttccacctattgtttagacatttctttgtccattgacacctttctcagggggtaaccggtgggaaggagaaggcaaggaagaacagaggtgaaaaaccaatgtgtacctcttactactttataagaagatattatggaaaatttagatgaaattatattttttggtagttttccttcatagacaaattctgtatttatttaataaatagcacaattccaagctttttatgggaaaatatag

SEQ ID NO: 223379 - DNA, 576 bp, Homo sapiens
gaggacaagtttaaagtaatgcctaaagaactggaacaagagaaagatgtccactttcaccactacttgtctacatacttctgaaagtcctcccagggcaggcagccaagagaaacaaataaaaggcctcaaatcagtatagaggaagtcaaattatctctgtttgctgatgatattaccttatatttagaacaacctaaaggcctacctaaaaactcttagcattgataaatgaattcagtaatcatgcaggatacaaaattgatgtacgaaaagaagtagcatttctatacaccaatattgattgagctaagaatgaaataaagaagtttaccctataactgaaaaaaaatacctaggaatccatctaagcaaggaagtgaaaaatttctataaggaaaaccacaatacactatgaaagaaattgtagatgacacaaacaaatgaaaaaggcatcttctggtgatgtacctgaagaattaatgtagttaaaggattatactgctcaaagaaatctacagattcaatacaatctttctcataatacaaacaccgtctttcacagaattagaaaaa

SEQ ID NO: 223380 - DNA, 439 bp, Homo sapiens
gggtgtgatcattgctactaggagatcactgcttccaggtttagttttcaccctttccgaactgttaattcccttctgtgacagagaaaaacctggctctggctctcatctcaatacactcacttaattaatctccctgtatgtaaccaatctcctgaccttatggctgccttgcagaccaagacatcaccttacatggaggccattgtgtagtagaaatgagactagcccctttgcttttcccactataacttgtaaatgcactacacaaagccaatgagacccttttctaaactaattcctattctttatgcaaaagagattatgtatgaaatttgggactccattgatttaatttatcataattttgtgaaatttattttgctatagaatgaatgtatattataatattggaattaaaatttctttttaatctgaa

SEQ ID NO: 223381 - DNA, 488 bp, Homo sapiens
tctagaggatccctgccttgatgatgctccactacttgacaggtaacctctaagcttcaggtttcccatgcatatagcatggggaataatacagtacctgctttatatagtgctgcaagtattaagtgaggttgcgcctgcaattgactcaggataatacagggcgcataatactaagcacaattattctttcataggactaaacagaaatacatccctgagttcattcagttgatatttatgctacatttcttctaggttcccaccattctgcctcttttcttcctacttccatcagaggaacagggaggtagaaccagagtagtttttggtctccaaacaaaccatgttcttctctttactgagaaaactctagtggttttgcttggagtatttaaattgaattaagtacatttgggactagaattggcttttttttattattattattacctgaaattgcacgagtgcaattgggaagcactcat

SEQ ID NO: 223382 - DNA, 435 bp, Homo sapiens
tcactgaagcaccatattcttatagtgtcattttaatctacctgaccaaaatctgttttgagacaatataacaccaagtcagggttaggcaggctaagttttagtctttatgctaatttgttaaatgaccttgggtcaatttattgccataatggaaaatcaagcaattctataactttagcctgcctcctttttttttttcttttttagcttttttcttacattttttaaaacattttaagcctcatgaaattgcctttattattttcatttgtaaggttaaaagtttaaaaataggctataggtcccagctacttgggacgctgaggcaggaggatcacttgaggccaggagttcaaggctgcagtgagctgtgatcacacctgtgaatagcccctgccttccagcctgggcaacatgggtagaccctatttc

SEQ ID NO: 223383 - DNA, 186 bp, Homo sapiens
ccaccaaaacaaccacccaacagagacctgcccagagaatcataagccataaaatgactattgttgccaggcacggtggctcatgcctgtaatctcagcactctgggaggctgaggcaggagggttgcttgagcccaggagtttgagaccagcctgggcaacatagtgagaccttgtccctattta

SEQ ID NO: 223384 - DNA, 636 bp, Homo sapiens
gttgtccaggctgatgctttcagattttaatacggcggtgcacacagatggttaaacaccgtgtggcacagcaacgtccctgcccctccccacactcagcaccttctgccacgagggctggtaacccgtcaagaggcaaccgcacacgcctgccgctccgtgggacatccagtgtctgtcgccgtgggctctgctacggtggtgcaagagccaccaggggatgtggacacaaggggtgcagccgtgtgcccgagacgcttgatttacagacactgaaatctgaattttacaattttcttgtactatgaaacatcattagaatggttttgactttttccaaccatttggaaatgtaaaacccgttctcagctcgccgactatacagaaacgccgtgggctaggcttgccagccgtcctccccgctccctctctaagtaacacttgtgcggctccttctggatacgccgtcttctgacatggttcccttccgcaaggggacacgagagcatagtgccggattcctgtgacctcccgcgagaacttcttcaaccctggctgcggctcaccaagcttcactggacacgttaaatcatgtcagcagggaggaacctcgctacctcacccctaaaactgtcg

SEQ ID NO: 223385 - DNA, 744 bp, Homo sapiens
cacttctccctctccttagttctccggtaaccaaaccttctctcgttatatacccaatgataaaaccaaagtaattgttgtacaggttaaagattcaaaacaaaccatagcaactgaaacagggtatcaggacgcaaatgcttggctggaatggattaaacattctgtttgcaggctaaacaaaagcgcctgttacacttgtgtgacaggcaggccagagacccaaattgttccctttccacttgggtggtcctctcacagaccgggcacgagctgtgtggtagctctcttccagaaccccacagcctggggtggtgagtcatgcaagactctttcactgctgttccctgaggtcaagagccctgcgggtcagccctgaggactatccggcctccagcccctgatgttaacttcacctcatgcctttcacggcagggggaaaagttagcattccttggagacttaacagggtgcagtgaaaccaggccttttgaagagcttaccaatcagtctgcccttgttcatccccgagcagatgtgtggtggtattgctggggactactgctgggtactctgccaagtaattagagcagcactcatgctctagtccaactggccatccctttcaccctagcattctgtcaatatgataaaaaaaaattgtaaaagaagtgcctcacgtgggtcctttgacccccatgtttatataaacactattggagttctatgaggagaaccagatga

SEQ ID NO: 223386 - DNA, 446 bp, Homo sapiens
tctgtcaaaatgctgctccttccatactgagtctctttgctcctcctctttcccccagtcaacctggggttaagtgggaaggggagtaaggcaactccaggggatgccttccaaactccgggagagggaaagcacaggaattgggagaagacgtgaaggcagagcttgaactcctatgtacccggtgacacaagactgctctgagggtggcgcccgctgcttctcccgggcgccccgccagccgctctccctggcagtggcgccctttcctcgccctctgcccgcccaagagctgctggcccagagcagccgcattcccgaccctccaaggcgaagatcccctggattcaccccctcactggcctttccgcctaactgactgaaacccggctccccaggcacagattttccagcctccctaagaaatgaaaggttcgcgtgccctt

SEQ ID NO: 223387 - DNA, 158 bp, Homo sapiens
aggaaggtggggttggtcgctgtgctgaatgctgctaagcgttacctttctgcaaaaacctttgtcaccttcttgattacaaatcccaccactgcctccaagaaagagcgttaattccttctggaatatcaggtctctcacacacttctgccaacata

SEQ ID NO: 223388 - DNA, 1125 bp, Homo sapiens
gctggagtgcagtgcagtggcatgatctcagctcactgcaacctccatctcccccgctcaagagattctcctgccccagcctcccgaatatctgggatcacaggcatgcaccaccatgcccggctactcttttatatttttagtagagacggggtttcaccatgttgaccaggctggtcttgaactcctgacctcaagtgatccgcccgccttggcctcccaaagtgctgggattacaggcgtgagccacggcgcctggcctaaatcgccctttcttattactttcttagaactttgggctatctcatttatgaatgatggaagagttctgctgaggatttcaattcagaaagcagggttctctctgtgggtaaacttcatatcacccagacataatttctaccgaacatcatcaattaaataacaagagaggaggtcaacaccttgagacctgaggaagaagaaaaaatacttatcattaagtgtaggatgcaaacattctattagaagcttagaagcaaagagtaagatattattttcgtggatacaagagaagacagagaaagacagagggagcggcccttacgactgatttgtgtttacacaataaggaaatctctcctctggggtctctccgtagttcacagggaccctgcttccaggggcacgcgtggcgaagagagtccgtccagagctccagccctcactgcacttcccaggtgccaagacaaaacatcactgggtggggagagaactgtcatgaggattattcccccgccacacaatgctgagcttctctccctctctttttgaagaagtgcgtttatgactgatcgctcaacaccttgttggttctgattgcagaaaacacaccttataaatatatgataaccatcctgtaatagagagtgtgacaatttacttcacagtgcgtttcgggctgctaattgatcgtttcagtccagggacgatttggaataaattatagccatcaaaaggatatcacagctcattttggtggaagggtttccacgtcgcttcgcgttcgtctcccggagagagcagattgcacccggcgggcgttgaggagcggagggagggggcaggggaaaaggaggccagcgg

SEQ ID NO: 223389 - DNA, 511 bp, Homo sapiens
gatgggcttctctctctgatgtttgtcaaaatcttaggtggtgttagctctacactaaatatgacattctcttatcttccatctactatggacagatccaggaggtgctaactatcctaccacaattggcaagaggtgggagtacaggttctttttaactgcattgcaggaccagactctgaagacagctgcttagatctaacagcgatttctttcagtaacaatcaagtaggagaagagccacatttgcttaggcctgcaagtcagtggaggaggacttaaactacagcaccctgcagcagacacattttggaacttcagctatttatgtaagaagctcttgaaatcagcttttctgaaaagtggcaccttagatttacagaagtaagcccagaatgcaaacggttttaaccattcttcagtagctaccatactgacatccaaaactctgtttatgataagctatgttgatccttaaagctgtgctttatagataaatattttgaaagga

SEQ ID NO: 223390 - DNA, 468 bp, Homo sapiens
agacaggatgataagagtttttctgctctttattgagaactttagacaagcaccaggtttttattactcatgcttcaaaatttacagccttcctgaaattctggatgggagtggggaagttaaggaagggtggtactaaggtgaggagtggtttgcttctctgaatgtttccttcttcatcaaaactatcattttcaatgtgaataatatattctgaatttttccatttctgtgcatttgcaatactaacaattaagtgtaagcaactgtcactctcacttttattataaatagtctaattgcttctcctactcacacattctccacagaacaactaagctgattacttaaatatgtcattcacatcttttccgctgctgttttaatgcctccttatttcaagttgaaggaacaccacataatgcacctgacatgggacacaaggccctccatattctgccccctgcc

SEQ ID NO: 223391 - DNA, 425 bp, Homo sapiens
tggactccggtcagggcaagcattagtattctcctgtgtgatggccacagccatgtcccctcctccggagtcacccaaggtgggtggcaccagccctgcaggaatgggcgagccacagggctcagaggagccctcctgcccccactctgcccagcccctccgtctggaatggccctggacaagttcaggagcctggactccttcaggctggctggaggagaagtttctctgagccatctggaggcggccccagtgtctacgagatggttttttgattccctgtggtgggagtgggtggtgtgaacccacatctgcaccagcagcccagccagggtcccagggagcaggggccatgaggggcagtcacgtcccgtggggaggcatagcagtggtgagggtgtcctgggaccaccggccgcagatgc

SEQ ID NO: 223392 - DNA, 417 bp, Homo sapiens
gctatataattttagtacctttctactggtcaaattttaatcatatttcaaaatgaatagcaaagaggtttataattaagttttataaaaattccaaatgtaataaagttatatttgtaacttacgtatactgcaaaaatggtagtgattcaaatgtttgtctttcaatataccgtattttattgcaggatgaatctccaggaaaaataaaaggaaaatattgccttgataagttatcagtgttgactagtatgaataatagcaagagtttagaataatattgaatacacatttttcatctcgactctaaacatttggacctgtagttgaactttccagagcccctaaccctgcctgtacctctcctagagtctcgccttcatacttttaataaataaaatatacaacttaatagac

SEQ ID NO: 223393 - DNA, 496 bp, Homo sapiens
gggggaagaatcacttgagcacaggagcttgagctgatcatagctgcagtgagctgtgattgcaccactgtactccagcatgaacagcagagtgagaccccatctttttttattgttgttgagatgaagtctcactccatcacccaggctggagtgcagtggcacaatcttggctcaccgtaacctctgcctctgagcttcaagcgattctcctgcctctgcctcccaagtagctgggattacaggcacccgccaccatgcccggctaatttttgtatttttagtagagatggggtttcaccatgttggccaggctggtctcaaactcctgacctcaagtgatccacccacctcagcctcccaaagtgctgagattacaggcatgagccaccatgcctggcctagaccccatctcttaaagtttgtggcagggctgcagtactcaaaccataaagaagtggcctatggaaatgagctttaagccacattccatgaa

SEQ ID NO: 223394 - DNA, 722 bp, Homo sapiens
cctgaaagtcgtagccacagcaatttaacaagataaagcaataaaatgtattcaaatagaaaaagaggaagtcaaattatcttcactggtgatataattctctacctgggaaacttcaccgaaaaagatttcaccaaaagatttctaagcctaaataatgacttcagcaaagtctcaccatacaaaatcaacatacacaaatgagtagcatttctgtgcaccaataatattcaagctgagaaaaaaagaacatggttctatttacaatagctacaaacaaaaaaatatgtacctagtaatacattaaatcaaggaggtaaaatatctctacaacaagaactacaaaactgctgaaaaaaaatagagacaacgcaaataagtaaaaaggcactccatgctcatgaatttaaagaatcaatataattaaaatgtccgtgctgcctaaagcaacttacagattaagtgctatttctctcaaactataaatgcaactttttatggaattagaaaaagaaaaccattctaaaagtcatatggaagaataaaacagcccatttagccaaagcaacattaacaacaaagcaatcctggaggcctcacattacctggcttgtactacaaagctacagtaatccatattacatggcttgctacaaaaatacacatgtagaccaatagaaagaagagaaagccctgaaataagtttacatttctacacccaa

SEQ ID NO: 223395 - DNA, 235 bp, Homo sapiens
ggcttttcttgactttttccgtatgtcaagtatgggtttatcagattagctggttatatggaaatgttgaaatgtgagacagttaaaacaaaaaaaggcggggggaggggaattgagcattgaaaaaaaagcattagcatagaatacaaacagcctccctcacactcatgcctcgggtagtgagagagactgcgagcctgagtctagtgtgtaccctaaaacttaaagtatgata

SEQ ID NO: 223396 - DNA, 475 bp, Homo sapiens
ctttgtgacaatgctaatcatgtgggaatggtgctgtttccccaccacaagctggccaattccggtctggcttctttaaccaggaagatgtgggctgagagctgtggagtagatgtcttcaccagatgagtacacagagaagtagagaatgtgtatctgcagagtaggatgaagcagagacaaggtgggatgggagagagacaggggctgcaggacaaccctaccatcaatacacccaacagtcgccatcctaccccacttatttattcacttagtaacactaattactctctaaaaatacttgactatttatttgtgtatctacacccacaggaatggatgtaagtgctatgagggcaggaagattgtttttcctaccactgaattcccaggacctcaatcaatgcttggtatatagtgggcactccataaacattggccgaataaatgaattctatttacttgttcaaaaaaa

SEQ ID NO: 223397 - DNA, 474 bp, Homo sapiens
tgtaaactggcagtaataataatacgaatgccacagagctgtggatgaaatgagcccattccggtctggcttctttaaccaggaagatgtgggctgagagctgtggagtagatgtcttcaccagatgagtacacagagaagtagagaatgtgtatctgcagagtaggatgaagcagagacaaggtgggatgggagagagacaggggctgcaggacaaccctaccatcaatacacccaacagtcgccatcctaccccacttatttattcacttagtaacactaattactctctaaaaatacttgactatttatttgtgtatctacacccacaggaatggatgtaagtgctatgagggcaggaagattgtttttcctaccactgaattcccaggacctcaatcaatgcttggtatatagtgggcactccataaacattggccgaataaatgaattctatttacttgttcaaaaaaa

SEQ ID NO: 223398 - DNA, 292 bp, Homo sapiens
tattttaataaaaaatgtactctttctatttaagaattatttatcacagatttgtaaaatactttgtttagcttagttctatactataaaactgaaatggtaactaaacctgtaagaaatcagttgaaatttacatttcaaatttatacacatattttgtggctcaagtcatgtatgctactcttataactgacaaaggggttgtggacagaatatgtaaaggactcctagaaaatcaacacaagataaaaatgggtgaaaaacttgagcaggcattttataaaagtgaata

SEQ ID NO: 223399 - DNA, 518 bp, Homo sapiens
aaaaatcaagctatccagctggacagagtgcaatgctaaggagatcatatgtctcagttcatctgggaaagtcttggtttcatcctgctttcccagtgtagttatgaataacactccctttcactttcaagtcttccagtgtgaactgtggatagctacatggtgactctgggcatcttccacctcttcatgcctatagccaggcaggagccccaagaatctggcttctttgagagagatgagctattggtttcatcttttagatatcagggactcaggggtcccatggatactcacacctaatcagagagcctgatgacatcaaggagttcatcaattgtgtgatgatttttcttttgtaaatttttttcagagagtttcaggttaagtataagccattcagaataattttttgtgtatatatttctcccatcacatatgcaaagctgcttaaaaaatcactattggttactttcttcttcagaagtcttcattagcataacatgaaaaggacatgc

SEQ ID NO: 223400 - DNA, 390 bp, Homo sapiens
cagtgtaggagcgttcattgttacctaattagagttaggcatcttttcattgtatttcctgaaccagctaaaaaagttacctgcctgtctgatcttatgactcataaaatccctttcatacacattaaaatttttattgtggtaaaacacacataacctaaaatttaccatcttaaccattttaaaggataaattcagagacatcaaaaaatttgcaatgttgtgaaaccatcattcctcttcgtttcatatttttttattgtgaaaggaagccccatatccatgaagcagtcactcccatgcctcctacccccggtccctggcaaccactaatctttctgtctccatcaatttgcctattctggatatttcacataaatggaatgatat

SEQ ID NO: 223401 - DNA, 418 bp, Homo sapiens
ttttagaaccagccatatagcacagggatgctccctcactaatcctcatagattaccttttagtaacaatgtcatgcaatgatatttaacagttggtggctgcaataattcacagggcaagagttcaagaccagcctaggcaacatagtgagaccccatctctagaaaatataaaaaatcaacctatggtgacccacacctgtagtcccaactactcgagaggctgaggtgggaggatcgcttgagcccagaaggtcaaggctacagtgagccgtgattgtactgtgcactccagcctgggtgacagagtgaggtctgtcgggggtaaggggggcagcgggtggaacccaaagcaaaaaaaaagaaatataaaggattatgacaggaatacaattaaaaaaattgtttgccaaataac

SEQ ID NO: 223402 - DNA, 296 bp, Homo sapiens
tatcctcatctccttttctgtgaagcatctatattcatatgttcactttcctattagattgtcattactgatttgtagttccttataagttgggtcatgaattaatgttctagcatgcctcaaacatttttaaagtatctttattatgtttcaaattttatacagtcaatgtagaggctggaaaacagggtgtcctttatagtatctagattttgtatcttgttttagaaagtttttcctgctcccaagactataaaattattctcctgtattttctactaatacttccacagttt

SEQ ID NO: 223403 - DNA, 379 bp, Homo sapiens
aatctaccacatctcagacctgttctcagtatgtctttgatgagggtaggtccttctccttctggggggttactttatctgtggtattattgctaggcccctgctccatcttctctttttacagtctcctctgtgatgctggctccgctggatttggtgtttatatgcccattgccatgccatttgaaccttgcagtattctgtctaccaaatgagattgttgtgagaatatctgcattcattgtttgtacagggtttctttgtgtgtttgtttttgcttttgagaatgtgtggagagattcagatttaggcagttgggcttattctacaggagcccagaactcctcagaaagtctgactttagacagaccttctagga

SEQ ID NO: 223404 - DNA, 484 bp, Homo sapiens
tgcagcacagaatgcatttattcatgaggcagccaagtgaggagatgggaaaacaggtctcaaacccacttcctcgaagatggggtttagagacgtttatgggacaaagaagcaggtggcctaaggtgtggggaaggtgattggagggaaaagtaggacatcggcgatctgtgcaagcctagtcaagcttcatcgttcttcataggatgcaggttcacaaaatggtggcattagcatgatggaagatggagtttttggcgctctgacatcaaacgtcacctactggacactcacacagaccaagttgaaggattgatggtcataagtggcttgaactggataagagctgaccccaagttcctgaaaaacaactttttttcttttcttttttttttttttgagatggagtttcactctcgtcactcaggctggagtgcaatggcgagacttcatctcactgcaacctctacctcctgggttcaaa

SEQ ID NO: 223405 - DNA, 461 bp, Homo sapiens
aggcatagttataaactgcatgggtgaaggttgaaaggtgtgtcccaacacagaacacatctgcaaatgctacgaggcattttgttgttccaagtgttcaaagaaatcttttgaatcactagctgaccactaagctaaccaaagacttagtggccacacctgacaaagaatacaaactaaaaaactaaaaatgtagttcaagaaaataacaggctgggcacagtggctcacatcggtaatcccagcactttgggaggctgaggcaggtggatcacttgaacccaggactttgagaccagcctgggcaacatggcaaaaccccatctctgcaaaaaatactaaaaatttgcagggcctggtggcacacacttatagtcccagctgcccaggaggctgaggtgggaggatcacctgaccctgggaggtccaggctgtagtgagccataatcctgccattgcac

SEQ ID NO: 223406 - DNA, 485 bp, Homo sapiens
aaatgtggctgaaccttgtcaacaaaagaatgatcctgtgaaaatgattgtaagaaataagaaaaacccaaaagtggtttttcctttgtgtcttacacagtcatactcatcacacttctgacatcaactgtgacaaagaaagaaccagtgtttttcctactctatatctcaatatagatcacctcttgtcatcaaaatgagtgaagatttcttctcaccaacaagccaattctgtggcagaccctccagcagacatcagctaagtgtcctctaattcaattcaactctggcactatttacctggagatagcagctgatcccacgggttaagggcttagtcccctgtggctgcctcctacttcaggtcccacttgcaggcacaggtttccacctgtacttctgaccaaccagctataagtcaggttccacagacccccttcttgggttcaattaatttgctagagtctcacagaactcaggagaac

SEQ ID NO: 223407 - DNA, 266 bp, Homo sapiens
aggcatggtggcccatgcctgtaatctcagcactttgggaggccaaggtgggaggattacttgaggccgggagttcaacaccaccagtctgggcaagtgagaccctgtctttacaaataaaacaacaacaaaaattatccagatgtggtggtgcatgcctgtagtgtcagctacttgggagactgatgtgggaagatcacttgaacccaggagttcaagccttcagcgagctgagattgcaccactgcactccagcctagttaacg

SEQ ID NO: 223408 - DNA, 733 bp, Homo sapiens
ccagatggtctgggctgtatttctttaagttgggggactgactgcattacatttctaactcccaaaacaatctggttggatgctacaagaaggaggcattccctgacacactggacacccagacctctcttcaggctttctgtttaacttacctttctctcccacaacaaatcccactgaaacaacagaataaatagtataatatacacctccaactagactgtaatctccttgaggataatgacttaacttttacctttcctggatctcccagtgcacagacataggacattacatttttttaataattaagttttacatatattgatgaatagctaatcatttctctaggttttacatatattgatgaacagctactcatctgtctaactttaaacatgcattagcacaacagtgataatgaaactccctatttattgttcccagacatacacaaggctgttttgaaaatatggcaagaaacaagttaaaatgcttatatgccatataaatggacccagagtcctgacaatgaacctaaaaccattcactgagttcagatgttgttgtaatacacaatatagcaggtacagtagagagtctgtaatatgaagttacatattgaattttaaaacatatactccaggcagaattcaacagtggaaaactgtctcccacaaaacaagtccctggtgccaaaaaggttggggaccactgatataaagtatatacc

SEQ ID NO: 223409 - DNA, 852 bp, Homo sapiens
aaatatgacctaaggttctatagtatatttagacaaacttctcatttctctgcagtgttcggaattcatcatgcctgtatgacaaggttgtgtttgagaacaaaaggggacctgtgtgacatgttgtatttcaatatacatttagagtttgaacaaataaaaaaagctattagaatttttaatatatataacacattatcaaaaacactgtcacttttctgagtgctctaatcaggcaattcgtatgtatatttaaaaagagggaaaaagctaattagtatactaaatatatttattttaatacctgtgctcatatgttatctttaaagaacaggaataaaatttatgggtagaatagtatgccagcaatttaccttcaatacaaattaaacacatcttttaagaaaagggcgagttatattggctggggtggcactaacactacattattaatatgtatttattgagcatttactgtgtccaggaccctgtaagggggaaaaaaagtccttgtttttacaatctttattgactgaaattctgtaaaatgaattgaattcctgaagtgacatcatttaacccaaattttttcatcatcaactaattcatctcagaaaacagtaaagtttaaaaaaaaatactatcagtaagaataatatatttccttggtttggaaatttccaaaccacgatattctgccctgtcaaaatatattcactggggaattttttacttcatacgtttcttttgaacttagtcacatttttatatctagctggtttcattattaaataaaactctaggggctggtttgggaacactgaaatcaacctctgggagcactttttttgg

SEQ ID NO: 223410 - DNA, 1268 bp, Homo sapiens
aaatatgacctaaggttctatagtatatttagacaaacttctcatttctctgcagtgttcggaattcatcatgcctgtatgacaaggttgtgtttgagaacaaaaggggacctgtgtgacatgttgtatttcaatatacatttagagtttgaacaaataaaaaaagctattagaatttttaatatatataacacattatcaaaaacactgtcacttttctgagtgctctaatcaggcaattcgtatgtatatttaaaaagagggaaaaagctaattagtatactaaatatatttattttaatacctgtgctcatatgttatctttaaagaacaggaataaaatttatgggtagaatagtatgccagcaatttaccttcaatacaaattaaacacatcttttaagaaaagggcgagttatattggctggggtggcactaacactacattattaatatgtatttattgagcatttactgtgtccaggaccctgtaagggggaaaaaaagtccttgtttttacaatctttattgactgaaattctgtaaaatgaattgaattcctgaagtgacatcatttaacccaaattttttcatcatcaactaattcatctcagaaaacagtaaagtttaaaaaaaaatactatcagtaagaataatatatttccttggtttggaaatttccaaaccacgatattctgccctgtcaaaatatattcactggggaattttttacttcatacgtttcttttgaacttagtcacatttttatatctagctggtttcattattaaataaaagaaaaggtgattcccctcttgtactgcaggagaccacatacttgaatgatactctaacttctaggttctgttatagtaacactgaaatcagaaacctgtgggagaaatgtcactttatctgagagagtaaaatcagactctaaaaggaagtagcaaattcatcttgttcttttttttaatcaaccctctgcctaagacaagtagtttgaaacacagaggactctttaagtcatacttcctttatgtagtcaaaaccaaagccactgggtagtgctttccccaaaggaatctctaaatagtagacggggacattttcagatagattcgtttgtaggcaaacctccattgcttgtatcacatttcctgaaagaataaaggtaaaacttcaactatgtattacagaaagataaatcataaaggactattttgaacatttgggcctttaattgtctagctcctagatgaagtaca

SEQ ID NO: 223411 - DNA, 1324 bp, Homo sapiens
aaatatgacctaaggttctatagtatatttagacaaacttctcatttctctgcagtgttcggaattcatcatgcctgtatgacaaggttgtgtttgagaacaaaaggggacctgtgtgacatgttgtatttcaatatacatttagagtttgaacaaataaaaaaagctattagaatttttaatatatataacacattatcaaaaacactgtcacttttctgagtgctctaatcaggcaattcgtatgtatatttaaaaagagggaaaaagctaattagtatactaaatatatttattttaatacctgtgctcatatgttatctttaaagaacaggaataaaatttatgggtagaatagtatgccagcaatttaccttcaatacaaattaaacacatcttttaagaaaagggcgagttatattggctggggtggcactaacactacattattaatatgtatttattgagcatttactgtgtccaggaccctgtaagggggaaaaaaagtccttgtttttacaatctttattgactgaaattctgtaaaatgaattgaattcctgaagtgacatcatttaacccaaattttttcatcatcaactaattcatctcagaaaacagtaaagtttaaaaaaaaatactatcagtaagaataatatatttccttggtttggaaatttccaaaccacgatattctgccctgtcaaaatatattcactggggaattttttacttcatacgtttcttttgaacttagtcacatttttatatctagctggtttcattattaaataaaagaaaaggtgattcccctcttgtactgcaggagaccacatacttgaatgatactctaacttctaggttctgttatagtaacactgaaatcagaaacctgtgggagaaatgtcactttatctgagagagtaaaatcagactctaaaaggaagtagcaaattcatcttgttcttttttttaatcaaccctctgcctaagacaagtagtttgaaacacagaggactctttaagtcatacttcctttatgtagtcaaaaccaaagccactgggtagtgctttccccaaaggaatctctaaatagtagacggggacattttcagatagattcgtttgtaggcaaacctccattgcttgtatcacatttcctgaaagaataaaggtaaaacttcaactatgtattacagaaagaaaaattcagcctgaaccctacccttataaaacaggttaattgggttttaattttcataaatcataaaggactattttgaacatttgggcctttaattgtctagctcctagatgaagtaca

SEQ ID NO: 223412 - DNA, 389 bp, Homo sapiens
tgggggaggcgaaaggcggaaggtattcacccatctcattcagcaaatttatgctgatcctctaccaagtgctagaccctggccatacagtggaaaataagagaaagtttttgcccttacgtaacttatattctagtgggagaagacaggacaataaacaaagacagtaaacaagtaaacagtacattaaaaaagtgatgttaaatagtggtcggtagtaaaggtaatgatcagggtcgataaattgcacttattctgtgaatcacttgctttgcctatgatagtctaatgaacagtcttcatgttataactttttaatattcatgtgcagtccaaatgaatttgaataaaaatctacacattaaccagtttttaaaaaaagaaatgtg

SEQ ID NO: 223413 - DNA, 522 bp, Homo sapiens
tccctctgccctcagagtgggggacattttagtgacttcttgatttttcatgccaaaggcgatggtaggttatccaaaaaaatcttatttgaccttccaatgcatattacaattgtatttgactatgaaagaaatgctctaaaaattcagtctttgaaattaaataataaagatctaaggcaggagaaactggaaagccattcaacttcccgtgttgactcctactcaggaaactttcttttcccaagataatgcagggaatctgcatagcacaacttgggcagtatttactggtccattgctcagagagccccataaatgtaaggaattattcatatccagttgcgcattttagctgttaagtatttttccagttctgctgggttagagaggtatcgtgttacagtggaaagaaaaaggcatggatagactgacagttatggaaagaagacggagcaggggacagtgaaggggaaatggattcgttatgacacacaaatgtaaaattccctagtcaagaac

SEQ ID NO: 223414 - DNA, 228 bp, Homo sapiens
acaaggtcgagactgcagtgagccatgatggcatgccactgcacttcagcctgggcgacagagtaagaccttgtctcaaaaaaaaaaaaaaaaaagaaaaatcagttttctcattctttccatgttttagattaacaactcttaaaacatattcctttgtggacatgaggttaatttcaagagatattgaaatctgttttctgtggaataaagacaaaataaaatttc

SEQ ID NO: 223415 - DNA, 789 bp, Homo sapiens
  misc_feature (789)..(789): n is a, c, g, or t
ggtcagatttaccaccaaaatgcatgcaggagatcccgcaagagcaaatcaaggagatcaagaaggagcagctttcaggatccccgtggattctgctaagggaaaatgaagtcagcacactttataaaggagaataccacagagctccagtggccataaaagtattcaaaaaactccaggctggcagcattgcaatagtgaggcagactttcaataaggagatcaaaaccatgaagaaattcgaatctcccaacatcctgcgtatatttgggatttgcattgatgaaacagtgactccgcctcaattctccattgtcatggagtactgtgaactcgggaccctgagggagctgttggatagggaaaaagacctcacacttggcaagcgcatggtcctagtcctgggggcagcccgaggcctataccggctacaccattcagaagcacctgaactccacggaaaaatcagaagctcaaacttcctggtaactcaaggctaccaagtgaagatttgggtacctggctgagtttggggctggcagccttcagcacaccaatggtgtcaatggcaggtgtgcgtgggacaagaacatatgctgtcatgattgtgctacagtttctttaagaacaccagcttgcaggatttgagttgaggaaaacacagacttccatgagtttgggaactacgagagaaaagacagacagagtcaaatctacagcatatctctcacctcaggaaactgggaagaatgtattccatcaatatgattgtaaaagtcttgaacatan

SEQ ID NO: 223416 - DNA, 405 bp, Homo sapiens
ggtcagatttaccaccaaaatgcatgcaggagatcccgcaagagcaaatcaaggagatcaagaaggagcagctttcaggatccccgtggattctgctaagggaaaatgaagtcagcacactttataaaggagaataccacagagctccagtggccataaaagtattcaaaaaactccaggctggcagcattgcgtaagttgttttgtgtggttctctcgtgtgtaccaatacttactctaactctccaaggagagagggatatcgtctccatttttagatgaggaagcctgggccctaaagggttaaattatgtgctctccactgttaaggagcagagtcttgacttaaatacatctttccacctcagttctaggtcttctctcctttgtccacatatatattta

SEQ ID NO: 223417 - DNA, 217 bp, Homo sapiens
cagtttcttcggtctctgacgttgttgtctgcacaagagagttaaggcagccatcttgggaccatgagggagccagtctaagaggcaaatcaacacaatgagagggtgttggaaaaagacaaaaagaacctggtccttgatgtcacagccaggcctctgaattaaccacccccaggacttcttgttacgtgagctaataaacgttcctttttgctta

SEQ ID NO: 223418 - DNA, 587 bp, Homo sapiens
  misc_feature (523)..(523): n is a, c, g, or t
cggagtgggcacatggattgggcacaaagtactcagtagtccaagaatatttcagtaagactgcaagaagggaggaaatcaagtttcaggagaaattctaaaggcctaagactgtcatggatccaaatgtgtattttctgaatttaacatgcaaatctttgttaaggggttcaagaaagtcattccttatcttacaaatactagccatggtaaactgattaggaatatgtttaaaaacaaaaaaacaaaaaactagccataagaaactacttagttctatatcatccctgtgagaaaggaaaaaaaattcttatgttagagaaaacaaagtctaaattctttagatttttcatatatgtttaagcatgtgtgaataacataaaataagccaagcaaaacagagaaatcatagttatgcactgtaccaaattagctcccaaaagaaagtataaactggggtttaagtcaaaggaaaaggggaataaaaactatatgatcatgaccgaagaatcagtgtcatganttttattaagcctcataatttttaaaattaagctcatttcataatttcctataattgaataaat

SEQ ID NO: 223419 - DNA, 468 bp, Homo sapiens
gatcccccgggccgcaggagagagagagagagagagtgagactccgtctcaaagaaagaaactgagtgaaggacacacaagaatttctggtacattttcacaactttctgtgattctgtatttcaaaataaaaggtttgtaaataaaagaattgtgttaacactttaaaatgttaggaggtgtaggccgggtgtggtggctcatgcctgtaatcccagcactttgtgaggccaaggcaggtggatcacctgcagtcgggagtttgagaccagcctgaccaacatggaaaaaaccccgtctctactaaaaatacaaaattagccggccatggtggcgcatgcctgtaatcccagctactcagaaggctgaggcaggagaatcgcttgaacttgggaggtggaggttgccatgagccaagatcacgccattgcactccagcctaggcaacaagagtgaaactctgtctca

SEQ ID NO: 223420 - DNA, 703 bp, Homo sapiens
  misc_feature (518)..(518): n is a, c, g, or t
  misc_feature (587)..(587): n is a, c, g, or t
  misc_feature (589)..(589): n is a, c, g, or t
  misc_feature (601)..(601): n is a, c, g, or t
  misc_feature (634)..(634): n is a, c, g, or t
  misc_feature (690)..(690): n is a, c, g, or t
gatccctgtactaggatggtttcagagtctgtctctctccctcccttccaacaacctcagatacattgacttagatcaaccaatctttgttcatgacacattagtatcattggtccacgaatggccttacttatgtatattttgtagacaatataatgaagtaccatgagcccatcacccagacccaagacccagaatattcactacctgtgcgctacctcccttttccatccccctgctgcctccttggacatatacctgctgatggctcacacctacaatcccaacattttgggaagccagcgcaggaggatcacttgagcccaggaattcgagaccagcgtgggcaacatggggagaccctatcctacaaaaaataaaaaattagctgagcatagcggcctgcacctacagtcccagctactcgtgaggctgaggcaagaggttcatttgagccccagagcctgaggccgcacaggctggagtgcagtggcgtgatcctagctcactgtagcttnaaccacctgggctcaagcagtcctcccacctcggcctcccagagtgccgggacacagacgtgagccacnanacctggccagancgtttgacacatgaggggacattagactttctntggaagggtgtattttccagtgctctagaatgaacatgattccatggtgacctgtnttactggacttcg

SEQ ID NO: 223421 - DNA, 311 bp, Homo sapiens
caaaactgcacagccaggatagtgtgacatttctcaacccttttgtcattatcacatcaccccaaagaatgattaagatattgagatatcctttttccctaactgacaaaagttaaaaaaaaataataacccgtagtttcaaaggagtgaagaaaagagcactctcatataccattgacagagaaaattagagagcaatttgaaaaggtatcaaaagcagccatttaactttgtaactctattttgagcaattttgtctttaaaaaatgaataagtatttaaacttgaataaagtatttaaatatgttcaa

SEQ ID NO: 223422 - DNA, 434 bp, Homo sapiens
aaggagtgaatgaatgattgccaacctcaatagctggacatttatcatgagggcagtaggaagccacagaagtattttaggcagaactggacccatttctctcaaactctgatgtgcatctgggattttgaatgtagattccgcttcggtgggttgaggaaggggcctgagattctgcatttcaagctcccaaatgatgccaaggctttgagtagcaaaggtgttgccctgctcttcagtacagtacaggagccactggccacatgtggctcctgggcacttgaaatgtggctcgtgtgacttgagatatattttaagcataaatacccaccagagttaaagacttggtacaaaaaaaatgttttatattgatcacatactgatatggtaatattttggatatattgagttaaataaaatatattattaaaatt

SEQ ID NO: 223423 - DNA, 712 bp, Homo sapiens
gactctagcttgtaaattctcagagcctcctgaaaatcaaggggatatatcttaaaattcaaacaaaaacaagggtgcttcagagaggagactggcaggagacccccaatgtggtggctgtttctctgacttacgcataccctggcagaccctatgagttttccacttccctttcaagacagcatggggtgctgtgccttggaggttgagtagggaactttgggcaccagctttgaccaaatgcaggacaggaaagaagtgatggacagttggtctgttgagctcactttggtgaactgtattttaattagcattttaagaaatggagaagttcaaaattaaggttgatccacatcagatgagtagcccatgtgccagggccacatataagcctggtattttaagaaggtatgtttcttatctgtaatgaaatattcaggcaccccatgaaggttttgatcctcctggccacaaaactacaataaagatggaaaaagtttatacatatacatacatacatatatatatatatatatatatcattggtatgggagaaaatctctgaaaagaggtaacaggaaagcacacaaaatgtatctattcatcaaacattaaattatgtttgtttagtgctaaatcaacatataatctgaataaagaaaagccatgttaaaaactagacaagaggttcctctttctctcaaagcagctt

SEQ ID NO: 223424 - DNA, 347 bp, Homo sapiens
aagcttactaggctgataaataagttgtctgaggtcaatagcttctcagctgtagaaaagtggaaatgtgccaacatgaaactgacaacgattataaagcacattaacttccttctggttaatctccatataatatttttcaattgcttgtggaataactaaatgatttcatattgatgtttttattcacttaaaaagtcaggacagcagactgaatttgaatttgttatcttggaaaggtttggagctagtgagcaatggctatttcaaactaaagaattatatttaacctgggtttacttcaattcttggagagtctggctaaaaattacaaggtaggttctccc

SEQ ID NO: 223425 - DNA, 418 bp, Homo sapiens
tgtaggaacactgaattactaactagatgaatagcatagcaaaccatccgctgaaacctaacaaaagtagctcatttggggagtgagttttggagagtcactctgcctctgttctgtagattgtggcaaataaacatgatatagtatacattgtgtgtgtgtgtgtgtgtgtgtgtgtgtgtaggtgtaatactatctatttgaaatgacaatgtaaaatgagcaggagaccttttaagaccaacaaggagcttcctttatcactactgattctcgtgtcgaaatagagcttagagaatctatgatgaaaacactgtgacccaagttcacactctaaggtcaaacttccaaagttcagcccttgtccttgtgaatcacttaacctttctgtaccttcgttgcctcgtctgtacaatgg

SEQ ID NO: 223426 - DNA, 403 bp, Homo sapiens
gattacttagggctggcctgagggggagttggggaatgactgccagtagatacaggcttttgtgggtaataaatatgctctaaatttgattgtggtgatggctgcacaatggtttgaatgtactaaaaccattgagttgtatactttagatggatggtttgtgtggtatataaattatatttcaataaagcggtaataaaacaaaacaggtggtaggcttattgaccagcaagccaaagcttgctgacccataatagattattcttcattttcctgctaagccattctttatctgttctcattgctaactcaaatctttctcgttactcaatttttcattcaaaatttaagtacttgtctcacattttccctctgtgttccaccatcaggttacatctttatg

SEQ ID NO: 223427 - DNA, 556 bp, Homo sapiens
gtaacctccactacagtcatgaggtagaatattcccgtcaccacaaaaaggttctcttgtacccctctgcagtaaatcccttccccataccaccggccccagacctgctttctgacagtgtatcagttttgccttttctagaacttcatataaatggagtcatacaatatgtactcgactggcttctttcactcagcataatgcttttgagagtcatccatgtcgctttatcagtagttcatctcttttccttgctatgtcgcataccacaatgtgtttatctgtgcaccagacaagttgtttccagtatgtggcaattgtggaaaaagctgttatgaacatttgtgtatctttttaaaatgtattttcatttcccttgggtgaattaactcagaatgaaattgctgagttagctagtaaacatgtgtttaactttatatgaaactagcaaactgtttccccaaatgctgtatcattttccactcccaagagcagcgtaggaaagctccagttgtcacagctcctcgtcaacatttggtatggtcagtctttttca

SEQ ID NO: 223428 - DNA, 2644 bp, Homo sapiens
ttcacagaaaacaaaatttactcatatccaatgtacatttcctgaagataaaactgttcatctcagggtctgagtgggccctggagcctgagctggccttgctcactgcatccgcaaggagacaattagcacagcctgctgcctgtagctgagctgtgcagagccagggaacaggagtgctccaaaagcgagaagggtttccggttgccctttcaacctcagaagtcaggacttgactcacagtcttctggatttttgacaaacaaaatcctatgcctatgcctagatccataggcacacaaatggaagacctaaataaatcaaagtgggggagtgaggctgctggactcctagagattcatggctctgccttgattagtcaccattcttttagcacatacgtccagatatcctacagaaaagaatgcagtcaccattcaggcatgctttgttttgaagcaatgatcatgaacttaatattctctgctggcataaagaggaaaaaaatataacacctggcagcttgtgggtaagtccatcacgggagccggtcctaaaattcttcaaaataccaactttctgaggttggaagcagaccctgagatgagattttggtgcaagtgatttattaaggaagggatcccaggaaaggcagtaagggagtaggggaaacaagttagggatggggaagaatccaagcaaaggttcaacttcaaaagttctggcctcagtctaatcccgagtgtaaattaggcctcagagtttgttctacctccaggcaaggaagcaggactgtcatattcttatatgagtcagtcatcggctaagagctactctggagaagtaaactccaaggcatctctagctttaggcaaagcggctccaatagccaaaagtgaaaaccattggtcaggatgagatactccaaatgagagcccagagggatgaggaatagggcctccacagagcagtcccaaagctcatctctctcttatcttgagataaggttacaggaagtcctcatgcataacaacaaattatctaaatgtatgtccatcaggaccttgaaagagagagaacaacacttcccccatcatgactgtaggggagaaaaagaaaaccatctctctctcctaaccagttgtcactttgtagtttaatatcataatgtacttttctgcctaatgcttgaaaatgcctacttgagtcacaggaaatattgctcccatctcccagtatcaccaatatcagagaaatttcaaagaattttagtgggggatgactgccaccttcgaatatttaggtttctctcatatgacctggtgctttctctgtggtcctagagggtgagctaggctcgaggggtagatgtcataagaagatcagtttttgactcaagaaaatcatctggagtaaagtggtccacatgctggactggaacaacatttccaaaactgaccttccaggggatggatttttaatgtaaactctttagcgagtatagtatatagaaagaaattcattaggtgtggctccatgacattttaactaaatgaacagacccatgtagccagcacccaaatcaagaaacagacgatttatgtgccctgttgctcagcagtgcaagagattcctccatgttcctgtatgtagttataggtcgttcattctcattgttgaatatcattccattgtataaatggatatttggattgtttccatttggggctactatgagtgatattgttaggaacattcttgtacatgccttttggtgaacatacagatacatttctgttgagcgtctactagggagtcaaaatgttgggtcattaatatacatatgtgcaattctagtagatatcgtcaaatagtttcctgaagtgggtgtacccattgaccctaccttgagcagtatatgagaattacagttgccccacatccttgccaaaatgtggtattattagtcttctatattttagcattcttatggatgtgcagtggagtcatattatagttttaatttgcacttccctcatagctagtgaaattgagcacactgggtaaagttttttaaaaaatacattcccaagcctcacccaagcctcatagaatacaaatccctagggatgggtggcccaggaacctgacttttcaatgcttgttccccgggaatacttaagctgccagcctgtcgctgatctgtgaactagggtgtgaggatgatcaataaggcaatagctctgtgaatctatgactctgggtgcagagtgtgggtagctggcttctgcctctgattaggtgttggtattcagtcaagatttaatgtttctgcatgaaacaacgaatccaaataataacagagacaagggtttatttctctgtcatgtgaaagaaaatacagagataaggaacccagggctggtttagggtaccggggtaccattgtgaatcagggaatccagctctttctagctttctgctcctttgctctgccactttcatgttctctagacgtgctggaactccagccaccatgtttacatttcaggcaggaaaaggagaagcacaaagggcaaaaaaataaataaataaacaaataaaagagagagagagaaggagagagagaaagaaagagaaaaat

SEQ ID NO: 223429 - DNA, 433 bp, Homo sapiens
catagagtaagaattgggagtgagctagcaccccttaaaaactgtttggattgaaagacttgtagagttttacggagttgattcttttcgcagcagttttgtgtgagtttcactctaccaaaacacagtgtggcaagattcacttcttggcacctactttacttcctatcaagatttgggaacttccctgtaatctcagcactttgggaggttgaggtgggtggagtgcttgagcccaggagtttgagaccagcctaggcgacatggcaagaccccatctttacaaaaaattagccaggtgtaatgatggacatctgtggtaccagccactcgggaggctgagaagggaggatcacttgagctcaggagtcagaggctgcagtgagctatgatcacaccactgctctaggcaacagagtgagaccctgtctcc

SEQ ID NO: 223430 - DNA, 245 bp, Homo sapiens
ctggttgtggctgcttggagtagagtgttgagaaaaatcacaaatctcatctgggcgtcaggcagagaagagtgatgtgatcaattagtagtgtctgcctttgttattctaagctaatctgtgctaaatagcaacaacaacaaaaaaataagacttttgtagacaggtgaacaagtccttgagaatttaaattcaagtcaactctgctagtgccatatcaattactggccttccattttcttcat

SEQ ID NO: 223431 - DNA, 459 bp, Homo sapiens
accttctctgggccttgcctcccgtagctgcacaacacaagcccacaggcaaacacacagactcctgcagtgtctagagcagtcactgggatatgaagactgtgtgtggaggctgggcagctagggtgcagggggtaagtcttctacactatgtgacagcaatggaaaggccccttgagcccagaaagctcttttattttttgttaaagaagttcttccaaatacgaacttgagaaatctagaaaaatattttgggttgtaagatacagtggctcagataagaacattttaatttcccccattgcacaccatggttttgctggaaataaatttttggtgctgcaaaagaaataacactcaaacataaattttctcagcaaggcaattttacttctatagaagggtgtgtctcatgaagggagcaatggcgagagcacacctgaacaagggaggggaagg

SEQ ID NO: 223432 - DNA, 270 bp, Homo sapiens
tcatcctgtgtgggtctccacccaggatgcagtgagccctgagctgcttgtgttcaaagacatcaaggttgtctacctgagatgtggggtttgtggagcaaaaaaggaatcaatacccgaagaactcagagacctcagtgactttcttgttacctttggtttggtatggtgcagttctcttgacacatttgaggggtagctcattatagacctcactttttttctcaaatatttatttatttttttattaaaaaccatatttatttcaga

SEQ ID NO: 223433 - DNA, 575 bp, Homo sapiens
tatttctttggaaagaatctgagtgataaaacctaagattaaaatatctaagaatgtaaaaggcttaaaaattatattttctatataataaagtaaatgtcagtatataggcaaaataaaaaatataacagtaaaaaaaattatcctggctgctgttttagaaatctagcagtcttgggccagagtagtaacagtggatataagaagtggccttaattctgactaaattttgaaggatttctgatgaattggaggtatggtgaaagagaaacggggagtaaaggataactccttgatgtggtttgtggtgcaagcaactaagaaagatttggacagttttggacttgttagtttgaaatgtcaattaggtatccaggggaaataggtaggcagtttgatataccagtctgcacttaaggaaagattaactagagagagatatttggcagtctgcagcatggatgttatttaaaggcatggcactggatccgagtatccacgagtgtggatagggaagaggagtgaggaccagcagccatggggcatttcaacgtacaatgattgaaggagactaa

SEQ ID NO: 223434 - DNA, 186 bp, Homo sapiens
gaaaagcagtcaatataaactactcctaagaaagcccagacactgaactttttagaattttttaatttagagacagggtctcactctgttgcccaggctgggtgccacactgtagcctcgccctcctaggctcaaccaactctcccacatcagcctcccgaggtgctgggaccacaggtgcatgtg

SEQ ID NO: 223435 - DNA, 231 bp, Homo sapiens
catctgacctgcacccttggcttcagagacatctagcttctgagtctctctagtacaggaagacacacaacaaaagaggctgagcgagccaagctgtcgcctctttgcagtcctgggccttctctcaagtctccctgcctcttcttgctgctacagggctttgcacacgctatttgcttctgtctgtgattcccttccttctctcttcttcccctcttccttcggatccca

SEQ ID NO: 223436 - DNA, 462 bp, Homo sapiens
tttacctcaaaacagtcatttcctacttttttctggttttctaattgtttacaaaaggaactctattttgtttttgaatcctctaatcatttttgatttccaagaactcttgtttctctgaatattgcctttttcaaaaataagctcttattcctgttttacagttaaaatatcttacatttaaagataatgattttcaaagacattttcttctcccatcattgggtccgttttctctagttttctgtttgatgattttggtatttctttcttgtgagaagctttcctcagttacagctagtaatccctcattgcctatccaggcagtgggaagactaacgtcctttttggacgttctgggtaagtggggcttcagtcttcaacacagttctccggccccaacacagttctcccgccccaggcatcttccgtccagagcaactttgttttgctctcctgaaa

SEQ ID NO: 223437 - DNA, 458 bp, Homo sapiens
ggtcagaattaaccttaccatttataaagcactttaaaggggtgcaaatgtgccagcattaacaaaaaaagactgcagaacaaaacgtagcctttggtttaagtgattgacgtgaaattattgcttctcgtgtgtccttcagtgaagatttgaggctttgtgtgtgccaggcattcttctggtttctgggaggctgcagaggtggatcagacacgggttcacttgtagtcatgtagcggtcagcagtactcctgtgacaacagtgctagctggcagcacatggcatccaccaggactgcccactgctatgtgaggagatgatttccagccatgagtgagtcagggaaggcacatggaggaggtggccaccaccccagggagcccaattagacaagtcagcttggattggacatggtttaaggaaacgcattcccagtgacaacctggggagaggtgag

SEQ ID NO: 223438 - DNA, 297 bp, Homo sapiens
catgtctataattttgtcatttcaagaatgttctataaatgcagtcatacatatgtgacttttcgagctgacttttcttcactcagcataatgtctttaagagttctgattagttgcatatacatcacattcccttcttattgctgagtaggattccatgatacaaatgaatcacaaatgtcccagagatttttttttccatgttttaagttttatggttgtagggtttacatttagaatctatgatccacttgcagttaatttttgcacaaggtttaggtcaaggtttattttgtt

SEQ ID NO: 223439 - DNA, 396 bp, Homo sapiens
cagtgggagaggctctgggtgtgaatgcgtgaccatgtggccatgcgggattaatgccatgactggggggttctgggtgtgattgtgcgtctcttgttttgatcagaacccacttagggccaggtgcagtggctcacacctgtcatcccagcactttgggaggctgaggcaggtggatcacgaggtcagaagttcaagaccagcctggccaacatagtgaaagtccgtctctactaaaagtacaaaaattagctgagtgtggtggcaggcacctgtaatcccagctacttgggaggctgaggcaggagaatcatttgaacccaggaggcggagtcgagatggtaccagtgctctccagcctggatgacagggcaagactccatctgaacaaagaaa

SEQ ID NO: 223440 - DNA, 757 bp, Homo sapiens
tcaaacttcttttagtttctccaacatactatgagaactttttttctcttttcttgccctctttactttcaatcctcctttacctggctcacactttcaggcctcagataaaatgccacttcagggaatatatttcctgacagcctaccaccatccccacatattgctgggtggccttgctaagtgctcccagagctacttggcattcccccatattggcatggattacatggcataattactcttagatcattgtctgtgtccttcattagacagtgtcatagtccattcaggcagctataataaaatatcataagctgagtaccttataaacaacaaaaatttatttcccctagttctggaagctggaaagtccaaggttaaagtgctggtaaacttggagtctggtgagggcctgtgttctggctcatagacagtgccttctagctgtacctcacatgatggaaggaatgaggatctatctggagcctattacataatggcactaattccatttgtgagggctctgccctcatgatctagtcacctctcaaaggccccagttcgtaatatcatcaccttgcaggttaggatttcaacatatgaattttgagaggcacagatagattttaagtactttgaggactggatctaagtctgtctgatttactgttgaatcttcaatgcctagaaactaatataagttcaatacataattgtagggaaaataaataaatgcataaattaatcaatggta

SEQ ID NO: 223441 - DNA, 434 bp, Homo sapiens
ctccaccctttcctgtccagaccactgtgaaggcctttagtcacctcctagagaagcaagattttcagccctggctttctacccccacaccctacagccggccaggggacagggtcgtgttcacacagtgctaagggaacacgctgacgtgtgtgacatcaagaactccagtgcccacacagcccgagtccggatggagggctcatcaatgtatggagaaatgaaagagcgccgcatttcacattggagggatctgggtttgagtccttgggccagccttgctacagtgggggcaagaacaccaatcacactggcttattacggaattcaaatgtggcagagtatttaaactatgaagtgtagaataaattaattggcttgcaattccccatagctagtactagaggctggcctcagatggaagaaccaggggc

SEQ ID NO: 223442 - DNA, 512 bp, Homo sapiens
ctccaccctttcctgtccagaccactgtgaaggcctttagtcacctcctagagaagcaagattttcagccctggctttctacccccacaccctacagccggccaggggacagggtcgtgttcacacagtgctaagggaacacgctgacgtgtgtgacatcaagaactccagtgcccacacagcccgagtccggatgggacgtttgaaatcaggaaggagtgtgggttggatccacgtttctgttcataccaggcaggcacatcggaaggctcacggtcagaggatgctgggacaaacgccacgagaggttcctttttgtctggctcacccagaagagaggctcctctcctcccttccctgcagcacaacggcctggctggcacccaaagggcagccggcgtgggctgacctcagaggagcaaggcgtgtttgcagctctgccgctcacatccacagtggccatgacaacaggtgcagcaccatccattaaagctctgtgtcatttcaaaaaa

SEQ ID NO: 223443 - DNA, 348 bp, Homo sapiens
gcacgagccaactgctcatattaatttataatatctggcatctaatttacacatataaaaaagcaggaggctgggcgcagtggctcacacccgtaataccagcactttgggaggccaaggcgggtggatcatgaggtcaggagtttgagaccagcctggccaatatggtgaaaccccgtctctactaaaaatacaaaaattagccaggcgtgtggtgggcacctgtaatcccagctactcgggaggctgaggcaggagaattgcttgaacctgggaggcggaggttgcagtgagccaagatcgcgccattgcactccagcctgagtgacagagctagactccgactca

SEQ ID NO: 223444 - DNA, 573 bp, Homo sapiens
caggcgtggttttagcatctggtacacagctgcaaataaggcagacatggtctctgcccacatggagcttcctatctagtgggagagatactcaacaatgtccagcattcaataaaaaaattactagatacacaaagcaaaccagtgcatatgtttggtggtggtatgtgctgcggagaagagggaggcaggataaaggtatagtcagtgccatatttgggctgtaatgagtgagtcttgtggctatttggtggaagatgttccaggcggagcttggattgtttgaagacagtgggcagaggtgagagggagcaggagggaggagaggacggacacagtaggtgggggccagatcatgaaagtgctggtaggccataataaatgcatcaattatctgtgttgctgcatcataaacaaccagaaaacttagtgtctacattggatgcaatgtacactgttcaggtaatggtacactcaaatctcataaatccccgctaaagaacttatccatgtaagcaataatcatgtaccccaaaaactattgaaataaaaacaaaataaaaataatcaaaa

SEQ ID NO: 223445 - DNA, 347 bp, Homo sapiens
agatctgagattgaaattggaagaggggtgttcagggccaaatcctcaattaatgaagatactgactgggagcacaactgagttggtgtcgggagggtgaaaatctcggaggcaactttgggattcggtaaggcaggccactctgcaaagaacacagcagctgatggagctgggtaggcagggccaggcattgcttgttgtcccttttctgtttttctttcccgtttttctccctttcttttccctaaatgtctttccctcttgtgcagtcacttgggtctctttaaattttattaacgggtttttaatttctttatttcttttactctcttttaattgaacacact

SEQ ID NO: 223446 - DNA, 173 bp, Homo sapiens
agacagacattaaaagttaaaggagataatatttcagattctaaaatctatcagatgagtgacattcatttctcctctcaatattctaacaaagctgttaggacaaaagacctattttacattaatacaaaaatatttgttttctaactccagatagtcaacaaaggcaagaa

SEQ ID NO: 223447 - DNA, 317 bp, Homo sapiens
ccttgcttgcccccagtgacgggaagctcagcccctccactgtcgtcatgaagcttcctcttggaacctgggctcgggctgtagtctgggcttcctggcccatgacatctcagagtgtgggaacagggtgggcctcagtcccgcccatgagttgggcgtcagatgggatccccctggcctcctcatcgctgcccccatccccgctgtcacacttcccactgggtccccacggccttcctgcctctggccctttaaggcccaggcaggaagcccctccccatttagggcaataaatggacacgtaaaatggccgaggg

SEQ ID NO: 223448 - DNA, 553 bp, Homo sapiens
acgataatgtagcctaccatggggagaaactcagtttaaatatccgtttctctgtgaaaatatctcagaagacacacattccaggctctttgctgaggattttattttgctgttatctcatttaatcatcacaacaattctggggaaatgggttcattttagaaatgtgaaaatcattactcagaaaattgtacattttgcctaaagtcacacaagctagtaaggatcagatccagggtttgaatccaggtctgctttgattccaaagcctgagcccttctatacaaactacacagttcaaacatgtcacagaatctctcctgccctggggctgtggcccttgctcccctatgacaccgatgttttaggaagatggctagaacctgcccggatttttccaaggaagtcagactaatccctaagtcaggcatacctttttccctctgtccttactgggctttggtactaggcagtggtttctgtcctccacaactgcccatggctgtctttgtgtgaagggaccccgattgtggccagttaactcagtgtccta

SEQ ID NO: 223449 - DNA, 436 bp, Homo sapiens
gagggactgaatgtttctacttaaggtggtatgcaccacaaaggatatgtagacaaaaagtttgaaaaactagagagagaaatgggaaattgagactatatatataaagacaaagaaataaaagactgcaagagaatgagatttggctgtgcccttcttgttgtgaaggacaaaaaagaaaacaggatgagttagaagctgttgtcagagaaaataagaactaaagtcaagtgtagtggctcacacctgtaatcccagcactttgggaagccaaggcgggcggatcgcttgaggtcaggagtttgagaccatcctggcaaacatggtgaaaccctgtctctactaaaaatacaaaaaaattagttggatgtggtggcaggcgcctgtagtctcagctacttgggaggctgaggtgggagaatcgcttgaaccctgg

SEQ ID NO: 223450 - DNA, 1941 bp, Homo sapiens
gtatttgtgttagatgttgttagatgtgttgtttttttgtgtgtgttttgtttcgttttctgagacagggtcttgctctgtcacccaggctggagtagtggcgcgatctcggctcactgtaacctccacctcccaggttcgagcaattctcctgcatcagtctcctgagtagctggcgttataggcacctgccaccacgccaggctaatttttgtattcttagcaaagacagggtttcaccatgttggccaggctggtctcgatctcctgactcaggtgatctgcccgccttcgactcacaaagtgctgggattacaggtgtgagccaccacacctggccagcctgtgagagctttaaaccatgagatagacatatggttttgcaaaagtttctacataaatcagaatggttcccagaacagaaaggctcctctgtcactttttttatctggttgcttaaccataagatgccaacccaattaacagtcacacccatatttgcattatatctgtttcatatgttccgtgtaactgcctcctttcaaagtgttggtatatttttcaagtcaactggaaccaaaagtatagagaaactgaatgcaagccagctttctgcatatgtaacagtgtaagaatccaggttgtatagatgggtttttgtttgacacagatgtttctcccagtaaagagaggataaggagctggaactcgtggcacagttccctacaaaataattaattgatcatgtctactaattaaaatttctttttctgtactattgcagatacctggttttggctgggcaaggtggctcacacctataatcccaacattttgggaggctcacttgaggtgggaggctcacttgagcccaggagtttcagagcaacccgggcaacaaagtgagatcccatctgtacaaaaaattaaaaaattagctgggcatggtggcacatacctctagtccagctattctggaagcttaggtagaaggatcacttgagcctgagagatcaaggccgcagtatgctgtaattgcaccactgcactccaccctgggtgacagagcaaaaccctgtctcaaaaaaaaaaaaaaagagacacctggctttactgtgtatgctgtacctcagggcaagttttccctttgtcttctaatagacactttttggatccagaaattgttctctgcaatttctttacttaaacataattatcagcctgtatgacctctgtggtctgactactttgaaattaagggagaaggctgggcacggtggctcactcctgtaatcccagcactttgggaggctgaggtgggcggatcacttgagcccaggagttcgaggcaacatgacaagaccctgtctcgacaaaaaaacaaaaaacttagccagacatggtgacacacgtttatggtcccagctactcaagaggctgaggcagggggattgcttgagcccaggaggggctcaaggtcggcccaggaggtcaagacccaggcgatcaaggcccaggaggtcaagactgcagtgagctgtgctcatgccccactgcactccagcccagtcatcagagcaaaaccttgtctcaaaaaaaagtaaagaaagacatgtttattatatggtagtttgaaaaattacaaaaaaaagagtaaatcatggccggacgcggtggctcacgcctgtaatctcagcactttgggaggccgaggcgggtggatcatgaggtcaggagatcaaggccatcctggctaacacgatgaaaccccgtctctactaaaaatacaaaaaaattagctgggtgtggtgctgggcctgtagcccagctactcgggaggctgaggcaggagaatggcatgaacctgggaggtggagcttgcagtgagctgacatcgtgccactgcactccagcctgggtgacagagcaagactccgtctc

SEQ ID NO: 223451 - DNA, 585 bp, Homo sapiens
tgtatacccatcaccacaatctaattttagaacttttgtctcccctcaaagaaacccagttagcagttgctccccatttcttctacctgtagccacgaatctactttctgtctctatggatttgtctattctggacatttcatataagtggagtcatacaagatacggccttttgtgtccgacctctttcatttagcataacgttttcaagtgccagccgtgttgtcacatctatcagtatttcgttcttttttattgccaaacatcctattctaaggatatatcctgtttgtttatccagtcataagttgatggagcttatgatggttttcactttttggcttttaagaataatgcagttatgaacattcatgtacgagttttagtgtggacatcatatgttttcatttttcttgggtatgtacctaggagaattgttgaattaacgtggtaactctatgtttaactccctgaggtgctgtcacactgctttccacagtagctgtaccattttacatgcccaccagcaatgtatggaggttataatacctacacatcctcaccgacacctgttattgtctgtct

SEQ ID NO: 223452 - DNA, 661 bp, Homo sapiens
ttcattgctagcagtttttctaccctctctcctgcaggcattctcccagaaaaaaggctgactctgtggtgccatttgagagaaataggttcagtagattcttccagagatgacaaacgaaaagacttgatgtggaagtaagagaagtaggggcgtcaggacactgaagtgagagatcttttgttctcgtggcattggagaagccaggaaagaaaaaggctttagcagggaccaggtgcgtccactttgcaagtggatttggagagaacaagcagtgttcacatatcagtccagcaatgtctcaagactccttcctggaacagtcatcagtttaatccagtgaggatggtgtctctcttctttcatgagcattttcctatttctgaaatattaataaataggtgctttgttcctaggaagtggagagaagtcaaggaaaatactcatcatactcctagaagtcaaggaaaatactcctcgtactcctcatggccgctggagcccgctgctatgaggttatggagaacgtcttgaacattccattccccagcacctagtgcagtgactagcatagtaggcactcaaaaagtgtctgtaggattgtatttcaaactttagttgtctttcccaaagaagcctgtcgtgcccacacgcggccgca

SEQ ID NO: 223453 - DNA, 278 bp, Homo sapiens
ttcattgctagcagtttttctaccctctctcctgcaggcattctcccagaaaaaaggctgactctgtggtgccatttgagagaaataggttcagtagattcttccagagatgacaaacgaaaagacttgatgtggaagtaagagaagtaggggcgtcaggacactgaagtgagagatcttttgttctcgtggcattggagaagccaggaaagaaaaacctggggccctatggcttaattgctgaattccaccaaacatttaaagaactaatttcaatc

SEQ ID NO: 223454 - DNA, 892 bp, Homo sapiens
gcacaggaagcgtgtaggaagcgtggcgcctcagccacaatcgtaatcacctttaatctcttgctcaaaataacccaaagtcaagccagagggagcctcgctaaccaccaaggcggtcctgcggccccgcgcagccctgagggcgtccagtcctccacgcgtggaggagaatccggcctccagacacaatctccagggcccactggatgggcctccgctccttctcactcccagtcctctggtgcatgcccccttcctggctgaagaacctgcaccagccgcccctccgcctgggaagctccctcctgtcattcactccgagacgcagcagcgttgccccaagagccctccctgctctgcaccccgaattcactctcagcccccacctagtttaaatcctggcccttctctctcttccgttgaatgggagtaaagaccactcctcccagggagcttgtggtttctcacaaaagaaaaacaaaacaaaaaaaaaaaaaaaaaaacaaacaacataagacaaaacaaaacaagccgaagcaacacgtctcacccgccggcggggacgcagagcagacatgagcagagacaggcagcaaagaacccacagagagggcccccaacaacgcgaccgccggatggagtaccaccaagaagagacacaacggagggcgcgcccggacacagcgcgtaagagagcagagcgactggaacaaccaacacgaagcaggaggcacgcgaacaaccaaggcgcgaagagcagcagaagcatacaaaagcagaacaagacacctcggagcgagactagatagaaagacagggggcccgcaccaccacgagccaacacaacccagggaggaaccacacacaagaagacaagggggaaccaaaagaa

SEQ ID NO: 223455 - DNA, 1412 bp, Homo sapiens
gcacaggaagcgtgtaggaagcgtggcgcctcagccacaatcgtaatcacctttaatctcttgctcaaaataacccaaagtcaagctgaccctcggtctatcttgaggccctcggctgcccccgacttgaagattctcccccgttgcgtctaagtggctgctccaagttcccgtccccgctggcatctccctgcctcaccatccgccacattcctacaccaaaagttgacgccgcattctggactcctctctttcctccccccacacctggtccaactccagcagcatctaatccacctgcagaagcatctggaatcactccactcccaccacgaccgcccaaacccacctccagcggggacgacgcccaaggtaccacctggtctcctggcacccacaatccattctccctccacagccagagggagcctcgctaaccaccaaggcggtcctgcggccccgcgcagccctgagggcgtccagtcctccacgcgtggaggagaatccggcctccagacacaatctccagggcccactggatgggcctccgctccttctcactcccagtcctctggtgcatgcccccttcctggctgaagaacctgcaccagccgcccctccgcctgggaagctccctcctgtcattcactccgagacgcagcagcgttgccccaagagccctccctgctctgcaccccgaattcactctcagcccccacctagtttaaatcctggcccttctctctccctgatgttctgcttggttatttacttttaattcatgttggagctcctcctgccactgcaagagcaggagctgtgtgtcctggtcactgctgtggcatcccagggccggcgcggtgcccagcagccaggactggacagactcgggccacgctgcgcacgggctgggatgcgcttgctctgcttcctcttccgttgaatgggagtaaagaccactcctcccagggagcttgtggtttctcacaaaagaaaaacaaaacaaaaaaaaaaaaaaaaaaacaaacaacataagacaaaacaaaacaagccgaagcaacacgtctcacccgccggcggggacgcagagcagacatgagcagagacaggcagcaaagaacccacagagagggcccccaacaacgcgaccgccggatggagtaccaccaagaagagacacaacggagggcgcgcccggacacagcgcgtaagagagcagagcgactggaacaaccaacacgaagcaggaggcacgcgaacaaccaaggcgcgaagagcagcagaagcatacaaaagcagaacaagacacctcggagcgagactagatagaaagacagggggcccgcaccaccacgagccaacacaacccagggaggaaccacacacaagaagacaagggggaaccaaaagaa

SEQ ID NO: 223456 - DNA, 1079 bp, Homo sapiens
gcacaggaagcgtgtaggaagcgtggcgcctcagccacaatcgtaatcacctttaatctcttgctcaaaataacccaaagtcaagccagagggagcctcgctaaccaccaaggcggtcctgcggccccgcgcagccctgagggcgtccagtcctccacgcgtggaggagaatccggcctccagacacaatctccagggcccactggatgggcctccgctccttctcactcccagtcctctggtgcatgcccccttcctggctgaagaacctgcaccagccgcccctccgcctgggaagctccctcctgtcattcactccgagacgcagcagcgttgccccaagagccctccctgctctgcaccccgaattcactctcagcccccacctagtttaaatcctggcccttctctctccctgatgttctgcttggttatttacttttaattcatgttggagctcctcctgccactgcaagagcaggagctgtgtgtcctggtcactgctgtggcatcccagggccggcgcggtgcccagcagccaggactggacagactcgggccacgctgcgcacgggctgggatgcgcttgctctgcttcctcttccgttgaatgggagtaaagaccactcctcccagggagcttgtggtttctcacaaaagaaaaacaaaacaaaaaaaaaaaaaaaaaaacaaacaacataagacaaaacaaaacaagccgaagcaacacgtctcacccgccggcggggacgcagagcagacatgagcagagacaggcagcaaagaacccacagagagggcccccaacaacgcgaccgccggatggagtaccaccaagaagagacacaacggagggcgcgcccggacacagcgcgtaagagagcagagcgactggaacaaccaacacgaagcaggaggcacgcgaacaaccaaggcgcgaagagcagcagaagcatacaaaagcagaacaagacacctcggagcgagactagatagaaagacagggggcccgcaccaccacgagccaacacaacccagggaggaaccacacacaagaagacaagggggaaccaaaagaa

SEQ ID NO: 223457 - DNA, 900 bp, Homo sapiens
atttcggaccaggaccaggaagtaactttagaggaggatctgatggatatggcagtcctctggtgcatgcccccttcctggctgaagaacctgcaccagccgcccctccgcctgggaagctccctcctgtcattcactccgagacgcagcagcgttgccccaagagccctccctgctctgcaccccgaattcactctcagcccccacctagtttaaatcctggcccttctctctccctgatgttctgcttggttatttacttttaattcatgttggagctcctcctgccactgcaagagcaggagctgtgtgtcctggtcactgctgtggcatcccagggccggcgcggtgcccagcagccaggactggacagactcgggccacgctgcgcacgggctgggatgcgcttgctctgcttcctcttccgttgaatgggagtaaagaccactcctcccagggagcttgtggtttctcacaaaagaaaaacaaaacaaaaaaaaaaaaaaaaaaacaaacaacataagacaaaacaaaacaagccgaagcaacacgtctcacccgccggcggggacgcagagcagacatgagcagagacaggcagcaaagaacccacagagagggcccccaacaacgcgaccgccggatggagtaccaccaagaagagacacaacggagggcgcgcccggacacagcgcgtaagagagcagagcgactggaacaaccaacacgaagcaggaggcacgcgaacaaccaaggcgcgaagagcagcagaagcatacaaaagcagaacaagacacctcggagcgagactagatagaaagacagggggcccgcaccaccacgagccaacacaacccagggaggaaccacacacaagaagacaagggggaaccaaaagaa

SEQ ID NO: 223458 - DNA, 673 bp, Homo sapiens
tgtgtccaaagctggaagctgccccagccaaacactggaaacacccagctctccaccaagataaaccacgcgagccacagcttgcgggcaatatcccatctccatcctcaccactgctcagcccagacctccctcatcttcctggcctgcagaccttagcagtggctgttcccacccctggaacacccttcccacctggtacctgatgcctgcagggcccatgcacggcatattcactgctgtatccccagagcctcgcacagtgcctggtgcagagatgattttcagcaaagaggcactgaagggaagatacctatgtgactgtgaggagacacaggctggacgatgaatgtgatggctggaactcaagcagccacagtggatcataagggacggtgtcttgctatgttgtccaagctggtctcaaactggcctgaatcaatgcttccacctcagctgccagaggaaccgggattacaggcctgagccactgcagccagccagtttgttattttaatgtaaattcttagtaaacaactcaggagctctcttgtccttttaaaatccatttcaacttctgctaatcggagtgtatattcagggcaacttgaatctgtgctcctgggatgcaatcctcaagcttggcccaaataaagtctccgctgatattaat

SEQ ID NO: 223459 - DNA, 514 bp, Homo sapiens
atctctgcagggctagcccagaggttggcggcggaaggcccacagctcccctggctccatgggcaatgaccgaacagcccttcacctctctgggccttgttttctcaaactgaaactggagaggatgaccccagcctgggaccttcgagggcctcaaaagggctctgggccttgcgtggctggacgatgaatgtgatggctggaactcaagcagccacagtggatcataagggacggtgtcttgctatgttgtccaagctggtctcaaactggcctgaatcaatgcttccacctcagctgccagaggaaccgggattacaggcctgagccactgcagccagccagtttgttattttaatgtaaattcttagtaaacaactcaggagctctcttgtccttttaaaatccatttcaacttctgctaatcggagtgtatattcagggcaacttgaatctgtgctcctgggatgcaatcctcaagcttggcccaaataaagtctccgctgatattaat

SEQ ID NO: 223460 - DNA, 3025 bp, Homo sapiens
  misc_feature (10)..(10): n is a, c, g, or t
ggcggggctngcggcaggagacgccgcgttgagagcttgggctcctccgtgagccgccggcgcgcttcgctgcctggcggcctttccccgagccgagcccgcttcccgaggccgccagtcgtcgcctgcccgcgcctgcgcagcgtcccgggccgagagggccacggcggcggccatggcgcaccgctgtttgcggctgtggggccggggcggctgctggccccgcggcctacagcagctcctcgtgcctggcggcgtgggcccgggcgagcagccctgcctccggacgctttaccgatttgttacaactcaagcaagggccagcagaaattctcttttgacagatataattgctgcttatcaaagattctgttctcgacccccaaaaggatttgaaaaatactttcctaatggaaaaaatggaaaaaaagctagtgaacctaaagaagttatgggagagaaaaaagaatcaaagccagctgctaccacacgctcttctggaggaggaggtggtggcggtggaaaacgaggtggcaagaaagatgattctcactggtggtccaggtttcagaagggtgacattccatgggacgacaaggatttcaggatgttcttcctctggactgctctgttctggggtggagtcatgttttacttgctgctcaagagatccgggagagaaatcacttggaaggactttgtcaataactatctttcaaaaggagtagtagacagattggaagtcgtcaacaagcgttttgttcgagtgacctttacaccaggaaaaactcctgttgatgggcaatacgtttggtttaatattggcagtgtggacacctttgaacggaatctggaaactttacagcaggaattgggcatagaaggagaaaatcgggtgcctgttgtctacattgctgaaagtgatggctcttttctgctgagcatgctgcctacggtgctcatcatcgccttcttgctctacaccatcagaagagggcctgctggcattggccggacaggccgagggatgggcggactcttcagtgtcggagaaaccactgccaaggtcttaaaggatgaaattgatgtgaagttcaaagatgtggctggctgtgaggaggccaagctagagatcatggaatttgtgaatttcttgaaaaacccaaagcagtatcaagacctaggagcaaaaatcccaaagggtgccattctcactggtcctccaggcactgggaagacgctgctagctaaggccacagccggagaagccaatgtccccttcatcaccgttagtggatctgagtttttggagatgttcgttggtgtgggccctgctagagtccgagacttatttgcccttgctcggaagaatgccccttgcatcctcttcatcgatgaaatcgatgcggtgggaaggaagagaggaagaggcaactttggagggcagagtgagcaggagaacacactcaaccagctgctggtggagatggatggttttaatacaacaacaaatgtcgtcattttggccggcaccaatcgaccagatatcctggaccccgcgctacttaggccggggcgtttcgacaggcagatctttattggaccaccagacataaaaggaagagcttctattttcaaagttcatctccgaccgctaaaactggacagtaccctggagaaggataaattggcaagaaaactggcatctttaactccagggttttcaggtgctgatgttgctaatgtctgtaatgaagctgcgttgattgctgcaaggcatctgtcagattccataaatcagaaacactttgaacaggcaattgagcgagtgattggtggcttagagaagaaaacgcaggttctgcagcctgaggagaagaagactgtggcataccacgaagcaggccatgcggttgccggctggtatctggagcacgcagacccgcttttaaaggtatccatcatcccacgtggcaaaggactaggttatgctcagtatttaccaaaagaacaatacctctataccaaagagcagctcttggataggatgtgtatgactttaggtggtcgagcctctgaagaaatcttctttggaagaattacaactggtgctcaagatgacttgagaaaagtaactcagagtgcatatgcccaaattgttcagtttggcatgaatgaaaaggttgggcaaatctcctttgacctcccacgtcagggggacatggtattggagaaaccttacagtgaagccactgcaagattgatagatgatgaagtacgaatacttattaatgatgcttataaaagaacagtagctcttctcacagaaaagaaagctgacgtggagaaggttgctcttctgttgttagaaaaagaagtattagataagaatgatatggttgaacttttgggccccagaccatttgcggaaaaatctacctatgaagaatttgtggaaggcactggcagcttggatgaggacacctcacttccagaaggccttaaggactggaacaaggagcgggaaaaggagaaagaggagcccccgggtgagaaagttgccaactagaggcccagagggaggccatctcagtctctccactgtggtttcagctggtgcattatttcagctgtggctttcagaagaatgggaatgctgcgctgattttagccagccactggcccagctgaaatgatggggaaaggagtccttagtcctttcagcctcagaggtcacagtgggtggcaggtgactttccggaggccttgagggaaatgcacactgtcccatagcctcattgggctcccagacgtgctggaaaggttgagcccagagtggccgaggctggaccctgtggcaccaagtggggtcggctgaccgtgtggcagggatcgttgcactggactcttggcgtgtgggaagggatgctttctctttgtcgcccactcttcattcctgtttctcctcagttcccctgtgcagatgggctgtgaaattaaattggagtcttgataagaacatttt

SEQ ID NO: 223461 - DNA, 945 bp, Homo sapiens
  misc_feature (10)..(10): n is a, c, g, or t
ggcggggctngcggcaggagacgccgcgttgagagcttgggctcctccgtgagccgccggcgcgcttcgctgcctggcggcctttccccgagccgagcccgcttcccgaggccgccagtcgtcgcctgcccgcgcctgcgcagcgtcccgggccgagagggccacggcggcggccatggcgcaccgctgtttgcggctgtggggccggggcggctgctggccccgcggcctacagcagctcctcgtgcctggcggcgtgggcccgggcgagcagccctgcctccggacgctttaccgatttgttacaactcaagcaagggccagcagaaattctcttttgacagatataattgctgcttatcaaagattctgttctcgacccccaaaaggatttgaaaaatactttcctaatggaaaaaatggaaaaaaagctagtgaacctaaagaagttatgggagagaaaaaagaatcaaagccagctgctaccacacgctcttctggaggaggaggtggtggcggtggaaaacgaggtggcaagaaagatgattctcactggtggtccaggtttcagaagggtgacattccatgggacgacaaggatttcaggatgttcttcctctggactgctctgttctggggtggagtcatgttttacttgctgctcaagagatccgggagagaaatcacttggaaggactttgtcaataactatctttcaaaaggagtagtgacagactgccaggtcgcacagcgtatgtcgactagacttacccaggaaactcgctgcggccaacgtggtacattggcgtggacctggaggaatggacacaaacgatggctaagaaacgccgcgccaggcaaaactcagagcagacaacccccaaagcgtggcgcacgataacaaataatggtacacaacaacaaaccacaccccccccacacctc

SEQ ID NO: 223462 - DNA, 2896 bp, Homo sapiens
  misc_feature (10)..(10): n is a, c, g, or t
ggcggggctngcggcaggagacgccgcgttgagagcttgggctcctccgtgagccgccggcgcgcttcgctgcctggcggcctttccccgagccgagcccgcttcccgaggccgccagtcgtcgcctgcccgcgcctgcgcagcgtcccgggccgagaggctttaccgatttgttacaactcaagcaagggccagcagaaattctcttttgacagatataattgctgcttatcaaagattctgttctcgacccccaaaaggatttgaaaaatactttcctaatggaaaaaatggaaaaaaagctagtgaacctaaagaagttatgggagagaaaaaagaatcaaagccagctgctaccacacgctcttctggaggaggaggtggtggcggtggaaaacgaggtggcaagaaagatgattctcactggtggtccaggtttcagaagggtgacattccatgggacgacaaggatttcaggatgttcttcctctggactgctctgttctggggtggagtcatgttttacttgctgctcaagagatccgggagagaaatcacttggaaggactttgtcaataactatctttcaaaaggagtagtagacagattggaagtcgtcaacaagcgttttgttcgagtgacctttacaccaggaaaaactcctgttgatgggcaatacgtttggtttaatattggcagtgtggacacctttgaacggaatctggaaactttacagcaggaattgggcatagaaggagaaaatcgggtgcctgttgtctacattgctgaaagtgatggctcttttctgctgagcatgctgcctacggtgctcatcatcgccttcttgctctacaccatcagaagagggcctgctggcattggccggacaggccgagggatgggcggactcttcagtgtcggagaaaccactgccaaggtcttaaaggatgaaattgatgtgaagttcaaagatgtggctggctgtgaggaggccaagctagagatcatggaatttgtgaatttcttgaaaaacccaaagcagtatcaagacctaggagcaaaaatcccaaagggtgccattctcactggtcctccaggcactgggaagacgctgctagctaaggccacagccggagaagccaatgtccccttcatcaccgttagtggatctgagtttttggagatgttcgttggtgtgggccctgctagagtccgagacttatttgcccttgctcggaagaatgccccttgcatcctcttcatcgatgaaatcgatgcggtgggaaggaagagaggaagaggcaactttggagggcagagtgagcaggagaacacactcaaccagctgctggtggagatggatggttttaatacaacaacaaatgtcgtcattttggccggcaccaatcgaccagatatcctggaccccgcgctacttaggccggggcgtttcgacaggcagatctttattggaccaccagacataaaaggaagagcttctattttcaaagttcatctccgaccgctaaaactggacagtaccctggagaaggataaattggcaagaaaactggcatctttaactccagggttttcaggtgctgatgttgctaatgtctgtaatgaagctgcgttgattgctgcaaggcatctgtcagattccataaatcagaaacactttgaacaggcaattgagcgagtgattggtggcttagagaagaaaacgcaggttctgcagcctgaggagaagaagactgtggcataccacgaagcaggccatgcggttgccggctggtatctggagcacgcagacccgcttttaaaggtatccatcatcccacgtggcaaaggactaggttatgctcagtatttaccaaaagaacaatacctctataccaaagagcagctcttggataggatgtgtatgactttaggtggtcgagcctctgaagaaatcttctttggaagaattacaactggtgctcaagatgacttgagaaaagtaactcagagtgcatatgcccaaattgttcagtttggcatgaatgaaaaggttgggcaaatctcctttgacctcccacgtcagggggacatggtattggagaaaccttacagtgaagccactgcaagattgatagatgatgaagtacgaatacttattaatgatgcttataaaagaacagtagctcttctcacagaaaagaaagctgacgtggagaaggttgctcttctgttgttagaaaaagaagtattagataagaatgatatggttgaacttttgggccccagaccatttgcggaaaaatctacctatgaagaatttgtggaaggcactggcagcttggatgaggacacctcacttccagaaggccttaaggactggaacaaggagcgggaaaaggagaaagaggagcccccgggtgagaaagttgccaactagaggcccagagggaggccatctcagtctctccactgtggtttcagctggtgcattatttcagctgtggctttcagaagaatgggaatgctgcgctgattttagccagccactggcccagctgaaatgatggggaaaggagtccttagtcctttcagcctcagaggtcacagtgggtggcaggtgactttccggaggccttgagggaaatgcacactgtcccatagcctcattgggctcccagacgtgctggaaaggttgagcccagagtggccgaggctggaccctgtggcaccaagtggggtcggctgaccgtgtggcagggatcgttgcactggactcttggcgtgtgggaagggatgctttctctttgtcgcccactcttcattcctgtttctcctcagttcccctgtgcagatgggctgtgaaattaaattggagtcttgataagaacatttt

SEQ ID NO: 223463 - DNA, 197 bp, Homo sapiens
cgttttgttcgagtgacctttacaccaggaaaaactcctgttgatggggtaaatcattttattaattgatgtgaattagttgtaaattaactttttcagatttaaagctgaaaggaaaacctgcctcatactctaggagttatacgcaccagatatatcagaactgggcagtgtggcaggggtgatcttactaacat

SEQ ID NO: 223464 - DNA, 335 bp, Homo sapiens
cgccttcttgctctacaccatcagaagagggcctgctggcattggccggacaggccgagggatgggcggactcttcagtgtcggagaaaccactgccaaggtcttaaaggatgaaattgatgtgaagttcaaagatgtggctggctgtgaggaggccaagctagagatcatggaatttgtgaatttcttgaaaaacccaaagcagtatcaagacctaggagcaaaaatcccaaaggtaaaatgaaatttaagattaactttttgaaatgtttcttgatctctgaagttataattctgtgaagtttgattacttattatagatagctgtttttctg

SEQ ID NO: 223465 - DNA, 515 bp, Homo sapiens
cacactttaaactttgagtggggactgaggaatttgcatcccaactctgtgacttattcactgtcccctaacactgccacccatccaacaagttacttaagctatactttctccctctgtgaagggtataacagtcctataatttcttgggttattgggttattgtgcatatttcatgagatgatgcaagtatagcccttgggagcctccctgattggtaagctttgtatttgtattctttctcatagtgcttcacttagtaactgatcagttgccacagtgtattctgcaatgagtcttttattaaaccgtatacatgaagacattgctgagagagctaaaaccttgccgtgcttctgtgtgtgctctttgtttatgaacagaatcaaagccagctgctaccacacgctcttctggaggaggaggtggtggcggtggaaaacgaggtggcaagaaagatgattctcactggtggtccaggtttcagaaggtttgatgctatacattgtgtgaat

SEQ ID NO: 223466 - DNA, 190 bp, Homo sapiens
actgaaataagtatctccactccccaaagtgatacatctgaagtcatctggctgactgtgtgtccagaggcaccacgtcagtgtctctttgccagagcctttatgggggtggtacgaggggaactggagtctgggggcacgtcaggccttcatcaatcagaaggcagtggcagcgacagcaagacaggcg

SEQ ID NO: 223467 - DNA, 455 bp, Homo sapiens
gcaacagcgtgagactctgtctcaaaaaaaaaaaaaaaaaaaaaaaggaaaaatgcatttaaagtaactttggaaaaaatgaattaagaacttttcccttcctaattaaaaaacagcgaattgactacctaataaagccagtaattgtgactagggagcattatcattgcctagcagagtttcccaaatcgtggctccgaagccctgtggctctctttcagcacattatgcaagtctttggcacgaagtagaaaggaataagggtggaattcaaagttcatatatagtagtaaggatttagaaaagagatgaagatacacactcaaggaaaattaatataaaatggatgtcagctgggagaggaataagtacgtactcaggaataaatcacttttatagctctgctttaaagctctattactttctgttaaaatgtattttcaagtgttatgttg

SEQ ID NO: 223468 - DNA, 498 bp, Homo sapiens
gggaaggcaccatgggagagatggggtggagacaataagaggcaattgaaattaaagggaagttgggcagaatgtggagacccagcacctgctagatcctctgcaagtgtgctggaaatgaacagcgaaatcagggagcaaactaacacatgacctcaattaactgatgaaagaattaatcatacttcatactgagcacttattttgtgccaggcattgcactaagtgctttacatatgtagttgtcccttgaacaatgtgggtttagtggtgttgacccccctttcagctgagaattcaagtataacttttgtgtcccccaaacttaactattgattgcctactgttgacctgaagccttaccaataacataaatgaccgattaacacatatttgtctgttacacgtgttatatactgtattcttacaataaagtaagctagagaaaaaattttaagaaaatcatagagaaaataaaaattggctgtttttaaatgg

SEQ ID NO: 223469 - DNA, 451 bp, Homo sapiens
attatcttccaccacagcagaattttttaacagtttaatcatcatcagcctttagtctcagtcatcatatacccatcttgcaacctcattctccctaattttatcgtggaaatgaaaaaaaaaggaccttcttttggaaaagattagattattttgatctagcatgaccaattattaacacttaaatagtttgtagcacccacggagcagtgttttatagttttccttagtttttacatttagttgtttctattctgtgaatgaaattaaagcaagtattaatacttgatctattttctatgaattatgtacttcaattaatgtagtttttcatatctatcaaatcaaaataattattagtccaaaaagttaatatgattattttttaaaaacatttgtttagaatcactagatgtttagatactaaattagaaaagtttgtcccatacca

SEQ ID NO: 223470 - DNA, 571 bp, Homo sapiens
gacttttacaaagctataataatcaagacagcatatttggtgtaaacataaacatatgcattaataaaaagtatccacatataggatcaactgattttcaacaaaggtgccaaggcagttcaatgaaggaaggacagagttttcaacaaatagtgctggaatcactgaacatacatatacaaaactaaaacaaaataacaacaaaatctcagtccttacccttacactatatataaaatttaactcaaaatggacctaattaatgtaagagctaaaaactataaaacttctagaagaaaacataaaagaagatcttgggttagatatattttttttaagacacaacacccaaaacatgatccatagaagaaaaaatggataaaatggacttcaacaaaaataaaagctgctgctctttgaaagatactgttaagaaaatgaaagctagacacagtggcgtgtgcctgtagtcccagatactcaggaggctgaggtgagaggattgcttgagcccaggagttcaaggtcagactgcccaacacagcaagactctgtctttaaaaggcaaaaa

SEQ ID NO: 223471 - DNA, 528 bp, Homo sapiens
cagaaagagggaagacaactctttcatgacatataactctctttaaagcattaacatacggaacttttctgaaagggtcaaaggggactaatactgaaaatggaagtgaacaatgtgatgagcactctgaaagggtgaggtgtattgacaactaaggtcttctcactggtattttgtggtttctttttgaaaaatggaggtgattctcaccttttgggggaagatctgttgctatttgaccatcattggcaagtatctaactgtttcacatctccagagaaccaaaggtaaattataaagctgacaggaatataaaaattcatcatttctgctcagtgtatgaatttggattaatatttaatgattcattaaatttttgtattttgtcttcttcccactgtcagtgagtaaggtttaatggaattgaatgaagtctatgtttactcacttttatggcttctgtgtcctcaggataatgtctgacgcatattaacactcagtaaatatttttattattgttgttgtgta

SEQ ID NO: 223472 - DNA, 413 bp, Homo sapiens
ccaacgggctgaaaattccatcttgtggatgtaaagaagcagaagttgtcattttgagtctgagggaagtctgcagacagaattccttcctcttcaagggacctgggtccttgctcttaaggccttcaattaattggatgaggctcattcacactgcggaagataatctgccctactcaaagtgctctgacttaaccacattgatcacatctgaaaaatacctttgcatctacactggtgtgtgaccaaataacgaggcaccattgcctgggcaagttgacatgaatttaaccaccacactagagagctctcccgatgcccatggagggccattgctgtgggtatcaaatggctcagggagattctgtagagaaatattttgtttccaagaaaaatcaatcagtcttgatcca

SEQ ID NO: 223473 - DNA, 412 bp, Homo sapiens
aatttgaattgtaatatcaatatgaacttatgacgcttttatcttaaggaaaatgaaaagtatttcctacctagctctgtttacttaaaaggcctagaaacaaggacaactcagtagcaatgagcaccccagcacccagattctggtttcaaatactatttcccacaaaaagaaatgggggctctttggagaccggctgaatccaaaccttgcggggagatcagtctggaccatctagttatagtagaaagaaaagaaagtatctaagagtaatgaggggagtcaaagggtaggatcagatcacttgagggtcaataatagtcattacaagctgagagtcgataagaataattgcaatgaattgaaacatgttgaatatgtttaagtctatgagttcataatgatactaaaa

SEQ ID NO: 223474 - DNA, 456 bp, Homo sapiens
gcaagtttacaatttcatgttgagctaaatccattagctttatagcatttttttgtgttttatttcctcttataagtgaaaagaagtgaaagtgaagaacatttatttgtttgaagaagataggaaagcagtgctacttatacttccgagttcatattcggtttaagtatccaagatagctggatctttattaaataatttattaaaattaacaaatactctgaatggaaatattgttcaaaattataatgttgaaaattttcaaattcccaggtaaacatttgaattggatttatatgaggagttagaagaaaatacttttctcataatttgaagatatatgatgccagtggaaaatcttgtagacactttctaaattattttgattattacctttttccacggattgtaatttagaggcttcttttctccccagcattcaatattatctatcag

SEQ ID NO: 223475 - DNA, 182 bp, Homo sapiens
tagaacttaaatatataatttgggggcagacacaatttagtccatagtatcagcagggcctggtggctcatgcctgtaatcccagcactttggaagtccgaggcgggtggatcatgaggtcaggagattgagaccatcctggccaacatggtgaaacccgtctctactaaaataccaaaaaa

SEQ ID NO: 223476 - DNA, 380 bp, Homo sapiens
gaacaatcacatgaatgaagtccttcagtatataagagcagatgagttccagtgcagaattgctgggattggcctgaggtgcagaaattgattatctgttgaaacagtatggactgcagaatatatggataaaaagttaggtagatttactagtgagagtatgaggaagttatttttttatttcctcagtgaaatgaagagcacagtcatcagctaagagttgggggaaggactattgcaggttagagataaaaggggaagctaggaaaagaccaaaagaagaataaatagacttgggaaatgtgataggattaccaaaggggtccagttgagagttttggctatgtagttatatgtttcaaaggaagaaagaatagagg

SEQ ID NO: 223477 - DNA, 447 bp, Homo sapiens
gcattggtctatttttccacttactttgtgagtttttctctccctttccttgctgtcagtgtcctcatgtagcagcttttctccttatttctaattttctcattttacatctactacaggctttgaaattgcatactgaagcttctttaagtactatgtaacctaagattaggccttgaaataagggcaaaagagatcactttcaagccacatgtgtgagatttgaatgcaggcccttgagatgatactttggctgtatacaggtttgttgcttcctgctttaggctacatctaaagcagagttttctctgataagagtttgggttagattcaacataaccttagaagaaatggctaccctattttatttatgctttgctttttttacaaaaaagaaattttattaaaatgtatagaaaatcatgtgataaaatattttttaaaaaa

SEQ ID NO: 223478 - DNA, 129 bp, Homo sapiens
gaatggaatggaatggaatggaacggaatgtaatgtaatggaatggaatggaatcaacccgagtgcaggggaatggaatggaatggaatgcaatggaatggaatcatccggaatggaatggaatggaat

SEQ ID NO: 223479 - DNA, 789 bp, Homo sapiens
gacgttatagcgtggtatcaggcaggcagacttctgatggcccattcagtttcagtagatgcctggattttctactggcactgagccagaggctgctaggctcagaggtgcctctaacctcacttggtgacttcattttcaaaaccgaacctgagaaactggcaatctgtcatatctagactcaaaagcaatgggccacaatatcttgtctgtgtaaggcactcatgcttctttgccacattatttgataatggtttcatgtcatgaatgcacaagtagagagatcttatggaaaatatattggcatgaataaggacaggcatatatttgctgtcacccttctctaaaggtggaagaataacctggtgtagaggatgatggaatcagagttaagagacgtaggtccttgccatgctggcaagaactaagtgaggcactggacttctttgtgccaaggattcatggaaaatgccatgggggtcattctctggttaacagaggtcacctgaggatctgagtaaaaactgtgatgtctgttgcctttataggcaaaatgaataggttaaggtattgactgtgaagtccaggggaagtgatgatgctgaaaggtaacatgtaaagtgatggtgggaagatgaatatcagcatagatgaggagtgggaaccagcagttctttagcagttttgttcaggtgatggtcatgggcttggtgattgatcaggtgtgttccagagtagggcaggaagatgcagagatactatttcaaaatctaggagtaatgaacgccg

SEQ ID NO: 223480 - DNA, 405 bp, Homo sapiens
aaaaacagaaaacagttggatacagattcctgagttggaagtgcactttggccaactcccttcattatcatactaaaatccctgcccaaggcagagcttactcaccattttctacacgtgacatatgtaggagcatgatcagccactgtgactgtgagtaaagctgcctttactccatctctacgcacagtgactcagctaactagctcaataaaagccctatttcaccattgtttgagaaggtactgcttcggggaattattcccagtgccctctttacttgctgtaagtaataaggtcctcttgttacatgctccttggttgtggtgattgacagttacccaccaagcaatggagcccacccattgtgtgggtaacacttccaaccttgacattgtataatta

SEQ ID NO: 223481 - DNA, 388 bp, Homo sapiens
attgcacatgtgcatgtttctcctttcataaatattcatggctccttctatagcttattgaatatgtgtatttggccgccttgctcagcataaattcctgtttcctttgcccctctctcaaagtatcttgtttctggcttctggctggaggctgtgcttcccagcctgtcagaatagccaccctgcaggctgtaacctttataagaaataaagtttcctcttgttttaaacaaacaaatgaacaaacaaacaaacaaacaaacaaacaaacatatgccttagttgggcattggagtttgtgactgtaatcccagctttgcaggaggatcacttgagcccagaaatctgaggccagcctgggcaacatagtgagacccatctcattaaa

SEQ ID NO: 223482 - DNA, 456 bp, Homo sapiens
caggggtttctgttcttatttctgacaaaacagtctttaaaccaatgatgatttaaaaaaaaaaggggacaaggaaggacattacataatgacaaagggcccaacccaacaagaagacttaactctcttaaatgtgtatgcacccaacattggagcatctagattcataagacaggttcttagagatctatgcagagaattagataactacacaataatggtgggagtcttcaactctccagtgacaacagtgttagacagatcactgaggtagaaaaataacaaagatatttgggacctaaacacgacacttgaccaaatggacgtaatagacatctacagaatactccacccaacagcaacagaatatacattcttctcatcaacacacagcacatactctaagatggaccacacccttggccgtaaagcaattttcaacaagttaaaaaaaaa

SEQ ID NO: 223483 - DNA, 430 bp, Homo sapiens
tttatgaagaatgggttggtgccagggtaggagaagtagcctgactaggccaatgagcaaacctttgttttagggaagagaccttgtaacaattggcctcttggaaattgcagccaaggtttgtttatcggaacgatgggaatttgtccttaggcagtcctctttgcctttctgaaacatctgtgatttagtattatttctgggcaataagtcaaggtccacaacttagttttctgttgtcctttaacattttaaaatatgcctacatctctttcatttttagttttcttcacagactccttttgtttacctccctctctggtgttttgcatgattatagctaactttcttttctttcgacattctccccttggacacagttttaactctttcatatcttggtggttaccagatctctgtctccaaccct

SEQ ID NO: 223484 - DNA, 667 bp, Homo sapiens
gtgactctgaggatcccccggccagaacacactcaaagagcttttgcaaaaattagatgaaatagtgcatgttaagtatactgccttctttatccacagtaagtacttaatagatgacagatattcgggctgggggcctaaagcccagtgccttacacaatccatattgtattacaatagatgtttatggaaggaaatgggatgagcctttatggctaacaaggtacagatgtttcgattgttaagcatcatacaccatcaggtaccactcttcatccaaagatggtgtgacaaattgacaaagggttaggaaaaagtgtttagagagaggtgggtaaattcaacttggctatcaaatgtatatcatatagaaacaaggatgctgaggttattaaaataacctatttgctacagccttggtgtctgtcctctctcccatgggaacaatgggaggaagggtgagcagaagaaagagtaacaccctccaggttgtggtactattgtgtgttgccattttgttattaaagccatataccatagcttaggcgtgggggacaacaataagtggcatcgggccagcttcatcagaaggttagtatttcctatagatttatggtacctaaagggttgttttgtttgagtgtgattctggccggttttgtttttt

SEQ ID NO: 223485 - DNA, 542 bp, Homo sapiens
tgcatcagttatcacctctagaaatctcagaattatcttcaattctgcccaatacatagaattgtacactggattctaaagaagtggctctcaaatgtaccctcttctttctttgcctactcccataagttgtcaaaaaaaaaaaaaaaaaaaaaaaccacaccaataaaaccaaccacctctgatgagattatgattcttctttcaactccttcaatgaacctcagaatctagggaatgccacccaacctccttggaatggtcttgtgtcatcttgcccccaacagactaatttcatcttccaaagggatctttgttgccctgcccatcaccctcataagccaatctgctcttccttaaacacttgggacatcttaatacctctgcgcctttattaatttcattccgtcctctttctccatcatcagtacagagtgcagtttctacaacctgctatctccaggctcactgttccctctatctgaaatgccttctcctgcaaactcaattcatccttaaagtcacagcatgagctataaaca

SEQ ID NO: 223486 - DNA, 579 bp, Homo sapiens
gggagaagcagcaggctgaagtggctctttagggagacacatacctccacaggaagagcagtctagattgttttagcacattccacttaaggattgcagtgtgacagcagagaaaatcctctccagtcaagtaattgcatccatttcatcttcccagccctcctctagatgggaggtggaggtgtgtgtaccaatctcttaattcagaaatgagacaagaggaggaaaaaggagttccggaggacagtggggaccccagccagagcctggggacttggctgccttggaaccagaacctggcccctcagaggagttgcagaatttcgatagaggagtggcaggaggtgtactggctgaagaggaggcccaagggaagagaacgttgccctcattggtctggaatcagcaggtacctcatggctggaggtgtattttcagactcctttggcatctggtgaggcctgtggattcattctcagaatcacatttttaaatgcacataataaaatacatagaattgcaaaggaagttaattatattgaaatacagttatcaaaaatataaataaaacaagtatgt

SEQ ID NO: 223487 - DNA, 535 bp, Homo sapiens
gtagctctgggatttgctgcatgttgctggccctgagttttggagagaagccctgataagactaagagggatgctgataacctggagggacattgatgacagaaaatcctctccagtcaagtaattgcatccatttcatcttcccagccctcctctagatgggaggtggaggtgtgtgtaccaatctcttaattcagaaatgagacaagaggaggaaaaaggagttccggagactttgagtaaagctgatcaccttacgtaatgtgagtgggtctcgtccaatcaactgaaggctttaagagcaaagacaaaggtttttcaaagagaaaaagaagactctcctcaagactgtgacatagaaactctgcctgaatttctagcctgctgccctgcagaatttagagtcaagcctacaacataactcttacctgaattctcaggctgctgacttaccctgcagattttggacttgccagcccctcacaatcccatgagccaattccttaaaataaatctctctttttccctctgtata

SEQ ID NO: 223488 - DNA, 483 bp, Homo sapiens
tctcgattgcccagccttacttggtgtctgctgatgctcgtttagaagaattaataatccagtagacttacctaccaggtgctaagcaaacctcttgttcttttgttgttgttgtatagatgaaggcttcctatgttgcccaggctggtctcaaacgtctggcctcccgtccttatgcgccaggacaacaggactgagccaccgcaccatccaagtctcttgctttttaatagctttcttatttttcttttattcatccaggggttactttgtgaatttaaataattcacttaaaataacattttgaaatttatcaactttatctactgttgtatgagatatgaggaacttagcaaatggactcattcttcattttcttcttcctctctctcctgatttttccaagttatgttattatttttaaatttccaaagcttgtgtcatttagattgttctataaatataattaagcaatcaaaagtt

SEQ ID NO: 223489 - DNA, 469 bp, Homo sapiens
caggatgaagtgcggtggcaggaccatagctcactgcagcctcaatcaactcccggagctcaagcaatcctcccacctcagcctcccaagtagctgggaccacagatgaaggcttcctatgttgcccaggctggtctcaaacgtctggcctcccgtccttatgcgccaggacaacaggactgagccaccgcaccatccaagtctcttgctttttaatagctttcttatttttcttttattcatccaggggttactttgtgaatttaaataattcacttaaaataacattttgaaatttatcaactttatctactgttgtatgagatatgaggaacttagcaaatggactcattcttcattttcttcttcctctctctcctgatttttccaagttatgttattatttttaaatttccaaagcttgtgtcatttagattgttctataaatataattaagcaatcaaaagtt

SEQ ID NO: 223490 - DNA, 814 bp, Homo sapiens
aactagactcccacctcttacgttatacaaaaatcaactcaaaattgaccaaacacctaaatgtcatagctgaaatgtaaaactgctagaaagaaacacagggtaaacacttcaggatattggtctgcgaaaatatttgacagataagaccttaaaaacacaggcaacaaaatcaaagatgaacaagtaggattaatataaatggaaaagtttctgcacagcaaaggagacaatcagcagagtggaaagacaacctacagaatgttaagaaagttcaacaatcaaatgatatttatccctaggacgcaaggacggttaaacatagggaaaccaataaatgtgatgcaccacattaaagaatgatttaaaaatatattgtctcaaaagattccaaaaaagctgttgagaaaattcatcactcttttatgataaaaaaagaaaaactgttaatgcagaaggaaattaacataataaaggctatatatgaaaagcccacaattaatattatactcagtacttagaaagcaaaatcttagccaggcacagtggttcacacttgtaatctcaatgcttttagaaggtgaggtgggatgattgcttcaggccagtagttcaaagacagcctgggcaacacagcaagatctcatctctcaaaaaaaagaaaccaacaaaaaaaagaaaaccaaaaacaacaacaacaacaaaaaattaagtgaaatctctaaaatcataaagatggaaaggattttccgttatgtcacttgaatttaacggtactggaagtcctagccagagcaataaggcaacgtagaaa

SEQ ID NO: 223491 - DNA, 422 bp, Homo sapiens
aaaagtaattaagtcctttatgagtcagactgacagcaaaagttagcaatcttgttacagtattaaaacttgcttacaggaccaaagactttatttggtctttgaaataaaagtaaaatcaccatctctttgtgggtttcttttcacaatgaggcattgatttgcttttggagagatgggagcccattatgattttactttttttgttggcgctgctgatattaaatcagcgtacctcaggtgatgaggttatatatgccgtgtttttaactttcatctgcttagtgaattccttttgtcttttgatctctctcagcaacctagtttttgtttttaattttagatatgaccctgcttttccagaactagatcactttcattctgttttgaatacttaataaaagttcccaaaatgaacacga

SEQ ID NO: 223492 - DNA, 509 bp, Homo sapiens
aggtgtccagtcctttgtgcatctatcccctggcattctcccatcctgccccaagtcatcagcccacacaggttgctggcacatctaaagtgagaattttaggactaaataaatcaaatagaagtaagccctcacatcttctatatctcacctgatagtgaagaagtttgaaggtacagagctccacttctgctaataaaaaaagagtaaaatttaatttgtaaaatagaatggtgtagctagggttgaggtgctataatttatttattggaatggcatcttgagatccagcacagctcattgaatttccctgtggggagagtttgtggtgaagactcatcaacagacaagctgctatccccccctaaaaaaaaaagctactaacatcacatcaatttccaggttcttccaacttgcggaaggatgtgtagaccaagcttttattctattttgtgaccaaagtcttgggaaaagaagaaaattgttagcattttcatgtcaagcatacg

SEQ ID NO: 223493 - DNA, 462 bp, Homo sapiens
ccagaaaaccaaaattaacattagggagtttttaccaaccaacggctattgtctttttaaagttaaggggattatctaacaacttggggtcatggaaaataaatatgggagatgttttagatcaaaagaaacttaagagatgaacacaatcaaagtgcaatgtgtgatccccaactggatgaataatagtgtgaacaagctagttgtaaaaacaagcttggaggggcaattgggaaagtcttgaatatgaaaatgttaaatatatggataatattagggaattattgttagtttgtattaggtatagtgatggtattgtagttataaagaaaatgtacctattttgaaaaattcttactggagtattggggtaaatgtcagcaatttactttaaaagcataggaaaaaagcaaataaaacaaaaaaggcttcagaattaggtgatgggggagatgaggggag

SEQ ID NO: 223494 - DNA, 513 bp, Homo sapiens
aggctggagtgtaatggtgtgatgtgggctcactgcaacctctgcctctcaggttcaagcaattctcctgcctcagcctccctagtagcctgggattacaggcgcccaccaccacacccagctagtttttgtatttttagtagagatggggtttcaccatgttggccaggctagtctcaaactcccaacctcaaatgatccacccgccttggcctcccaaagtgctgggattacaggcgtgagcgaccgcgcctggcctaaaatgcttttcctaatgtgtatttacatgtatgcattataaaacttctagatttttctgtgagccccctgcttaaaatccgtctgtaaatatttccttgaaatctggtctagtttaaggtaccacgtacaactggtgtctctaaattaaatgtggtctctattacttctcttctttaaagattttttttaattaaaatctatgattctacaaagctcattgtagaaaccttgacaaacacagatcatagcaaa

SEQ ID NO: 223495 - DNA, 424 bp, Homo sapiens
atggctgtgaaacatctgaggtgacgtaataggtcggtgtcttctgggtctctatcctgctttggtaggcttaaaaagtgtgtgtgtgtgtgtgtgtgtgtgtgtgtgtgtgtgtttaaaatctaatcagaatcaggactcacctttgaatgggcataatattccagaattcttacagcttcaagaatagtggtagaggctcagatgggaagccttgctgaatttctctcagggaaaattgcataattttcacttccatggatagaaaggaagttccacactattcattctgccttttggacaagtgatcatcccctttcgtgaaagagaaagatatagggagcaaaggagagcagaaggttgcattcatacgacattcacatgaacaaaagaagggaaaggtaagtaaaaatcaaagaacaaa

SEQ ID NO: 223496 - DNA, 367 bp, Homo sapiens
gcagggaggaagtgtattagcaataagaggcatgtggtatgtcagacaattttaggtggcactcacatgaactggaatgctttttatttcaatggttatatagttatctgagtgagtatttgatgaagtatatttagcacataaaacccatggtttcctgaacagtgctgcttaagacaaagtttaaaaaatgagttgggtttaagtcatttgaaagaaacagattcaataaaggacagtacaagccagggacagtcactcacacttgtaatcccagctacttgggagaccaaagtgggaggatcacttgaggccaggaattggcacccagcctggctaagtagcaagaccctgtctcttaaaaaaa

SEQ ID NO: 223497 - DNA, 241 bp, Homo sapiens
gacttttaaatgtattttctccagacattttagttctttaagcaggagagtggtctgaattatctagtttatcactaccagaagtggaactctttcaaatagtacaagttttgttattagcagttctgttctgctatgagcaaacatatgcaaagctacccccaaaggctaagggagctgagatcgcgccattgcactccagcctggacaacaagagtgaaactccgtccaaaaaaaaaaa

SEQ ID NO: 223498 - DNA, 463 bp, Homo sapiens
ttttaccttctttccaggcggtatcctttgtgcatgcctactgtacattttcgacctctttccgatggaatgatctaagatgaaagtaaactttttaaatgtttaatcattcaccactaggcaaaccgtcataatagcattacagttcgcattatttctgtagtgtctcttatgtaaaaatgctttcatttctgatcttgcaatgaagtgctgtactaactcgcattatgcatattagaaaactgataagtgatttgtccgacattattctgttaattagcgatgagccagtattgcacagcttgttttacgtaattttagatagctgcttgtaaccacttagattatatagaaattaagacatagaaacttttatcagaattaccagaaatagtagccttttgctattagcttcatgtagagatttacctgagtaaagtaccaaagaagttatctgaggtat

SEQ ID NO: 223499 - DNA, 350 bp, Homo sapiens
cctgagaattctcaggggacagagacagagtccatcccgcacagggcggaggggcgacctggatcacacaccgcgcgtgtgccgggctcacgctcaccacgcagggcctgtcaccgccaacaccgttattgtcactgccaggacgccggcaccgtggcaggcccagagtggatgcagaccccaccctgctctgctgggtgcaccttctggacgggcagagacttgactgtgacacttggggcaaggcccacgcagggtgctgggcagggcgggggtcctcaccacagcatgaagaggacccagcagaagggggagtcagagaggggagagggagtgaggcccacacatgc

SEQ ID NO: 223500 - DNA, 208 bp, Homo sapiens
ctacctcaggctgctctctccacgaggcctcttctgacaccccttttacaacttgccaagcctcccacaccccagcttgccaaccaatctttccactcccctttccagccttattcttctccacagcacttttcagcctggtgttctaggctggaggctctaagatcttactgtatgtagttttaagcttcaataacttcagagaaag

SEQ ID NO: 223501 - DNA, 470 bp, Homo sapiens
cataaacatttctctcagtatgagcaccacgacttagacgagacaccaccactggctctaagggactattggccataaacatttctctcagtatgagcaccatgacttcgacgaggcaccaccactggctctaagggactatgaccagagatcagctctggcccaaagaccatcaaggacctgagaggtgagtcatgagagcactgctcacctggatgatgactggacaacccaatcacatcttttctcttaagaagtatgaagccaagagaaataagaaaatgggagagcttatagtctagagaaatagaagtacattataaggagatacaggctgattggtcaaaatggtggaaatactagagttggtaacaacaggtgaactagaggacataaaaggtaaatggtgtttaattttcgtgaaggccaactgagatatgtatctttataataaacttggaaggtaaact

SEQ ID NO: 223502 - DNA, 428 bp, Homo sapiens
gattaaaaggttcagaagacaaaaatgatttaagacacagtccatgcctttgataagcttatagtttcctaatcctggataactccgataaacaactgtataaaaaacagtgtgcagttctcataaagttagaaacagccgtggagatttgaggaatggatagtgcaaatcagattgggagcagttttatgaagggaattattatttgagacagttcttgtaaagtagataagaaaaaaagcattccagttaagaaataacatagtggccaggcatggtggcttatgccagtaatcctagcactttgggaggctgagatgggaggatcatttgagcccaggagtttgagaccagcctgagcaacagagcaagaccctgtctctgcaaaaaattaaaaacagaaaaattagctgggtatgatggtgcat

SEQ ID NO: 223503 - DNA, 335 bp, Homo sapiens
cagcccgcgctctattctcctggggtggtgctgaagcgtttctccgggagacaccggttggtgggcgtggtgcagtccgcactgcggtctctacggcagcccgaggcggacaaagggcgttcacgcagccctcgttccccactccccctccccaataaaagacgaaagaaaaaccttgttttagatgaaaaaataaatgcttgtcatctgcctctgcagttggaaacggccacttgtccccagaacaaaaggctgcagggtggggactggagttgcagacctggttcttttgtttaactttaaagcacttgattttcccttttagcttaaaaaaa

SEQ ID NO: 223504 - DNA, 428 bp, Homo sapiens
ttttcatcttgcaaaacagaagcactgtacacattaaagaaaaactccccatttcacccttccccagcccctggtaaccatcatcctagtttctgtctatgaatttgaccatctagatacatcatgtaagtggaatcatataatattcgtccctttgtgtctggcttatttcacttagcataaggtcctcaaggttcatccacattgtagcatgtgccagaatttttctcctttttaaggctgaacagtgttccattgtattccattgattcttgacatgtatgtatgcatgacattttgtttatctgcttctccaaggatggactcttgggttgtttctacctcttggctattgtgaataatgtttctgtgaacatggcaagtatctgtgccaggtccttcttttttgtttgcaacgaattcacatt

SEQ ID NO: 223505 - DNA, 338 bp, Homo sapiens
gtgagccaccgtgcctggccaactgtcatttttccccacaaatgcatcaaagcttgtttattaaaacaaatttattatgaatcaggattaattaacagattaacatttaacatactttaattgaagatattcatttagattttgttctgtcgtcaagtaatcacaaaagttgtagttaccaagttttctgccattgttgaattatcctggaggtcacatttttgtgtacaaattgatgagggacttgcttcgtagtataatttgagaggtggctgaactggcttctatagctagacatatttccccttttgggctagtgagtgcctccattagttgtc

SEQ ID NO: 223506 - DNA, 299 bp, Homo sapiens
gcctaattgttaaagtgtccttatagatgttactgaaacctccatatccaagataaaagagactgctttgcggggttgttaaaatcagtttttcaaacataattaatcaaataaaatttacctaatgacatttcagtagtccttatggggtcacaattgctctatttttttttttattttaaataaggtgaagtgtaaatgaaagtttttcgtaatgttgtttacatgtgcaaaatgattagataccttgccattttagtataaatatgaataatgatcatggggctaatgattaaaaa

SEQ ID NO: 223507 - DNA, 732 bp, Homo sapiens
tattaaataaatttattttcaaatgacaccttaaaaatattgtttgtttcatcataaatttcatcatgatgcattcatttcactattaagtgctttgatatttacaattgtaaattgataccactcttgtcaattgtttctaataagacttaaagaaacaatgtaaatacacattaattaggtttgagtcttttttagtatggtcaccatagatgaaaaaatgatattttcttctctgtctatagatctgtaaaagtaatagcagagaggtcagccttgaagtactttaggttgatggtcaaaccacaacatggacaaatactgccttggtccagtggttagatcaaggggtgaaaaagaggtcttagatttgaagcagactctctttacttctctaatattggacaagtaaatatatatctgacctttctgtgatataattttttcatctattggactaggataataactttccaagtaacttgttgaaatgattaatgaggtactattcagaaaccactctgaactcctccataaaaagctacagtgtaaatatgaatgattattaaccataagccctactgtttactgaaaaatgcaaaatacaatgtagctgtattattttcattgttattattagttatgatgatggttataatactccctgatgtagaaacacgtgttgtggttacatttttagtaaagtgaataataaacatgacctttccgtcc

SEQ ID NO: 223508 - DNA, 547 bp, Homo sapiens
tgtcagccacactctctcacaccatctcccttaacaaaatcctctcatgtttcatcctgtcctggcatctccttcctggaggacccagactaatactacaagttccagaaagaaagaactgaaaaaatagaggggataaattacggaagaatgatatatatacattttttagtttctcagaatgaaaggccacaagattccaaattcaaagagcccactaagaaccccaaacaaaaaatgtaaaccacatcaaggcaatctcatgaaacttcaaaacattggagataaagcaagagaaatatactgcacatcaatgattatgaacaattgttcaccaaaagggcacttgaatccccaaagccacacaggatgctacgaaaaacagtggagtattttcaaattgaaatgttgagggaaaataattctatacctagcctaaccctcaattaaatgtgcaggtggaataaagaccatttcagatccacaaggttcaaattacctcttccagagcatttcctaggacatgactagaagatgcgggcaccaa

SEQ ID NO: 223509 - DNA, 418 bp, Homo sapiens
tggccacctggcctccatatgagtgtgtcttgaaccagagtgtgcatcatattttatccacaggcctcactgcaatggaaggagcgaagagaaagccctcatcataaccaacaaaaaagtctaaggacttttgagaatgactactctggtcatctttgggaattttctctgattgtgccatctccaagccatccctccctcctctgaacacctatttcacttacagatgattaaacaaaatgtagcatttagtggtgcccctgttatttcatgtgtgtgcactacacctacctgagtgcacacacatgaagtagcatgaacagcagcaaggtccatttcaccctcatcatcctaaaaataattaatatttatcaggcacctacggtatgccagatactattctaaatgctttacatat

SEQ ID NO: 223510 - DNA, 546 bp, Homo sapiens
ctacttgggaggctggggcaggagaatggcatgaacccgggaggcagaggttgcagtgagccgagatggcgccactgcactccagcctgggtgacagagcgagactccgtctcaaaaaaaaaaagagaaaaagaaaatcatgccaagtatgttctccctattacagtgaaatgaaattagaattcaataacagaaaaaaaatgtggaaattaaacaacacacttctcaatatccaatggatccaaggagaaatcaccaagggaattagaaaatagagctgggcgcggtggctcacaccttttaccagcactttcggaggccaaggtgggaggattgtttgagcccaggagtttgagaccagcctgggcaacatagtgagacactgtctccacacacacataaaaaaagcaattataaaatacttccagatgcttaaaaatatactaaaatttgtaaaatgtattaaaaacagtgctcagaggctgggtgcagtggctcatgcctgtaatcccagcactttgggaggctgaggtgggtggatcactc

SEQ ID NO: 223511 - DNA, 546 bp, Homo sapiens
agtgctattggagatatgttatatgaactgggacatgttaaatatcactggaacatatgctattgctttacacttccatagcttcattcctgttactggagagtagcaccattttcaaaagtgagtaagtcataagatcaacctggaaaaatccatcttaagatgttccccttgacaaatcgaaaggatagctcaccatacttatttaactgctaagttgaaaatagccatttgtctaattatgcttttatataactttttggtaactcattatttcaactttaaaagtcaaattctagggatatggaattgtgaaagaaaagactttgcattcacaagtcagtgcgtgaatcgcaatcaggcaaaaatacagtgatctcatctgtaacacataaactgggtaattttttatttatgaagtaatgcaaataacttaatatagattactacactaactcatagtatactttacttcagttaaataacaccattttgggcattactgaaatataaatggacgtgaagcatgcaaaataaaattatgac

SEQ ID NO: 223512 - DNA, 565 bp, Homo sapiens
gaaccggggggtattacttctggtatggtaaacctcccatctgagaatttctgacaacctcctttctggtaacttacactctcctgctcaaacgaagccttttcattaaaggagtacttagggggttccataagggaaagctccagtaaaggcatggtaagggtttcctcttccatcttagttacctctgtcattgcagctcctttggcttctctgtccccctttctgtttcctctagcctcatcacctcctcctgtttgatgccctttgcgatggatgactgctacttcttttggagcccatatggcttctgagagctgctgtactttctttttatttttgatttcctttccttcagtagctaataatcctctttccttatatatggctccatgggcatgcaaagtggcaaaagcataccttaagtcattatagatgtttactgattttcctctggccaagagcaatgctctagtgagaagtattagctctagtgagaactattagctcagctctttgggccgaagatccgaccgtcagagggcagacttcggctactgaattc

SEQ ID NO: 223513 - DNA, 415 bp, Homo sapiens
tgtttatgtgagaatttttttcttcttctaggggatataattttagtcatacagtttatttggttaatcagtatgaatgaataatttgtcttttgcccctcaaaacaaaagaaaattttctttgcagtataaattaaaagggtttgttggagatcctacaaagaaactctaagaactatttttctgaaatactagtaaaaaactaatgataaatctcagtacagttggcccttgcacaatgcggggttggagcaccaactgcctgcacagtccacaatctgcgtatacattttgactccccagaaactttactaatagcctacggttgactggaagtgttaccaatgacaattaacacatattctgtatgtcttatactgtattcttacaataaagtaagctggagaaaagaaaa

SEQ ID NO: 223514 - DNA, 248 bp, Homo sapiens
agaaaaagagaaaataatttttattatagattatcagtagttatgtatattaatgaagaatttggcttcatttacctaattagattaatcataaatcatttatgaatagtaatagacttgaattgttactttatattacacagttggccctctgtacctgcaggttctgcatcctgggattcaactgtggatcaaaaatatttgggggaaaaaaagcaatacaacaataaaaaataatacaaattagg

SEQ ID NO: 223515 - DNA, 375 bp, Homo sapiens
atctcatgttgttggtttctttcgtcatttattgtggttttaatttacatttccctgattaccaaggaggttgagcatcttttcatgtttcttggtcattcaggtttcctcttctgtgaaaggcttgttcatatcttttacttgcttttcttctggattatctttttttttgtttgtttttttgagatgaggtctccaatctgttgcctaggctggagtgcagtggcgcaatcatagctcactgcagttgcaaactcctgggcttaagtgatccttccacctcagcctcctgagtagttgggactacaggcatgagccaccatgtcctgataattttttttttctttttttttttcttagagatgaggtttcact

SEQ ID NO: 223516 - DNA, 437 bp, Homo sapiens
gtgatctacagttgcatttctggaaaatggggataccactacttaaagggatgctatggtgagtagaacatctaatatatattagatgtgcctggcacatttcagccaataaatgacaacatctcaaactccttcagaattgagctcttggtcactcaaactttcaaactgttccccctccatttttcatctcatccatccaaggagtagctcactccactctctcttttcttctatcagccctagcaaaccagtccatcataaagtcctgctgtccatttttattgcaaaatctctttcaaaccggtctgattttcagtccccactattctgccatcctaatgcaagccactgtactgtattatctttttccttggtgcggtgcctcctgcacacactctgcaccccttgcagtctgttttactaccagcagcctg

SEQ ID NO: 223517 - DNA, 131 bp, Homo sapiens
cctgtgtcatccagagctttccagatttaatgtgggctgggaacattacagtattttcacagcacagcctgccccaaacagcagtttgagaaacgatgctctgggcccctcgttctcttctttgtcttctg

SEQ ID NO: 223518 - DNA, 359 bp, Homo sapiens
gttgtttgccctcctgcaatttaatttcttcagatttctttttaattttacctccaaactttcatttatgatggatgccatattctatatcatacaaaaaactataaaataaagtataaggattctcacttttctaccagaaaatttccagtgaaaagtgttcacagatttttcactttagtcacataaggacctctctaatggccgtatatatagagcactcctgtacctgtgtttatattgcactgggattgtatacaacacatagctttgtaatgattaccctggccaaacaagaccgaatcttctattaccacatgctttcccaaagcccctagtcctgtgctttgcattagtgg

SEQ ID NO: 223519 - DNA, 285 bp, Homo sapiens
ctttttttctaggcattctgcaaatttcagctgcttcagtagtttcttctgtttgttgctgaaccgattatactgttctgcacttgatcggtggaagaatcctgagtccatcttgccgcctcgcttggagatcgctccctatcccagggtgcaccgcctattttatagttttaatttgcatttccctgatgactaatgatattgagcatcttttcatgtgcttattgaccatttgcatgtcttctttggaagtatgtctattaaaatccccatttaaaaactgga

SEQ ID NO: 223520 - DNA, 369 bp, Homo sapiens
tgttgcataatagcctggaggctccttgagtgtttagtataatgagggaacattgcactgtttcctataccattgcacagttattatacctattgcacggttatgtttaccattttaatggcttgctttacttatattggcaatgccagcctctctgttactcagatctatcccacccttcatgcccaatacacatcttaacatcccctttttaaagccatcaacttcagcagccttcatcagtttccctttgatttccaaagcagcttgctgttataaataacaacaggtgtaaggtactgaatgtagtgagtgcactgtttttgtcaccacttgatgatgtaacctctgcctaggtgatcctagcca

SEQ ID NO: 223521 - DNA, 456 bp, Homo sapiens
cacatttgttatctccctttatcttcacaatacaccctcaaaaatatggtattattttcattgatggaggtaagccctgagagactccacaatttgccccaagcacacaaccacaaaacagacagttaagaaccaacttcgtacctgaagcctgtgaaggctggctgccataccttgcttcacaggccatcccatagctgatgtatttattagaacagagggagggagtctctggataatggaatcaaatttaaaaggcaaacaaattttcagctatcttccaagcacatgacaatgttatgaaaaagtctatttggctcagaaagggcactatcatttaccccttttccttttaaggtggagctctacctggagaacacccatctaagaaactgaaattgcaaagctccctctggcttaagtactcctagccttagctctatgctgagctaaaaa

SEQ ID NO: 223522 - DNA, 499 bp, Homo sapiens
gaggaaccccgtctctactaaagaggaaattacgcatggtggcgcaagcctgtaatcccagctactccggaggctgaggcaggagaatcgcttgattctcgagttacagtgagccgagatccggcgattgccctccagcctgggcaacaagagcgaaacgtctcaaaaaaaaaaagggaaaaaagaaaaaggggcctccagaaggaagtcatctgctccctgctgtggaggctgcatctaatgcttgtaccggggcagtcatatgacaagtaggagctagcccttatcataagatgttgatgtgaatttagaaatactgtatctttataaacgtttgcaacatttcaagataaaaccaggttccatgccaggcgcggtggcacatgcctgtaatcccagcacttggggagactgaggcaggtggatcacctgaggtcaggagttcaagaccagcctgaccaacattgtgaaatctcgtctctactaaaaaaaatacaaa

SEQ ID NO: 223523 - DNA, 284 bp, Homo sapiens
aactctataggtaatgttcttatgagggcacacataatcaccaccactcacaatacctagttttggaatcttaattattccttccataatattttcttaatctgctataatgtgagatatatgactacagctgagagatattaaaagcagaacaggaaaccacagaagtttcttaaaataaaaatacaaactgagctcagaaacatgatttttatatacatatctgaaaaagaaatgtagccagtgagcagaatatactcaaagccaaccacaaataagcagta

SEQ ID NO: 223524 - DNA, 575 bp, Homo sapiens
atgtctcagatatggaggaataatatgcaacaatatctgttccctgcctgccctgtgccttggaccatgttgaatccacaagggtaaagtgagaaacagaagctgttggcaaaggtctaggtgacaaaatagcccagagttaagaaaagggcataaaacctattgcctataaggtactcctctaaaatttggcaacttctctgaatggtacctttttgttgttatttttcatttaaaaactgtcttgtatctaatcaactctatggttctcaaatagattatcaattaattctcttgggattgctagtcaccttttctataattttgcctcctaatactttctgctttattatatttgctgtaacaaatattcttttaaaattagttgtaaagatgaaacagtgttgaagtttcaaatagatatgggaagtagagatttgatgaaaggatatttacattctggtgatcagatttttggatttcaaagaccagtcaattttcttttagtgtttaggggactgatataaggctgaaacatttttacatttccaatttatgaacaataaaacaaatag

SEQ ID NO: 223525 - DNA, 487 bp, Homo sapiens
gagaattgtctgaaaagttatgtgtgtttgttatcatgaaaacattaataatattaggatttggctataatccatttttactttgagaacctcgacattttaacgggtacatgtaactgataaatcctttttgtggttgtcaaaacaagcaaagctaactttgtacatttcctattataactaaaagcactttgacagtctgaaattgggtgtatcagtatggagagcaaacagcctattcattttatcaccatacttctctaaggattttgacatttctgagatacatatcacttctaaacagtgaagcacaaagttggtaaaggttgtgatggctgcagttcatggaggttgaccatcctgttgggattgccagttcccttggcaggtgccttgctaggccagcctgccatgcatctggtcatgtggagaccatcaggagaccatcgcatggtctatccacatctttgaggcccaactgatcatt

SEQ ID NO: 223526 - DNA, 565 bp, Homo sapiens
aatgttagctataatcacatagaagatatagtgatgaagtattttttcaggtatttcagcaaaaattaaatgcctaggaataaacttagatgtgcaggacttttatcaaggacaggacaaaattttgctgagtggaatgaaagatttgcattctatgttcctggatgagcagatttcatgttataaatatgttagttatcaccatgtcttcatattaatttgtaaatgtaatttctgctgggcacagtggctcatacctgtaatccaaacagtttgggaagctgaggcgggtagatgacaattagctgggtgtctgtggcacacacttctcccacctcagcctccagagtagctgggactacaggtgtgtactactccacctagctaattttttgtattttttgtagatacagggttttgccataggtattcaaatagaaagttttgttgttgttttagtatataaagaaatataactttccatgttgaaaaaattttaaaaacctttttttaaattataaaactcataagcaaccattgttgagaaaattagtaaagtacagaa

SEQ ID NO: 223527 - DNA, 505 bp, Homo sapiens
ataatcttacatcaaagtctaaccttcttgcaccttctttctgtagaaaaatcatcatatagcttatcacatttattcattctccattactaaatattcatgtgtaaattgttaaattcttttatagcatcagtagattccaaattaactgcatttgcttattttatcaccaagtcttcttggctctttgtcaagatatctaaggaaatttatgtactcaagaaaggggagatgggaagaaagcacttctctttcttcatgcctccaaaggagtgttcgcccatctaactcaagaaaaagtttcaatgatgaagctgaaattaaacttctattaggtatttcttccttctccccaggactggagtacatgaatagtctcatatctggtttccccaacctcagtccctctactacttaaatttttcctaaagcatagctctggttatttcattccgtctgttcaaaaagcatttaatatgtgatgcaggtccagctaaagaagaaa

SEQ ID NO: 223528 - DNA, 360 bp, Homo sapiens
ttagagctaacaagagacagaccccaataaaattacagcataatattggcataaaaacagacacatggaccaatggaacagaacagagaactcagaaataaattcatatatgtacagtaaattcattttggacaagggcgccaaggacatacattggaaaaaggatattcttttcaataaatggtactgggaaaactggatatccatatgcagaagaatgaaactagacccctcatatggttaggctttgtgcccccacccaaatctcatcttgaatcgtaatcctcataatccccatgtgtcaacggagagacccggtggaggtaatggaatcatggaatcggtttcctgcatgctgtt

SEQ ID NO: 223529 - DNA, 342 bp, Homo sapiens
caatttagtatttttatgttagtatcgtaagttactatacatgtatgtgcttttattttaagaagtgaagaaagaaattaagatcctttccatttttaaaaactgtttatttatgtttgtggagagtatactaaagagctcatctttgtgcctaaacctcaggtttttagctgagctactgaatcagttccaactttaagttatgtaagactaataggactgtctcaggtttcacctcctgactttttgcccctctttctgagttaaataattaaatctttcttaaaggaagaacttaagtcttcaagaatatgttttgaaatgaaagaaacctgagcctca

SEQ ID NO: 223530 - DNA, 457 bp, Homo sapiens
tgggaaaatgaaagaagaatacagaaagaaaaattaccaatggcaagggtgtctttgccaggtttctagatattaagcatatacctatctatcttattcatttccaaatcattacattcatctgctcatttaacttaacatctacccattaaggaacacttatttccttaattttgatgaatctcagtagtgcttaaagatcctaagtagtggtagatgaaaatgggttttgtggtcaagtacgtttggggaataatagaccataaaggattgttcatagcagaacttcttgccctttaatatcttattcagaaccttaccctggaacttaattttttctggcatatggtttacttttaaaaggaaaaactgtaatatataatattaaacatttggcaagcatttcagtaattgtaactatgaatttctatattaaaatatctggataagtgaagga

SEQ ID NO: 223531 - DNA, 203 bp, Homo sapiens
agtggaagtggatcatcataaaagtcttcatctttgttgtcttcacattgagtgggctgaggaggtggaggaagaggatgggttggttttattgtctcaggggtgacagaggtggaagaaaatctgtgtataagccagccacagtcgttcacatctgtaatcccagcactttgggaggccgagatgggagctcagggctgaca

SEQ ID NO: 223532 - DNA, 590 bp, Homo sapiens
tagaaattgctactctaaaattatcctagttctattgtgtgtgtctcattcttcattacaatgtaagctcagtgagatcagggactatgtctgtcttgttctttgccaaatcccagcactgataagagaacctcctagaaggtagtgggtgagaaataaccatttatgagttgagttatgctttagtttgctgaaggctcctattttctagtacatgcaaatacctacacataagggagataagagtttagggaaaggagaatagacaaccaaatgatataatttatgataggggtaaacgtactttaaaaaaaaaagtagaacagtgaactgaagaccaactactttcactgcgttctactttcgttgaagttattagaaaaagcacttctgattaggtgatgtgagctgagttctacataatgagaaagaaggagctatccaaggggagactattcagggtatagtagcagttgaaacactcctgaaataagaacgtacttggcttatttgaggaataaacgaacagttgaccggcatagctggcatagcatgagccagagagtaacctgtgtgagaggtggtcggaa

SEQ ID NO: 223533 - DNA, 533 bp, Homo sapiens
aaaaatcttttatactgtatttttactgtaccttttctatgtctagatattctcagacgcaccatgttacagttaccaggcagtattcagtacagtaatatggtatacaggtttgtagcctaggagcaatgggctataccgtgtaggcttgtgtaaatacactctgtgatgttagcacagtgagggaatagcctaacaaacacatttctcagaagatatccctgtggttatgtgacgcatgactgtgtatcctttggtgactcaaattgttaaaatttagccagcgagaactcaatcagtctggtttctgtttctttgacatgccccctcatttttatagcaccagtttgctttgtggcacaacaaaacattctctccttaccttatggttttcttaccccagacctggacttggctattttaccaaaagttcttgtttctcttagtggggaatggtatttggaagccaacatcatggatgcattactgggtgtcattgcttctattggttcttttcattagacagaataaga

SEQ ID NO: 223534 - DNA, 727 bp, Homo sapiens
tgggcaacacggcagcattcactcaaaaacaaacaaacaaacaaacaaaaatgtagacagtcccataggcagccagtttttgaaaaggtcactcttgcataatgaaaaattcacttaaatgtgataaggtggagattatggtctctctcagagcccccaaataactgggtcctggatactacccagatctggaagaaagtcctgttagagaaagctatgttgatttaaaaaaaataaaaagaaagataataactaaaacttattgagctctcatcatattccagcccttactctaacaacgttacaagtactaaaccttgtaatctttacatcaaccatatatagtagatactattattatccttaatttatagagaataaaactgaggcataaggaggttaagtaacttggtgaaagtcattagctgacgtatcaggagtagaattagaattccagcattctgactgcagaaacgtccttaaatacatcatgctaatactccccctagatcagagacaaggaagaagagcaccccaggcgtgattctatggagggctttgggcctatacactggattggcatctctagctagcagctatttttaagtccttaagttctaccctttcacctccatgggacatcatgggacaatgcagtggtctggggtcaaccaataatgcaaaagccagtcgcctttgagtgtgattctgccgggggatcctcaag

SEQ ID NO: 223535 - DNA, 244 bp, Homo sapiens
ctttatagcaaccctaggaggaacagactatttggtacccacttaatagataaggaaactgagatttggaaaggagaagtcactttggttgaagttgcacctaagcggaattgctgaggtttgaattaataggatgacccatgggttaagagaccatgattttaactagtaagctatactccctccctaaatacaaagttataatagttaacaggaactggccctcaaattccccctctcagac

SEQ ID NO: 223536 - DNA, 496 bp, Homo sapiens
agggctaatttaggtctctagagcatgccactatcaagactaacccattcagcagggctttgtatagccaaggttttgttgcatattaaaatgtttaggaaaattatccaacatttgggaataaggcacaggatgattgcatgtctttttagcgttttcttggagcacttaagacaccagccaaggatcatgtaattctctaggaaagtgttcctttgtttaacttactttttattaggatccagattctatgaagttagatgttaatttgtagattgatcccctgcaaatgacttctgtctgataaagaagataaccccaaaggttatagttttattgccctataggatagtaactagttttatttctaaattagcaatcttatttcagtattctgtatttcattgactgtatacacttcagtctttcctgtattacattgaaccagatgtgccatcctgctgagttaaaataaatttttgacatatgcttaata

SEQ ID NO: 223537 - DNA, 445 bp, Homo sapiens
ctaggttgcctcttttggctagagagagcaggcttttcatggggttttctcttggtctgaacccatagcttctccagcaccaagtccaggataaatgaggcaaaaagaaaatccagtccactccccaccacactgctcctctggttccaaggtccctagccagtctgtcttctctctgcctttgagattcagctgaatggtttttttttctttttgagacagagttttgctcttgttgcccaggctggagtgcaatggtgcaatctcagcttactgcaaccttcgcttcccgggatcaagcaattctcctgcctcagcctcccaagaagctgggattacaggcatgcgccaccatgcccgactaatcttgtatttttagttgagacagggtttctccatgttggtcagaccggtcttgaactcccaaccttaggtgatccacccg

SEQ ID NO: 223538 - DNA, 1037 bp, Homo sapiens
ggcagacgccgtcgagatgcagggcccaccgctcctgaccgccgcccacctcctctgcgtgtgcaccgccgcgctggccgtggctcccgggcctcggtttctggtgacagccccagggatcatcaggcccggaggaaatgtgactattggggtggagcttctggaacactgcccttcacaggtgactgtgaaggcggagctgctcaagacagcatcaaacctcactgtctctgtcctggaagcagaaggagtctttgaaaaaggtaagataaacagcataaagtcttacccttctctacctctgaacagtgcagatgagatttatgagctacgtgtaaccggacgtacccaggatgagattttattctctaatagtacccgcttatcatttgagaccaagagaatatctgtcttcattcaaacagacaaggccttatacaagccaaagcaagaagtgaagtttcgcattgttacactcttctcagattttaagccttacaaaacctctttaaacattctcattaaggaccccaaatcaaatttgatccaacagtggttgtcacaacaaagtgatcttggagtcatttccaaaacttttcagctatcttcccatccaatacttggtgactggtctattcaagttcaagtgaatgaccagacatactatcaatcatttcaggtttcagaatatgtattaccaaaatttgaagtgactttgcagacaccattatattgttctatgaattctaagcatttaaatggtaccatcacggcaaagtatacatatgggaagccagtgaaaggagacgtaacgcttacatttttacctttatccttttggggaaagaagaaaaatattacaaaaacatttaagataaatggatctgcaaacttctcttttaatgatgaagagatgaaaaatgtaatggattcttcaaatggactttctgaatacctggatctatcttcccctggaccagtagaaattttaaccacagtgacagaatcagttacaggtttgtagactttaaagtgga

SEQ ID NO: 223539 - DNA, 412 bp, Homo sapiens
cggcacgaggggttgcttggacctgggagtttgaggctgcagtgagctgtgatcatgtcactgcaccccggcctgcatgacattgtgagaccttgtttcaaaaaaaaaaaaaagatgtgaaacgtctgttagcttgtatatatgtcagaataatttccaaatggatgagcgagctaaatgctgaatgttgaaaaaatcatatagatagtagaatcagatggattattgtataacctggagaaagcttttctatatgattcaaaatctagaagcaataaaaaaaattaaatttatgaatgattttaaagtgttttacatgaccatagtagaatcagatggattattgtataacctggagaaagcttttctgtatgattcaaaatctagaagcaataaaaaaatattaaattta

SEQ ID NO: 223540 - DNA, 308 bp, Homo sapiens
aatcccagcaccttggttggctgaggcaggaggatcacttgagcccaggagttcaagaccagcctgggcaacatagggagaccttgtctctaaaaaaaaaaaaaaaaaaaaaaaaaaaaatttgccaggcatggcaggcgtacctgtggtcccagctacttgggaggctgaggtgggaggaccagctgggcccagggggttcaaggctgcagtgattcttgatcgcacctctgcactccagcctgggcatcacagcgaaaccccagcaaccccagtctctaaatagataaataaaaccatgttgttta

SEQ ID NO: 223541 - DNA, 565 bp, Homo sapiens
catggaagttctctttttccacataataatagtccaaaaggtttcatatggaggagtcttgacaggtcaggggagggagaggcccaacctgcctcttagggtttggtagggtttgggaatgtgagagaggcctgttaaccatgagaaaaactcctaatccaaagtaaaataaagaaaagagtttgggccaagacaaacattttaattctctatgccttgtgctgggaactcatcttgccccaattcaaatgtaagccttccttatagaaagtaattttttttttttgagacagagttttgctcttgttcattgcactccatcctggtcaacaagagtgaaactctgtatcaaaaaaaaaaaaaagtatatatatgtgtgtttgataaatcccaaggataaagtaattttacttggctaattgcaattttataaactaaaaggacaaaaaggaatagctgtgacagacgtttctaatgaatcatctttattgctgtaaactcatagaaaactgttaaaattgttactatagtgaataataaaaggaaagtattttcaaaacttaca

SEQ ID NO: 223542 - DNA, 389 bp, Homo sapiens
gctaggtttagaaattaaagtctccgaataggccgggcatggtggctcatgcctgtaattccaacactttgggagactggggcagaaggatggcttttggccaggagttcaaggctgcagtgagctatcatacattgcactccatcctggtcaacaagagtgaaactctgtatcaaaaaaaaaaaaaagtatatatatgtgtgtttgataaatcccaaggataaagtaattttacttggctaattgcaattttataaactaaaaggacaaaaaggaatagctgtgacagacgtttctaatgaatcatctttattgctgtaaactcatagaaaactgttaaaattgttactatagtgaataataaaaggaaagtattttcaaaacttaca

SEQ ID NO: 223543 - DNA, 1410 bp, Homo sapiens
  misc_feature (1317)..(1317): n is a, c, g, or t
acatttttctccaaattttattaatttcatagtgttttgatttgggtggcagatgacttttaagcagtgggtgtttgccggccagatctttcctggcatgcggactgtgaggcaaagcacgggtgaaggtaggcgctaaaggctttgggctaaagccagcacgcggttctgtgctataggagtctcccgtttcccgtggacaggttcagcgttccttctttcgcacaacttttttctaagtgttccagtgaccaagccagtcattcggacactgatttgcagtgcattggcagtaattcacaaattagttattatataagtctctctcatccctttcacactagattctcagacatgaatgaatttgtcgtttggaaggaaagctgggtaacgttttgggcacaggggaaggaggactccggtcttaactcccacgctaactttagctcaagtggagttttcaccgtggtcatttctacctccggagcaaggtgccagcgccagtactagagcctgcttatccacatttgccctggacaggagcaggaggaagtccacttctgtaccggcagacagagcatgtgaacacaaaacacatttctatggcatagtcaactgaacttcatttttacatttaatctaacatgttaacacgttctaacagggtttctatgagcagctgctgtaacatactcatcaactatgatagacttaacacttgttacctaatgaacaaggaggatgtgcatttcgggtttcttttgatattcgtggaggtgattgtcagtgtttaaacaggactactttctccactatgaagatgacttggaaatcgcaacatcatggtacattgctaagtccatgcttgtgtgtgtgacagtaggcttgataatttatcttaaaacacagcagcattgaaatttaggaaaagaatattaaatgcctttggaaacatgaaacaaagttaggagccagtaagaaagtgacagaagcaatgaatgtcttaatgcagtatagttaaaatggcttcccacagggtagataattatccaggatccttccttttccttcttcctccaggtttttcaggggtcacttcacatttctaaagaaagagtgaataggctgggcatggtggctcaagcctctaatctcaacgctttgggaggctgaggcaggaggatcgcttgaggccaggagtttgagaccaccttgggcaacataacgagaccccgtctctacaaaaaaaatttaaaaattagctgagcatggtggcatgtgccagtagtcccagctactcgaaaggctaagactggnggatcgcttgagccaatgagttggaggctgcagtgagctataatcacgccactgcactccagcctgggctgcagggtgaggtcctgtctctgg

SEQ ID NO: 223544 - DNA, 426 bp, Homo sapiens
tccagctttcttttctgttgttggggaagagaaacctttccttctacccttataggtttagcaaatgagggcctgtgaattaaactgacaaaagacagattagcaagagaaaagagagagtatgtggggtgggggggcaccggtagtgggtgcttggtggctcacacctgtaatcccaggactttgggaggctgaggtgggcagatcacgaggtcaggaaatcgagaccatcctggccaacatggtgaaaccctgtctctattaaaatacaaaaaattagctggctgtggtggcgtgcgcctgttttcccagctactctggaggctgaggctggggagtcgcttgaacctgggaggtggaggttgcagtgagctgagatcatgccactgcactccagcctggcgacagagcaagaatcagtctcaa

SEQ ID NO: 223545 - DNA, 273 bp, Homo sapiens
tttcaaagagacacctgcacaccccatgttcattgcagtgctactcacaatagtcaagatatggagtcaacctatgtgtccaacgacagatgaatagatttttaaaaacgtgatatgtacatcatggaatactattcagccataaaaaggctggaattatgtcatttgtagaaggctgaatggaactggaggacattgtgttaagtgaaacaagcatgttaacagaaagctaaacactgtatatttgtattcatatgcagaagcgcaagtatg

SEQ ID NO: 223546 - DNA, 310 bp, Homo sapiens
gcagcagggatgaacttctgcacgcttgggagttctggcgtgcgcagtggaaggagggggcgagggctgggggaggagatcggaaggggaaaggtaatccccggcgttttcagcatcctctttttagaaagactgagtctctcccaggacagctgctgcggtcacaccacaaacttaaaagccgccctcctgtttggagcgtgcctttcctcgccaccctctcctccccaaagctccagctggtgccttgctctccgcctgtcctagcgcggctctcgggggaggcagcagcgccccctgcctcccggcc

SEQ ID NO: 223547 - DNA, 576 bp, Homo sapiens
tgctgagtttaatactcacgggcactgtctgggggaaaggttgggggacatggaaatggcctagttgcagcagagtgggaggcagcatagaacagtacccctcgccaacccggctggccatcacatggccacacagtggacagaggtacagaaagctcttggcacttctgaaatgcgaggctggcagacagcagaaaagctaaatcctagcatcagtcactcatgtgtatgtgtgtgcgtgtacacacacacacagctgccccgccaccctttcacacagtagcacagcaagcttcaggaattatttccagaattctaatggagcatgattcaccggcaagaggatgatgacctaattatccacctgtgtcagttaaatggcaagaagccccctcgccctcccttcgcctggcacagcattcagcatcttcctgctgtctgaagagaggcttgcaaaatgctaatgtgactccagggtctctatcctgaaagcttgcaggtatccaagcagcctggggaaagggaagccaggagcacatggagtccaagaagaaactgaaccccagcaggctctgg

SEQ ID NO: 223548 - DNA, 223 bp, Homo sapiens
gcacacaaaactttctgtttcacaaacagtagcattgattgatccctttaaatgcaagttcaatccttataagctaagtgcagtgatgattttatgtaacatagctaaatgcacacaaaatctgtatattctgaactacaaaagtggtttccatagccacatatggttttagataaggattcattttcataatgaatagtactaacaaatacgttaataaaac

SEQ ID NO: 223549 - DNA, 363 bp, Homo sapiens
gagaatgaacgtgtccgaaagacagacagaagcccggggactgacgtccgtgggagctcctcccgcactgcagaagatgaacatctaagactcgtttagacaaactgatgtagagaaaaataagaaacatcaaaacataccgtgccctgacctgggctttaatcctcatgaggccacactgttcagaatcggctgagggactctgtggcatttcggggtgtccttgctgacagggtatttggtggcccccaagttccctcctcagaggtggcagccgtgggggaccctgcagcagctgtagtggtgtgggacttggtagcggggtcctgacggcggaggacccagcacgtctgttctcagcgg

SEQ ID NO: 223550 - DNA, 467 bp, Homo sapiens
tgctcttcacgcaaagaatatatcatatactgctgtgccacccagggccattctctcacaaattagagctccttgatcctgatcctcagagttgtagaatgaattccaccctaggatccagaaaggagttttggggagggttttggaaatggtgcgagaataacccgcaacctagggaagcaggctgcatcacaaagcatgaataaccaggccccacagtggttcgtggagctccaagcagaatctatctgcccagaggcagcatgtggttggaggggaaagagcctacctggtaggagatgacctagctgtcagtcatccttttaaagctacaggccttgggggaaatatttttcttttggaacctcagttttatcatctgaaaaccaagaggtctgacctcacaccctctgtaaaattcttcctgagttgactttctgattaaaccatttcctcttgctatgtgc

SEQ ID NO: 223551 - DNA, 466 bp, Homo sapiens
tgcattttaatggtcttgacatgaaaatttctggaagcctcctgatctcaccatggttgaaaaccttctctagatgtagtcaaatttccctagtccatttgattaatttacgctaaaagcaattattgcatgccctccatgtagcaggtccattataattcaataaaatagtatgtaaagcagccgggcgtggtggctcacgcctgtaatcccaacacttttcgaggcctaggcggacggatcacctgaggtcaggagttcgagatcagcctggccaacatggtgaaaccccgtctctactaaaaatacaaaaattagccgggcatggtggcacgcgcctgtaatcccagctactcaggaggctgaggcaagagaattgcttgaacccgggaggcggaggttgcagtgagccgagattgcaccattgcactccagcttgggtgacagagcgagactccgtatcaaa

SEQ ID NO: 223552 - DNA, 329 bp, Homo sapiens
accaagaggagcctaaagagacatgaatgtaatgtggcgtcccggatggatcctggaacaggaaaaagacactaaagaaaaactgggaaaaaagtatggattttagttatgaattatttataaatattgagtttattcattgtgataaatgtactatactatcagacataaatactaagaaaaactgagtgtggagtatctgaaaactttttgtactatctttgcaacttttctgtaaatctaaaactgttctaaaatataactttattaaaaatggcaatgataaactcatcgaaagttaacataaataatacatgaattacaaacta

SEQ ID NO: 223553 - DNA, 547 bp, Homo sapiens
gttagaaatattattatatttctgcttattccataggcagatgttagaaatattcaagaatcttgtcttctagtttttgtgattcttggtatttattttagtattattagatttttgatgtattattcaatgatatgaatgaagaaaatgagagccaagcctggatcaatgatgtccactggtggcgtataaatcatatttggtgaatatatgtctggaactctgaggtccaagaaggaaggaatctaggttattgcctcttttagaaataatcctatagattatttaagaatatataaggatcttatttggcctttttaaatgagtttttactctatcataataaattgatcaataaaaggatcaacatatggatacaaatacataaaggtaaatagggtgaagcatcatcaaattatggaaagatgtggtggcaagagaatccacgtgtatgtacactgaagacactgaatgtcattaaaaaaccaatggttcaggctgttacacctggttaaaaatcatgcaggtaacataaataatagcctgt

SEQ ID NO: 223554 - DNA, 545 bp, Homo sapiens
aataaaagggcatttgtctgttgatacataatttcttttaatttaggagtcctctcttaaaatagtttgaaaataatcttagcatcgatcatcaatgtacttttttaatacctagtgactatcacagtgcctagcacatagtaggtgggtggataaatatttactgaacgaatgaataaaatgagatatttactgaacgaatgaataaaatgagaggtaaacaaaaaattttcttcacaaataaagataaccaaaatctacactagtatataagtgtatctttttccccatttctccaagaacagaacaaaaggttggaatcagtagccaaggacactggcttcatcatgttgttgatgaacacatcaggagatgcaaaccgtccacccctggctgaaactgagaagcccgatctgccaccccttgggtgatctatgcagggaattctcatctgcagaagatccaatgggaaaaacaatcacaatcatttaagcaatccacctttagattttcctttctttcaatgtgccatttcacataacatt

SEQ ID NO: 223555 - DNA, 439 bp, Homo sapiens
ctcatggcctttgccccagctgtgtcctctgccctgcaggatgcacctctgctccgtgtggctccctcccactctcactctccaaatgccccgaacccctgagccccactgcagccccactgtaccctggctctgcagcgctgcttcttcatgatgtgtgtcttccaacagcagacggggccatgaatgtggatgcctcattcactgctgtgtgccggcatccagagcaggactggagcccagagcaggcacctgactgatagttgttgaatgagtacagtaatgaatgacaatgaaagcactgtgtagaaacactggctgaatagtacctagaaagagaatgtctcaaatacctacattagcaatgaaaaaaacactgctaattaatgaactaagcatctaattcaagaaacaaagcaacacatctaacttatagaaa

SEQ ID NO: 223556 - DNA, 515 bp, Homo sapiens
tgaaaggaaaaatccctaaatataacaatattttaaaattttctttcttttgaatgcattaaacgcacattgaagaagtaagcctgtgttagacactgaattgatttagttgagttataatcttcatccaagtgcccttcagcctaggagagttagccaaataatttagttaagtagtaattgaaaaccaagattgttgagaagggtagcaaaaaggcactcattgatctattcagttttcctagtcctggaaagttaactgtcagggttttaacatttacatgatgaatgaatattgaaacttaccccccagaaagaaaaaattgggattcttttgatcttaccttttttcccttttaattttacatgtagaagagttactagctaggcatgttggtgtgcacctgtagtttcagccactcagctacatggaaggctgaggcaggaggattgcttgagtccaggagtttgacaccaggctgagtaacataagagaccccgtctcttaaaaaaaa

SEQ ID NO: 223557 - DNA, 463 bp, Homo sapiens
  misc_feature (17)..(17): n is a, c, g, or t
  misc_feature (32)..(32): n is a, c, g, or t
agcgggggagggggggnggaaaaaggaaggcnggtgtaaggcggtgaattgatttagttgagttataatcttcatccaagtgcccttcagcctaggagagttagccaaataatttagttaagtagtaattgaaaaccaagattgttgagaagggtagcaaaaaggcactcattgatctattcagttttcctagtcctggaaagttaactgtcagggttttaacatttacatgatgaatgaatattgaaacttaccccccagaaagaaaaaattgggattcttttgatcttaccttttttcccttttaattttacatgtagaagagttactagctaggcatgttggtgtgcacctgtagtttcagccactcagctacatggaaggctgaggcaggaggattgcttgagtccaggagtttgacaccaggctgagtaacataagagaccccgtctcttaaaaaaaa

SEQ ID NO: 223558 - DNA, 265 bp, Homo sapiens
atgcatcccccttaccacccccttccattgaaaggaaccagtgaagctctttatctgaaacacatttcatggtcatggatggaatcattaactacgttttgccagtaaacccagtttagtggccaagcagatccaatgggatgagattttatttgcttcaataacaaaaatctggtattaagttggattttgtttatatagcatgaggaataaggaaagaaagaaaccctaaaatctcacaggggaataaagtcttgcttaaggt

SEQ ID NO: 223559 - DNA, 711 bp, Homo sapiens
catgggcatacagagcagtagctgtctatcgacagacctcaaagacacagtgagcctttgagtttcttcaaatcccttaagaaatggagaacagtagtctttcttcaggggggttctggaaatgaaagagctgactgtctgctctgagatgtgcttattagtggccaggatccagtttaaggtaaggggtagacaaccctgattgaaaagatctcatttcttctcccgttgctgtactcctttttctaacaaaatctataactggataagcataatccatcttccttcttgtttacttccacagctttacatgataacccttagacataaaattaataccggctttcttactgattaaatatttttctctggtcaggcatcttttactgtttaatttctggaaatgattaaaatgtgtgaagctgatgtatccaactataatgcccatcgttagctcctgggtacctatgcaaaatatgctgtagagagctggggctagaaggattatattccgtttagattgtagtagggcatttgttatttgttagtgaccccttctgggttggaatgtttatttgaatttatgaaattttacatgaagagtagttttggaacggtttggtttgttgtgactctcccaaaatacagaggtaaaaactcatttcaaaataacccatttaataaggaaacactcctatgtctctgacagca

SEQ ID NO: 223560 - DNA, 505 bp, Homo sapiens
ggtatgtctggggggagtgtgttgggagacactgatgaaacaagtctggcaaaatgctgataatcactgatgcaggtgacaggtacaaaggagtcccaccacttttgcatatggtctgtgtgtgtgggttatgtatcatatattgcagaggttgaggggagtgaggtggggaccagcacctgtatccccagctcctgacacagtgccgggcacactggaggtgcatggtacaccatggtaagtgatgcgcagatgccctcggggatggaaaccaggcagtctctggagacagaagactcagtggacttgtggggctgagaagtattcgggaaataagaaaatggaatccacaaggaaaggcttacacataaactgcgcccaggccaatagccaagcacgtgtctttttcccaggatgtaacccagcttggaggccatacagcaccattctgttttcctacaggagaaagactggattgctccaaggtaaaagctgaactttccca

SEQ ID NO: 223561 - DNA, 208 bp, Homo sapiens
ttctcagtggatgctgcagcagcagagtctaggtacaagccagttttccaccaccaccttgcaatagcagtggtgcactctgctgcaaacctgtgagtggaactctagcttccttccattcctgccttgcagaaactggtatccctcctttgctgagcttgtgagtgggatcctgactttcttctccaccctatagtagaagcagcaa

SEQ ID NO: 223562 - DNA, 402 bp, Homo sapiens
gggtgcaggacctcatgcctgtacttacagcactttgggagaccgagataggaggatcacttgatcccaggagtttgagaccagcttagacaacacagggaaactttatctctataaaaataaaaccaatcagccaggcatggtggtgcatgcctgtggccccagctacttgggagattgattgtggcatgatcacttgggcctgggagttcgtgggtacagtaaactgattgtgccacaaacaaggaatgagaggtcctgttgctccccatccttgacagcatttgaccttttcattcttctggattttggttattgtttgattgtttgtgccactgcactccaagcctgggcaacagagactctctctcaaaataaataaaagacttctagtcactatat

SEQ ID NO: 223563 - DNA, 569 bp, Homo sapiens
tatgtgtcagtagtttgttccctttattgtgaagagtatttcattgtatgctataccacaatttgcttatccattcaccagttagtaaatatttgggttgctggattcagtagctattctggcagttacgaacgaaacttctataaacatttatatacaagactttgtgaggatgtatgtgttcattaatcttggataaccacttaagagtggaattggtggttatcttttaagtatatgttaaactttgtgagcagctgtcaaactgtttctcaacatagcagtaccatttgtgttcccaccagctctgtatgagagttcctgtggccccatatctttactaaaatgtgattattctctatctttaaaatgttggtcattcctaatgggtatgtagaactccttttctgcaaacttcttggcaaaattcaggtcaagagggatttggttgggttgagtaattttctaagaggatcattttcatggatgggaaattcattctgaggatataataagtactccaaaagaaaatattttaaatttatatttttaaaaagaaaatcgaccct

SEQ ID NO: 223564 - DNA, 232 bp, Homo sapiens
ctgaggaacaaaattaattcatagcaggaaagactggaactgggtcacttgcaaaaagaatgcattcctgaatgtcaaattcactaagcagaggaaatatcttctgtaatttactgaagaaaacatcaaattcattataaataagacctatgggttggatagtctcagaacatctctatttcttaagtcacttggaaaatgtatgtatatctgcacaaatagaatcgtctga

SEQ ID NO: 223565 - DNA, 252 bp, Homo sapiens
tcgcaacattgaacactcaccccgccacagtaaccaaggcggtcattaagaggagaaacagcaaactaagcctttctccaacctggggtgatgcaacagggacccgggcggggaagaccgtgagggtctggggaataagacagtgagcaagtgagcaggaccttgggagagagaggagggactggggcacactgaagaaaaactgggggaaggtgtatgaagggagctgcgagctgaggtctgactttgatt

SEQ ID NO: 223566 - DNA, 713 bp, Homo sapiens
atctcaccactgtacttccagcctgggtgacagaacaagacccctgtctcaaaaaaaaaaagaaaaagaaagaaagaaatgaggtaagcccattaccacctctgtacataaaatttatggtgaagaaaagcaattaatgaccaaaaacacagcaccacttttctcatttccttcatttaaaacttttttgttgtttctgtatctaagtgatttatccccctccctgaatttataccaactccctgaatgtttcctttcacttagatattgctgaggtagctgtactttgtattatttgcttcaaggaaaagagaaaatacctcagtgtcccagatactcttgtatgtgttgcactaaaaagatctggaacacctggctggtctaatgtctaatggtggtgggttatcagaacttattaacattagtgtcgtccaggtgcagtggcacaagcctgtaatcccagcactttgggaggccaaggcaggaggattggttgagctcaggggttcgagactagcctgggcaatatagcaacaggatctctagaaaaaatatgaaaattagccaggcgtggtgacacacaccagtaatcccagctacttgggaggctgaggtcggaggactgcttgagcccaggaggggaaggctgcagtgagctgatatcacaccagtacactctagcctcggctacagagtaaaaccctgtctcaaaa

SEQ ID NO: 223567 - DNA, 385 bp, Homo sapiens
ggaaaagtgagagtatgtatgattagctttccaaacatgataaaaagtaaaaacgatatacactccctgaaaatgcagaacccagtctgcttgacagtttgggtgggcatattttgaagaaagggatacagtaaaataatagtaaatactcattaagttagctgtgtgccagacacttatttagtgctgtgcatgcattatctcatttaatccttgctacttacgaggtagagttatttccattttacaaacaaggaattcgcaccttaggaaaagttaagtaactggactagcatcacagctgttaagttacagagttaggatgttgtccgtaattatactcttttaaattcatgtgtacactagctgtaaaagtgaatattat

SEQ ID NO: 223568 - DNA, 318 bp, Homo sapiens
gatggtatatgctgattaaagtattagaacagtgttccctacactaagtgctgcctttcaaccctactgtagattctataaatgaagtgaagggatgtgttatggaatagtagctttgtggggagtagccgcaacctgaggcagcaaagctgtggtccctgtgctagttggagagctactgcacatgggaaaagttgaatgacagtacaagtctggtgttagaaggaccaattctgcttctgtatttatggagtaaaaagggatggtgaatgtcctcgtttgtcaactagatgggcaacaaagacagtgaaatgagtg

SEQ ID NO: 223569 - DNA, 267 bp, Homo sapiens
aatcagctcggccctgtggtcatccatcaacctcagtgaaataccagcgtcaaggagcccccaccagcaccgctgtgaagggtaagagtgcgggagaaagaacacagtttacagcagggccaaccgagcgcacagtccctggcttgtagtctgcgaccttgaattaattaatttagtttgtttatgtatttatttatttattttgagatggagtctcattctgtcgcccaggctggagtgcaacagcgtgatctcaggtcactacaa

SEQ ID NO: 223570 - DNA, 439 bp, Homo sapiens
agtcatttattgtattatgccatggaaagtggatgactctcatggtgcaagtgcagtctatgtccgaaagagggagtagtgaaatcacagatagcatcatggtttttctgactttttgcttctgatatttcccaacttaagagccagaggagagtagggaactgggaaagaagagtttatcagctgttggatgaacagatctttggagtaagcagttgtctcgcacactgcagctttacagccattgagcagaacacccagccaccaatgcccttctgtgatttcccaagtcctttcctttaacctaagaattaaatacttttaaacattcaataattatcaagatgatatccttgttgctagaagcttttaattctacttaaatgaactggttagaatctaaaacgtgttcattgttaaataaactggttagaatcta

SEQ ID NO: 223571 - DNA, 455 bp, Homo sapiens
ttttaagtaacatgacaaactctcatgccatcctgctctatcccacctggaatgtgactcatccttttgtccagtgcatccatgctgtaaatactacctgtacaccagttacttaatagcctgctcagttatcagataaaaaaacacaaaatatcaaaatatatatatatatagggtttcatactatctatagttttacacatccacttgaggtcttggaaggtacccctaaggataagaggggactactctattaatcctttcccaagtaactcatggatcctatattagcaggagctctggtactatagtactatagcatatatgaaaaaactgaatgacttctattatttggagagaaacttattagtaaactctcagaagttgtatttggaaattatgtcttctacatgttaaaagagcttattaaatttagtctgttttggttcctaaga

SEQ ID NO: 223572 - DNA, 940 bp, Homo sapiens
ccaaatggagtttatagtacaacttgaaaaagtaagtttatttacagttactaaaatatctggaggtactctctgagtaacaacttgggttcttatagtcagattgctctgaaagtagttctaacaaacttcattttggcttgttacatcattcgacttttgggaaattattcattattgcatcttaggaaaacagtatatacagtcaaatatcaagccagcctgattatgcctaattcatgtgtacaggcaataaatattatagttcccagaagagaagagtaaaaacaggaaatatttttacgttcatgggaatctgggtaactggggtttgtgtgtttcaacttttggtttttggcttcatttttatgtacctacatctacattgagaattgctcttctaaatgattaatctcttacacctggttaattctactctttactgtatagtgggccagaaaacatgcagtataggtttatttcatgtataatagctactgctttctttattgtgatgatacggtttataaagtaatacattttaagttgttagagccaaaggaattattaagaaattgttagaaaaggctgggcgcggtggctaacgcctgtaatcccagcactttgggaggccaaggtgggcggatcacctgaggtcaggagttcaagaccagcctggccaacatggcaaaaccctgtctctactaaaaatataaaaattagccgggcgtaaggacaggtgcctgtaatcccagctactcaggaggctgaggcagggagaattgcttgaacccgggaggcggagattgcagtgagtcaagattgcacccctgccctctagcctgggcaacagagcaagactctgtctcaaaaaataaaataaaataaaaagttgtttgaaaactaaaacatcctttcatcatccttatactttaataga

SEQ ID NO: 223573 - DNA, 403 bp, Homo sapiens
caaaagcgaaactccgtttcaaaaaaaaaaaaaaaaaaaagggatgttaagcaaaacgacccattattctaatcagggtttgagttgctacattgtatcagagaagaactactttccaatctctgtaagtcacacaagtatactttgttatagtccagttatcagctcactttgtttctttgcttctaacaacactaacttgatatttcatattgaggttgtggtcagccagggcccctgaatttttgtttttgttttctgttttctatgccagtgcctgactatcaagtatcttgatattagtatgggctccctgccatttcatttagaactttgtaattgaggcataataaacatgtatataagataacacgtaattatacaacttgatacgttttcacaa

SEQ ID NO: 223574 - DNA, 1003 bp, Homo sapiens
tggatggcttaaacaataggaattcatttctcccggttctggagatgggaagtccaagatcaaggtgccagaagggttggtgtctgtcgagggctccccttgggtcacagacagccattctcttgctctgtcttcaccatgtcctctccatgtgtgggtgggcttgtgagcttgaaagcaagctctctggtgtcttcttataagggcactaatcccatcatgagggccccaccctcatgatcctatctaaccctaattacctcccaaaggccctcgctccaaaataccatcacatggaatttggtggggtggatagaattcagtctatagtacctagctgtcactcaatatccctacttgggatttcaaaggtctcagggaaggaccagactgaggtcacaagcttccttttgtagcctgggttataactggggaagggagggcaatgtcttcccacaaagaaagggagagctgttccagaaggaggaagagtgctgagcagacagtaatagcaatggctgacttttgctgagagcttgttcatgctgggcactgtgctaagcttctgtgtattcagtcatttgatgcttgtgatcatcctgtgtggtgggaactgtcattactcccattttacaggaaaaggaactgaggcccagagaggttactcagcttgccctaggcaatacagccaagagtggcagaaccggaatttgagtccagactgtctcaccccagggtgcatgagcaccacacaccagtatggctgtccttcgcattcctgtggtctctgccgtggatctggcttataccttcctctgggcaatgcattccctgaatatcttgtaatccttggttgccagttcctatttagggtgtggggcactgagataattccagggaacttgggtttcacgagggagcttctctgtctgctggcttcttgttgaggcctccgatgtggtgtgggggcacttctcagtgcttgggggaggccttttctttg

SEQ ID NO: 223575 - DNA, 543 bp, Homo sapiens
cactctcagactcataagcatttaaaatgggagaccctgggaaagcctgttctagtcagtccaccctattgtcattatgaaagcatcatgaacacaagtggcccctgtggcaggccgggacggctctgccctgatgcagtgggcgggatctctggggaaggcaggaaatagaagggcagtatcaggtaccttgtctcccagcttcccactgtgagactgggtgtgccgagtctgacctgccagggcaggactctggaaacaccaggcttctcccttgagatccacattgattcatccacacctctcagagacagctcatggcaggggttttgagcctgccaggctcttgttcccagggaacccttcctctcctccctcctctcatcttcccagtcacctgccacctccagctccacctggtagtaacatttctctctccttttaaaaagaatatattttgtcaagcattttatttctgaggctgagaagtgacttgtcaatttgctggactggatttttataaaattcgcccattcaccagca

SEQ ID NO: 223576 - DNA, 424 bp, Homo sapiens
tacctgtattcccagctacttgagaggctgaggcagaagaatcgcttgaatccaggaggtggaggatgcaggagcagccactccagtgcgggtgacagagcgagactccgtctcaaacaaaaacaacaaaaacaaaaacaaaacaaaacaaagacaactgtttagaaaatataaagtgagaaagggggctataaagtgtgtgactggagggaggtaggacactgaactattagataggatggcagacttttgggtagagtataaaagaggtgaaagagacataagggctctggaggaagagcattctaggaagagagaataggatatgcaaaggccctgaggaaggaatacgtctcataccatccccagacagcaagaacatggaggctgtttgttgcatttcccgtcctgcattacaataata

SEQ ID NO: 223577 - DNA, 471 bp, Homo sapiens
ctgttgttttagatgtttaaaggagatgataaaaatgctgcaacccagataatgatcaccttactcttcaaaaatactgcccaagttctttgttcaagatgccaagaacctggataccctccactggtaacaaatatgactttgtttttagcaagcaactttgcagtgtaattaagttaaggatcttgagatgagatcatcttggaatatctgggtgggccctaaatccaatgacaagtgtcctcataggaagggaagatacacacagaggagaaggtggtgtgaagatggaagccaagactgttgataccagttggagagcaccaagaactacccgcagccactgaaagctaggagagaggcataggactgtctccttcagaccctccagaaagaccaaacctgcccgtgccttgatttcagacttttggcctcccacattgtgagagaataaaattttgtttttgaagc

SEQ ID NO: 223578 - DNA, 749 bp, Homo sapiens
agcgggtccgtggccggtgaggcgcgaggggaggagggcttgcggggctggggcgttagctgcttcccggctggaagcccgcgaacacgaactatgaggaaggcgccgccgtgggccgtgggcgcagttgctcgggcgcgacgagcctatgagcagcgagacccgacgggcggactgccgccgtcggccgtggcgagccggcttgatgcaccgacgcccgcagggcagcgtacgcactggctccactagacgacccgttcgtccatggcgacactctcgcgcccggagaaacatgattcccgtgacagaattccggcagttctctgagcagcagcctgccttccgagtgctgaagccatggtgggatgtgtttaccgattacctctcagtagccatgctcatgatcggcgtgtttggatgtactttacagaattcagagttcaagagctccttaaaggatacacaaaactgtcatcagtagttaagatttcggtggtctgggggtgaattccaggtagcaagagaagagtctaaggagcagcaggcaacgtgctgaagtgcagagccaggtcaaggctgggtttgtctgagcagctggtgagtaagagagctgtgaccagggctctgagaaatatggacaggggccagcctgacaaagacaacaaagaactgcccaggggaaggtgaagaaggtaactgtcaacccttcaaaaagtgaaatggcgttagtaagatgaaggccagcccat

SEQ ID NO: 223579 - DNA, 454 bp, Homo sapiens
acacagtgctacttgaagcttattttatagataacatacttaactgttaacagattcagttagctgtttacagtttagttaactggatatagttctcaacccacatggggtcagtcattttcaacaaatctttttattttctctatagaattcagagttcaagagctccttaaaggatacacaaaactgtcatcagtagttaagatttcggtggtctgggggtgaattccaggtaagtagtccctcttatcaaatgtctctttaacaatgcttgcagctatcttgatgtgacaaccatcacaaaagcaaatattaatcagatcactaaagggacacaaataaccgacactagccaagaaagaattcaaatatatttttgaactagtttggggccaacttttgtgtgagaagaggaattgagttcacttcatctggtgttaactgaaataagagt

SEQ ID NO: 223580 - DNA, 420 bp, Homo sapiens
ataaataaaatatttatttatatttatcaaagcaacacacaacctaggtgaggatggggaggtgtcaaacaagacctaacctctcaacaatcagctggacactgttgtgtaagaatgtgaagcttggcactgctgcagccatcttgttccaggaagggtaaaacctgaggttagaagccaacatcctaatgatggcagagaagacaaagagaaccagagtctaaatgacattgttgagttagatcactacactacctctagtcttctttttatgtgtgataataaatctcacttatacttaagccatttgaagttgagtctaatgttcatttcagaccaaagcagcttaactgacatgttctccgctttgttaccctatccagttgttttcatgcaggaaataaatctcaaattacctca

SEQ ID NO: 223581 - DNA, 449 bp, Homo sapiens
acaaaaccacatgatcatctcagttaatgtcttagtccattttgtgtttctataaaggaatacctgaggctgattagtttataaagaaaaagggtttatttggcttacaattctaatgtctgaaaaagtttaagattgggtctctggcgaaggcctcaggctgcttccactcatggcagaaggtgaaggagagccagtgtgtgcagagatatcatggtgagagagaaatcaagaaagagggggaaggtgccaggctctgtttaacaaccagctgtcatgggaactaatagagcgagagctcacttttccccaagggaaggcatttatctattcttcatggatccacccctatggcccaaacacctcccattatgttctacctccaacattggggatgagatttcaacatgaggttttgaggggacatatccaaaccattgcaaatgtag

SEQ ID NO: 223582 - DNA, 677 bp, Homo sapiens
tggaattatgagtcaagactgggcaggaagcaggaagcaaggatgaggagccaggttatgataactagtgatgcatggggtgtccaggcccagaggcactaaaagggggtcaaggaccagcatggagactgggtaacagagagccatgctgtgctcatggaatctgggcagcaagagtagcagctcccagaggggctggctggcaaccttttgtatcagcttaggaacttttcatgttggtcaggagcagagacgcagttccagttttggctggcctggagcttgcaggataagcccgtgtctggctgcactgtaaaaataacacggagaataggatgggtcttgtccttggtctctagagcagccactacatggaagaaagaggtagaaggcaggtgtctatcaagtgacatcacagaactcaagaggagtgaatgtcacctccattccccagtctcccaacattccctggggaacagggcagagggaagacagagtaggggaattccaggataagcttcatgcacccagaatgtggaatgctcaccaaagaagaacaagagccgtgttcacatcatgatattccgccctcttaattcccaaacagggctcccaggctacagagcagctttgataacagcagtgcactccctctcctctagaaagttaggtggctt

SEQ ID NO: 223583 - DNA, 940 bp, Homo sapiens
gcaacctctgcctcccaggttcaagtgattttcctgcctcagtctcccaagtagctaggattacaggcgcccgccaccacacctgggctgatttttgtatttttagtagagatggggtttcaccatgttggctatgctggtctcgaactcctgacctcaatctgcctgccttggcctcccaaagtgttgggattacaggcgtgctagccacacccagcctaccagagaaatttaacaaggatattgaaataattaaaaaattaaacagaagtcttagaactgataaatagattttctcaactggaaaattcatcagaggctctcagtagcaaaatggatcaagcagaggaaagaagcagtgaccttgaagacaggctgtttgaaaatacaaagaggacaaaaaagaataaaaagcagtgaagatgacctacaggatgtagaaaattatttcaaaagaccaaatctaagaattgttggtcttcaagagggagttgagcaagagcaagggtagaaagcttattcaaagaaatagcagaaaactctccaaaacttgagaaggatataaatatccacatgcaggaaggccagaggacaccaaagagatttgtcccaaataaaaccaccccaaggtatataataaccaactctcagtggtcaaggacaaagagaggatcctaaaagtagcaagagaaaagtagcaaataaccctaatggagcttcagtcagtttgtcaacagacttcttagtacaaaccataaaggtaaggaaggagtggaatgacaccttcaatgtgctgaaagaaaaaaaaaatttaacatctaagaattgtatatccaacaaagttatccttcaaatatgaaggagagatacattctttcccagacagaagtttgagagaattgaccactaccagacccatcccacaagaaatgctaaaggg

SEQ ID NO: 223584 - DNA, 507 bp, Homo sapiens
agaccaggcgggtggggttcaccccaggctcctccccggcccggcccgcatggtcacaggactgcgccttggggttcagacccttgtcccgtgttccagagccagcccttcccgactccaaagtccccttccttgtggccgggccgcccacttgggaagcccgatgaagagttaatagtttaatgtgttacccctcccaggaataggtgccttcagaaacaggtgggccggcgcggtggctcatgcctgtaatcccaacactttgggaggccgaggcgggcggatcacctgaggccaggagttcgagaccagcctggccaacatggtgaaaccccgtctttactaaaaatacaaaaacttagccaggcgtgatggcagatgcctgtaatcccagctacttgggaggctgaggagggagaatcgcttgaacccgggaggcggaggttgcagtgagccgagatcgcaccactgcactccagcctgggcgacaaagcgagactccgtctc

SEQ ID NO: 223585 - DNA, 425 bp, Homo sapiens
gttttttttctgttgagactgcttttactgatgacagttcattagataggaaatgattctgtggtacacaattttgaactttgcacatagggaattatttccaaattgacaaaagttgcccattattacaaatttctgaagcatcctgtttcaaattgatcccgtagtggtacctttgagttagaggggtgatgttaatgttgaccagggtgttaccttgagaatgataatttgggatccagtagaaccctgttaaactttaaaatggtagaaggagcaaaaaggcagttgactgaactgaaggggttgaaggatgtgagttcatccttgttacctgcaaatagcacatgcgtgcacttaccatccgggaactctgggcactaggctgtggcacatctcccaaggttaccccatgcctttctaga

SEQ ID NO: 223586 - DNA, 525 bp, Homo sapiens
gccatggccagcccggagccccggcgcggcggggacggcgccgcccaggccgcgaggaaaacaagagtagagggcaattctcttctttcaaagaactctggatccctaaatgaggcagaagccttgaacccagaagttactctatcttcagaggggtccttaaacctcgaagacattctctacctggaggacacaggtgaccttgatgagacactctatgtgcaagagactgagaaggcagaggaggccctgtatattgaggaggccatgcagccagatgaggctctgcatgtggaggagcctgggaatccagaggagacagtgtgtgtggaggaaaccacggagccagatcggatacagtttgtggaggggcccgtggagccaggaaagcccacaagcccagagcacgttgtttatgagggagagacagtcacaagggcggagaaatctaaccctgaggagagcctcagagccgagcagagccccagcatggaggagaacctgagcatagaggacctggaattg

SEQ ID NO: 223587 - DNA, 934 bp, Homo sapiens
agcaagtatataaaaataataatgtttttacttttttaagtattggaagtaccttagaaatcattgactttgcccaactgccccattttacagttgtggaaaccgaggtcatagaattggtaaattacgaagaaaactgtgtttcctagtaggtctccctgccttcactctgcctccaccaccaggagtctctgcacccagtcatctttctaaggggtgtgccatccatcactccccacgcaaaacctctctgtgccctccaatgcagctagactgaagcctgtgatgtcagtgtggtcagatccctgcaacctcagcttgtgttcatggcacactgtgcttctgctaccctggccttctctctgctgtgtgaacacactaaggtttaacccttcccgttgtcttggaggggaaaattctcccagatattcaggcttctttgtgtcattcagtctcactcagctcaaagggcacttcctctgggctgccctaacccccaccagacacccaaactagatgcacaacgctcgtcactctttcccatcagcctgattggatgcctctaaagcatgtaccactatctgtaccactgctcatttattcattgttcatgtttattgtttgtgtccaatcactgacaggaagctgcaggaaggctaggattcgtctctatttccagtgtctagaacataattgattcatagttgatgcagaaaaaatatttgttgaatgactgaacaaacaaatacatattgaaggaaattcaaaaatgcaggatagtataaaaatacaaataaaaatcacccataactcctagttctggtattacttttgttaaaattttttagtatttctttttttcaggtctcttttctatttgtgtacatatgatattcagtatgcatttaataaaattgggactactgtaaattac

SEQ ID NO: 223588 - DNA, 373 bp, Homo sapiens
tctctgcatcctcaccaacacttattatctgttgtttttttaataatagctattctaagtggtgtgaggtcatagctcattgtggttttgatttgcatttccctgataattagtgatgtcaaccaccatttcctatatctgctggtcatttgtaaggccagacttacacaccagccttcctgaagtcaacttttgaaaaatgtctattcaggttctttgcccattttttaaattgggttgtttgatttcttactattgagttgtatgaattcattatattttttggatattaacctcttattacatgtatcgttcacaaatattttttctgaatcctaagttgctggttcatttcgttgattgttttctttac

SEQ ID NO: 223589 - DNA, 269 bp, Homo sapiens
aaaccccacccaatatggaatgcagcaaaagtacaaggacaggcctggtgccattgcttcaaggtcaactggctgacgggctgttgacccaggaacgggagacagttgccaaacaggactggccttgtgttagctgaatgtttgctccatgaacttgtaatttaaagggcactggctaccccactctccaaaataacaacaaacaaaagaccttcattttattttgacacggtacttgaaacctttccaaatagagtcctttgaggttg

SEQ ID NO: 223590 - DNA, 357 bp, Homo sapiens
ttgatcatggctcaccgtaagttcagactcctgcgctcaagtgatttttcccacatcagcctctcgagtagctgggattgactgcaggtgcgctcaaccacgtccagctaatgttttgtttttttgtagagactgagtctcactatgttgcccaggctggcctgaaactcctggcctcaagagcttctcctgcctcagcctcccaacgtgctgggattataggcctgagtcactgctcccagcctggcactgccttaggacagtagctggatgcatctgattaatgttattaactgactaaagccatttattgtttcttcacatacagttttttaataaaagtatggtcgagattac

SEQ ID NO: 223591 - DNA, 473 bp, Homo sapiens
ctccacaagaaagcaactcaggctggatttcaaacagcatacagtctaagctctaggtgatttttgacagttgtgttgttgctatagtatcctttttacaagtgatggtggtggtctttggttctcctcatcccctcaaaggctgttgaatcacagcaccagtaagcctgagaatgctaagggctctagcccaggctttctcccagattctctggtatgtgccctcctggtgacaatgaaattggctaattgctctcagtggtctggagtgactatgtccacagttcatctttcacagtaggaatcactccttttttgcttcatccatactccatagagtctctccttttcagacatcctaggaggaaaggatttagcttctatttttttagactatatatttttgacatctgttttttcttaggctattacatttaagttattaaataatacagataattactgcttttatc

SEQ ID NO: 223592 - DNA, 159 bp, Homo sapiens
tgggagagaccctgtattacaatccagtggggactgaagggattttgactttggctgtagggatgttaatggctgtttattgtgtatttcagtatcaaatgggcagtaatacttaattcattcatgcaccccatcatagcaagcagagagcttcggtag

SEQ ID NO: 223593 - DNA, 250 bp, Homo sapiens
acttctaaccggtcacctgcagctcccacctccctaccagcctcctgctcactgagctcctgcctttgagggagttaattcccctccatgggccagagagaggggccttgagctctgatagccttccagacactaactggctccagctgaccttcctacccatgagtttcacgagtgcctcaggatcctgaaccacagatcccgtctcttgtttagttagtgtgagtgaaattggtttctgatatttgag

SEQ ID NO: 223594 - DNA, 446 bp, Homo sapiens
gagagtccattgctttttaacaggcttcacaaaaggtaagcaccactcagaaggggagacactgtctttattagttgtcaattgctgtgaaacgaattacctcaaaatctagtgacttaaaacaatcaacatttcggctgggcacggtggccctcacctgtaatcccagcattttgggaggctgaagttaggtggatcatgaggtcaggagttcaagaccagcctggccaacatggtgaaaccccacctttactaaaaatacaaaaattagctgggcccgatggcaggcacctgtaatcccagctacttgggaggctgaggcaggagaattgcctgaacccgggtggcagaggttgcagtgagctgagatcacaccactgcactccaggctgggcgacagagtgagaatccatctcaaaaaaataaaaaaccaaaaaccaaaaacc

SEQ ID NO: 223595 - DNA, 1059 bp, Homo sapiens
tgtgtggtgggggaaccatgccctttcaaccaagctatgtggtgttcataagggtagcccctcctccgaccccaggagtggcagttcacagccctgactgatcacagtgttccgtggcctagctgtaaccaccccagggagtgagactgaactcaggggttcattggacctatcaggaaagagagacctttcttgtttctggacttggagctgtgatgaagtaagtgggtcaggggccaacacatagacagcgttggcctacaaatgcagcccaggcagaggacggtgcagccaagccacacagagagacaacttcctagtgacacgctgtgaactcctgcatccacccctgcctgaactggagcttttcctcttcagctcttcagttatgtgaggcaagatgttgccttttttgcttaatgctgtgagttgagtgtacagcagttacaatcaaagaatcctaaataatgctgcaagcatggtgactatctacatgggaatatgcagtactccagtgaagacaaaacataaattaattttggaatctgatgaccataatctaaaaacattcatagaggtatataaaaattataacaaaatttaaagtagcatatctcctcatgaagcaggttaagtgtatacacaaagaaggaggaggaaaaggtgagaaagaatctgcccttgtggggaagtgacagaggcagaagaggctgatgcagtcctgcatccaggcccagctctgccagcagctgagtacccctgaacaagctcccccacctcttcgggcctcactttccccatctatgaaagaaagggagtctagcttccatagctgccccagctgatacgcaaggtgccagtgtgtcctcagtcctgtcaggagaaaccttccccactagaatcccaggaggagcttgaaatcctgtctgggatcctgacggcccaggtgctgaccctgcctcgggttgtgtctgctaagaagtctgatttctgctcatctctccccatttctttcttcccataaagtgggctgatgcgctggaacgtcgatgcagccag

SEQ ID NO: 223596 - DNA, 332 bp, Homo sapiens
agtattgtagctaagaagccattgccaaattcaagatcatgaagatttacctctgctttcttctaagagtttgatcattttagctcttgtacgtaggtctttgatccattttgagtgaaaatttttttttggtgcaaggtaggggtcgtgctttattctattgcatgtagatacttagctgacccagcattctgttgaaaattctaatatttccccatgaatggttttggcacccttattgaaaatcaattggccatagatgtatagactctcaattctggccttattgtctctccttatgccagagtactacacaaaaaaaaaaatcactc

SEQ ID NO: 223597 - DNA, 480 bp, Homo sapiens
caagaaaactgtacagtgctggaggctagaagtcaaaatcaagtgattggttggaccatgctctctctgacagtgacaggggagaaccctccctcgcctctcctggcttctggtatgcaccagcaattcctggcgttccttggctcctagaagcatcactcctatcacatggtcatcttcaccctgtgtgtcttcacactaccctttctctgtgcatgtctgcccgaatccctttttataaggacaccagtcagattagattagggtctaccataatacctcattttaacttaattacctttgtaaagacctttttccaaatatagtcactctctgaggtactgatggttaggatctcaacataccttttttgggaggacacaattgaacccataataaggtgtttgcaaggaagagttaaaatttgaaagaaaggtggtatttgcttagatagatagggcacagctttctaggtgacaa

SEQ ID NO: 223598 - DNA, 168 bp, Homo sapiens
tttttttttttctttagctcccctcaaagcacatggactaatagagtaacacaaacgaattggcataattccttctcctgctattgttactagttcaagtgtgggcacttgccccaacttgaggccaagagtatagggaggatgtttacttgctgcttctgggaagaa

SEQ ID NO: 223599 - DNA, 377 bp, Homo sapiens
attctgtttgtccatatgtagatccaaagaatttcatgtcatcctaagtatctcaataggaaaattaaaaggagaagtaaagatattagaagtcaatgaaaaactaagtttcaggggataatgttttaaattacatgcagagaattaaggagaaataagtggccaagaggacaactgcagcctcacacacggaccacactgactgatggtgaggacagcaagcaggccgcactggagtcggtcatgtctcgttcccaggctggaacaacaacacctacaagtacagctccaaaagcaaagaccaagttcaaaggccccaaactaaatatcactgtaaaagaaagctcctaaaactaaaaggctaattttttctaaat

SEQ ID NO: 223600 - DNA, 164 bp, Homo sapiens
tggattgtctgtttattctgctcactgttccttttgccatgcaaaagctctttagtttaattaagtcccaactgtttatctttgtatttgcttttgggttcttggtgatgaaatctttgcctaagccaatgttatcgtatagagtttttataatttcaggtctt

SEQ ID NO: 223601 - DNA, 337 bp, Homo sapiens
atgataatgctttatacttctcattgtttggtaaactatttgattgccctctttttagtgaataattctactaggtattacttttctactgatgcagaagtgaaaacatttgtgaaacgtggtagagaggcagaagagtgaagaagagcatgtgttctagtaatttacaaaatattaggtctaatatttctgattacatcagctttctcttctccaaatcttggtttccttatctatcatactggcattctgatattggtttcaacaacttcagatgtaaataaaaatgcattaaaatccataaaatactaaataaaagaaaatatatttgtaaagt

SEQ ID NO: 223602 - DNA, 571 bp, Homo sapiens
cacagagctggcctcctctcaatggcacgtgtgaagcaacacactcacccttttacccaaggggaaaaataaaaaaacaaagttcctgtccaaaaagctttaaaactatggacaatctcaaaaatcgcatgcccaagaatttccagtttagaattttttttaaaaagctctgaagtgtattgccaaattattattattcaactttgatgagtttgaacccagcagagccagcatccatttctgatttatgaaatccactgagtgtcttagctttacgtgttaagatacaggctctaaaattaccaattttttttctgttttggttgataatcctgtggaaacaaaaatgactttgcttggtttggcagaaatacaagaaagataagctggttggaaaagagggaacttgttccaatccctgtcccaaagtcttttcataatgtgtgtgtcagcctaagaaattttaatatgtaatgcctaaatctaattatttaatttggctacaatgaattgttgaaggatgtttaatcgttttgctgctagcattgtcacagggcaatgttaaatcatt

SEQ ID NO: 223603 - DNA, 465 bp, Homo sapiens
tttttaaatggtaaagtgaattcagatctcaccaattacatcaactaatttatgtgtctgtgtattctatgcaattttattacatgtgcaaattcatattaccaccacagcagtaaaaatatagaacagttccattacaaggacctttagtgctagcctttcatagggacagtcttccccacctgttagcaaccactgatctgttccccatcactacaattttggcatttcagaaatgttatatacattgaattatatagtatataactttttgagattggctgtttccactcagcatactgcccttgagatccattcaaattattgtgtgaataagttatttgttctttttttatattagagtagtatatcaacaacctgaatgacttttaaagatattatactgagtgaaagtctactttcaagaggttatatactgtattatgacatttatgtggtattatc

SEQ ID NO: 223604 - DNA, 389 bp, Homo sapiens
acccacatgatgtgtagatcaaacactaattacctccagggttaagggaaaaggtgaagactgtggagcatgataccaggctgataatcatcaccttaacctcctgtgagttctgtaaatgaggacaagtgccttgggacaaaggtctccacactgttggaaaagcaacttgggcagtgagggcaggagtcttgggaaatgatacataatatccagctgtcagatcagcctctgtgttcccagtaactcagtcaccatctgtagggttcaactactttcccagctcactgaacacaagaatcactgtttcacctcctcctgcttctcttattcagaaataagctcaattcattcattaaaatgtgccctaaaaggaaaggaaagaggga

SEQ ID NO: 223605 - DNA, 380 bp, Homo sapiens
agccgggaaatcacgaaggaggggaactcatgcttgcatgtttgagataaggactgtctcaaggactttctaaaatagcccccaagaaattccttcttcaggactgcagcaattcaggtaagatgttctccaaagaacactgcccagtaacgtcatctccaccaatgaactgatgccaactctagctttgagcctctgcagccaatgaagtctgtttccaagcagcttatgtgaacttctcttttttttttttttttttttgccaataaaagcttccctttgctgtcccctctccagacgcacctatggcttgccacagctatacttccagagactaatccatttatgcttactcccaaatacattcatcatataggaga

SEQ ID NO: 223606 - DNA, 359 bp, Homo sapiens
caaaaactcagaaaataacaaatgctgaaaaggacacagagaaatgggagcgctcaaacactcttcgtaggaacataaaatagtttatccactatggaaaactgcatggaggttcctcaaagaactaaaaatagaactatcatatgattcagcaatcccactgctgggtatatgcctacaagaaagaaaatcagtatgtcgaagagacatctgcactcccagtttattgcagcactattcacaacagccaaaatatgaaatcaacctaagtatcaacggatgaacggataaagtgtggtacatatatatgaaaaaaaaaggatttgtgaatatactaaaagccattgaattgtatgcct

SEQ ID NO: 223607 - DNA, 108 bp, Homo sapiens
agacttattcatcttcccaggaataaccttaaccagacacaggaggggaaacaggaaacatatctggatatgcttagaatctgcgtgaatactgtgaagtatattaga

SEQ ID NO: 223608 - DNA, 370 bp, Homo sapiens
gtgaagatggggccagccatggtggctcacacctgtaatcccagcactttgggaggccaagatgggtggattgcttgaggtcaggagattgagaccagcctggccaacatggcaaaaccctgtctctactaaaattacaaaaattagccaggcatgatggcacatgactgtaatcccagctgctcaggagactgaggcacgagaatcacttgaacccaggaggcagaggttgcagttagccaagattgtactgctgcactccagcctgagtgacagtgagagactgtgtctcaaaaaaaaagtgaagatgagcaagcagtagccattggctaagtcatttgaattcttaaaaaaaaaaaagatacctaga

SEQ ID NO: 223609 - DNA, 680 bp, Homo sapiens
agggaaaactaaacctcctcaaactggatcagagcaggaaattgcaaaaacgtgtaggttttcatggttacatacaggaggtattgcaacatttggaacatttcaatacaactaaggtttatcattcatacatcctaaaaattatgttccagaaattatactgtcctgggtgctaggaatacatataaaaattgtccctactctcaaagagctcaaagtcaaaaggaaaatcagacaagaacaacatggtttgagaagttttactgataacagatattcagcatactatgggaatataccaaagaaacatgtaacagacttcagtgaccttagaaaggcttcttgaaggtggtgatccccaacctgaatttaaagacatgagcagctgggtgatggagtgagaccccatttaaaaaaaaaaaaaaaaaaaagctttcctccaaaagagcttcaggctctaagcataactttaatcttcctgagtggcctcaaacagctgtcgattaccctgttagggaacatggagggagcacaggttaggtgcactgaggataacatctcatgctagtaatgggcacaaagtaggagctttcagagaattgatgctgatttacaaagtgttctgagcagttctagaatacagaaatatttaacaaagatgactgccttgttaagataac

SEQ ID NO: 223610 - DNA, 524 bp, Homo sapiens
cagagtctcagagctgtgggttccgggactttgcaaagaaatgtcatgaagaaagaactccgatttgaacggaagctggacttccacgttgtggacgatgggctggtcctaagagggaggtggccagtaggttccctcagagaaaggttggtgacatggaaaatcgtttcctgccctgtgctgtttttcccctagagtcagtggtggggagttaggagtcaggctgtgcacatcttggaaaagggggattgagggactgtggccgtccttctccctgttgtgggtctgcactgtggtggtagtgtcatgccaagagaggaccctgacctaggagcatggggaagccgttcccagccagaggcgctaaataccatctgggggaggggtgttcttcctgccacccataggggaggacttgcatattcttatttggtatattcttaaatattcttccagagtgatcttggaaggcagaaaaactagggaacatttgggtaacgtgtaaattcattaaaacatagaat

SEQ ID NO: 223611 - DNA, 496 bp, Homo sapiens
cattaatgctgcctgtctcaggcacagtttttcaatgtactgtgttatttctgtatttctgtcaagtcaatatcatgcttttattaaaatgactttgagtgtgtgtgtgtgatatttttggacagctgcctgtttattatactcatgcacattgtctgtatttcatagagtaggcaaaaaaaggattttaatcaattgcaagagtcaatttcaggcaggacgcagtggctcatgcctgtaataccagcactttgggaggccgaggcaggtgaatcactggaagtcaggagttcgagaccagcctggccaacatggtgaaagctcttctctactaaaagtacaaaaactagttgctcgtggtggcatgtgcctgtaatcccaggtatttgggaggctgaggccggagaatagcttgaactgggaggcagaggttgcagtgagctgatattgcaccactacactccagcctgagggagagagcgagactctgtctcaa

SEQ ID NO: 223612 - DNA, 255 bp, Homo sapiens
atctaattgctcacttattacattatttttccaattaaaggtgtaagatttagacattaaatttaagttataagtgtttccttgaacacctaattgtaactgcaactagaacagtgatcattggtgactattgaaagttcagtgatttttaaatatattttcaatctgtaaagtagtagcatagcccagattgcataggatgaaaaatggaagatcacctaaatcttttcaaatccttggatgaaaacatcctag

SEQ ID NO: 223613 - DNA, 127 bp, Homo sapiens
agaaactacctgaaaaagaaatcaagaaaaatcccatttgcaataataaaaaatatcaggaataaatttagccaaggaggtgaaagatctatacactgaaaactataaagcattgatgaaaaaaaag

SEQ ID NO: 223614 - DNA, 404 bp, Homo sapiens
agtctgagagaattcctgcttcatggcctccgatgtcagctcttcctgggtctccagcctgcaggcttcagactggaacttcacagttggctccctgggcctcccgctggccgacacactctgcagatcttgggactcgtcaccctccatgcgcgagtgagccaatcccttgaaatctccttctctctacacgtgcacagcctattagtttctctggagactcctgacgaatacacaaaccagtgcaggtttgtagcccagcaaacccagtgtgctggagcagctcgtactggcttgcaagaaccaactgttaagtttttaggaatcttgtgtgccagttagaaaaaaaaaaaagatataaacttaaataattatattaccaacaaagataatacatattcaaa

SEQ ID NO: 223615 - DNA, 443 bp, Homo sapiens
caaaatttaccatttaaacatttttaaatgtgcaattcagtgactttcaatacattctaatgtgtttcagtacattctgttgttgtgcaaccattaccacttttcatcatcagaactttttcatcattacagattgaaactctgtacccattaaataattgaccccatttccgcctcccctagtccctataatgtaaaacttagagcatgaaacaaacatcattagatttatagatttgatttattatctaagatatttcacatggttcaaaattctaacctatggaagagtatacacattgaaaaatcccttttacctaagttctccctataggcgactgtatgtagtttttaatcttccctcagaaactgtgtgcatattcaggcaaattcattgttttaaaaagattgtaatataagcataaacattgttttgtactttc

SEQ ID NO: 223616 - DNA, 199 bp, Homo sapiens
ctgtctcaaaatatatatatatatgtgtgtgtgtatgtgtgtgtgtgtgtatgtgtgtctatatatgtgtgtatatatgtatatatgtgtgtgtatatatgtacatatacttatgcaaatacagctacattaaatgtaaatactgcaaggaaatatatcaaatgtaaaaagtgattatctcagagttattgaattatgg

SEQ ID NO: 223617 - DNA, 579 bp, Homo sapiens
tggctacctgaggaccccgatttgacgcgtctcatacgtgactgattttgtgtgtgtggtaaaggagagggaagcatcaggatgacttccagatactgtgtcttggagaattttagaaaatgccagtgccatttgaggagaagctgttttaaaaggaataattagtttgctgtttgaacatgctgaatttgagctggtaaaggatacccagaaagatgtgttctgtaggtatttggatctggaacttcaaaaaagggtttatagttaagaatcaagagtcatcaggattgaattgtttgaaaccgtggaagtagatatgataatctaggaattcaagaagaaaagtgtggtctggtgcgatggctcatgctgggattacaggcgtgagccaccgcgcccggcctcagaagattcttaaatgggtaattaatattaataatcagggaaagattatctggcaagtagaaggtgacgagattccagtaagaggtatcagtttgcagatattaaagtaatcaagccagaaatgacatgggcccaaagtctcaaactaagtgatgaaaactcaaaatggaaatt

SEQ ID NO: 223618 - DNA, 859 bp, Homo sapiens
ccgcgtaaacctcaccctaaccgcgtaaacctcaccctaaccgcgcccggcctcagaagattcttaaatgggtaattaatattaataatcagggaaagattatctggcaagtagaaggtgacaagattccagtaagaggtatcagtttgcagatattaaagtaatcaagccagaaatgacatgggcccaaagtctcaaactaagtgatgaaaaatcaaaatggaaattaggagacaaaaagatgtattagaaacaagatacgtgactgattttgtgtgtgtggtaaaggagagggaagcatcaggatgacttccagatactgtgtcttggagaattttagaaaatgccagtgccatttgaggagaagctgttttaaaaggaataattagtttgctgtttgaacatgctgaatttgagctggtaaaggatacccagaaagatgtgttctgtaggtatttggatctggaacttcaaaaaagggtttatagttaagaatcaagagtcatcaggattgaattgtttgaaaccgtggaagtagatatgataatctaggaattcaagaagaaaagtgtggtctggtgcgatggctcatgctggtaatcccagcactttgggaggctgaggtgggggtatcgcttgagcccaggagtttgaggcaagcttgggcaacatgatgaaaccctgtctctacaaaaaataacaaagattagccgggtgtggtgatgcatgcctgtagtcccagctactcaggaggctgaggtggaaggatcatctgagtctaggaaattggggctgcagtgagccatgatcactccactgcaccccagcctgggtgacagagggagaccctgtctcaaaa

SEQ ID NO: 223619 - DNA, 363 bp, Homo sapiens
gcagtgttcgaggttttaaagataaaactgtgtccctgctttactcgtttgctttcttaaacattgctgtggaagctcttcctccacactgcgcctccattcccaagtgttttctctgctcccctggctcactagtctgaccaaccttttgactgtttcttcccattccctggaaagctcttaattggctggctctttcttgccactcagtttcagcacccatctcaccctgccagggggccttcccaggggagcaagggcagacgtcattgtccgcacttgagaaaggaataatgtatccgccggaaaacaacccagatctcctgagtcacagcccagtgctccttctgcacagatattaaa

SEQ ID NO: 223620 - DNA, 473 bp, Homo sapiens
ccaccttggcctcccaaagggctggaattatgggcgtgagccactgcacctggccagaaatgatttttttaatccatatatctatcagtatataatatcaaagtgtagagacaaaatgaaaacaaaagagaggaggcaaaaataaaaacctattgggaatgaaaatgtgtgcattcccatgtctattggttgatgctggtgtgtagactgagattgtaggtaaggccgttgaacagaacacttcatgcaccctcttcatgtggcttgggatttctcaagggattctagcacctggctgcctgtgatttgccccacttgacagagagtggagcagagacgaaccatccatgtgccaccctcctttaactgcagattcacatgcaaagtagatgatgatgtcttaagccactaaatttggggattatttgtcatacaggagttgatggttggaatagatacctagggaaaatgtt

SEQ ID NO: 223621 - DNA, 294 bp, Homo sapiens
gcacgagaaaaaaatccctggttaacagggaaaagagctatgtaaatagtataatgtgaaaagagctttagtagagatatgagaacacagctattttcaagagcagtggaaaataaggttaaataagtagagtagaccccaaatgatagccctttgatagcaagcagagaagttcagattgggtgtggcagcattttagtgggtcctctgggttcttaggtggggagagagacacgaggaaaacagaaggccaggatgaaggttttggagtaatctacacacaaagtaagagca

SEQ ID NO: 223622 - DNA, 501 bp, Homo sapiens
gagattcaagcttactgggtttgccttgccactgggactatttgtagttttacaggtggacacttcctaagctgtgtgtcataatggataagatgtatatttcataaccagagacagctgggaacaaatctaggccctattatttaccaactgagtgaccttgaagatgacttaacctaagaatcaggttttttttttcatgtaaaataatggacaatcatctatctgatagggttctttgaagattacatggtgtattggttggaaacccaaggcttaataattactagctgttgttgttgttagtattattcagctatgattccattgcctgttatttttctccaacattttattatgaaaagtttgaaacatatggaaaagttaaaataattggacaatgaacactcatgaacctaacatctaaattcaataaataatattttattatatttgatttgtcacatatatattcacctatccatcacttcatctatcttt

SEQ ID NO: 223623 - DNA, 469 bp, Homo sapiens
cgggaaatatttgcccaataagggagagtttgtccccacactgcggcagaacccccctgcgagctctgaccccagcagcacggccaagcccccccaaccccgctcccccctttaggggacaggtatttgtaaataacaactgagctggtcgtcggtaggagaatcagattagaaacatggtccccactctcttcctatctccccagcactcatcacctcacaaagcagggggggacctgtttacttttcctggcgctctcccccaggctagaacgtgatcttcttcctacgcagggacagtgttttattcatctttgtacccactgccatctcatctggcttggaacaggctccggataaatattttttaaatatgtgcatgaattaatgagagactcgagatttagtccccaaactctctgacctccctcgagtgactttaagcctttagagcccttatctgttaaga

SEQ ID NO: 223624 - DNA, 584 bp, Homo sapiens
gggattgggaatatgagaccagagggagcttatccctccccctagttccaacccaggcagagcccggttgctgacaaggctcatagtacccctggaagacagcagctgagcacataaaaaaatatctgcatgaaagtgaggttggggacagattcagagtttcctgcagctcccaatggcatagcagtgaaagtcctcacatctgtagatggcacagatctgaggtccagatgaacaccagctacgatccgggctgactaaaaaccgaagaccaggtggaacgattttcctggagatttggcaaccctctcctgacctccatgtgtggcaataagaaaactgcactgagtttatattcaatcctgaggcaagtgtgagtttggattttggatcatctgggagatgtcttttcgcctgaaactgagctattaaactgagaccgagtcctccatctcttccctctccacctggatgggtcaactttcaaggaacttaattacttttgtaacagaacaaaggctacggaaaatgtctgtaaaatttggaacacaggctatgaaattagaatccaagctctctgcaaa

SEQ ID NO: 223625 - DNA, 430 bp, Homo sapiens
tgggcttcccccatcccttttccaacatccccagactctgggacttttagggtatggcttaccatggggttcctgaaatccccacaccaaggccctgggcatgtgggatttggtgtgtctctgaggagctgactggccagctcggaccttggcttcccagtgaggggccctagggaataaccagccaagcaggcttcagggatgtggggtccacagaacctttcgctgaggtcgtgtcctgccaccaactacctgctagcatcccctctcagggcctcggattctccacccgtccagcaggaagattaagaatcttcctcctggactgttgtgagacaaagccctccgttaagtgcaaagtccaatgtggaggaaaaggcacagacccttgtgggaacacgtttagcccagcaggcgcctctgggagccc

SEQ ID NO: 223626 - DNA, 624 bp, Homo sapiens
gcacgaggaaaaacactaggaattcttacaattcagtaaggggaagaagacatataatcaattgaaaaaataggcaagagacccgagcaggcactttatggaagaggatatacaaatgacaaaaaaatgtaaaacatatagtcaactttattaataattatggcaatgcaaattaaaaccatagtagaaaagatagctgggcacagactccagaaaaatgaggacaaactggaatgcagctgcacctccgaatcttcctttcactgtctctgaacaaagaaaaccagtaatgtgtaatgcctaagccttcatttccaccttccagatctcccgccactttacttttggcaaactttaaccaggaaccatgtaaggaagagtctaagtaatttggttcacagtataaacaagtaaacggttgaacaagccagcacaatgagagtctactacacattcatcatatttgctaaaatttataaaaactgatggtaccaaagatccaggctgtggaatggctggaattctcatacattgctggtggtagtataaattgatagaactttatttggaaacttttgcttctttaacgtattaagttaaatacatataacctaatatccagca

SEQ ID NO: 223627 - DNA, 704 bp, Homo sapiens
ggttattataacaaactttgatgagtaatgataacatagggtattgtgggtgcacagtggtggccagagtatagtgtaggatcaaggaagatctctgctcaaaagaggtgatggagatctctaacctctctgatagttaaacagagacccaaagggataagcaggaattagacaggtgatgggagagagggcaaaaggcttgtgccaggtgagagaatagcataatcaaaggctaagtggtaagactaatcttgaggcatgagaagaactggaagaagttcactatgactggaggaggaggaatagaatggtaagatgaggctggagtgctatggggtcagatagtagaaggccttaaaagccttgttaaaggatttggatttcatcctaacatctgcagaaaactattgttagactttttagtggattacagtgattgatttttgagtttttgaagaattactcttgatgtcatctgcagagtggattggagaacaagattggaggcatttaggaagctgttagcatagttagcaagacagctggaccagaatagtattaataggaaaggagcaaagtgggtagatttgagagaatagaagttcaattgatagcatcttggtaattgataccatgttgggaagagattgaagaagaagtcgagagtcatgtccagattttgggcatgaaccaagctgttcatg

SEQ ID NO: 223628 - DNA, 579 bp, Homo sapiens
tgctagagtatccacctcgggaacgtgttatccacctcttctaacgacaaggtagagccgagagggcaaaaggcttgtgccaggtgagagaatagcataatcaaaggctaagtggtaagactaatcttgaggcatgagaagaactggaagaagttcactatgactggaggaggaggaatagaatggtaagatgaggctggagtgctatggggtcagatagtagaaggccttaaaagccttgttaaaggatttggatttcatcctaacatctgcagaaaactattgttagactttttagtggattacagtgattgatttttgagtttttgaagaattactcttgatgtcatctgcagagtggattggagaacaagattggaggcatttaggaagctgttagcatagttagcaagacagctggaccagaatagtattaataggaaaggagcaaagtgggtagatttgagagaatagaagttcaattgatagcatcttggtaattgataccatgttgggaagagattgaagaagaagtcgagagtcatgtccagattttgggcatgaaccaagctgttcatg

SEQ ID NO: 223629 - DNA, 644 bp, Homo sapiens
ctgggggcctctctcaaggacgagattttgaaggttacgccggtgcagaagcagacccgtgctggccagagcaccaggttcaaagcgtttgttgctatcggggactacaacggccacgtcggtctgggtgttaagtgctccaaggaagtggccaccaccatccgtaaggccatcatcctggccaagctctccattgtccccgtgcacagaggctactgggggaacaagatcggcaagccccacaccgtcccttgcaaggtgacaggccgctgcggctctgtgctggtgtgcctcatccctgcacccaggggcactggcattgtctcggcgcctgtgcccaagaagctgctcatgatggctggtatcgatgactgctacacctcagcccggggctgcaatgccaccctgggcaacttcgccaaggccacctttgatgccatctctaagacctacagctacctgacccccgacctctggaaggatactgtattcaccaagtctccctatcaggagttcactgaccacctcgtcaagacccacaccagagtctccgtgcagcggactcaggctccagctgtggctacaacatagggtttttatacaagaaaaataaagtgaattaagcgctgttaaaaaaataaaaa

SEQ ID NO: 223630 - DNA, 374 bp, Homo sapiens
ttttctcttcttcctaggttctgcccacaggggagattgtgacctattgctggccccaacaccaagtcgaagttacacatttgccttggccttgccctgagaaggtgctgtgacatattgctgggcccagcaccaaggtgatgggactctcctctttctcctggaacctgtccacagtggggattgtgacatattgctgggcccagcaccactgtgatgtgactctcctctcgtgcctggggccagcccactggggtaattgtgacatataactggacctagcccctaggttatgtgacttacctctccttcctgagccctgcccacaagggggcctcatgacatatctctggacccctcacctaggtgatgtg

SEQ ID NO: 223631 - DNA, 288 bp, Homo sapiens
gcgacggagtctccctctgtcaccaggctggagtgcagtggcgcagtctcagctgactgcaccctccacctcccaggagaatcacttgaactcaggaggcagagattgcagtgagccaagaccgtgccattgcactccagcctgggcaacaagagcaaaactctgtctcaaacaaaaaaaaacaaacaaacaaaaaagaaaagtgacggcatttacatcctaaatctgaagaatctaattctgttggcagcttgtaccattgttgccattgaaaacccttctgattct

SEQ ID NO: 223632 - DNA, 393 bp, Homo sapiens
tattaacatttttatctttacaataaaatcccttcttcagtccaaaagagcccaacgttaagctgagtataaatgtttagacttaccaagcagatacataaggaaatactttttaacattttttcttccaggccaggtgtggtagctcacacctgtaatcccagggaaggccgaagtgtggggatccctgtgcccagcctgggcaacatgacaaagccctatctctacaaaaatgtacaaaaattagccaggcatcatggcctgcacctgtggtcccagctactagagaggctgaggtgggaggatagtttgagaccgggaggtctaggcttcagtgagtcgtgatcgcgccactgcactccagcctgtgtgacaaagtgaaaccccatcaca

SEQ ID NO: 223633 - DNA, 413 bp, Homo sapiens
tttcatactataaatatacagtcggtcctctgtatctgtgggatttacaggtgtttattgaaccaaatataaatcaaaaatattcagagaaaaaatccacaaagtttcaaaaagcaaaactatgttgaatggacacaaatgaagctgtgtgtaggctgtatcaggaattataaataatcaagggatgatttcatgtacacaggaggatgtgcatgggttatttgcaaatgctgtgccatttcatgtaagaggcttgagcgtctgcagattgtgctatctgagtggagatcctgaaaccaatcacccacgaatagtgagggatgactgtatataatttttatttctcaattttaaatataaaacataaaaaaattacaataacaagataaaataaacaagtgttttatagtgtg

SEQ ID NO: 223634 - DNA, 830 bp, Homo sapiens
taactctacagtgcggccctgggtccactggtccatattctgacagataattaagaaagcagcagctttttctagacggctcttcctcatgatttgcattttagccagaggcgaccagttataaaaaaaacatgatggaaagatggtaagaagccaattagatggatggatggctgactgacagctctctggtattacgactccagatttcagactacatagcctggcagttttctacaagaaccaacttttttgcagaaggtcatacatatgctattggagagttcacagctagcccctcactactcaaattgtgggtgttattgccagactgcggagatgcacaagaattgacttgagaagcaaggagattattcatgttcctgcacactctgttatctctgggagctcttaatcaatgcagggtgagagccagttagcatgactgaggttagggtaaacgggctgttcagggaaagataaattaaaatgtgattattattcaaattggaatatagagaacataatccatgatggaagagaaggagaataatagaaataaataaaaatttacctactgaatcacttgctctattgaatctagtccttgaaattccaaagacattataatatgctatgactaaagggaatgatttgggagatttatactctatctttattggctcctgcagatatgctgaaatacaaattctcacatgctggaaatgtctactaaatgtaccttgatatacaaattaaattctcctatagaaaactgtactgtactcaaaaacctatatacaaataaaaagactaaattctaaataaca

SEQ ID NO: 223635 - DNA, 423 bp, Homo sapiens
ctaaacaggtttcccacatggagaagcaaataccctataaaaggtatttctttatctttttggcaactggcctaaaaaaaaaatttattgttttatcaatataacgcctgtgctttattaggtttttggttacttacgaaaactgagctttaaaaggattaaggcttttacatccatgtaactttctgcattgcttttaagatcttttgattatcagtatggttaaataagtaacttcacagtggccagcaattttgttttgatcaaatgttttgaacctttgacatctctggcaggtttccccagagtcaagatcctaaattaaggctttccaatctaaaattaactttgagattttctttttctttttttttgagatgtagtttcactcttgttgctcaggctggagcgcaatggtgcgat

SEQ ID NO: 223636 - DNA, 540 bp, Homo sapiens
ttgtacttagcaattctcctgtttgctcagagcaccaggcttttcagaaggggatcgttttgtccctcctgattgaaaagatcacagaatgctttaattttgtgaagcgctttgccaacatattcattttcccctaaactcttactttatgaaatctttgcaaattgtttcacacgtacagtctctgagaatgtgaaaatgattcagaaaagggaaagcctcacttaaaactactggaaaatgcaaatgaaagggaacaaagggaacatggccccactgtgccccacagaatgtaataatatgcctctggcctcttatttcagcaatttccaagtttttgtgattttaaacaacgtcccagcaaaatcctcctaaatacattgttgcttccttcagttaatttattcaatacatatttattgagtgtcttctgccaggcataaatgccaggtgtgcactgctgaatctaataggctggagtcctgctttcctggggtttattgcctcttcccagtagtcagtctggtggggaagttaact

SEQ ID NO: 223637 - DNA, 586 bp, Homo sapiens
ttgtcactagaggatcccgcctaagtggaactgccggaattccctctaggagacaaattatagagaactggtcttttccaaccactgattggatttctgtaaacattgtcttgcagataatgcatttgttttgcattgaaagtttggttgtgtgtgtggtatttgggaattgctggaagacgtatccccagttaggaatacaacttgcaaagttcggtctagggcgtgtagtcagagctctgtgatctcccttgaaagggtgtgattgtgagtgtagtaggtgccactggaatttattttctttttcggagaagtgaagggaccttatgaactggagtaacacccagatctctgcagcagttaagctgggggcctagaactagactagagctagaagaagggacaaatgcaatccgacctttggatctacacattcctcttgcttcaatgggtgtcatttaagaattagaggaaaatattaggagatggagaactagagttgaggaaaccaaaagaagaggagtcacagaaaaccagctctctctgtgcaaggcatcttgaaaggggaattccagagtcaaagaca

SEQ ID NO: 223638 - DNA, 431 bp, Homo sapiens
gtgccttagaaaatcaaattgagtgcctttaaccaagaaataagcaataatttgttgaaaaattctatcaaaatgaaaagtatgcctctttagagtatttttaagctcacctctgcaaacactgttaaagaaaggaaatttaccccagcacaaaggtgaaaatcttggcacaaagggggaaactaacaatacatgttccctgaaaaatatttttaattggctttcaaataagtgtccttacagagatgagccttccctcctccttccctcctggtatactggtgaggcaggaagcacagtaacttggagcatgactttcagagcttgcagaacttgtgcacaaatccaagctctgtgctattcaacaagttacttgttttttctatagtatggtcatatctctctcacacaacattgctgtagtatctaaa

SEQ ID NO: 223639 - DNA, 435 bp, Homo sapiens
aaatagactggaaagagtcattgttcaccttccctcagcatccctggctttccaaccccctggcatcctcctctggtgacacacaggacctgtctcaggaggagaggtcaggcagaggatttactttcaggaagggcaacaaatgtagactttaagttatggacaggcagttatcgtattggtaagtatgttgattccattactctgttaagattgtgtaaccctgttttggcaattccttgcttcaattcttgggagcttcaaacaatggaagaagtccagacccttgtcaagaccccagtcttccttttttttaaacttttaatttttgtgggtacatagtaggtataggccccaggattcttaagtgggaaagtgaaaaaagccttcctggccagggcactccccagaaaaatcatacttcttaaggaaaaa

SEQ ID NO: 223640 - DNA, 507 bp, Homo sapiens
gccatgtgaagtagtgttatctatgtcacatagctttcttgataggcccaaatatagtaaagcctgcttttctgttgaagtctgtgaatatagagaaaacataaaaaggtgacacatgagtaaaattataaatattttatactttgtgggatgctagtgggaaaagcagactagggagtgaaatttgatacgtctaagctactcaaagataagtctgagaagcatgaaaacagtctttgttgcaatattgtaacattataaggaaaaacatcttggattgcagagaaatagaaagatgcagagaagtgggaaaaaaaagtagtgaagaagtagagggagagaagtgagctttcaataggactgaattgagtgtaaaccacttttgatccatttgaatcatgaacttcagaatatataattatcttcctttaaaggctgatgctacttcacaggtttttactgctgtaaggtgccattccaatgagaagtagacccagtagtcaaata

SEQ ID NO: 223641 - DNA, 560 bp, Homo sapiens
cagattttggggcagcacagagacaatcttaaagagcccaactaatatagaattatccaggaataaatggtaatatagcaaattgggcttttattgaatggttctcatttaaggctgttagcacatcaaacagtgatatgaaaaatgacatgccaatttgaccttgggaataaaagagtaagtgtaagcaacacttgtcacactgacagtcttggcagatagtgttttgatttgccagccgccctactccagacagtttcagaaagttccatgtgcctggaagacatttggacaaagcctaattcttccgtctttccctgtcttctatgtttttctatcaagcaggaatcaagacttacatttactccagtaatggggtcaacccaatgtactaatagactccataattccaggttggagtttgttgagatcagagtttcattatggcctttctcactggttctctgactggcaaaagcaaagccatgtctctgagcttggcccaagattcaaccaggtatgttcctcctcctctctgaggatcagcatctgagacctgt

SEQ ID NO: 223642 - DNA, 675 bp, Homo sapiens
ccagcacaagatccactactgccatgtattgcactaagtggaaactggtcaggttgtggggtcccaatcagcctgtgagcttcagaaggcaggcattgtgtctcatggacctagcccaaaacagaagtgtctatggaaatagtgcgatgacctgagtaaaatatgggtggaatgtgacataggcatttaagaaatctatatattgacatacaaaaaacagtttattaaaaggttgtgtaggtagaaggcaaaggctggaaattttaactttttccaaaataataattaacattttatattttagcaacaaaatgtggccgggtgtggtggctcacgcctgtaatcccggcactttgggaggccgaggcaggcggatcacgaggtcaggagatcaacaccatcctggccaccctggtgaaaccccatctctactaaaaatacaaaaattaccaggaaaaaatacggaacgcttcacgaatttgcatgtcatccctgcgcaggggccatgctaatcttctctgtatcgttccaattttagtatatgtgctgcgaaagtgagcacctgagaggccatttttatttaacttgagagatctcagaaaaatgccttttcctttagttttatatacctgacacaaaattgaaaaagctatctccagtcgggcctggtggctc

SEQ ID NO: 223643 - DNA, 419 bp, Homo sapiens
aaaaatgactccagacattgccaaatgtcccctggaggacaaaatggcctctggttgaaaactattgctctaaagtaacctacactgtaatggtttaagccatgggagtgaaaagcagttactagccagttcgtggaagccactagatggcctaaggcagggataagccattgttcagaagtaggatgctaagtcaccgatgtactgagcctgggttttggcaagagtggacagtggcagcccagcatggacccctagcacaagaatagccttccctcctccaaaacctgtttctgaaatgctttgtcccaggacttctctacattcttaaaaatgattaagaatcccaaatagattttctttatgtgtgttacatctattcatatttaccacatcagaaattaaaactgaaaaattgt

SEQ ID NO: 223644 - DNA, 262 bp, Homo sapiens
agtgtcttttccccttcaaaaaaggtgtagttgccacaccagccaagaaagcagatgtcactccaggcaaaaaggcagcagcaacacctgccaagaagacagttacaccagctgcgtttcacttccgagtgaaaccagctgagggtccaccttcatcaggaagtctgactttcatgacaccccggctctcattacccataccacccaccttctcatttagtcttttttttttttttttaaggtttgaggggaaaagacccgg

SEQ ID NO: 223645 - DNA, 502 bp, Homo sapiens
atatatatgtatatgttgatcagatgtaaatgtggaatgtaaatggagatcttttccttctcactgatcccatcaataccatttgaaacatacttataagcagtggtggtagatagtattaaggaaaaaatatctgtgtctgatttaaatcctcaggtggcagcttaaacgagctgcctcgtgtgtgtacacatagatatgtgtttgtatgtgtgtgagtttcagcagagatagagaacatcaggtgagcagccttgatttataattctggctatacatcctactgtacctctgtcaagggggtaatgagagaaaagatggaatcagtaacctaaagtttaggaataatcacatgttgcatgggctcctgcctgagtgtagagatggaatagtctgtacgtgtatgtgtgatcggtgacacccaggtttgctcaatgtcattttggctgctttgaacatcagaatcccttttaaaataaatgtttgcttattatgaaattga

SEQ ID NO: 223646 - DNA, 420 bp, Homo sapiens
gaacatgacaaggatccatcagcagctgaatggagaaacagaacgtgtccagccacaaaatggaaaattatttccagccttaaaaaggaaggaaatgttgatagacgcgcatggatgaaccttgagggcatcatgctaaaggcaagaagccagtcaggatagagattgtaggattctccctccgtgaggccctagagcagtcagattcccagagacagaaactagaatggtgggtgccacggctgagggagggagaagcggggagtgaggtctgctttggaaagatgaaaaagttctggagatggccagtggtgatagttgtacaacaatgtaaatgtacttaatgtcacagaactgtctgtttttaaatggttaaagtggtaaattttatgtgtattttaccaaacttttaaaaacaca

SEQ ID NO: 223647 - DNA, 424 bp, Homo sapiens
caacttagtgatgttgagattggggctaggcctgcagtaatcctctgaaatatgtatgtgcaccccaaaaacatgtcattgagatgggtagacacctgcaagaggagtgcttttaaaacgtttttacatgaagatgctttctacttcagtgagacttttgccagtggtgttagaagttgctgtgaaaaccaagataaggagccactgtgtttttgatttgttctagggatttaatatccctcatagttaatcactcaggcaattactgggttaacaatatgtcctgaagaagagtagtttttgagccatgttctttgaatcactaagattcttcaaaactgctttagagtttcccatgaacatttggatcacattaaagcaggctcattatttccatcttcatgtccatgtaaatgaggttgag

SEQ ID NO: 223648 - DNA, 509 bp, Homo sapiens
aaaaaaaaaaaaaaaagcatccaacccaaggccaggcagagaaggaaccagtggaatagaaacacagactcaatctcctccttctttactttcctgccagtgtctcccactggacaaccccaaccagaagttagaaggtgaaggaatgcagttgacacactccatagaagtcagcctcctggagcatacagctattggaaactggatctctagggacaaataggacatatctagaaaaaaaatgatggaggcctctaggaactgaggtcagcctctggccagcagcctgcaaggagctgaggcccagagttcaacagccctggggaaactgatgtgccaacagccacgtgagtttgtaagcagatcattccccagtcaagcctcagatgaaacacagtaccagctgacacttggaatctttatgagaccctgaggcacaggattcagctaagttgtgcccagattcctgacacaaactaagctaataagtgtgtgtaattttagccaaa

SEQ ID NO: 223649 - DNA, 255 bp, Homo sapiens
ctagtctatgtgtacatcccagcacggtaccttccctgggagttatttatgatgcagattcctttactcacatgttttcctgctgaccttctccccatcatcaccctgttcacgctgttctcctgccgcactccccgtatggagatagtgaaaatagtcatcaataaatactgagggaacccagagaccggtgccggtgcaggtcctcgcgtgctgagtgtgccggtcccctgggctcactgttctttctctgca

SEQ ID NO: 223650 - DNA, 339 bp, Homo sapiens
atataattttttttctaaagcagaaacaagaagctgggcaccatggtggtgcacacctgtagtccccactacttgagaggctggggtgggaggattccttgtgcccaggagtttaaagctgcagtaagctatgatcaagccactacactccacccacaccctgggtgacagggtgaaacacttgtctctaaaacaaaaaaagaaaagaaaaaggaaaaagaaaaaaaccagaaaatgaaaaacaagtaaatgagtagaattaatttgcatacattgcaggaaaccacaatgatagcttttactaaagatagaaacattctttctttggactaattcatt

SEQ ID NO: 223651 - DNA, 383 bp, Homo sapiens
gaatcctagactataaacaaacaagcaaacaaacaaacaagatatcagatattaattgaggacccactgttcagtcttgttgaaaacttggcacacatgcttgaggagtttaatagggatcttgtccagtagggcgatgaaagaacactattgtgtgattgtcagatttcttgaagtagtactgaattactactgttcactcttttccttagaagacatctcaatggttgaatagagagtcttaaggcagcgaggtgatccttgtcaaactatgagagtttcaatccttatgagtaatatagctctaataattttgccattcagcttatttacagagtaatctagagaggctacaccaacctggcatggtaaatgttgtcttc

SEQ ID NO: 223652 - DNA, 426 bp, Homo sapiens
tatttttaaagcttcaatttttgtactaagaaaatgtataaagaaaaaagcgagactggataaaccttcagctaagaaactaagactttgcatctgatttacttaagtattaattaaacatcaatttacttaaaagcacaaaacacaacttaattggcagtagtgaaactggggaaagatacaaaaccagactgttgtcttggtaggttatgtgaaattaattacagtgaatcactgggattatctgtacatttccatatatctgagtgatattacttcctgatagcattcaagtattaggacaacatcaaagctctgtaaacactcattaccctggtttaaatctacaatatgatgttgaaatggtggtccttgaacattttagttcacctaacactggtcattaatctactcagtctatgccca

SEQ ID NO: 223653 - DNA, 521 bp, Homo sapiens
ttctgcagccaagttcattgtcaagtctctggcacatggacttaagctgtgctcagttttggcagggtagttgtaacccggaactatggtcatttggttttaaaaacctgttgtaagcctgagcaccagtgtggagttggctaaaccccactccaagactggatggtagccttggagattaaatcctaaatactccaacaaatgctctgtgaactggaagcctcactggtccatagctaaagagaaggcaggaaagagccacgataaccatcagcccatgagggaggattcaggaagccaactaaggatccgggactactacgtcatttttaggaatttcaaatcaacagtcgcctcctctgggtgtggcacagcgccaggctccctggagaatgaatgagagtagctaattgcagttgctgtcagttctgggctgtgctgtccgggactgagccactagccacatgctgttatttaaatttaaatttaaatcaattaataaaatgtaaaagtcaactgct

SEQ ID NO: 223654 - DNA, 252 bp, Homo sapiens
agcaatcaataaatttacaggaaaggacatcttatgcactgggttacgttgtttagaaagccccagagcactgaacaggtaacaggaactttatcggatcaaagtacactgacttactgcactagttctttccaaatgctacttttatagtagtatctggaatcattctagctaacttccttcaaccagactctgtgagacagatcattctacctttttttttttttttttttggtgagatggagtctcgct

SEQ ID NO: 223655 - DNA, 1189 bp, Homo sapiens
catcaggaatctacaaaggtgttaaaagagctgataaatcttatatgacagtttggttctaaaagcagcacttaaggcaaaaaactgttcacagatggttaaattttttccataaagtagacacagtttgctgtgtacagccctgtacagtacgcacacacagtgcatacagagagcctgtacgtcatgcagtaaaccacgacagctacaaatcggtctgctcctgagaggctactgcatggctttccaatttgtgtgtattcataaattaggtgaggaatgtgactttttgactcaaaataggcaaaaggaagttgtaactgggtgtcaagagacaccagccctgagtgagcagcgcagactgagaacaggtccgagaatgactggagattctatcttgagagtgtctggcattgcctttcacaggagcgatgggcaagtgaaacttactacctggctttaggctcctggggtcctgaattatctacttcattgtaatgaaggcatcagaatgtaacttaatctcacaggagtggcatccctacttttggaaggccccctgatagaaactgtattcaaaaataccattccaaagtggagatctatgatttctcttctcatctctgtttggtgttgtccgatcttctgtaaataactgatcagtgcctcaaaattgtctttattctgtccttataccctccattaacctttcaatctctccccagcaatgtaagccatccctgcttacctgcccagctcccacagcttgtccctcgaacgcacctgcaggaggctgtgacccatgcagtggcaatgcggctagctgtgtccatggcctgtggaaatatgccagcccagcagaacagctggaatcctacactattaatatggttatgttttccaagcaagtactgctcaatttatacaagttaaatgcacatctgtgatttgatagcacagctgagaactgttataacatctaacaattaaatgacagtaacagtatatgacaaattaggggaaagaaccacaacttcaaaaggatagtttccttttaagaagaaactaacatgaaaaaagactgacatccaccccaaaaaacaggcaaataccacattaagtaatttaccaaaaacaagaaaagcaaatggataataaatatatggaaatattcaagctcacaatttat

SEQ ID NO: 223656 - DNA, 496 bp, Homo sapiens
atgcttgaaaagtatctaagttccaatttgcacatctgtaaaatgggtatggaacgtaccacataatactgtgaagaagatcagataaaacaataaataccaaacacacagtgcacgtcatgtggtaatcattcagtgcactttagatattattacatttgctactagattcctccttgtaaaacacaatacatatatatccattagagctcttatgaagatattattatggtcaatattaaatccagctaataccctgtgatctggtggtacagattttataagccatgaagtaagttatctaacaaacagcctttttaaaccaggttaaaaaatagctttataaaaataagtttttaataaatgaagatatatgtttttaatgttttaatttaacagtatattaagagatcaaacatattttgtctgacttgtaaatcctgtgaagttttgttgtagcacatttaaaaactattattaagaacaattattgttt

SEQ ID NO: 223657 - DNA, 511 bp, Homo sapiens
cagacacaattcttcgtgctcatgatcactgggatagaatacccactttttattgagcacctactagatgcccaaaactgtctgatcattttacatgtgttatctagtcattttgcaggcaccattattaacacacaaggagagagatactattctcatccacactttacagatgatataactggcactcactaaagttaagaaatttgttcagaatcccatagtttttaagagcggagctaagaattaaactgtcatctctcttcaacttcaacctcaaaatccaaaaatgacacaaacaccaataatggcatgtattagtgcatcattatgagatgagtatttgggaacaagtgaggagaacacttagtacttttcagggacacccacacactaccgactgcccgctcagattatcactttgcccggaaactcagaggtcccataatgatgggcaaatgagttggggtggtctcagaaccctgaaatgatcacatgcatcagaagtaca

SEQ ID NO: 223658 - DNA, 441 bp, Homo sapiens
ttatatcttatgagtctgttaggttaaaaaaaaaattatcctttttttgctatttctgttctcaatacttgaaaaatagaattttgtgtgcctcaatctaaaaggagaatcatcgagagaatctcattctgtactgcataagctacgaaagacttcaaaattccagaggaaaacagacaaaaactctttgcttattaatgtacacacctccattttcctaaagttgcataactagccgaattaggaaaatgctgtaaacattgcatcactgttgacattgaacattgcatagctagaaagaaaggcatatatgtaatttttttcgtttactatttcaatagtctgagtctcagtggcaaatgaaaatacaattgaatctcaagtgaatggccagaaacaccgtatattttatgaaatatggcagcataatgaataggaggt

SEQ ID NO: 223659 - DNA, 117 bp, Homo sapiens
catcgcaggtgctgtcctgtgcttaggttggacactgagcagcatctctggcctctaggtactcactagatgccaggagcactcccctcccttgagttgtgacaagcaaaaatgtct

SEQ ID NO: 223660 - DNA, 556 bp, Homo sapiens
cgacatcactgaggtacagccagttgcatttcactaggctcaagaggattgctgcctcaagcaggataaccaggcctgcctggaacagtgccatagtccgggatcccagtgacctgggtgagaagttgctattcaggtcaaagaaaatttcttcaggtgaccccactgtctctagccaatagtcctgcttgtggatcttacgtatttgtgtttcaaaactacctgaggtcctgatgtggggtccttacctcctgtgcacagtgactcatgcctgtaatttgagtactttgggagtgtagacagaaggaaaacttgaggccagaacttggacacccggctgggcaacaaagtgagactccatctctacaaagtaataataatatataaaactaaaaaattagcacagtccaatgtcacaggcctgtacttccagctactcgggagactgaggtaggaggtgcccatgaccccaggaagtcaaggttgtagtgagctatgattgtgccactgcactccagcctggatgtcacaggttgattccctgtctttaaaaaaa

SEQ ID NO: 223661 - DNA, 570 bp, Homo sapiens
cttatcatacccatcttggcagctccaaaactttgcatagcacccggcctaaaaactacagtatcatagtacacagtagaagttcaattagtatcaatggtatagaacatcactttccattttctcctctcctccttgatatgatgatcataaaatattagatttcgtgggaacttcagagattatctgctccattatactagtcaatgtagaaattctctgtcaagaaggttttattgtatattcgaacatctccagtggtgggatgctcactacctcttaatccagcatggtccatttcgaaccactcaatcttcaatgaaaaattcttctacattaagctgattattatctccctataacttttacttattggtcctatttctctctgctgcacacacacttggagttatccaaaataagtctgattgtcctccatatggccatcctgaagtacttgaaaacaactgtcatgtcccatttaatattcttttttctcaaattgggccattccatgctaaattagacttcaacggtttctcatataacaggctttctaggccattcctc

SEQ ID NO: 223662 - DNA, 434 bp, Homo sapiens
aagtacctagttctactgggcatgcctagattcccagctactcaggaggccgaaacaggaggatagcttgaacccagaagtttgaatccagcctgacaacatagtaagaccccatctcttaaaaaaaaaaagagtacctagttcttggcaaaaagtgttgggattacaggcgtgagccactgtgcctggcctctctctgcttctggccccttctttgggtccttcctcctttctctcttcatctctcttttgtttttgtttttgagacagggtcgcccaggctggaatgcagtagtgcgatcatagctcactgcagccccaaccttcccaggctgaggcaggagaatcacttgaacccgggaggtagaggctgcagtgagccgagatcacgccactgcactccagcctgggcaacagagtgagactccatctca

SEQ ID NO: 223663 - DNA, 438 bp, Homo sapiens
aacaggttgtcatgctcagagcagcagaagctgaggcgtaacagtgaaagccacgtgaatgtcatctgggaaaaacacggatggccaattcgtaattctttaaaagtcttaaaaaacatggcaccaggctgggcgcggtggctcacgcctgtaatcctagtgctttgggaggctaaggcaggcagatcaggaggtcaggagtttgagaccagcctggccaacatggtgaaaccccgtctctactaaaaatacaaaaattagccaggcgtggtggtgtatgcctgtaatcccagctactcaggaggctgaggcaggaaaattgcttgaacctgggaagtggagcttgcagtgagctgagatcacgccaccgcactccagcctggacaacagagcaaggctctgtctcttaaaaacaaacaaacaaacaaacaaacaaaa

SEQ ID NO: 223664 - DNA, 212 bp, Homo sapiens
gtgcagatactggcgtgagaatcgcagcacagtacatgcaggaagatgaccatctttcccagagcataaaccacagcaatgggtggcagggctgacagacccagctccaccctccccagtgccagcctactatccccagctgccccacctggcaacccttgaagagcagacttccctacctggcagcactaaaccagtttcaggggaaacag

SEQ ID NO: 223665 - DNA, 234 bp, Homo sapiens
cagcactcagaagaaaccagccctgctgacacttcgagttcagacttttagcttccagaactgtgagactatacggttttgttgtttaagacccccggtttgtagtactttgttacagcagtcctagccaatgaatacaggtatattatgaggactttagtcttttacttcttttttctttacaagttttttaaatagaaaagtagaagtaagaaaataaagcagaaaaaaatg

SEQ ID NO: 223666 - DNA, 289 bp, Homo sapiens
  misc_feature (216)..(216): n is a, c, g, or t
  misc_feature (223)..(223): n is a, c, g, or t
cagcactcagaagaaaccagccctgctgacacttcgagttcagacttttagcttccagaactgtgagactatacggttttgttgtttaagacccccggtttgtagtactttgttacagcagtcctagccaatgaatacaggtatattatgaggactttagtcttttacttcttttttctttacaagttttttaaatagggtagtacaagtcaaggnatagggnctgttcgcaaccagggctttttttttttttttttttctccccccccccccccccccccctcccccc

SEQ ID NO: 223667 - DNA, 395 bp, Homo sapiens
taatgggatgttgctgatttgtttcagggtctgaacttgctattagtaggaagctcttggtgaactttggttaggtgcacaggcaaataccaagtgccttgtttttctcataatatttctaagggagttttatttcccttatgtccctctaccaaatgctggtttgatccttattttttttggacaactttattgagatataatttatatattgtatacactagccatttagtactttactgttttttgagacacagtttcactctgtctcctacagccttgaccttccccagctgaggtgggaggatggcttgagcccgggagttcgaggctgcaatgagctataattgcactattacactctagcctaggcaacaaagcaagaccctgtctta

SEQ ID NO: 223668 - DNA, 782 bp, Homo sapiens
tagtatgtttgttgaaaagaattcagatagtactgaaatgcacaaagtaagtctcccatcactcttctgccagtccccctctcctcaggtaatcatcgttaacatttaggggcaatgctttcaccatttcttcttcctccatctggaaattgtggtaagcagaggtcagaaagagaagcctgttggagagtccctggccagtgcaggggggcatgtaaagatgtccctatgttcgctgtgttgaggaaaaagcccaaacgagccgtgcattggtggttctgattcatatggttctgtataggaagctatttggaagtaaagttttctgtaaaccatggtaattatttatcactgtctctcacaccaaggaattcttgatgcttgggagacagagaagccgtaaggccgtgttgcattcccatgagctccttttagcattgtgtttgttctgctgagttggtggcagatcactgtagaaagtgactatggatcagccgggcgtggtggctcacgcctgtaatcccagcactttgggaggccgaggcgggaggatcatgaggttaggagatcaagaccatcctggctaaccggctaacacggtgaaaccccatctctactaaaaatacaaaaaattagccgggcgtggtagtgagtgcctgcagtcccagttacttgggaggctgaggcaggagaatggcatgaacctgggaggtggaggttgcagtgagctcagatcgcatgactgcactccagcctgggtgacagagcgagactccgtctca

SEQ ID NO: 223669 - DNA, 853 bp, Homo sapiens
ctccccaagtactgggattacaggtgaaccactgctcccaacctttaatgacattttctgataaggtcttttataatatggcttcttctaacctttcggttttatgttccgtctcttcctcctcctctcctctaccctcttcctctcaccctcacccccaaacacacactcaaaataaagttccagccattctttatttccctaaactctggtaaagttagtgtatcttctccagcccttcacacatactgtttcctctgcttagaacacttcctctcccatttgatctgagttctcttcaggtcaaagcttagctatcatttcctctgggaaaacatttttgagcctgcaagtgtaaatgaggtattcctcctatgtgatgaacttccattattataatatttattaacctgcattacagatgcctgtcctatttactttatttaacagtaggctgtaatctctgtgagggtagggattgtattgccctatgtatgattgtaccccagaatgaaagaatgaatactagtactcatattatttcaacaaatttgtgtttctcataggttgaaggaactctgtgtgatacagagttgaacataagttcttttattcaggtaacttcaaatctaatggaggagaaataggttacctcataccttgccctactccacatgacctcttaatagtaggaacttcaaaccaaatggtatgatcatacctggtcaaaaccaagctgaaaataaaacctagaaatactgctggcctgtttctgaagcagctaaggattagactgtatcttctctttctcatattagtcaagagtaagctgtgataatgtatagccggggat

SEQ ID NO: 223670 - DNA, 683 bp, Homo sapiens
acttgtcttctgcgtcactcacgctgggagctgtagactggagctgttcctattcggccatcttggaacctcctctgcctatagttctttaaaaaaaaaaatttcaggcagggcatgttggctcatgcctgtaataccagtgtagcaggacaagctgcatacaaaacccctcagacaccgagttaaagaaggaagggctttattcagtcaggagctacagcaagactcacgtctccaaaaactgagctccccgagtgagcaattcctgtccttttaagggcttaaaactctaaacaggtccacgtgagggggtcgtgatcgattgagcaagcaggaggtacgtgactgagggctgcatgcaccagtaaacagaacggaacagaacaggacagagattttcacaatgcttttccataccatgtctggaatctatacataacataactggttaggtcatgagttgatctttaaccagacccagggtgcagcacagcccgtggatttaatttctgccttttagtttttacttctttctttggaggcagaaattgggcataagacaacatgaggggtggtctcctcccttaccagcactttggaaggctgaggcaggtggatcacctgaggtcaggagtttgagacgagcctggccgatatggtgaaactctgtctctactaaaaat

SEQ ID NO: 223671 - DNA, 501 bp, Homo sapiens
  misc_feature (53)..(53): n is a, c, g, or t
tagtactacccgcagaatggctctagtgcatccccaaacaccacatctggganaaggaaatagtacaatggaaagtctatccttggacctactatttgtcattccccatggcatgatggaatatctaaaataaaaagagttgctttggagaaggattgcaaaatattatttcatagaagagatttagaagaggggaaactcccaattacataaggtgggcattatagcttctcaaaacattggttccctatatgggtcatgaagattgatcccagtatcagcctatggcttactaggccagtttaactgaaagatttaatgagcttggaaggatgctgccacctgcactctcactttggcgggtgtttatcaccagtgagtgcggtccctaaaggagcaaaaggacaataagcacccagtggacaacagtgtggcattttgagtgaagatagcaactgaaaaggtcatcggcttggctagattgggctgggcttgtttttt

SEQ ID NO: 223672 - DNA, 1783 bp, Homo sapiens
gtgaaatggagtctcactcaggctggagtggcacgatcttagcccactgcaatctccgcctccgaggttccagcctccccagtagttgggattacaagtggcactaccacacccagctaattttcgtatttttagtagagatggggtttcaccatgttggccaggctggtcttgaactcctgacctcaagtgatctgcctgccttcggcctcccaaagtgctgggattacaggcgttagccactgtgcctgagtcaaatacattcctaatgaatccccaggagacctttgctcacatcttctgtcaccttatcctggctcttgcctcatttttcttttctagagtcatcctagggaatttcttgccctcactgaccttcctccatttctttccccaccttgatgagtttcagtaggtcttttttgctttctctcgtcctaagccatttgtctctaacaagtccccatctgaaagttttattgtgaatgagtgaatgaaaccttagagagtgttgcgagttacattcatgttgcccttggatataaaaagagaggcagatgcatttgcttttggggtcttagtcgtgaatcctttgcctaggccaatgtccagaaaagtttttcctggttatactgtagaaatgtcatggtttcgggtcttagatttaagtcattgttctattttgagttgatttttgtataaggtaagagagatggattcagtttcattcttctacatgtgggctatctacttttcccagcaccatttattaagtaggatgttgtttccccagtttatatttttgtgtgcttagttaacgatcagttggttgtaaatagttggctgtatttctgggttctctattctgttccattggtctatgtgtctacttttataccagtaccacgggtacactaaaatctcagacttcaccactatacaattcatccatgtaaccaaaaaccacttttaccccaaaagttactgaaataagtatttttaaagattttaaaaaatagagaggaaagaggaggctatgaaattccataatggagttacagatgcttgacataatttagtggatattggatttagacttacatgaatgaggcaaacctgagatctgtgatatttgtaaatgaagataggagtgaacttactgcccttaggagtggagggagggaaggaagggagaaaatgagagatgccataaaatctattacttcaatggatttgaagtaatcctttgaagcaggcagtgagacttacttcataaatccatacctttttaatgtggattggagagaagttgttgcgctgtaatacctctgttgctactgtgagagtcattgccagccactattctcatgtcaagctgcccttgaggaggtttctcttgacccaatttagaaacaaccaaaacaaggtttgtaacttagaggaattcttgattctgtgacaaggggtctgtgaccctcttaaagggatcaagtacacaggagaatagtaccaagtaggtactaaaataagccaggtttaacaaatggcctagggacgatgagaccggaccgggcccaatgggtccaaggctccccaaaaccccattctggcttaggaactggtccagggaagctatccgggaccaatattgtcctccctggctgaggaactcacacaaagagctgctttgcgaaggggccatttccgaagaattcaggggaacccctcacgggggagtccaggcctgtggaacaccatctgattggcaaaaggggccacacgg

SEQ ID NO: 223673 - DNA, 1544 bp, Homo sapiens
gtgaaatggagtctcactcaggctggagtggcacgatcttagcccactgcaatctccgcctccgaggttccagcctccccagtagttgggattacaagtggcactaccacacccagctaattttcgtatttttagtagagatggggtttcaccatgttggccaggctggtcttgaactcctgacctcaagtgatctgcctgccttcggcctcccaaagtgctgggattacaggcgttagccactgtgcctgagtcaaatacattcctaatgaatccccaggagacctttgctcacatcttctgtcaccttatcctggctcttgcctcatttttcttttctagagtcatcctagggaatttcttgccctcactgaccttcctccatttctttccccaccttgatgagtttcagtaggtcttttttgctttctctcgtcctaagccatttgtctctaacaagtccccatctgaaagttttattgtgaatgagtgaatgaaaccttagagagtgttgcgagttacattcatgttgcccttggatataaaaagagaggcagatgcatttgcttttggggtcttagtcgtgaatcctttgcctaggccaatgtccagaaaagtttttcctggttatactgtagaaatgtcatggtttcgggtcttagatttaagtcattgttctattttgagttgatttttgtataaggtaagagagatggattcagtttcattcttctacatgtgggctatctacttttcccagcaccatttattaagtaggatgttgtttccccagtttatatttttgtgtgcttagttaacgatcagttggttgtaaatagttggctgtatttctgggttctctattctgttccattggtctatgtgtctacttttataccagtaccacgggtacactaaaatctcagacttcaccactatacaattcatccatgtaaccaaaaaccacttttaccccaaaagttactgaaataagtatttttaaagattttaaaaaatagagaggaaagaggaggctatgaaattccataatggagttacagatgcttgacataatttagtggatattggatttagaaaggaaatagtacaatggaaagtctatccttggacctactatttgtcattccccatggcatgatggaatatctaaaataaaaagagttgctttggagaaggattgcaaaatattatttcatagaagagatttagaagaggggaaactcccaattacataaggtgggcattatagcttctcaaaacattggttccctatatgggtcatgaagattgatcccagtatcagcctatggcttactaggccagtttaactgaaagatttaatgagcttggaaggatgctgccacctgcactctcactttggcgggtgtttatcaccagtgagtgcggtccctaaaggagcaaaaggacaataagcacccagtggacaacagtgtggcattttgagtgaagatagcaactgaaaaggtcatcggcttggctagattgggctgggcttgtttttt

SEQ ID NO: 223674 - DNA, 303 bp, Homo sapiens
caacctctgcctcctgagttcaagcaattctactgcctcagtctctcaagtagctgggactataagcacatggcaccacacccagctaattttcgtatttttagtagagatggggtttcaccatgttggccaggctggtcttgaactcctgacctcaagtgatctgcctgccttcggcctcccaaagtgctgggattacaggcgttagccactgtgcctgagtcaaatacattcctaatgaatccccaggagacctttgctcacatcttctgtcaccttatcctggctcttgcctcatttttc

SEQ ID NO: 223675 - DNA, 126 bp, Homo sapiens
aaccacatatcattgtggagttttatttttaacttcttcagccagctgagttttatgcaccagcttcttttctttggtttatacattgtaccacctgaaaaaccagcggtaatatctatgctgctg

SEQ ID NO: 223676 - DNA, 268 bp, Homo sapiens
gccaagattgtgccactgcactccagcctgccaacagaatgagattctgtctaaaaaaaaaaagaaagaaagaaagaaagaaaaagaattcctgttgcaaaaactgaacaaaatcccacagggacatgtgcagtaataccagctaccacgtgttgacagcttatatgccaggcgctgtgcttaacaccttatgtatgttatctcacttaatcctcccaacatctctttgaggtagatactattattatccccattttacagatgagga

SEQ ID NO: 223677 - DNA, 545 bp, Homo sapiens
tttataaaataattacatattattttgaataacttcacagaatcagtggcaagcagagacttcttcaaaaacatttggaatacggaagtagagattgatgggctttgctttagtctctgaaataatcatatttttctgaaatggatggttaaatttatcatattgttctagacacttggagtgtaataatgaacaagagagaaaattgcctgcccttgtggagcttacattctaatgtcacacacactttgtgcattttagattgttaggggaggagattttttaatgaaactttaaaacctagctgctttcttgtcttaggaactacagtttgaaagagcctacagaagtttgagaaggaggaaggtgtttaccagttggcagtgataggaaagaaagatcttagtttatttcttatttgtaccttttgttattgtcatgaaactttctccatatatttcagttggtaattttaacagatagggatttttttcatgattttaataatgtctttgaaattaataaaacgttgctttatattaaaa

SEQ ID NO: 223678 - DNA, 450 bp, Homo sapiens
agataaggttcatcaggcccttccagctccccaggctccctgaagtcctgggtctaggccaggcattgtccccctgcttcctggaaaccctcattttccttgtctgtaatatgaagtcagcattggccccgccccccaccccctaccatctcccaatggaggggaggttgcaggggagagctgccgccagcccactcctgaggcaccaccacagtcagcatcgacaggggcacagcagtggcagtttgggacctccctgtgcctctcagcactcccttccccacccccatagcccaaggacaaggctaccacagaaggttaccacaggacctgggcttcgtctccaggggacaaggagacactgtcagcctggtgttcaccaggcctggtagatgagatggcttgtctcatccacaccacagaaggaaataaaccatgtggcttaaattt

SEQ ID NO: 223679 - DNA, 199 bp, Homo sapiens
aataatgatataaaattgaatactattcaatagtaaaaagaaatgaaacactgaatccgattatctcaatcaatcaacatggccagatctcaaaaaaagacagtgaaaaaattacagaatgacacatggcacaataccatgaaaatgatactacaaatgtaatttttagaatacatacatttagaaaaagaaaaaatat

SEQ ID NO: 223680 - DNA, 485 bp, Homo sapiens
tgtagaaatgggatctagctatgttgcccaggctgctcttgaactcctgggctcaagccatcttcttgcctcagcctcccaaagtgctgggattacgggcgtgagccaccacgcctggcatgttttttcttcagcagaggaaaaaaatcataatgtatcaggctctgaagccccagatcccggggatgggagtcctgggcggccagaggagagttttagccgtaacctggcgattgcaacgtgcctccggaggcagggaaagggcccaggttggcaccgtggggagaggtggggtctggggaggacctggcagccagccccacttaacgacattcagttaagcagaatatggaaaataaacctgtgagggccaaacaaaatttttttggagacagagcctcactgtatcgcccaggctggagtgcagtagcgtgatcatggctcactgcagcctcaacctcctgggctcaagagatcctcctgcc

SEQ ID NO: 223681 - DNA, 465 bp, Homo sapiens
actggactgtcagccacgccctttcaaccagaggcttcaccatccaaaaagatccaggacgacaaagtcattctcgctgccagtcctcttgttgatttcatcctcatacctgtcaggcgaggcaaaggagcacagaaaggctgcaggctgaccttggctccctgaggtccctccttacagcagaaagcttggaattccccaaacatttgctgtcctgggttcagagaaccctgctcaaggtgctggctgtccattcccagaggctggcactctcatggatgagggcagagccaactcctaggtctgtgggccaacagaggggaccccgggccaacatggaaaacccagagccacagagaaggtccctggaatgtctatttttattttgatgttttacctttgtaaatgtgtcaaactcattcattccttaaaactgagaacatgaaataacaaccacttttacta

SEQ ID NO: 223682 - DNA, 392 bp, Homo sapiens
aaacaaggtaagcttataaaagattagaatggggcttccttgcatagcaattgcttaattagcattcgttgtaatcaataactatttcttgtttatgtaatctatgttcaacactccatgtttgccttatgaatagttctcatttatccattcttcaggctttatacaatccattcttaggcagagaatgtgtccattatgggtcagagttagcctgcttaaaagccctagaacggggctgggcactgtggctcatgcctgtaatcccagcactttgggaagccaaggtgggtggatcacgaggtcaagagatcaagaccatgctggccaatgtggtgaaaccccatctctactaaaaatacaaaaattcactaggtgtggtggtatgcacc

SEQ ID NO: 223683 - DNA, 521 bp, Homo sapiens
agaaaggaacagcactatggatcaggtaattgttaggcatttttatcagtttgaaacaatttacatatctaacagaattttatagaggtgtctaaaaaatttatactcagggatgctacaataataaagttttcagaagcagcattagctttttaccccttttcatcaagatgtgaacagtctacattttctggaagtagccataagaagcaattagaagatgaaaatatccctcctatgttgataggattttggcttgctgccaagattcccaacagtgaattgacagcgttcttctttcctttggaattctgattttcattgctctcttgctggtctcaattttgacagcagaataatgagtaatagaaaagtttcattaattctgaaaagagatgtcttgtcatttgacaattctcagagaacattcttacgataagaagttggcacgtaactgaggaaaaagctcaatttgtataggctaggggatgtgatcaccagaaagatgtgggtggtaacag

SEQ ID NO: 223684 - DNA, 677 bp, Homo sapiens
gagtggcagcagagtgcagagtgctgcccaagggagtggtttgttgaatttcttaatttgtgtattctactgacagtgccagccattggtttttagtaaatgagacacttgcttcctaagagctgtctttataatcataggtgccactggtcaggaggtcttgtactacttcaacctgctatcagatagtcattctgtacattctaattcctgtacctctttgcatctgccaacttctttccttccccactgcttttggttcaggcccccgttcatttccttcctggatattgtataatactagtctcctagccaggtctacatcgcagccatatgaggatcaagctgatctttgtaaacacagaactagccctgtcacttctccttttcaaaacctgtgagtgcccccatccttggcgttgcatactatccggtcattttctgggccagcctgcctttccaacctacttccccctcctctgttcttgcacacaccacctggccatcagtgcctaattacagacatttccccaggttctctgtaatcgtttctttcaatattctattcctcttttgggtcagcttctctcccctggtccacttgggtacttctttaaagaatcacttccagaaaattcttcctggctcatccaaactattaatacttccatctcttg

SEQ ID NO: 223685 - DNA, 488 bp, Homo sapiens
aggctagtgctacattcgtcatggaaaacaacttaaaaattataaaacatggtaatgctttgaatgactgtcttagtttgctggggctgcagtaataaagtgccagagactgggtgacttaatcccaaaaatatgtttcacagttctggaggttggaagttgagaacaaggtgccggcagggtttgttcctttggaggcctctctcctgggcttgctgacagctgccttcttgctatcttcacctggtcttccttctgtgtgtgtctgtgtcttaatctcctcttgtaaagacaccagtcgtattggattggggcccatccatatgatctacttttatcttaatgacctctttaagggccctatcttcaaatatactcacactctaaggtattgggagcaaggacttcaacacatgaatttgaggagatgcaattcagcccccactacatgaatcaaatatttatttcccaattttatttgttacatc

SEQ ID NO: 223686 - DNA, 755 bp, Homo sapiens
cagacaatttgagtgtttttaaaatagtctcataaaaaatatacctttgactgggtgcagtggctcatgcatgtcctcccaaagcggaggccttacaagcattagccaccgcgctcagccgactggatagaatttgagactactgtgcaccaaatactgttctaggcagtagggatacagtaaggaaaaaagacaagaagatccacttaccctcatgctactttttagcagcaagagagagagaatttatttacaaataaatagaatgtgtagtatgtcaactgaccataggtgctaaggagaaaaagcaaataagggagatataaatacaagagaaggggtttgtattttaaataggagagtcagggatggcatcgcagagaagacagcatttgaataaaacctgaaggaagtgaagggatataatggcactgtgcaaaatgattacagaatgcacttctgctatagttaagtcatccagtccatccatctggctgtacctcttcttagattctggactgcatctgaataaataataatttgcccttttctgtgaattggcagaaaattttgctactttggcacaagagactacttggttttagtttaaaataaattattctgaatcaggctttaatttggatttgcttagaaaatagttttcttaggtctgtatgatgcatttacattttgaacacttcaaatattaattagacctaaatctgcctttaaaacattcaacatctagaaggaaa

SEQ ID NO: 223687 - DNA, 433 bp, Homo sapiens
tctgctctcatacttatgggagatagaggagtacaaagaagaaaaaggggaaaaagaaagcagaaaaactgcgtggcaccatacccgactcctctctactgctgttagacaagtatagtaaaaatagttgccacttttgacacattattgccacacagtggtttcttaccctaacttaactggaggaagctgagacttaaagaggataacaaaggcctgtttttcactgttggaagaaacttgaaaaaatacaaataacaaaaatctgtggaatatttagagcagaccaaatgtaaagagctctcctaccccatactggttggatggactaaatatttcaataatttgagagataatatatttcatttatttacctgtaatcttttagcaaaacaataaagattaaatggaattaaaactgtttttaatttaa

SEQ ID NO: 223688 - DNA, 602 bp, Homo sapiens
gtgactttgggaagattatttaccatctctgagccttgggtccttcatggacagcatggaagtaattatattaggattaaacaagatgatgtttataaaaacttagtactgcacttggcacctaacagcactcaataaatgacagctatagtaggttacatcgtactcggcattattgacatttggggctagataaccgttgtgcagggccatcttgtgtgttataggaagtctggtagcattcctggcctctacccattagatgccagtagcaaactccacccaccccgcaagttgtgacaatcaaaaccatctccaagcattgacaaatgtctcctagagtcaaaatcacctctagttgagaaacctgacctagaaaagtcccactgaactttaaaacttcaggtcaaatatcacctcctctgtgaagccttccctgacctactaagcacaattgctttgtactccagattacatcacaggggtcagatcctgacatgctgtgtgtccttggtcacgtcactttgcttctctaaggctccttctctaaggttcatctataacaagaggatatgatgttcctgggaaggatgttgtaaggg

SEQ ID NO: 223689 - DNA, 405 bp, Homo sapiens
ccaatccttacaatgactagtagaagtcctattgtaagagaatccctaacattaacaaatgtgtctgcaaaagaaactgtacaatgaatacaaagtcattaagtggaataaataatcaatttctttgtctttaatggctttttatatgaaaactgccgtaatggcaatactgaggtaaattttacatgcataaacatagtgccttctactaaaaaaacctattatgataaaacaatactgaagtgtcagagttggtaactgttttagggctcaagtcttgtcacgaaaagtactattcatatatcaacactaaagaaaaagtgaagaaaatggtttggaaaactgagttctcagtccggctagaccctgttgttccaatttgcttgtgccttggtttttctgtta

SEQ ID NO: 223690 - DNA, 439 bp, Homo sapiens
atgtgtagctagaagccaatcaaatgagatggagaatgtctgccaagaaatgatgaatctgattttggaattaatcacttgtaggcctatctgatagtagttagcaaggccattcgtttagcccaaaacaatctccaggacatgggaagaaaatactattatcttaccctttaaagtttctagggattttgtgtatatttcataatgaatacaaaatattttgccagtaacacatgtattagtttttaaatacattacctatgttagaaatgtaactcattcttttccccaatgctatgtgtgatttttaaaagttttgaggccaaatgcagtggctcatgcctaattctagcactttgagaggccaagatggaagaatcacctgaagccaggagtttgaaaccaagctgtgcaacaaagcaagaccctgtctctacaa

SEQ ID NO: 223691 - DNA, 439 bp, Homo sapiens
agccccagactccagtggtctaaggcttactcctgtgcaggttaccttccatttgcacccccatctccactttccacctttctctaccatgtttctgtaggagaaggctgagctatccatatatttagcagactcccatgggcccggacttctgtttgagttgaacaataaagagccaagcaggacatgagaaagagggaggagaatgagatcgatgtatttctcttactggcttttgccatgagaagtaatcatgggctaacaccttaacaaaaggtctccattcaactctctccatctgggcttcaggaagtcctccctcctttcctgtcttaggaccctctgctgaagcttctcccatttactagccccagcttgctatatcttcatgatttctttatatcttgagtatagttttgtcaataatcctttttgtaaa

SEQ ID NO: 223692 - DNA, 607 bp, Homo sapiens
attcataaagcccagtgaatccaagaaggggaaataaaattctagacacaacataattcaattgataaatgccgtaaacaaagaatatatatatatatacacacacacacatatgtatttagacagagtctcgctgtgtcacccaggctggagtgcagtggcccaatcttggctcactgcaaactccgcctcccgggttcacaacattctcctgcctcagcctcccatgtagctgggcctacagttgcccgccaccacacctggctaattttttgtatttttagtagagacggggtttcaccgtattagccaggaaggtctcgatctcctgacctcatgatccacccgcctcggactcccaaagtgctgggattacaggtgtgagccaccacacctggccaaagaaaatattttttaaaatatctagtgataaaagatgggttatctttcaaaaggatgtatttccgaagaataacaatagaaaatggcctctgtcggtgatgcactcatctctaagttttctggaaggatggggagggcaggagcctggctcgggaggactctcactagacccagctgggagtggggctctgtgtctaagccaagg

SEQ ID NO: 223693 - DNA, 2761 bp, Homo sapiens
  misc_feature (4)..(4): n is a, c, g, or t
  misc_feature (6)..(8): n is a, c, g, or t
ggcncnnnagctgtggtgatgggtagctaggaggcctgggcctctctgcctgctgtagccgtctgccgcgcccttgttcctgcagctgtccagttatcttttgactgccacatatggaccccaaaagatctcaaaaggaaagtgtcctcattacaggaggaagtggctattttggttttcgcctgggctgtgccctgaaccaaaatggagtccatgtgattctgtttgacatcagcagccctgctcaaaccattccagaaggaatcaagtttatacaaggagacatccgccacctgtctgacgtagagaaagccttccaggatgcagacgtcacttgtgtgttccatattgcctcttatggtatgtcagggcgggagcaactcaatcgaaacctgatcaaagaagtcaacgtcaggggcacagacaacatcctccaggtttgccaaaggagaagggtgcccaggttagtttacaccagcactttcaatgtcatctttggaggtcaagttatcagaaatggggatgaatctctgccctacctgcctcttcacctccaccctgatcactactctcggacaaagtcaattgcagagcagaaggtgctggaggcgaatgctacacccctggacagaggcgacggtgtcttaagaacctgcgctctgaggccagctggcatctatgggcctggagaacaaagacaccttcccaggatagtcagctacatcgagaagggtctgttcaagtttgtctacggggaccccaggagcctggttgagtttgtccacgtggataacttggtgcaggctcacattctggcctcagaagccctgagagctgacaagggccatattgcctctgggcagccctacttcatctcagatggcagacccgtgaacaactttgagttcttccggcctctggttgagggcctgggctacacattcccgtctacccgcctgccattgaccttggtctactgctttgcttttctaacagagatggttcacttcattttgggtcgactctacaacttccagcccttcctcactcgcactgaagtttacaaaactggtgtcacacattattttagcttagagaaagccaagaaagagctaggttataaggctcagccatttgacctccaggaagcagtggaatggtttaaagcccatggtcatggcagaagttctggaagtcgtgactcggagtgttttgtttgggatgggctattggtcttcctcctgattatagcagttctcatgtggctgccttcttctgtgattctgtcactgtgaaggaggggccagaaataaggtgatcacagttggctgagatggttctcaagaaacatgggttttaaaatgtgtacagtgatatctggtgccaaacattggctcttcaaattgctacttaagaataggttcttggattgaatctttatgtcttatttccttgcactaatccagatgggaatgaaaaagcagaagcagagattagtttgaaatttgatttgttatgtgcttctgttttaggtgggtacaatagaagtcagtttggagccatagaagtaggcttagttgagttggagatgcccatcttgaatttctgagagggcaagatatacttatttccattttatgcagtctgcatctacctaaaacctctgactgatgtgggaatggcgaaacactatcaggcttgaatgcgtgtgaaaaacaccaaattggcccagatccctaacagagcaatcctcgaggggatggtggctattgctggagaggcattagctattcacagggtacgttttaggtgttaacttttgccctttatgatatcagggcattatgcctatgtgaacacatggtaatgtttgatgtttaggcctttattctacctcataggattcttttgaggattaaattcaagcatacaaagcgctcctcaacacacatagccattctttttatcagaattgtcatggtacattccttatgagggctttcttcctcagtgttctctttagagggctattgctactggactttctgcaatgtcttttgggtgtgccctcagagcctgcaacaagtgtatttggatatactctatttgtaaagtttaggcctctaagaaggccacaatgaagcaactaaaaatctgatgattaagggagtcaatcaagctgatgccatttttagtttaaaaatgaagcagagctctaaactcatagatgggttttcttactgggaagaagattggctctctgaagacagcttccaatgaggaatgtattgaacaatggcagcactgtctggccacccacaaactgttacagatgatccagttacactgttgcataggaacccaagtggaaagaagacagagtccatgtctgtccatggctccagctacagaaaggatagtatgggaacattacaagggggatacattactgtggaaagttctgctagagttagtcttgagagtatctgtaaaatacaaatagatgagcaatccctgtggaatgctgcctggatattttcagaaaagctctgaacttgatgtcataataccaacaccgtgaatatcgtgtgtggccttaaccaaggaacagaagccctttagaacttagcttcctcacttgggagctgggactgactgcatttgccctttgtataaacccacccaccccatagggttcactgggagcataaagcaagatgtggtgaaagtacttctaatataaattgcaacatcagtatga

SEQ ID NO: 223694 - DNA, 2989 bp, Homo sapiens
  misc_feature (4)..(4): n is a, c, g, or t
  misc_feature (6)..(8): n is a, c, g, or t
ggcncnnnagctgtggtgatgggtagctaggaggcctgggcctctctgcctgctgtagccgtctgccgcgcccttgttcctgcagctggcggaggaaacagaggttcagtgaattgcctagggtaacacagggaattggtggaagagccaagtctaatgcccagatttccaaactgggagtcttaacccttcatcagtgctacctgtgccacatgggagaagatgggccacctccaattcattttctctgggaactgcaggaaccacaatgaggttgcagaatgtgttaacagtgaaagccctcacaggactcaggtccagttatcttttgactgccacatatggaccccaaaagatctcaaaaggaaagtgtcctcattacaggaggaagtggctattttggttttcgcctgggctgtgccctgaaccaaaatggagtccatgtgattctgtttgacatcagcagccctgctcaaaccattccagaaggaatcaagtttatacaaggagacatccgccacctgtctgacgtagagaaagccttccaggatgcagacgtcacttgtgtgttccatattgcctcttatggtatgtcagggcgggagcaactcaatcgaaacctgatcaaagaagtcaacgtcaggggcacagacaacatcctccaggtttgccaaaggagaagggtgcccaggttagtttacaccagcactttcaatgtcatctttggaggtcaagttatcagaaatggggatgaatctctgccctacctgcctcttcacctccaccctgatcactactctcggacaaagtcaattgcagagcagaaggtgctggaggcgaatgctacacccctggacagaggcgacggtgtcttaagaacctgcgctctgaggccagctggcatctatgggcctggagaacaaagacaccttcccaggatagtcagctacatcgagaagggtctgttcaagtttgtctacggggaccccaggagcctggttgagtttgtccacgtggataacttggtgcaggctcacattctggcctcagaagccctgagagctgacaagggccatattgcctctgggcagccctacttcatctcagatggcagacccgtgaacaactttgagttcttccggcctctggttgagggcctgggctacacattcccgtctacccgcctgccattgaccttggtctactgctttgcttttctaacagagatggttcacttcattttgggtcgactctacaacttccagcccttcctcactcgcactgaagtttacaaaactggtgtcacacattattttagcttagagaaagccaagaaagagctaggttataaggctcagccatttgacctccaggaagcagtggaatggtttaaagcccatggtcatggcagaagttctggaagtcgtgactcggagtgttttgtttgggatgggctattggtcttcctcctgattatagcagttctcatgtggctgccttcttctgtgattctgtcactgtgaaggaggggccagaaataaggtgatcacagttggctgagatggttctcaagaaacatgggttttaaaatgtgtacagtgatatctggtgccaaacattggctcttcaaattgctacttaagaataggttcttggattgaatctttatgtcttatttccttgcactaatccagatgggaatgaaaaagcagaagcagagattagtttgaaatttgatttgttatgtgcttctgttttaggtgggtacaatagaagtcagtttggagccatagaagtaggcttagttgagttggagatgcccatcttgaatttctgagagggcaagatatacttatttccattttatgcagtctgcatctacctaaaacctctgactgatgtgggaatggcgaaacactatcaggcttgaatgcgtgtgaaaaacaccaaattggcccagatccctaacagagcaatcctcgaggggatggtggctattgctggagaggcattagctattcacagggtacgttttaggtgttaacttttgccctttatgatatcagggcattatgcctatgtgaacacatggtaatgtttgatgtttaggcctttattctacctcataggattcttttgaggattaaattcaagcatacaaagcgctcctcaacacacatagccattctttttatcagaattgtcatggtacattccttatgagggctttcttcctcagtgttctctttagagggctattgctactggactttctgcaatgtcttttgggtgtgccctcagagcctgcaacaagtgtatttggatatactctatttgtaaagtttaggcctctaagaaggccacaatgaagcaactaaaaatctgatgattaagggagtcaatcaagctgatgccatttttagtttaaaaatgaagcagagctctaaactcatagatgggttttcttactgggaagaagattggctctctgaagacagcttccaatgaggaatgtattgaacaatggcagcactgtctggccacccacaaactgttacagatgatccagttacactgttgcataggaacccaagtggaaagaagacagagtccatgtctgtccatggctccagctacagaaaggatagtatgggaacattacaagggggatacattactgtggaaagttctgctagagttagtcttgagagtatctgtaaaatacaaatagatgagcaatccctgtggaatgctgcctggatattttcagaaaagctctgaacttgatgtcataataccaacaccgtgaatatcgtgtgtggccttaaccaaggaacagaagccctttagaacttagcttcctcacttgggagctgggactgactgcatttgccctttgtataaacccacccaccccatagggttcactgggagcataaagcaagatgtggtgaaagtacttctaatataaattgcaacatcagtatga

SEQ ID NO: 223695 - DNA, 205 bp, Homo sapiens
ctggttatttttattttattttattttattttttgtatttttagtagagatggggtttccccatgttggccaggcgtggtggcaggtgcctgtggcaggagggaaaaaggggctcaggagagttgggctagcaactacttataccttagtgtacattcatttaatcagttttccttccttccttacctaagatggactaactgcc

SEQ ID NO: 223696 - DNA, 121 bp, Homo sapiens
ttcataaccaaaaaacacatactatatagagcagacagcatttgacttcactgaaagcaaacagtatcccttaaagttaaggcaaggccaggtgtggtggctcatacctagaatcccagca

SEQ ID NO: 223697 - DNA, 459 bp, Homo sapiens
tttttagaatagccataaaaaatatgtctttgtttagatcacttcagaaccaaatgctctgaagccagcctatccagagagcctagattgatttgaggccagtccctgcaatgcaagggggggtgtcacaactcaaaggccactcctgagctttcactttctttccaaaataattgaagtcagtggactgtccccagagcttctgtgaggtattcacattttctctggagtgacgtgacttttgtaagacatctaaggcatgtatatgttatactttggcctggctaaatctggagaatgacagaggtctccaaaccccgaggactgttgggttgatttgaattaaatgagatgccccctttctgcagaaaatggaaactaacatggctatctctgtccattacacaagacttttgtaaaacagtcatggtttctttcttaaaatctgttttaaacaaa

SEQ ID NO: 223698 - DNA, 446 bp, Homo sapiens
tgcagtggcacgatcttggctcaccacaacttctgcctcccgggttcaagcgattctcctgcctcagcctcctgagtatctgggattacgggcatgcaccaccacacccagctaattttgtatttttagtagggacagggtttctccgtgttggtcaggctggtctcgaattccctacctcaggtgatcagcctgcctcagcctcccaaagtgttgggattgcaggcataagccaccatgcacagctctgcttcttttttatctgtatttttcactgctctgattttttttcaagtcaagtcctggacttgaggcaaattgggcttctccatacccctctatgcagtgtcttttcacaccccagtgctccagttaggccactccctgtgcctctggagacccaccccttcactcttgcgaatgcttctaccgtccaaagcccttag

SEQ ID NO: 223699 - DNA, 337 bp, Homo sapiens
cacacacacacacacacacacacacacactccccaaatcccagtaaagctgtttagaaattgcttttttcactcaatagtgagtgacggctaggttggccagattatgtgaggattaaagatgcaagatattggtaaagggtttttggacagttgaaactgttctgcctaaagaagagaaactttaagtggtgacttacttatgcctcaaagcttgaagaaccataagctagtagagtgagatttgttgtatgtatggagaaggattatctaaacacacactcacacacacacacacgtacacacacacattatacttttaaccatgtttgcataaa

SEQ ID NO: 223700 - DNA, 460 bp, Homo sapiens
cagacctggagagatatcctctggaaccattacagggcttttcaaagaacacacagtcccactgaaatcagcagaatatttcctggcctctctactgcaccccagggggggtgttcacactcctcaaagcccaggccagactcctgttaatgctaatagcaacacatgtgcactttcaagggagagaggaccacacagtgcttagtatgctagtaagcattaatttgattccttgggtgcaaaacaatgtcaatgggaccattttgaggcatatgctactgctcacaagcccaattaaaccaaaggattattgctatgttgcattatccataggagatgtacatatgatagattattggggatgcaatttgcagtgcattgtttattcccaatgtattgggtgtttggtgttgctttggaaaggttgtttacattgaaagtaaactcacattaaaaaata

SEQ ID NO: 223701 - DNA, 136 bp, Homo sapiens
gatcctgcaggtagaagtgctcacattgctgtgctcccttttctctgaccagccatggaggccctgggggcttggaggagtggctgcttactccctgggggaagtgtgggctgcaagccccttgagtgggcaggtt

SEQ ID NO: 223702 - DNA, 607 bp, Homo sapiens
gatctttgaaacaaagtaaaagttaacagggtcaagaagatacttgaaagagataactgcaggagaaaggagagatggtgcataccaaaggtgaagcatgcttagtggctgagccaagagagatgatttcttgaagtaaagttttataatttgatatgattggagtttaaggaacaaagtggaaagaaatgggagttgaggtaggcagtaaacgaaagtgttaggtatttcttctggcctatgagaaataaggaataatttcctgagatattaagagtaccatgaacaaggaaattttgcagacctctggctttggacataatattaaagaacaaatctgcgaaagcagttcataaagtgttttctgataaatgtgtaaggattgaaacaaaaatatttggaggaatggaactagcttaaactattttttatctaagcattttttgcctcagtccactttacctgaaactagacaatatgaatttgggattttattctttgacaatagacatgtgctagtgttgttgacaacttgccaaggatagacacttaaactttggaaaccaaatggatcgtaggacttatattccattataaatagtgaaaa

SEQ ID NO: 223703 - DNA, 460 bp, Homo sapiens
gtggcttcaggcctttcctttaaatctttaaacaattttaacttgatttttgtgtacagtgtcagataactctccaattttgtttcctttcatattttttctttttttgcatgaggatatccagttttcctaacaccattaattgaaaacaatgatccttttcccattgtgtattcatggcacctttgtcaaagattagttgaccatatatgcatgggtttatttatgggctttctattctgttccattggtctatgtgtctgtttttatgccagtagcatgtttttttggctactatagctttgtaatataatttaaaatcaggagatgtgatgacttcagttttgttcttcctgttaaaaattgcttgggctattcggggtcttttgtggttccctatgaattttaggattgttttttccccctctggtgttaggaaaactggatataatcatgcaaa

SEQ ID NO: 223704 - DNA, 373 bp, Homo sapiens
aaaattaagactataaaattaataaggcaaaataatcacagcaaaaggcattacatgagtttatcaattggtaggagttagaagcctggttactttaatttaaactcattattttctttttttttggcacaaatcgttgtttttatttaatttgggaaaaacatctttacaagttgataaatactagaattgtcaatgagaaaaatgctactgaaatacctatttttctctttgatggcagaatttcctaaatatttgcattttaacatattttatctcatactttagctgacattacttagttgtatatggatctattcttaataaaataaagagaaaaacataaagagaggaaaaggattattaaatttgg

SEQ ID NO: 223705 - DNA, 661 bp, Homo sapiens
gtatactgattaaaaccaacaaacctttaaaaaacttatgtgataatcagggaaatgtaaatctggatatttaatactaaggaggtactgtggttaggtttagtgtcctaatcttttagagcagaggttctcagagtgtggttcatggaccgcctgagagtcaaagctatttttaatagtaatactaacaacatatatttgcttctttcactgtgtttacatttgcactgatggtggaaacatgaataaaactgctgacaccttagcagaactcagggtagcagaaccaaacattactagcagtcatattctccattcaagtgaaggggagaaaagccagttttacttaaaaatgtccttaatgaagcagtgaaaataaatagttttattaaaccttaacccttgagtatacatctctttcatatcctgtgacttttaaaaaaatgaaagtcctcaaccaggcacgatgactcacacctataatcccagcactttgggaggccaaggcaggtggatcacctgaggtcaggagttcgagaccaggctggccaacatgaagaaacccagtctctactaaaaatacaaaaattagccaggcatggtggcaggcacctgtaatcccagctactcaggaggctgaagcaggagaattgcttgaacc

SEQ ID NO: 223706 - DNA, 519 bp, Homo sapiens
tgcctggctcatgctgctttttaaaagcaggagatgaaattcccatttgaaagatgccctcccagaacaacagacactgagacttacttaaaaatggagggtaggaggagggagaggatcagaaaaaataactactgggtactaggcttagtgcctgggtgacaaaataatctgtatagcaaacccctatgacacaagtttgcctatataacaaacctgcacatgtacccctgaacctaaaataaaagttaaaaaaaataaaagaaaagatgccctccctgtactagaaggaaaataacattgttatcaccaaggattaatagttgagactgaattcaaataactcttatcttctagcctcctcacatcatttagttactttttcacaacttactactttttgtccgattcagcatgtaagtgttcaactctgagtctctggatcttcatttccttatagcggctcctatgtcatgtagaacttatattaaataaatttatatgctcttctcctattaa

SEQ ID NO: 223707 - DNA, 400 bp, Homo sapiens
tctggggcatgagccccgtgggatgaagagagcatgcacacatggggacagttggtgcagtttgagcagggagagatgggcatccatagaagccagtccttcacctgactcagcctgaaaggcaaggagggtgtctgtgcaggggacagactggtatggggttcagaacctgagcagggaaaaggtttctgcaggagaccaggtaccagcagaggggaagaaatgtaaaaagaaagctagaatggaccctgtggtattatgttgaaaatggaagtctctgtgtgaacttgaatggaagtctctgtgtgaacttgtggttacaaacatacaaacacacacacacttcagatatctataagatatagaactataggtatgtgtagccatctaaagttatgta

SEQ ID NO: 223708 - DNA, 665 bp, Homo sapiens
ggatcaactactaaaacaccatgagcaaccttttccaagagtcactttaggaaacaatatttatgggccatatttttttccaaaataaaaagaatgtatctgagtatcatttataatcttctaacacagactacttattttactgagtagaacaatgtctgggagaaaactgacatgactttatgaccacaaaaaaaattagggcataatttaaaagtaccaacaaagaagcaactgtgtattccatcatcctttatatttctgtagtattttcgagcctgaagtatattctcatgaattatctaatagcattaccaaaatattctctccaggtgaaaaaaattgaagctcagataggtgaagtaccttgcttgaagacttagcaaagctgggtgctgtggctcacacctgtaatcccagcactttgggaggctagggtgggaggatcatttgagccctgtagttgaagaccagcctgggcaacaaaatgagaacccatctctacaaaaataaaaaataaaaaattagccaggcacgttggtacacgcctgtggtcccaggtactctggaagcccgcggcaggaggatcgcttgagcctgggaggtcgaggctactgttagccgtgatcgctcactccagcactaggtgacagagacctcatctc

SEQ ID NO: 223709 - DNA, 477 bp, Homo sapiens
  misc_feature (49)..(49): n is a, c, g, or t
accaaagctgtgtcattacagaagaataacaaaaataaaagcagcacanacaagaaatgagaaaaaaaaatctacaagaaacacataacaataacagtaaaactggtaatagcaactctattttaaagcaatcattttaaatactaattaattaaactacttaatagaaagaaacataatcctaggatgttgtgaggtcaaagtgggctgatcacttgatcccgggagtttgagatcagcctgagcaacatctcaaaaccctgtctctacaaaaaaaaaacaacaaaacttgctgggtgtgatggcaaatatttgtaacacagctatttgagaggccgaaatgagaggatcatcagagtttggaaagttgaggctgcagtgagccatgatcatgccactgaaaaccaggctgattgacagagtgaaaccctatttcaaaactgaatgaataaataggccaggcatggtggctcatgc

SEQ ID NO: 223710 - DNA, 402 bp, Homo sapiens
cacctggcctgttgctattttacaactgaggaaactgaatcccagaaaagtgaaataacccagccaagatcatggagctactaaactgtggcaacattatttgaatcttagtcctcttacatgtaaagttctttaaatattccatctctctaaagttcccataaaaatatatatgttggtggcactgcctgtaaccccagcactttgggaggccgaagcgggcagatcacttgaggccaggagtttgagacctgcctggccaacatggcaaaaccccatctccataaaaatgcacacacacaataatagccaggtgtggtggcgtgcttataatctcagctacttgggaaggtgaggcatgagaatcatttgaacctgggaggcggaggctgcagtgagccg

SEQ ID NO: 223711 - DNA, 270 bp, Homo sapiens
aaaattatttaactcattcttaagtccatttgcttaccacagctacctgtttgtaacaacttaataacaacagtaaacaaatgtataatacactgctaatcattgcctgagtactttttggccctttcacaggctaagaggtgatgctaacaaaaatatgtttagagtctaatagttataaacaatgatatctctgagatattgttgtaaataatcctgaaattattcaggattaacataggtaaatatacacagacacatctcttgcca

SEQ ID NO: 223712 - DNA, 512 bp, Homo sapiens
cacaggtgtctcatgacccgacctcaaaaaggccatctagtggatgtttgtggtctaacaagccctttcaatgaatacttggcggacagatgctggggcggagtctcttagaagagctgcccccggcccccctcagctggatttgtctgagaactcattcttggcgttcactgcaagctataagctctgcgatgggccctgaaaaaaaaaaatcgatactacgatgactctcatatgtatttcttcagcccagatccagacctttgtctactcagcttctccacgtggatacctaataggcatctcaaatttaaatatccaaaaccaaactcctgacattaaacacaagaagcaagaaatatgaacatattttctgattccactaatataaaagtacataacagtcaacacagctgctctatcactttaagagagtaagcatcccgaaggcaatgaccatcaacctcaaatatacatctatctgtccatcagagtgcataaacaatgctcat

SEQ ID NO: 223713 - DNA, 474 bp, Homo sapiens
tgataagaagaaaccaccagagagtctacacatagtgaggagagtctcaatgcttcccaggtacactgtaggttattacatgatattaactcatttgagaaaagaaaaccgaaattatcaactcaccaaaatggggtttgaagaaacaaaatatgacagtgtgtatacagtgttatccgtgaaaaggaagtcctgcatccaagagatgtgagtaattcagtgaccaaaagtgttctctacttcagttaggactagtttatcaagacccaaggtatgtggcttagggagaacataccttgagacttgccacttcttttggcactaattacaagcctaactgaaccatcttctgattgttgatatggccttttaagctattgttgttcaggaaaagggagaattctgcatgagggcaccaacatttcattctgcacatagtaaatttagagaaattctctggtttaaaaaaaagtc

SEQ ID NO: 223714 - DNA, 508 bp, Homo sapiens
agagaatctagagcccaagagtagaacgggggtcaccaaagcaaggccaagacaggagcagacccagtagctgataggaattgaatccaatgacagtgaagctggaaacctgacttggaacagacaggagcagacatatggacaagtgcaaggtctgaagaggccagcagtagacaggaacaaaacaaaaagctgacctgcaaggggtccagaacacagacatgaagaatgggcaaggagtcaaattcaagcaaccccaaggccacagctccagatgtgctgatgtttctgggaaggcagacacaatctcaaaaattatctgacttgggatttttaggtacagttaaatggaaagtcctgcctagagaagagaatggtgtttggggggaaagtaattcagaaacttccgataatttatttttatgtccccaaaagggcatggcacaattgaaagtgcacagtaaacactccataaacatttgtcaattacctaatagagacggaagtt

SEQ ID NO: 223715 - DNA, 409 bp, Homo sapiens
aaaataaatcaagtgtgatgagtgttatataagaaaggggaaatagcagggttcagtgtggaacataggagagtgggccttcattccctccagttgagggccaaataaggcatccctgaggaagagacattaagctgagatctgaaaggtgagcctgaataagttaggtgaaggagcatgagtaaagggaagcatgaatagcatattgcagagcctctgagatgccacatacaggatgactaggagaacctcagtatgcaggacaaagtgactttttggacatttttaggtttcgcatttttattttaagaacagagggaagctaatgaagtgtttaaattagggagtatggctatggcctgatactctgaatggagtatggagaattgattagagactgaatcactta

SEQ ID NO: 223716 - DNA, 355 bp, Homo sapiens
aacatcaacctaaaacccgctcataacctctcagctccctgctggtgcactccccacagagacaccctgggtcaaacacagccccctggccttattccccatgcctgctagcccacacaatccatgtcacaaaatcagcctcggtgctttggctacaattttccagggaaggaggcaacactgtcccgattatctgtgcacatttccagtgaaatacatgggcaccagcaccaccatgactggagggcatctgtgatctaattgtggagtataaaataacgagaagacactcaacttaactagaaagtgagacccccaaaatctcatttttaaagaaatattgtaaatgcatgtt

SEQ ID NO: 223717 - DNA, 383 bp, Homo sapiens
atctaggggcagattgtgttttttaagatggttacaacaaaatctatcttcctacatgctcttcttaccatgtaacattgatgctcctcccactgaactgcaggggtcaaggttccctctccttgtctccaggcaggctagtgactgctgaggaagtgatgctatgtgacttccaaggctagatcataacggccaatagattcttcctggtcccctaggggtggttgcttttggaaccacataccatgatgtaaggaagcccaagcagccacagcaaagaatacatgtaagtgttaacaactgataaccccagatgaagttccagctgacagccatgaccaaccaccagacacatgaatgagagagtctttgacatcagtcaa

SEQ ID NO: 223718 - DNA, 785 bp, Homo sapiens
cactgtagaagtctcgcatatatgatcatttaaaatttcgctgaagtcatgtctgaattctgcacactgccttatggatgtgggagaggtgactaaactgagtcaacgcagtcaaccacccaggacttgcaattccagggggttgcatccacctaaccctccggggttctggcttcggatagtgtttgatcaatggaagcaacaaaagaagattggaggacatgaagacaggttactggatgatattcgacatgagctgcaatcctccatctgaggtcccaacttttccagaaggcttctgtcctgttgcgctcattggattctgcattatgggattctcttgaagtgtgtgaagaataatgagctaaataaagaggaaaaacaaaagaaaacaaaaactgcagggacttttataactatcattgattgccagcttaagcctgctggactcttcacaaaactatatatgcttcaagcttaatatttaattttgtaattggaacatttataatcatattatgcatttaataaggatgctctaattcagatttactattatcaggaaattaaatttggagttacagtaatgcatgcatatatatgtgtgggtgtgagtgtgcatatacctatatatgtatatacatatataaagtaaacgccttcttttaacgtgtgttttaagtatagcttccatgtcctagttaattcagcaccctcccttttatcctttccttgccattgtcctctctactagactacaataaaaacaaaaaactatgaaagta

SEQ ID NO: 223719 - DNA, 432 bp, Homo sapiens
actgtgagcagacattgccaaatatctcctggattgggggtaggagaacagagtcaccatgaccatatatccatctaaaaaagttaaaatagaccagacgcaatggtgcacatctatagtctcagctactcaggaggctgagatggaagattgcttgggtccgggagttcaggactgcagtgcgccatgattgtgcctgtgaatagccactgctctccagtctggacaatgtagcaagaccctcatccccaaaaaaagttaaaatagtatatatactcgtgttctgagtattttttaatttatgtaaatagtattacattttatttatattatttacataaactacatacaatttatgtaaatggtatatgtatatgttgtatatgcatattcttgtacaactttatttgttcattaaacattgtatatttg

SEQ ID NO: 223720 - DNA, 371 bp, Homo sapiens
aaaaaaaaaaaaaacaagatgaaagagaaaagtctggaaaagaagaaagcagggacagaggaaggcaggtaggaaagtactgtggcacagaaaacagcaggggaaagaaccaaacaccacatgtctcgtaagtggaagctgaacaatgagaaccatggacacagggaggggaacatcacacaccggggcctgtagtggaggtggggagctaggagacggatagcgtcaggagaaatacctaaggtagatgatgggttgatgggtgcagcaaaccagcgtggcacatgtatacctatgtaacaaacctgcacattctgcacatgtatcccagaacttaaagtataataataattttaaaaagaggtaagaca

SEQ ID NO: 223721 - DNA, 530 bp, Homo sapiens
gtgtgaggggaggaggaaggcgccacgccgaaacctgtcgcaaacccgagaaggagagccccggggactgggcgcgcgggatacaaagggccgtgaacgcggccttccatgaggcgacagtgcgcgggcagggagacaaaatggagcgatgggaggaatcggagcccgagcggcagcggcggggaaggggcggcggcggcgggcacgcgccccgccagggcttcctcctccgaccagcgacgggggagggggcgcggcggcggccagttctctccgccgcttacacgcggccccaccgcccgggcctagcgcggcgggaagcgccagccgggtgccgccaacaatagggagcgaggcagcgccggcgagggaggagccggcggcagctgcacagcggcccgcgtccgcgctccgggccccgcggcgactcgccgcgcccgcggcccgtgaaacgacgcggtagaacgaggggcgggggggcgccacgccaggggtcggcggcgcggcccagaggcggcaagggcgcacac

SEQ ID NO: 223722 - DNA, 388 bp, Homo sapiens
gaggcgggtggatcacttgagcccaggatatctggatcaacctgggcaacatggcaaaaccctgtctttataaaaaaaaatacaagaagttagccaggtgtggtggtgtgtgcctgtggtcccagctacttgggaggtgggaggattgcttgagcccaggaagtcgaggctgtggtgagccatgatctcccctccagcctaggccatggccatacagtgagatcctctctcaaaaaaagaaatatgaagaatagaggtttgacagtcacatcatttgagatctccttatccaaatgcatggtcagagtttgagtcacttgtggaatctttgagtaactgaaataaaatccagttgatcagaattctttggtaatttttagtatgtatc

SEQ ID NO: 223723 - DNA, 465 bp, Homo sapiens
gtgtatagtggcttttcaaggtacacgctgaagacagcagagtgacaagctagatggaacctggatcctaaatcaccatgttaaaggccacccaccaaatactcaacattgaacagctctgtgagtgagaaataaacttttattgtgtgaagtctttgaggtttggggccttatgtattatagcaatttgtgttgcttactgtgacccagaaattgcacttctaggaatgtttcctaaagaaataatccaagattcaaaggctgatagaatctgagaacaatggacaaaacccgaaatggctataatcccaatgaatgctgcaaagggctctgaaacatgggaatggaaactgaacagcagaggacagaaaataaattacaaaattgctcaagtagtacaaatacagtatttgtgatgggaattaagaacaatagttgaaaagaaaataaaaacctggtcagcaa

SEQ ID NO: 223724 - DNA, 398 bp, Homo sapiens
agccgcctcagcccccggcgtagcctctccggtgggccaggtcctccgcccgacctgccttagccggtcggagcacacacgcctggccgcggggcgcccgcataaaagtcacagccagcggaggttggaaacagccgtcgacttgggcatcggccggacgaggatggagtgaccagcgcggccctggccacacaggccctgctccacgcccctcgcccgccctcacgacggagcggagctccactcagccgctccaggaaaggaagcccaagaactccggagttccgcaactctccccagacgtccggaagcaaatcgcgtcccaggcaaaacgagctcgcttgagagcgcccttagccccgttgggctgctgcgcgcgcggcgcgggaagctgccat

SEQ ID NO: 223725 - DNA, 745 bp, Homo sapiens
aattgagctttgtttgctattaactatatgactatgattcattctaatttatatgtgctctgattagtaaacttattaaaatacgtatcagggcaccattgcaagacatctattcagaccccccatcatcctctttgatttgtgagagatggaaagacacctgcttaggaaagggaggaaaattaaaaattctgaggttcagaaatagggattccccatttacaatgataacattaacgtgcacatgggatagtcacacttaaatgaattaagaaggatcaaactgaagcatttaaccctcacaaagcccccccactttttttgtcaaggttctagattatctgagagtaagacttctttattcagatcctgttgagatgctgcattctcatatttatgtttatagtggaaatgccccaatacatgattaaatcatagaaaagaattttgctgttgttgttgtttagggcagaggagagaaagacaacagattatacaattctcctggccctattattgttttgatttttgtttaaatttcccttatttgggtgttgaacaggaagatcatgtgactctaagatagaacatttttggagttctgtgtcactagcaattaaagctatcaagtatgtggagtgtcacaaaactctcatacatgtaaagtgcaatttttatattatgattttgatgttgatcttttatgaacttctcatgaagtatttggaactaagcccaaaggcaa

SEQ ID NO: 223726 - DNA, 497 bp, Homo sapiens
cagaaacaaaaaggaaaaactccaatagtctggatgcagccaacaaagcaccttccagacaacagaagcagctgggaaatgaaacaacaaacaaacaaggcaaagccacatctcagaacagggcatgttgtatggactcatgtacttggaaagtgaggttcagggaaattccaagtgaatggcaggaaataaagctggaaacctaaggaaggactaggccctaaggcagagagagattctttaagtacctcagcccatagggacaaatcatcggttttccttttacctaaacggaaacatgtttcttgtcttagagaattatgttttcttttcggtttattttctattttaaatttaaaatttgaattgtaagcctataggatcccaagagttccaaactctatatttttcttactcctttaactctgccttcagcatatgtcatggtaaaatgtaaattaacctaaatctatacaataaaaataaaataaaaatta

SEQ ID NO: 223727 - DNA, 192 bp, Homo sapiens
agatccagtgacccaactttctattttcatgcatgtttgaccacatccttttctatattaaagaggtgactcaaaacttggtaaaaggtaaacataaataggttttattgaatatctaagctgaatctattctaaagaccagaaacagttccgtctaacttcccccaaatttctcgtaacaggagaacaact

SEQ ID NO: 223728 - DNA, 379 bp, Homo sapiens
ttgagacagaatctcgctctgttgcccaggctggagtgcagtggcgctatctcggctcattgcagcccctgcctcctgggttcaagtgattctcctgcctcagcctcctgagtagctgggactacaggcgcatgccaccaggcctggctaatttttgtacttttagtagcgatggggtttcaccgtgttgggcaagatggtctcgatctcctgatctcatgatctgcccacctcggcctcccaaagtgctgggattataggcgtgagccaccacgcccggcctaaggtctgcttttaagacttgttaggaccagagccgcatttagtttaggactgattattctctgctactgaggcaagacccttctgtcgtcttctc

SEQ ID NO: 223729 - DNA, 228 bp, Homo sapiens
gggccgattagacccaggtatgtttaaataccaatgaaaaggttccaggcgagttggagaggttggaaatatggaatgaggaaataatttctagaagaaggtttctaagaaagatccatggagataagattcagagaaaatgtgaaaaaaggatacttcttccacgttaacttgagggaacaaagaaagaagcaaggacttaatatgcccacctctcaagcttcagca

SEQ ID NO: 223730 - DNA, 380 bp, Homo sapiens
caaagcatggtgggatatacacacacattgctaagtcccttgcccttaaggagctcacagtctagcctgaaggcagataattaagcagctctaatacaagtttgaataaatccagacccatgaaggaatttaagtagagtactggcttccagcaactggagcaaatacttgtgtatggggtacaagggaagcttcagagaaaagaactgtggtaaaagaagaggcctaagtctgaaatgtcattgtgaccaaatgcacacaccatcagcttgcattgaaaaagtcaaaccaatccttaaaataatccattatggctgtggtactgggaagatgatcatgaaccaaaaaatgttaagttctttgataatgaaattagtata

SEQ ID NO: 223731 - DNA, 608 bp, Homo sapiens
ctagaggatccccgaacatgtcgtgctggctcaaactctgacttcagatgatccacccgtctcggcctcccaaagtgctgggattacaggcatgagccaccgtggcctggttttgtaaaatatttgagtgctttacaaacacttaatatattgcaaaaaaacaaaaacaaaaatctaataaaacctttttatgatttatctcccataaaccattttttcaggaaagtagataatatgctccaccaaaataaagtacatcaaggaaaaaaggcatcttttgtctttgatggaagaaagaggaagtccagtacaaaagtatggcaaagggaatcatccctagggtaatgaaaaatgtccccaagatgacagctgtacaagagacctagaggcatccagcccagactagagactggagcagtcagaagaaagatttcttcaagaagatgaaattcatagaacacctaaattgtttggatagaggagattaacacataaaggagatttcgtgacactagaggagagttacacataaaagaacacaccaagcaaatgaaaaaaccaaggcaatcctttgggcaaatgtataccagcaaaacactcacattaaa

SEQ ID NO: 223732 - DNA, 639 bp, Homo sapiens
tagtgtagccacttcagctctctttttattgctgtttgcattgtatatctttatcttttacatccttttaatttcaatctagttgtacttttaaatctaaagtgagtctcttggagacagcgtatagttggatcatgttttttaaatctattcttccaatctcttaattggaaagtttaatttatgtgcatttaatataattgaaaaagtaagatttgtctgccactttgctatttattttctatacatcatatgtctttttaaatctcatgttctttcattactgccttcttttatgttaaatagatattttctttcattctcttgtttcatttactatatatttttgaattattctcttggtagttgccctggggattaccattaatatctgaatttataaccatctgttcatgttaataccagcttaatttcaagtatacaaaaatgttgctctaaagtggtcctgttttcccctcccatatgctattattgtcacaaatttcatcttaatacattttgtgcccatcaacatacatttataattattgccatacacattttatttaaatcagaaaaaaagagttaccaacaaaaaataaatttgtattgttttatatctgacttcataatttcttt

SEQ ID NO: 223733 - DNA, 485 bp, Homo sapiens
tcccctagccttggcatcaaccatttctccaaaggagctccaatttcattttcagtaaaaattggtatataaggccaagttctgaggtgtgcttactaactttcagccctttcagtggacaaagctggttagaagacagatgctccaacttcccgggatgctcaggagtgtcagcctagctcctgggattcttgaagcacttgaaatcctactacatcatgcaaaattggatttggattattcaacttccaattttattttttattttaattttatttttgcacattggccagtgccttggagagcaatataaatcagtaagtctctcctggcattttcctgatctctgctacatcatctcaaaaccacaaaattcagatgtacagagtaacaaaacattacttgaagttgatattaatatatagaaaatagaaagttcacatcacattgtatcatattaatggtgaataaaatagaagttactg

SEQ ID NO: 223734 - DNA, 393 bp, Homo sapiens
gagaagctattactgagccgtgaaaaaaaaacaaaaggcagtaggatgggcaataaggagaagacctggataatccatacactagatggttgagtcttgatgattttgaagataattatgtgtgtggctttggaaattagagtaactattactgtaacatctcagttatttagcgtttttgagctcattccatgttagtcatctagaactctttatagataaaatttttgagaattgcagagctagggagaacgggtcttacatgtctgtacattatctttttttttttttttttttttttgagatggaattttgctcttgttggctcaggctggagtgcaatggcatgatctcggctcgtcgcaacctccacctcctgggttcaagtgattc

SEQ ID NO: 223735 - DNA, 330 bp, Homo sapiens
cgtggggtggggggaggggggagggatagcattaggagatacacctaatgtaaatgacgagttagtgggtgcagcacaccaacatggcagatgtatacatatgtaacaaacctgcacgttgtgcacatgtaccctagaacttaaagtattaaaaaaaaaaggtgtctgatttcccaagaaagcaaataatgaaaataatttttttaaaaaggaatctgaaaaaaatttgttaccaaaaaaatacaaacaccaagctgattagtattattattaattattaatgttgttatttctagctaaagaaaatatactgatacatggcataaaaat

SEQ ID NO: 223736 - DNA, 202 bp, Homo sapiens
gtgttgataagttaaggtttattagaacatagccacatccatcccattgacattttacctatggctgctttcctgccatgatggcagaattgagtggttgtgacagagagactggtctgaaagcctaaaatgtttacacaatttagacccttagagaagaatttgccaaaccttgacctaagagatgaagcccacctttgga

SEQ ID NO: 223737 - DNA, 526 bp, Homo sapiens
cagaaacggggttgtctggtgcagatcagtgtatattgtgtaatttgaggaagagccagtaaaataatgaaaaatgaacaaaaccttgggaaacggatatcattaggtgcaccagcatatacaaatgggagtatcaatgtgagagaacagaaagggaaagaaaaattttttgaagaattacagaaacacccacaatttgttgaagaacactaatatattcatccaagaagctcaacaaactcatatgaggataaatgcaaagagacttatacccagacacgttatactgaaagatgtttttatcatgctcttatttgacctgccttataaaagtgataatacaagtgctggtgaggacttacaggaactgaaatgttcatatgtttttgatggcatgtaaaatgctacagtcattctagaaaatagtttgtcagttccatttaaaactaaaaacaaacttagcatgtcaatcactagttgcactgttagacatttatccttgagaaataaaaacttatgttccatc

SEQ ID NO: 223738 - DNA, 256 bp, Homo sapiens
atgtggggttggaaagaaaagattaaaataaacacatttgtatactgttggtgggaatttaaattggtgcaaaatttttggagtacaacttggcaacatattttaaaattttaaatgtcctttgatgcactactaggaatttatcctaaatatatacttacaaatgtaacctaagatggacagtattgtaaaaattgaaaataacctgagtattcatcaattttatcattaaataaagttatttattgctacagtt

SEQ ID NO: 223739 - DNA, 1072 bp, Homo sapiens
ggtgtgcaccaccatgcctggctaatttcagaatgattttcaacttcacattttgtatgtgccagtgaaaagaaatcttttttattatttctactgaaatatctatttctgtttcttagaattttacagttccaagtagattagcttagggactaggacatgtctcataatgggagagcattgcatattcatgtgtttcaaactccaggtcaggacccattagtggattgtgacattgatctagtgcggaaaaccagcatttaaaaaaatgaaatggtgtaagagaaaaatgatcacaatgtaccatacatagctaaggaaaatgttttgtgtaacttgtttacgtgtgtgcagcacatgtgtgcacaggtgtataccggatcatagcgtaaattcatttcttactgaaagttgtagtcaaaacattttcacaacactgttttggatgaagcttatacctcgtcccctgtgttactgggcacaaaacttcaggatgtaagaaagaactgagatcctgtgcagtggaaccagaggtttagtgctgggctctggtctgaggtaaggtgccagtgtctcagtagcgtgagcagggcgggggagccgctgggaggatgacaggagaaggcccagccgggaatttgcatacacaaattctgttgtaatggtgatcacagaataggttggctgatttacacagagagaaaggatctgttgtgttcctcagtgaaatcacaccatttgcagagagcaatcttttcctgttccccactgctcaagttaatgtaaaaacctgtccctatctgtccccatcaagaatgagatgtttttcttgttttattgttggaggaacattgactttcaaaattgaaaaaccttaatggtgtgaagaaatttcgagtttaaaatattacataatgtcatccttcaatacggaaattccttttgaatttccaagttaccagaacaaaagtctaatattttaaaatattcatgtttggaaacaggttggttgtctggttgcgggccatggccgatattctctcagccgcagaatagatgattacaagcacct

SEQ ID NO: 223740 - DNA, 350 bp, Homo sapiens
aagcagacttatccaatgtgaaggaaaggaggcagtttgggcttctgctgatgatagacttgaagaaggtaaaggtcttacaccttgtataatatagtggtaggcctgtccaagaagttagaagcattatgtctagcagtggcttattctcttccgtagatctcactgcttgggaattttgatacattccaagaatttaacacaatgaagaaccagaaatgtatattaaatacttggaaatgatattcttaataagcactggtaaaacagttaacttgtctctattttagagatatatctttttcagtggctataatgcatcgttacatatcagaatcacttggggactt

SEQ ID NO: 223741 - DNA, 432 bp, Homo sapiens
gcacgagcaggtctctgacatgtagaaataagacatacatgaaaaaagtgagataaatatcagtttaacacaataacactatgtacattatgaatagttaagtcttatacttctagggaaggaaggagacttttctgaactgatagtttgggtagggttactgtaggaggagagaactgagctggacttgtaggatggggttgaatttccttgagaggagtaaagcgggtatatgagcaaatgcttagacatgaggtataaattgagcttgggcaatagaaagaattcagctgtggcttgagtagagtgttaggaagctgaatagttagaggaaatttcaaaaattaacttggggccagactgtagaagaccttgaattttaacagtaggagtttggactctaagaagttaagagttggggcagaaaaaaaa

SEQ ID NO: 223742 - DNA, 546 bp, Homo sapiens
gaaatgagcaaggggaggggttccctgctagcttgtgccttatctaccagaaagctgagttggcaccttcctgggcagaagtaagttgtaaaactggccaagtgtgcatgctttcggcatgctctcctgaggtgaccccctggatgtgggagttccaacctggagcacatagatgaacttgccctggagggaatgttcaacaaagctgacaaaaacaagcaatgaggagaggactccctattcagtaaatggtgctgcggttactggctaggtatatgcagaagaatgaaagtagatccttacctttcaccatatacaaaaattaactgaagatggattaaatatttaaatgtaagatctcaaacaaaaaattccagaagcaaacctagggaatacccttcttaacgttggctttggcgaagaatttatggccaagttcccaaaagcaattgcaatagaaacaaattgacaagtagggcctaaataaataaaagagcttccgaacagttaaaaagaaagaaagaaagaaagaaagaaagaaagaaa

SEQ ID NO: 223743 - DNA, 363 bp, Homo sapiens
agtgctatcaggaacccatgggagagacaggaatgttttcagaaacctcagcctgtcctctttttactgaaataggggcccttgttgatggtagtcactgcccatgctgtttagcctaaggaaggtgacagtgggtgggccacctcaggccatatggaggaaggcctggcacagaaacacaaggccaggcaggctgtggctagcctgaatttagctgtagcctcagaatcaggggacttgggcttgacagctgacattacatggtgcacaactctggttaagtcacttaacttaaatcttatcccctcatctgtagatggcttgaagaccaaattaaggagctccttcaacaaatacattaaa

SEQ ID NO: 223744 - DNA, 415 bp, Homo sapiens
caaatatataatatgcaaatgaaaaagactgggctccaagaaagctttattacaaaaaccagcaaaaggcagaacttgacagccaaaccctgctcttcaatatatacccaaaggctggattcgccccatgcctttgagagtcttggttttttggttttaaaaataataacttgcttaagttgtgttactgttgccataggttactgtccatggtgttcagattttttagtataacctaaggaaatcaagctctgaaagcagcagcagaataaaagaggggccagccgggcacagcagctcacgcctataatcccagcactttgggaggccaagacaggcagatcacttgaggccaggagttagaaaccagtctggccaacatggcgaatcacggtctctgctaaaaatacaaaaa

SEQ ID NO: 223745 - DNA, 266 bp, Homo sapiens
attctggagatggtatggtgcagtggtcaagtttaaacaaatagaaattcatatataatcgcaggtttccacacatgaaataggtgatgaaaatttagataaatagaaaactaatctcaaaagtgttaaaaaaatgagttatttttggttttatgaagattatgaccaattaaagtaacgggataatgaaaagtaaataatgacaacaaaatcaagctttaacatgtatgctggtgacacccagaattgggtcctcagaaatttga

SEQ ID NO: 223746 - DNA, 295 bp, Homo sapiens
ggtttattttcaacagctgtctttcaagagctgcaaacagagagcaaatgtgaatgactgggaaaaggctatttccctatttcttcaatgaacctggtaaattgcaatttccaaatcagaggaactaccggatcaatacaaccaactttgaaggaatgtgtgaacgaagaagaagaaggccaggtgggatggctcacgcctgtaatctcagcactttgggaggccgaggcatgcggatcagctgaggtcaggaattcgagaccagcgtggccaacttggcaaaacctcgtctcta

SEQ ID NO: 223747 - DNA, 268 bp, Homo sapiens
gtaagaatatgatttcagaatataaacttgtggaaatattcttggtatagtggcaagaagtcagcttttagaatgggatatatagtcccatgcatctcactctcactgggtcacatctggatcaaggcataaggtttctttgactcttagatttgtcacctgtaaactcggaatacgaactctccaagttcttatgaggattagactagttagctgatgacaagtacctatcacagtgcttgacacaaggagatactcaataaattat

SEQ ID NO: 223748 - DNA, 410 bp, Homo sapiens
accatggaatactatgcagccataaaaaagaatgacatcatgtcgtttgcaggaacatggatggagctggaagccattatccatagcaaactatgcaggagcagaaaaccaaacaccacatattctcgcttagtgggagctaaatgatgagaacacatgggcacatagaagggaacaacagacactacacctaagggtggaggttggaaggagggagaggatcacgaaaaatagcaaatatgtactaggcttagtacctgggtgacaaaataatatgtacaacaaacccccataacacgtaacaaaataatctgtatgacaaacctgtacatgtacccctaaagttgaaacagaagttaaaaacaaaacacaaaaaacatgatcctgagttctttcaatggcaacaatcc

SEQ ID NO: 223749 - DNA, 495 bp, Homo sapiens
ttccagtcacatgcattgggcaccattacatgtccaagctgtgccaggatctagataaatggctgggctcagtccaaggggccttcctatctggcagtgaaaataagaggagataccaagggccctgagcctgagtctggaggaaaagtcatgagcacagggcagtgccagggcctgggagctgccacagaggagcccaccttggtgacagacacctgtaggctcatatgatgccgagtgcccaacacagggaactggacaaaggtttcatgcacgactcttttccctccttggctaccttgaggaccttgattataatagttagcctttttttttttttctttttttgagactcttgctctgtcgcccaggttggaatgcagtggcaaaatcttggctcactgcaatcttcgcctctcaggttcaagtgactctccttcctcagcctccctagtagctgggattacaggcgtgcaccactatgctcggctaatt

SEQ ID NO: 223750 - DNA, 239 bp, Homo sapiens
tcttgccacttctaatgttgcctcttctaatccctcttctgttatttatgcatatgggggaaggaaggaagagggaggtagtacgtgggtaaaggtaagaaacctcaaaatggaatgtggacttagggccgtatctacatcaggaatacaaaactttgtttaattttactttctaatatcatcattttttttttttttgagacgcagtctcgctctgttgcccaggctggagtgcagtg

SEQ ID NO: 223751 - DNA, 486 bp, Homo sapiens
gagactgtctcaaaaacaaaaaaaagaagtcagtggcctgataaaaataattcacatatgaaatgactacaaacataaaaaaaaaaaaagaaaaaagatctaaaatataatccctctcttctctgttttgcataccttaaactttatcttgttgcacaagtatttattggctaccttctctgctagtaaccacagagtaataaagataagttagagattggaaggatacaaagagagactgccagctgttttagttgtgttttataaacctctggatgattttgacattttgttatactttagcaatcttctttctgtctatactgtagtgacacattcatttattgtagccatggataatgtcagtagacttttggggaaaatattctttcatgttgtcttctgtagactagaataatatttttcattctgtcttttgggagcagagaattaagaggtacctaataaagtgagatggaggtggat

SEQ ID NO: 223752 - DNA, 186 bp, Homo sapiens
ctctaagaaataaaggataccaccttaagtgttagtaatgctaaaaactaaaataggaagtactaactttagcactcagggcttaaaagaaacttggatcatgacaagattcgaaagagtgttcatgaggcaatagcatagttattgtggggaatttagcagctgaattgaatatgttaaaagtaa

SEQ ID NO: 223753 - DNA, 448 bp, Homo sapiens
cgtgtgttctttggcaagtcacatctctctgaacttattgtccaccatcaaatgaagataataaagtatttcccaggggtatgatgtgttagttataattgtcaaataatagaatgcaagtgaaaagattttttaatctataaactctattgcaaatgtgaataattttttttctgttaataactaacattattcctcaataatctgtttagactgactctcacgctcacgaacattgctctttgttatctattgatggattttatgattagcccataaaatggtatttttagtagtatatattggcaagtaaatcttcctgatgtgactgctgataataggtactagctgatttggacgtgtattgttataaatttcatactgttagtaaaagatgaaaagccaagggaagaataaaaagaaatccttttaaataaaacaagataac

SEQ ID NO: 223754 - DNA, 401 bp, Homo sapiens
caggacacagtacactgctccaaatttgatgcggtataattaacacaacatcacctactgtatttatgccaaaaatgttaacttgaatgacatcaacagacactataagagtagttcagattgatgggtgttctgtgagacaaggaaaatatcagggtcatgaaggatagaaaaaggatagaagaattgtagattaaaggaaactaaagaaatatgacaactaaatacagtttctgattttgatcggattccagattttaaaaacatacccagctagaaggacattattgagtaaatgagggacatttgaatatggactgtgcattagataatgttgtatcagtgttaaaattcttcagattaacaatgatatgattctgttggagaatattcttgttctt

SEQ ID NO: 223755 - DNA, 352 bp, Homo sapiens
gctttgtctagcaatcacattcagtggattggccttgctcattgggagccactcaaggctacttagaagagatgtgcatctcaaacactgtctgctcagtccagggccactgacaagtcaactggtctgtgaatcctagggccggcttcagcattcaggaaaacgctttgaacttttaccagggaaggcacacaatttcaagtgaagccaaaagtcatgtgtttgtttctccttctgattagtctgatcatcaactgggactttatcatcatgggaacaaaaatactcagattatctgacaagtatcttagtaaccattttctgatagtaacatgtatatgtggatgatgaa

SEQ ID NO: 223756 - DNA, 400 bp, Homo sapiens
ggcaaaaggaaatactggatatgtgtaggggttacaaatttaagtgggagtgtgatagtgcaggtcttattctatcatgttattagatgaaagttacaaagatatatttctatgtacatgcaaaaagatatcaataaattcaactagccataggactgaaaatgcatttaaaatactttttaagattctatttgatacaaatagtcagaattatgcattcccaaagagttccattcaagccagaaagaagttagagatgccaaccaaatccatttaacactggtctgtaagtgctttaaaaaaaggtaatttaataaggaaataagataaataagcaaaattttaaaagggcatagatactagaaaaggggagtatggattattttaaagcaatgtaatt

SEQ ID NO: 223757 - DNA, 549 bp, Homo sapiens
tgcactgatgcatatacaattgaaagatagcaaaaagaaaagaggtcagagccttagcaaggcagaatggagaaacttctgaagtactgtaaaagattttcataagagagaaggaaggagaggatgactataagcctttctattcttcataaacttcataaaagcttaccaactgtctgcagaacgaaaagaattctatatagcctcttatgtcccaaaaacgttgatactcctctaaaagtgaatttttttcagacacttgaggaccactcactgattccacatcccttatattggaattaaacagctgctaatagcataacattagaaacaacctaaaagcccatcattatggaactaattaaataaattacaatcggccctctgtatccacgggttccgcacctgtggattcaaacaaccatagatggaaaatattcagagaaaaaacaaaattatgtctgtactcaacatttacagacttttttcttgtcattattccctaaccaatgtagcatttacattgcattggtattacttttatgttta

SEQ ID NO: 223758 - DNA, 421 bp, Homo sapiens
gccatggatcattccctcaaaagaaaggacacacacgcaaaatctcctctctatgtctggaggttcttagacttctggcgctcatggagctcaggatccgaactcctatcttgaacagaggcaccactgaaatgtaaacgtttgcaaatgtttattaagactgtattatgtgccaggcactttgctaattgccagggatgtaaagatcagtactactcaaggagaaaaacaggaaagggatctgtgtttctgagtatctctgtggagcttggcactgttcaagccctttatataggctatcttgcttcgttcttgtaacaatacgtttgaggtcggcattatcctctttttttcgtgggaagaatttgagtctcagaggtgaaatggccttttcaaggtcacccagctggtcagtaaaaga

SEQ ID NO: 223759 - DNA, 235 bp, Homo sapiens
atagctatcactgtacatatgaatactgtccaggatatcagatcaattatcaaatccaaggtctctggtgttttgtctcacagtgttgaatatatgaatgcttctctattatactgacttgtattattttcaacaaataattatgtggactcaaaatcttacatttttatttcttttcttttttttttttttttttttgagacagagtcttactctgtcgcccaggctggagtgc

SEQ ID NO: 223760 - DNA, 349 bp, Homo sapiens
tagtggaaaatggtttgctaaggttgtgctttgggctcaccaggctgctgaatggggttcctcagctttgggcatctggtggcagggaccttcaggagtctttcccatgtttggaccagtgcatcagtgaggctgtcactgcagagaaagacgctaggggtcaggtgatggactgctgcttctttagagcatcaccttcatgactggctgagtcaccaggatggctgaaaaacaggttctagaaaatcaaacattctggaaagccctggaggaaccactgggagacagagaaaatattccgaaataaggagtttagaatggggatagtctctgagcctgctaactggtt

SEQ ID NO: 223761 - DNA, 470 bp, Homo sapiens
gaatacatttaagtgaatatgtgacttctaaaaaattaccagggataactttagttttattaatgtgattaaaattattttagctttatcaagagctggtattttgtttcttaaggtagattttaacaaactgaagaaacattaaaagccatatttatatatgtatatgtgtgtatagataggaataacaagggctggccatggtagctcacacctgtaatcccaaaggaggccaaagtgggcagatcacgaggtcaggagttcgagaccaggctggccaatatggtgaaaacccgtctctactaaaaataacaaaatttagcggggtgtggtggcatgtgcctgtaatcccagctactcaggaggctaaagcaggagaattgcttgaacccaggaggcagaggttgcagtgagctgagatcaagccactgcatcccagcctgggtgacagagcaagactccatctcagg

SEQ ID NO: 223762 - DNA, 375 bp, Homo sapiens
gaagattagcaaaggtgctaatccagtggaaatcaggagaggtgtgatgttagttgttgatgctgtaattgctgaacttaaaaagcagtctaaacctgtgaccacccctgaagaaattgcacaggttgctacaatttctgcaaacggagacaaagaaattggcaatatctctgatgcaatgaaaaaggttggaagaaagggtgtcatcacagtaaaggatggaaaaacactgaatgatgaattagaaattattgaaggcataaagtttgatcgaggctatatttctccatactttattaatacatcaaaaggtcagaaatgtgaattccaggatgcctatgttctgttgagcgaaaagaaaatttctagtgtcca

SEQ ID NO: 223763 - DNA, 503 bp, Homo sapiens
tggaacagtttcatcctgaaaccattccccctgtcgccctgtccgtggaaaaattgtcttccacaaaaccatttcctggtcccaaaaagattggggaccattgatctagaatatttattccttccaatcatacattggtatgtcttcagataatccaaattaacctgaatactactttaggtcaagcattttcagaaaacacttgctaagaaagaaattatgacatagtcccggatgtcataatgtgacgtaatatgtcatactgttctcggaccaaagtgaggatcactctatttctcgtggcccaataacgagatgcaggtgaactggagaggaagagagtttttattttctgcaaccagttatagggagaaggcctggaaattattgccagaccaactcaaaattacaaagttttccagagcttatatgccttctaagctatatgtctatgcgtaagtgtgcattcatctaaatacataagtgattaacttcttttaatc

SEQ ID NO: 223764 - DNA, 322 bp, Homo sapiens
tatctgtacataatgtgtctttttttctttggctgcttctaaggttttctctttcccaattgtatcaatcaatttgattctaatgtgccttagtgtagttttctttatgttctttgtgttttcagtttgttgagtgtcttggatctatcagtttatgctttttgtcaaatttgtttcttttttttttttttgggaaaagaatttttcttttttcccccagcttgggtgccagggggggaatttgggtttattgaaagctccgcctccaaggttaaccccttttttttgcttaaacctccggagggggtggaatttaaggccc

SEQ ID NO: 223765 - DNA, 266 bp, Homo sapiens
gcttcatcatctcatcattaaagatttctttctttctttaaagaaaaaatcttagaaatctttcctgaatctaaaaaagaagtatcaaatggactaggaaagctttacagtaacaaggagttctggaagatgatttagtattcaatcatttgatactcagatgacaacaaagtctccctttccacacatgaataaaatgtcacattccatgagtttatttcaagaaggaatgtgaaggactaatattaaaaattcattaagaaaat

SEQ ID NO: 223766 - DNA, 522 bp, Homo sapiens
tcctataggtggacccagccgaactccgcagcagcccaggccagcgccccacctccgggtcaccggcatgatccgcctctccccgggcccccgcggccctggcacccgaggtcagcgggccgtgggtacagctcagccgcggaccctgctccgcgagtgcgggagctttggacttgaacgcgacgtgctcgcccggctcccaacaaacttgcaatttccgcgcgcaccccttaaacaggaactgttccccaaaccttgacccagctaccccgctgtgctctggcccgcggacctgtgtccgaacccgggctcggctgccggaaccggtttgagaaaacaaaagagttgtggggcagttttccctgtggggggcaggggcgcctcccaggtccctgcaccccgactcccggctgctcccctggcaactaatccggagaagggaagtggtgccacgagcccccactgcccggggagggagggagagagaagggggaactgggaaataaactgaattctcttact

SEQ ID NO: 223767 - DNA, 360 bp, Homo sapiens
agctctctatttagtgcttttcttccctgggaaataaaaggtgtgtttagaatctccaccttgttagtacaaccactgtgaagatgtctggaggtttctcaaaaaactaaaagtatgattcagctatccctcttctgggtatataccccaaagaaaggaaatcagtgtatcaaagagatatctgcactcccacatttgttgcagcattgttcaccatagctaagatttggaagcaacctaagtgtccatcagcaggtgaatgaataaagaaaatttggtttatatacacaatggagtactattcagccataaaaattaatgagatcctggcatttgcaacaacatggatggaactggaga

SEQ ID NO: 223768 - DNA, 362 bp, Homo sapiens
tggataaagggcataatcaagaccagctgggagaatgaggagtgttatatgtttagtgaaaatgtggaaaagtcattgggacaaattgtggagtcttgaatgcaaagccaagatgtagcctaagtcgaggagggatgtgatgaaggtgtgaagtcctccattatgcttcttcctgaaatttctctgaagtctgtctcctagcttttactccccattgcctttgctctgggtccagtccacattacctcttgcctggaccattcaaacagctcctgcctgattgctcctcttcctcaccttctccattgttctacatcaacttaaccttcctaaagcacatctctccatcagtgtttctctct

SEQ ID NO: 223769 - DNA, 541 bp, Homo sapiens
actgcctttcattgagtaggcactcaaatgttaaatttcattcttgtcctatattatgtgcccttatcattttatcacttaaagggactttactcagtgtcactaaccagattgactccatctatccttccatatttatctacagattgtctccatcaaagtgggtattaggaagctagcttgtacttgatgaacctgtttcagtttctcgtcctccctgaaaaggtttaccccaggcagtctggctatcagtgcagtggacctcacatctatgttggttatgtaggtggatggatgaaactaggtgggcctatgttccatcttttttctctcttttaggtagatgacagatttcccaagggagtgagggtctacatagtagcatcattctgtatgtgctgtgagatcagctcttggccaaagtaggctcaaatctacatggattagcctaggacctactttctcattattaccatctcaagaatgggtgttgtcattcaggttggtagtttttccctggtttctctaactgagctaggtc

SEQ ID NO: 223770 - DNA, 522 bp, Homo sapiens
cataatttcccactgttccttataggtctttgcatagaagtatgcaaacatacacatttgtgttcttaaaaacaccccaaaactccaacaggttaagctctacccatttgttctacacttcactttttttttcacttaacagcatgtcttgatgatcagcccataccagtatgtatataatgcatcattccttttgctggctgcatggtattccaccacaggaatgtgtactggcaggcagtattgcatagagaccaagaacctgtggtctgaatcctcaatttaccacttattagctatgcatcttgggtaagttacttaagctcactctgttttaactttcttatctaaaataggacgtataacagtacttaactcataaggttgttgttaggcacgtagaaagtacctaatgtattttatctgtcactatgtatagtaatttatttaaggagaccctattgaaggatagtgaagtttttgtcaacattttgcttttagaagcatcacagcaatgaatag

SEQ ID NO: 223771 - DNA, 603 bp, Homo sapiens
gcaccggcgcacacatcagccgccgcgcttccgggaagccacccatcagccggaggaggcccgcgggtgctgagggctctgccgccgctagcggggtggactccgcagggccagcgccgcagtctccgccccacgtcccgcgtgcccccgggcaccggcaccgggcgccgggcacctaccgtcctcctggtccaacaccatggtcccgacggctccagccggactagcgccgaggatacggaggggcgcgtggctccgactcccgccgccggccgcctgcgctgctcccgccggccccgcgcgggcgccgagtccggagagccgcgaccgccgacgggggcagacggaccggagtccggagcgcagccccgcgggcagggagcgcaggaggagggactggggggaaggcgcgggggcgagacggccaggccgggatcgcgggagcctcgcgagcagcagctgcccgggccgggccgcagccggagcctgagccgcgcgcgcgtccttcctccgcgccggccgtactcgcctcagcagagtgaaggctgcatttcccagggcccctcagattcccctgttaattaaatcaattcattatgctca

SEQ ID NO: 223772 - DNA, 719 bp, Homo sapiens
gtctaggtggcaaagccagactccgtctcaaaaaaaaaaagaagaggaaattgaggtcttgcatggcaaggcatcttggtttagttgttcttgtctcataaaacttttgacagggaaaatagaaagtcctgtttaatgctctgaaataaagctgatgtgtttgagctatcacccacgtagcttctagtcatggacaggtcttgtttgtagctagttaaggtatctgcaaggtgatgtctctgggtagcagcctctcctcctaaggagtatacagttgtccctcagtatctacaaggattgcttccaggacccccacagataactaaaatcaacagatgctcaagtcctttatgtaaaatggcatggtgtttgcatacaacctacacacatcttcccatatacattaagtcatctctggattacctatacctaatacagtgtaaatgatgtgtatactgttgttataccattttgtttacgacatgaaaatgatatgaaaaaaagtctgtatgtgttcagtacaggtgcttcttttcccgaatattttcagcctgaggtggttgaatccacaggtgcagtacccatggatatggagtgctgactgtatttgaaaatggtcacaaacatttcagccctattgcctgcttctctctttccaataggctgcaggcagttaggccttttatcccggagatgtgccacactttgaaattgtcata

SEQ ID NO: 223773 - DNA, 189 bp, Homo sapiens
ccactatgtttctcatttggtgttaatattgtggcctcagatttcctctcataattgcttcaataattacaatctatacataaaaactgaaactcattatttatgagcttgtagttctgttgtatgtgtacaagagctattcaaagaatagttgaaaaggaaaactatgaataaaatattattctcatg

SEQ ID NO: 223774 - DNA, 403 bp, Homo sapiens
aggtgtaagtaacaataaaacaaactaaaattggcttaagtaataaaggaatacaagatcttgcatagccagaagtacaaaggctgcagggatgcttggctcagcagttcttgtgttacaagggcatgacaggacaaagaccttatggccctagaatgtttgctatctgaccttttacagataatgtttgcttaaccctgacctaagagagcatcctctgatcatagaagcatattctcagccctctctaacaggtgctggaagctgggataggacagacactgagtttccgaaaattgaaaagtcccttctgagctttcttgcattgctgtgttccttggctccaagaggggttcgggggaagatgaagggcaatgcagcaaaggaggggctgaggagcaaa

SEQ ID NO: 223775 - DNA, 135 bp, Homo sapiens
aggcttattaaaacacattgccaggacttatatccagagtttctcactcagtgggcctggggtggggccaagaatgtgcatttctaacaggttcttaggtgatgctgctactgctaatccagggacaaccctctg

SEQ ID NO: 223776 - DNA, 374 bp, Homo sapiens
agctgagccaagagattattttcatttaaactataataactagcatcatcagagaataggtcctgctgcctaatttaacatccggttaacgaaagttaatatatgtatgtctctctcattcctctcctctccccgtctctcaatacacatacacatacatacaacaaacagaccaagaataaaactagctttattgtaacatttgtttagattggaaagttccacttaatcatgtatatctcctttcagaattctaaagcaaatgagaaatagatacataaatcacgtatggatcaatttattatcaacctcattattgttaatgcgggagtagaaaacaaaacgtgcatgagagaccaagcccttcccttccc

SEQ ID NO: 223777 - DNA, 402 bp, Homo sapiens
tgggtgacagagcgcaattttgtctgaaaaacaaaaacaaaaaaagctgctagttaagttttaatactcttgaaggcagtggaactgcatttatttaaaatgtttcatactttaggaatttagccatctttttccgtttagcaaaccaggaaataatttaagcaatatggctttatttgcagaaataatttttaataccagaatatatagttttgagaatttttgtctatcaaagcatttagtatacttgatgtttagtaaacttttttaaatgactaagcagtttaaaatgaaaaagataaaatagaaatatgatgtagtctgactataattgggtcaaacctttattgagagaagatacatttctcaggtcatcttccagaaagtggtatctcttcttag

SEQ ID NO: 223778 - DNA, 343 bp, Homo sapiens
acaagccataaattttacccactcaaaatgtacaattcaatcacttttaatattctcatagagtcctgcagccattagcacaatcaattttagaatgttttatcatttataagcaaaattcaatgtccatagagcagtcacttcccatttcccttcaattttcccactcctaggcaaccgttaatctattttctgtctctatagatttccctatttttgactttccacataaatggtatcatagaatatgtggtcttctgggactggcttcttttacttgacataatgttttcaaggttcatacatgttgtagtatatgtcagtacttcattccttttttttt

SEQ ID NO: 223779 - DNA, 238 bp, Homo sapiens
ccccaggaccctcccagatgctctgttggcagatgctgcccgctcgtttaagccaagtgatgccatttaaattacattgcaggcctgctccatgccacagctgtgcttcctcagccctcttgatggaatgctttcctgtaggcagcgccctgcacaagcagcctgtgccagcttggcacccctgacccagggctgtctgggtgtgagctgcaaggagcggggggcacaggtaggggct

SEQ ID NO: 223780 - DNA, 601 bp, Homo sapiens
agccattcatgagggatccacccctatgacccaaacaccttccaccaggccccacttctgatattggggattacatttcaacatgagatttggtggggacaaacatccaaacaatattaaatgagtcatctattgaatgtcactctttggggtggacaagggaagaggatgtgaagaggaacaagacatgggtcccagcctcaaggagaggggccatccggatatattgggctaaacaaagtatgctattaacatttattttactttttacttttctaaatgtgggaactagaagattttggctaatgaaatatgagcaaatttttacatttatggctcctattatatttctactgcattatattattctaaacagaagatacagcaagtgcaaaggccctgtggtagggaccgagcttcctgtgtttggtggttctgtactcagtctgcatgttgatacttacttgctaatgtcactagacctggagaggtgatgtgggaagccctgttgaacttacaagggggagtctatgagtctttgtcctttcttctcaagcagagagcaaggtcatgaaattcagcccttcagactgatgcctcc

SEQ ID NO: 223781 - DNA, 347 bp, Homo sapiens
caatgtcacatgacatgagagaagccttagagatcattttgcctacaaattctaaaatgaagcaggttagactgggatagagaggggaagtgatttacccaaggtccatcagctaggtaatggttttagctgttaagcctcagattgaacatactacattatgctttttttttttttaaagtcatagtataacatcagtaacaaaaatgagcatctcccttgccccagaaggctgccaaaagaatggaaagaagtgttttcattttttatttaggtacgtgtttatgtaaaggtgatggatgagtatttatacgaccagaacaatactacactgtatgaaaatggtg

SEQ ID NO: 223782 - DNA, 536 bp, Homo sapiens
gcactcactttttgtgtgcttttgtgcacagttctgtagcatttgatcccaggtaaccaccatcaataatcaagacatggaactgttctgtcaccacaaaagaactcgctcgtgctgcccgtttagagtcgcgctatccctcccctcaacctctgcaaccacttctctgggttccctctctacaattttgtcatttcaagcacattatataaaaggaatcatataataccttaccttttaagattggcatttctcagccaagtgtggtggcccacgcctgtaatcccagcactctgggaggctgaggcaggtggatggcttgagcctcagaagttcgagaccagcctgggccacatggtgaaaccccatctctacaaaagtacaaaaattagccaggtgcgatggcatgtacctgtagtcccagctacttgggaggctgaggtgagagggctacctgagcccagggaggttgaggctgtgttgagatcacaccactgcacttcagcctgggtgatggagtgaggtcctgtctcaaa

SEQ ID NO: 223783 - DNA, 372 bp, Homo sapiens
agccccagctctaactccaaacctgagagcacatgggaagtcattcttctgggccaacacagcaagtgcaatactaaaaactcatttaaagtccccagtatgtggccggccctttgcagacacttcacacatactctcatggccttaggagctgggtatatttttttttttccccagaaaagtgaggctcaaagaggttaaatccaagttgcccaaaaagatttgaacagacatttcaccaaaaaagataaacaaatggtgaagaagcacgtcaaaagatgctcagccttaaaatagttattagggaaatgcaaatcaaagcccaatgagataccacttcacacccacaaatatgactgttcttggttttaa

SEQ ID NO: 223784 - DNA, 914 bp, Homo sapiens
tcgatcgagctcggtccaatgccgacatacacccatgtgctgtgccctccctgtctccctctcccaagctcctgcatggaaacagaggtggacacgaaacctacctacccaccccctcccaggttaccgccatcactttcatcacaaaacagagtctggattcagggattcagcccagggcaggagctcaggtcatcttcctctttcagaagggagatttctgctgcctctggcccagcctttccctctctttccccccatgagctgccattggagcacccacctgggtgcaggtgagagagaggaggaaggagaccaggtgaccccttcctggctggttaccctatgtcccggtaacagacggttagagctgattctcatggcagaagcgtgactgccagagaccacctgcggcgcttctaatgctctggtccgtgtattcgtcttgtagcgttgccgagtgttacagagatccacagaccaggtggtttaaacaaaagatacttattctctcacagctgtagaggctacatgtctgaggtcaccgtgtcggtaggcttgctttctctctggcttgtagacgccgtcttctccctgtgtcctcacagagtccttcctctgtgtgtgtctgtgtcctcatctcttcttatgaaatgtcttagtctatttcaggctgctgtcacagaataccataggctggatgacttacaaacaagacatttattctcccacagtcctggaggctggatgtctgagatcagggtatgggcaaggctgattcctcctgaggtctctctcctggacttggagatgctgtcttctccctgtgtcctcacagagtccttcctctgtctgtgtctgtgtcctcatctcctcttcttatgagatatctagtccatttcaggctgctatca

SEQ ID NO: 223785 - DNA, 949 bp, Homo sapiens
ttttaggtcaagaaagactgtgacacacgtgtccagcacgccaagcacacagcccgtggggtgtcatccatgtgctgtgccctccctgtctccctctcccaagctcctgcatggaaacagaggtggacacgaaacctacctacccaccccctcccaggttaccgccatcactttcatcacaaaacagagtctggattcagggattcagcccagggcaggagctcaggtcatcttcctctttcagaagggagatttctgctgcctctggcccagcctttccctctctttccccccatgagctgccattggagcacccacctgggtgcaggtgagagagaggaggaaggagaccaggtgaccccttcctggctggttaccctatgtcccggtaacagacggttagagctgattctcatggcagaagcgtgactgccagagaccacctgcggcgcttctaatgctctggtccgtgtattcgtcttgtagcgttgccgagtgttacagagatccacagaccaggtggtttaaacaaaagatacttattctctcacagctgtagaggctacatgtctgaggtcaccgtgtcggtaggcttgctttctctctggcttgtagacgccgtcttctccctgtgtcctcacagagtccttcctctgtgtgtgtctgtgtcctcatctcttcttatgaaatgtcttagtctatttcaggctgctgtcacagaataccataggctggatgacttacaaacaagacatttattctcccacagtcctggaggctggatgtctgagatcagggtatgggcaaggctgattcctcctgaggtctctctcctggacttggagatgctgtcttctccctgtgtcctcacagagtccttcctctgtctgtgtctgtgtcctcatctcctcttcttatgagatatctagtccatttcaggctgctatca

SEQ ID NO: 223786 - DNA, 543 bp, Homo sapiens
ctgctctctggccttgctagggaagagagagtgagtgcacggcccctcgccctcccccttacccccaccctggagggggagacagatgttctgaatcccaggctctctgtgagttctacctgtcttccaggtgcagtgctagcagggaggacaaagagctgaggagtcaggccacaaggtcaagggaatgccttccctgcagcaggaagagccccatagccaggggagggccaagaaaccagggggagggaaccccaaactggagttggaagggacctcagggccataagccccaaatgctcacttcagatgagagaatgcaggccctgaacagggaagtgattccccagaaccccagaactcgcaggtcagtggcataaccaggacggaggccttccagatcctgggtccaggtccttcatgttatgcggtgctcttatgcctcctctgccagttactgtcctctgggcctggtggtcccctctgaggtagcagagatgcaggcttaggaggagctaaggaagcccctagagggcccctgca

SEQ ID NO: 223787 - DNA, 522 bp, Homo sapiens
taaacttggtcttagaacttagtgtcaggaactggtctctctggtttatctttgtcctttccccctactttagacttgtggacaatataatgtagtgcttaagaatgtgttggcagtcctgagaatgtgccatatggaacttgagagatagggagcataatggaccatgggccacagatgctgtgttcaagaactcacggcttcacttgcactgacacacacctcccactggctgctcctggttactgactaagcacagtagggagctaaagggaagccctgtcctgggagacagggaactcctctaatggcaactttggcctgaggactgtctgatggtcttgccaaaccttccttagattgccttgctgtccagatcacttgcatccaccctttcctttcctttttaaaaattctgtaatgacttatatagtagtttgacatctctccaattcttttctgacttctttctcattttaccatagacaatttctgaaataaaatacttatgttttttattct

SEQ ID NO: 223788 - DNA, 389 bp, Homo sapiens
gtaaaattaaaatactagctccagtcttccatcacgagtccactttacgttatagacatatccaatcccctttaggagaaaaaagaagttctatttttattttcaaggcaggccagcgcccaagttgtctgggcatggtacttcagccagcccagtaggcagccaggactgtggggtcatgagaacttccactctcagccccgggaggacctgggccaattatactgctagaggactttacaattttttggcaggatggggcatttttccctctatcagattcttggtcacataaagaatcaagcttgaggggttgggacttccagaaggacagagtcaggagctcagctgaccctctccgcagcaaacaacaatttgatgaaaattat

SEQ ID NO: 223789 - DNA, 395 bp, Homo sapiens
cagtgtggtctatccatgcaatggaatattactgggcaataaaaaggaatgaaatactgatatatgctccatatggatgcaccttgaaaacattacgctaagtgaaagaagtcaaacttaatgactacatatggtaggatttcatttacctgaaatgtccagaaagggcagattagtgactgcttggtgctgggggttgactgaaaatggtcatgactattcttttcatggatggtggtgaggaaatgttctaaaaactggattgtggtgaagactgcaaaactctgaaaatttattaaaaatcattgagttgcacttttactaggggtgaattttatggtatgtaaattgtaactcaaaaagtgttaaaaatgaagacaaagtggtatctgtaa

SEQ ID NO: 223790 - DNA, 402 bp, Homo sapiens
tccacttaccggatttcttttggataacaaagacaggtgaattccagatagaaaaagattgctcgatgtgtcccaattttaactgttcaaggatcaaaatatggagtgcctccagcttatttttagggagcggccactgatttacccaaaccggtttctgagttttccaagtcaaggggatgggatttggaggcttgatagtgaccacttctaaaaagaataaccaagtcccgtaaaatctgatttatgggtaggtataataggctcggtgatgccttgtgctgatttccctaagcccataacttgaacaaatcccatttttgtcataatgtctttactttgctggctgtaattgccttgtggaaaagaaatctgtgcccctcgttgttgtaaaagttctct

SEQ ID NO: 223791 - DNA, 427 bp, Homo sapiens
tgcgctgtggtgttttgatgtgttgcctacctgtttttattactacccaccagctcgctatcaagtagtccttgacctggctatcattgataggtacactagtcttgagtaattggtactttaacttatcaactacttttaaccactgtgtaaaaatgaaagcaagaatagtacgttaataattgccaggcattcccttctgtactgtacatacaaatagaatttttacacatgtgcctgtatgtatatataggttgagtatccctaaatcagaatatgtgaaatctcaaatgttccaaattctgaaactttttgaatgtgaggtgacattcaaaggaaatgttcacgggtacatttcagatttctggttttcgaatgaggggtacttaactagtttagtatataatgcaagtattttaaaatgaga

SEQ ID NO: 223792 - DNA, 572 bp, Homo sapiens
ctgagaataacactgaaatgatgaaaaagaagacctgatgcttgaagagatacttgtaatcaggatgcaagaaagtggaaaaagagccatttttggagtcaggctgacaagagtttggatataagctccgtctctagatagatgaccttaggcacatttcctatttttgcccaacttcagtttataaactgtaatgtggggataataatttagaactgtaatattgttgtttgaattaaattacattccagctttgaaaactcctaaagagtgtctggtctatagtacacatttaataacactgtctaaggggagctcaaccaagtctaccccgagataacaaaaacatgcttagttatggaggaagttggtaccctagaatatagctaggaaaaggatttctctcttttcaagttggagcaaggaaagcatttccttctcctagagcttttatgttgctgcctacattaaatttgaagatgagaatcattagtaggaaaaaaatgtaaaaggaagaaggcattgaaaaagaaacaagtacaagatgcactctcagctttctccttcttcta

SEQ ID NO: 223793 - DNA, 379 bp, Homo sapiens
acatctctggcctccccaaacagatgtccaacatcccacccattctggcttccctgctttttcatggagacttttgtcctaccacttctgacccgggagtccacagaagaacaattcaggtcagtttctggaacagtccttccctggagtctctcttgcaagaccgttgcctctctgattcccgcacagctccatctcccaggcacgaggtcccattttattatcaaacatcaactgcatctccccgtcttggccagacacatccagaaatgcagggccagaattatgacgtgccgacttgccttcataaataatattttgcaatttccttgtctgggggcatggataaattattcttccacgtcaaggttacgatgat

SEQ ID NO: 223794 - DNA, 621 bp, Homo sapiens
agatgactaagtgccttgttccctcactaaatatctctgtaaaggaacccaaaaaaacaccttttgtcctctttaagccataaatttatattaataatatccaaatccatgttgaaccagtatttttgaagattgaccttcaggataaactaatagcacaatcttcatgccctttcattcataactaactgaaaaggttgacttttgtaccaggaacccaacgaagaaaacttgtatcttgtcagggttggtaacctggctgccattgactgagaccaaaatatcccaacagtttgtcctcagctgctaagctgctgtggttagaatcaaacgtagagtttctggcctggtgcggtggctcatgcctgtaatcccaacactttgacagtcctaggtgggaagattgcttgggctcaggagttcgagactaaactgggtgacttagtgagagttcaactctacaaaaaaatcaaaaaattagctgggcatgatagcacacgcctgtggtcccagctacttgggaggctgaggtaggagaatcacttgagctcagacagttgaggctgtagtgaccgtgattgtgccactttactccagcctgggcaacagagtgagacctcg

SEQ ID NO: 223795 - DNA, 468 bp, Homo sapiens
ttctggacccacagtccgcctcgctcttttactttagaaggaattgctccaagcagagtctacacaggtttcccctgtggcttttcttcagagagcgtgttgaccccagctagtgtcacggttctcacactgtgatctcagggccgttgacattccccaggattacggaggacctcagagagctttcccttttgaaactcactgttgcagagtccagacacaaagtggatcttagaagtctagaatgtgaagctgactttgggttgatctggaggtagtgatccttggaaaatttggaaataacctggcaaatgtcacctcgtgagctggcaagcgttttgtgacaaaaatgacaaaggcttgtgaccagaagggtccagactgacccctgcgacccaagccagggaagggggacaaaaaggaatggacagctgtcctgcaggaagcagcctgacctgagagctcccc

SEQ ID NO: 223796 - DNA, 432 bp, Homo sapiens
gtttagtgccttttataaaagaatatttaattcagttgaaacacatggatgaactaggctgaagagaatataaattatgattatttgggacagtctgaaacttattttttatttcatgaggactgtggcaaagtagacacttgaagataggctgggtgcaagagggagactccatctcagaaaaaaaaaaaaaagctgattacactataggtcaaagattattattaagtgccaccagagtaatacaaaaagaatcagcagagggaaagagtaattttttagaggagttacttagaatttctctgctgagtttgagagaccctggaagaattgatcagcagagtttaaggggaggacttccaggtcacgggaaaatcttaaccaagggaatggcagcagaaaattgtagagcagactttcattttgcttagc

SEQ ID NO: 223797 - DNA, 413 bp, Homo sapiens
tgacacagagattctcaactagagggcagggtgccctggtatttttaattcttatttatctccttgtggagatttaataatgtggaccattttaaacctcatgttaaaaatagtttcttttggccgggtacggtggctcacgcctgtaatcccagcactttgggaggccgaggcaggtggatcatgaggtcaggagatcgagaccatcctggctaacacggtgaaaccccgtctctactaaaaatacaaaaaattagctgggcgtggtggcgggcgcctgtggtcccagctactagggaggctgaggcaggagaatggtgtgaacccaggaggcggagcttgcagtaagccgagatcaccccactgcactccagcctgggcaacagagtgagactccgtctcaaaaaaaaaaa

SEQ ID NO: 223798 - DNA, 1186 bp, Homo sapiens
gtgcaggttagttacatatgtatacatgtgccatgttggtgtgctgcacccattaactcgtcatttacattaggtatatctcttaatgctatccctccccccaccccacaacaggccccggggtgcaatgttccccttcctgtgtccaagtgttctcattgttcagttcccacctatgagtgagaacatgcggtgtttggtttttctgtccttgcgatagtttgctgaaaatgatggtttccagcttcatccatgtccctacaaaggacatgaactcatcattttttatggctgcatagtattccatgctgtatatgtgccacattttcttaatccagtctatcattgttggacatatggcttggttccaagtctttgctattgtgagtagtgccacaataaacatacgtgtgcatgtgtttggatatatactcggaagtgagattgctgggtcccatgtgcaatagcatcaaaaagaataaaatgcttaggaataaacttaaccaaagagataaaatatttctacactgagaactacataagattaataaaagaaattgaagaaaacacaaataaaggggaagaaagcccatgttcatggattgaaagacctactactggtaaaatatccatactatccaaagcaatctgcagacacaatgcaatccctactaaaatcctaatggtattttctacaaaaatttttttaaaaatcctaacattcatatggaacaactaaggactccaaatagtcaaacacaaactttagaaagaacaaatttggaggcatcatacttcctgatttctaaatttattacgaatttacagtaactttaacagtacagcaatggcaagtcttagtacatcctcacttttattataaatgggtgttttttcataatttttactgacgctcagtaaccatgcaaaattgtgtatagcattaatgtatctacatacctacacctatctatatataagctcatggtagaaaaccatagctaagtagcatcgcagacttaagcgtacaaagtgatcttgttcacaagtaatctgttgacagtgccaataaatgataaaaaaaaaaattaacatgtcacaatgtaacggatgaccatatgcacaattccatgaattaaatctgtttcctgtgttagtcagtattcttaaataaaatttataattg

SEQ ID NO: 223799 - DNA, 381 bp, Homo sapiens
aaaaaaaaaaaaagaaatattaacagagattctctgggtattcaagtcttatagaattccagctgatatttgaggaatgaacttttatcagatatttgatacattttagaaagagaatatttctaattttgtaaccccctaatgaaataatggatctcaccctcctaagaacacaccaccaccagtttactcttgccaaaaaatggaacctgatctgcctctggactagacaggaaatgtaagaaataggacaacatgttaaaggctgggcatggtggttcacgcctgtaatcccagcactttgggaggctgaggcgggcggatcatgaggtcaggagatcgagaccatcttggctaacacggtgaaactccgtctctact

SEQ ID NO: 223800 - DNA, 335 bp, Homo sapiens
ccagccctttgggaggccaaggcaggtggatcacctgtggtcgggagtttgggagttcagcctaacacagagaaactccgtctctactgaaaataaaaaattagtggggcatggtggcgcatgcctatagtcccacctcctgagaagctggtactgcatgtgcacaccaccacacctggcttaaaaatgttttttgaactaatggatgaacctgtattccaggttgttgcttttcttttttatgacaaggtctcactctgtcaggccatcttgaaccaggaggcggtggttgcagtgggctgagattgcacaattgcactctagcctgggcaaca

SEQ ID NO: 223801 - DNA, 449 bp, Homo sapiens
gtaacgctcaaagtagtattggcaaaacagagtgctgaactgattgtcagtaccctgttttcccagcgtgtttattttatgactctaagcaaagcagttgagcttactgaacgttcactcagtttctccgacagtgaaatgaggaaaataaggcctgctcacgtactttatcatcactcaccatgaggtggggtgaggcatgggtgaatgaatagcagaacatttttcaggagaaataataccctccattctggctttcatgctttctacctaataggtagttgctattgtgaaaatgcacatattcaagtctaaaatcaagtagctagccatatgactttaggccatccacttaacatttcttgttttatttataccaaagagagagagagagagagggagagttaggctgaattaacttgatgttggacttttttgcggggtgggga

SEQ ID NO: 223802 - DNA, 331 bp, Homo sapiens
gcctttaaaaaaggggcagctttatatcctgatatgtcacaatctccaagttatgtttggtgtggtagggaacgtggggaacaccgtggataatatctaccttttgtgtttttaaaaaaaaaaaagcaagaagaaaatgtatgtaggtgtttagaaatgcatggagctgtctctgcaagcatatgccacttaacaagagttccctacggggaaagagaattgggcatggaggacaagggaacaagggaaatttgcttttctctctctacttattgtaccctttgaatgttgtcccatgtgcaagtattattaaatacattagagaagaaga

SEQ ID NO: 223803 - DNA, 252 bp, Homo sapiens
tgaggtgatgtggaatacatttcaaagttgttccatccagggggtgaacatattgaagcatttatagcctggctcccatccgtcactggctgaggaatggtcccagggcatcaactctctggcttttttttttctttttctttttcttttttagacacagtcttgctctgtcacccaggctggattgcaatggcatgatctctgctcactgtcacctccgcctcccgggttcaagcgattgtcctgcctcag

SEQ ID NO: 223804 - DNA, 813 bp, Homo sapiens
agggcagggaacatcacacaccagggcctgtcgtgggggagggatagcattaggagatatacctaatgtaaatgacgagttaatgggtgcagcacaccaacacggcacatgtatacataagtaacaaacctgcacgttgtgcacatgtaccctagaacttaaagtataataaaaagtaataataaaaacacagtgaagctaagcactccggagaatgaggcccggagaggagcagtaaggctggagggcaaggtagatgcctggggcgtttgggctttctgcaagttctgtaggccttggggccactgaaagtgtttaggggcactcattagaaaattgcatttggaagtgtttccatggcctggactaggctggctgatgaggacaggaagaagctactgcaaagcccgctataataggacctgagcagggacccgtgagagaaaggcttaggaggcagaaaggatggtactctatccgtagcccaacctcatcagccagtgttctgtgactcatttctatttgtacaggcagtacttgtactgttcattggttttggttcttgtctcttgtacaatattgaaaggatcttggagacaggaacgcaattgcttcttcagtgttcgtttagcatcgggcaggtcagaattatttttgcaaaatggctccatcctacggccatgtcacaccatgtcatgcaagccttagccctcaccaggaaggttctgtctgttgcaccacattcatccacattctactcacaaacactggtcattgtgttaggcgatttggtagtgcccctgggtgatgtgt

SEQ ID NO: 223805 - DNA, 331 bp, Homo sapiens
ctgcttattctgtttctagtaactcttacagaaacaagtgtagtcagtagccaacatacatccatgtcagcctatatatgacttactaggagggcttagttttttaaaagagatgaaaaataaagagaaggtctagtattttcctcccacattccaacagatcattttatgtgccccctttgggtgagcacattccatgttgtagaccattgatcatagtagtcagagcatggagctctggagttcagaaaaattattttattattgttgttatgacaaaaataattaccatgtaaaggaaaagaaaagaaactcagcgaaaaaatttatg

SEQ ID NO: 223806 - DNA, 451 bp, Homo sapiens
accaatggtttgttttgagcttatcttcagttgtttggaagcaacctaattgctcaacacataggaaagggcctcattcacaattctgtcatcatgagtactacagagtctgttatgagtaggttggtttaatacacgggaaagtctaaggacatttttattatgccccaatacttgtttgaattggtaagtactgcttagtatttagtaacttaggaaactcttgggttcaatgggtgactgggaatacagcaagtagagttccatgttgaaccttggtagtatccacatctaaatcataaattactcaacaggagaaaagaaaatttatttttgtttgaatttactcattccatattgagctccatcatataccagacactatgttgaccctagctatataaattagaagcagacaattttgccattcttgacattggaaacaagagaa

SEQ ID NO: 223807 - DNA, 430 bp, Homo sapiens
aagagatctaagggagcatttctccagttatccccattcctggttgttttctatttctagatttcaaagcaggactcagtaaactaagtcaagggaattctatgtccggtgacaactgtcctagtgatatttcattacctctctctaccccatttattcccactgctctgcagtggtgtcttgggtctcctactcctagctcaccctccgaggagctggcaatcaagtacctgaatccctaaggagttgacagtcaacagtacctacttgagtagtcactgtcaactaagtactgcacaagggcaagatcacatctaggtgggttacaaaaaaattatctttcttaaatgatttctgggttacaaaaaattattttccttaaatgatctcaggtgcacagaactggattaaagctcaagcactcaccaaa

SEQ ID NO: 223808 - DNA, 502 bp, Homo sapiens
caaatcgtggttgaggtcaattgccgactgtttactgagaggatccatcattggagggcactgagggagctccaggaagcatgccttcatgcaacaagcatgcattgagcacctcctgtttatttttcaaatttattattatttttaaatttatttttctttcaataggtttttaggaagcaggcggtatttggttatataaataagttctttagtgagcacctcctgtttatgaggagaaactaggtttacaaatgagacagtgacaaatgccacaaggtgacactggtggggttttatctggggaggatgcttctttccattcccagtttggtttcaactgagaatttaaaacatgagagaggctgggtgcattgggctcacacctataatcccaacactttgggaggctgaggcttgcatattgcttgagcccaggagtttgagaccagcatgggcaacatagtgagaccccacctctaattattttttttacttaaaa

SEQ ID NO: 223809 - DNA, 414 bp, Homo sapiens
caaagtctctgtggcactgcatttggaagcttctaaaggctgcctgcattccttggctcatggcctgcatcattccaactttgcttctgtcatcacatctcttctaactctgacgctcctgcatccctctataacaacgcttgtgattacgttaggtccacctcataatccaaggtcattgttgagagacaaaatgagatcatgtctgggaaaatacttctaaattatcaactccctttctatggaagagggatgaccaaagaaggatgcactccttgtctggaattatgccagaggtcttaaaatgctcagaaatgaaatcagccttcttccctgtcctaagaggctcaggttttcggcaagtaactcataaaattaatgctccactgaaaataaaatctgatttgagtagta

SEQ ID NO: 223810 - DNA, 570 bp, Homo sapiens
cgtgcacagagaggcacagcccgcaggaacacagatgcacgcacacaggcacaggcacgctccctcactcactctctctcacacaccccaggtgcagacacccccacccagaggttgcagctcggatggagaaacaggctgggtcacaaaagccccgggaggcagcccctgctgtctggcgtcttctctggggaaagctttccggagcctgatggaggaagacagaggaaagagacctgtgttccctgatgcactggccagccgcttcccggggaggaggaggcagaaatacacagtaactgattgttgcctttggtctgtgaactgtactatggaacactggaacttactccttcacctgactgcatgtttgtgccccataaccagcctcactttctgtctgcctctcacccacacaccctgcctagcctctgggaaccaccagccaactctctgcctctgtaagagccactctttcagtgcccacaaatgagtgagaacatggtacatttgtctttctaccccggcttacttcccttaacatgacagccttcaattccatccatgttg

SEQ ID NO: 223811 - DNA, 455 bp, Homo sapiens
tctagaagcacccattcagaagacagttttgatagcaaatctaccgtcagagccaagagcaacacacttgacctctttgtttgagttacaaaagggcaccccactttctggctgacaaagctccacaccagaacatagagaatactgcaggtagatcaagagctggattttgctgggccaagtggctcatgcctgtaatctcagcacttcgggaggccaaggttaacagattgcttgagcctaggagttcgagactagcctaagcaacgtagtgaaaccccatctctacaaaacatacaaaaattagccgggcatggtggcacatgcctgtagtcctagctactcaggaggctgaggtgggagtatccctttagcctgggaagtggaggctgtagtgggccgagatcatgccactgcactccagcctgggtgacagagcaagaccctgtctaaaa

SEQ ID NO: 223812 - DNA, 486 bp, Homo sapiens
gtgggcaatggaagtctctttaggttggatacagttacctttggacatggtcccattaatttggttggttctttgttttcttgtatgatgaaatgtttcaggcttatctggtacatttcccagtcttcatatggaaccagccatttctctcgagtcctggttcttttacatgagaaatggtatttagagatcatggtctgaccactaaagatgttcattgctactgggttgattattgtttttaggccttttcaatgcgtagagctaggaattttttttttcaatgagaaaatatgagttcatactatttaccattcagatttatgaatataggctcttcgattttattactgcgcctcttctctctcacattgaaaatcatggcttcaggttgggcacggtagtttacacttgtaatcccagcactttgcgatgctgaggtgggaggatcacatgagcccagggattcgagaccagcttgggcaa

SEQ ID NO: 223813 - DNA, 555 bp, Homo sapiens
tgtaggcaagttctaccacaacttcaagaaagagataaccctatcttacataaattgttgtagaaaatggaaaaaaaaagttgtgagttcattttatggggctagtgtaactttgatactatattaccaggcagatataatatgagaaaggaaaactaaaggacagtttcacctaaaacatagatgcagaaattataaataaataaataattagctaaataaatccatgtgaaaaataccaaattgaaaacatcctgaacatgttggctttatcctatgaatggaaagatggttttaacattaggaaatctattaatataattaaccatattaatagactaaaagaaaaaatttgttgtgatgtaaggggaaaagcatgaattatatatgattcatgacaaaaactcgtaaaactaggaataagaaacaaccttcttaatatattagagacccgcaggaaacatttagtggtgaaacattaaaaatattttaacacttaaaataatgaatgaaataaatacatactattttgtctgtcaatttaaaaaataaaaa

SEQ ID NO: 223814 - DNA, 434 bp, Homo sapiens
gcacgagattcctgtgcaaaatgcacagccagatattccactctgagaataatccaggaacaaacttgcttgcaaaagcaggggaaataatgttgtgtgactaacttagtttcacttaaactcatagtaaagatcaccagttggggcatggaaaaggtaagagttagagataaaaaggaacataacgattatatgagaagttgatgtttataaaagaggttgatccatttatccaaatatgtgtgtttgcagccgtaggctgtgtctgccctattatgtatcctttttggataaggtttttgtttcgtttcgttttgtttatttgtttgtttgtttgagatggagttttgctcttgttgtccaggcggaggttgcagtgagctgagatcatgccactgcacttcaacctgggtgatagagccagacttgtctca

SEQ ID NO: 223815 - DNA, 562 bp, Homo sapiens
cactgtccatattattgagtcaaaatgcaagtttctaggtaaatactgctggtcaaaatttgaccttaaaagtttctcattatatagaagctttaattgaaaaacagcatttaattgaaaaaattgctatttaatcagtaatatttaagtaaaatgtgcgaacataatgtcacaaactgtataaatacaaagaaaatatatatgtgacaaaaattagcttgaaataaacctgtatgcccttaaaacataactatttttaaaatgattgaaaatgtatttcttgcctccaagaaatctgactgtgatcaaagaataatcccacacagatctgctaatttttaacatttccttcaaatctttttagaataaaaagttataaaatattacagatgaagttgaagtcctcaatagtttcattaccatctctcattccaaaggcaattactttaataaattttaaataatttacatatattttaatttgtatgtctggacaataatattgttattgtgtcttcaaagttatttataaatggtgtcaaataaaatatgccattctgta

SEQ ID NO: 223816 - DNA, 488 bp, Homo sapiens
  misc_feature (457)..(457): n is a, c, g, or t
aaaacataaagtggagaaaggacacccttttcaacaaatggtgctgagataatcggctagccacaggtaggagaatgaaactggatcctcatctctcactttatacaaaaatcaactcaagatggattaaggacttaaatctaagacctgcaactataaaaattatagaagataacattggaaaaacccttataaacgttggcttaagcaaggatttcatgacgaagaatccaaaagcaaatacaatagaaacaaagataaatagttggaacttaattaaagagcttttgcatagcaaagaaacagcaaagtaaacagacaacccacagagtgggagaaactctccacattctacacatctgacagaggactaatatccaggatctacaacaaactcaaacaaattagtaaggaaaaaaaaatcccatcaaaaagtgagactaagcccatgaatagncggttctcaaaagaagatatgcaaatggccc

SEQ ID NO: 223817 - DNA, 332 bp, Homo sapiens
aatggagtctgagctctcagcaatggcatgttaactgtactcaaagttattaaatctcaaacatgtggaaaagaaaaagtcataatgctaccagtggagaggagacagtgcacacgaaatctatgaatgtgaagacagcatgttgggaaatgaagcaaaagggaatttttcattacttgtatctggttttatgttacagtgaaagctatctggctactacagttggttttatgtagacctcatctataactacctaagcactccactgggctaaaatttaatcaaatatcttggtttctagttagtagatttgtggcaagcatcagtgattt

SEQ ID NO: 223818 - DNA, 552 bp, Homo sapiens
caatgggaagggaactcattctgggtccaaacaaaaagctggttggtgaccttaacgaatacaaccacgacatgtttaagactgtctgcacacgaaaatcagcaaacatcaaagatagcattgcacaatacggagtgtggcacatccagaaaattcagggggaatgaaattgcaaatgtaagggatagagtcaaagactgcattttaagtttatttccacccaaactggttcttcctctgccatggaataaggaacaactcagcaaagggagagaaagaaagcaaagcaatgaggagtttcagccgcctattctttcaggggaaagctggcgtgtgcttttcccaaactcagctataggcagaaaaccagaagtgaggccgcttcatcaggaaaaagagatgcagacagcccaagttacacaaatccctgagccttgtctgcacaagggtgtttcatttcatgtggctgctcagtatgtaaaggatgaaagtctcattttaagtaaatagtgacatggactgtggtgttgattaacaatcaaccatgtctca

SEQ ID NO: 223819 - DNA, 522 bp, Homo sapiens
  misc_feature (356)..(356): n is a, c, g, or t
  misc_feature (458)..(458): n is a, c, g, or t
ggaaagattaatttgcccaaggtcaaacaactagtaaaagaagtaaggattccaacccagatcttttgactctattatccttacatatagttttatagtgatttaaattgatacaaggataggtttaaatacaagtagagagaatgtaggttcatataaaactgattttatcctcatgttagaaaacatatacactgtaacagagggaggaccatcaagtgaccaagatattttagtcaaaagatgaatttttctgcaatttgaaaatgccaaaaatattcaaagaaaatataattcttgtaggcagtcttctatcaaaacccactgaaccaccgggcacggtggctcgcgcctgnaattccagcactttgggaggccaaggctggtggatcacctgaggtcaggagtttgagaccagcctggccgacatggtctctactaaaaatacaaaaaattgnccgggcctgatggtggcgcctgtagtcccagctactgaggaggctgaggtaggagaatcgtttg

SEQ ID NO: 223820 - DNA, 431 bp, Homo sapiens
aattgcaactcggtttatttaagcatctatcatggcagggtaaacgaggcagtttatctggcacctccattttgcttgttgctacctttatggtgtgtgtgtttgtgtgtgtgctctcacacaaagggggatgcggccggggggcgccgttgagagaggaggttaattccgcgcgagtggcgcggggggctgcttgtgttccagggggagctgttcacgcggtccccggccccgctctgaagtctcccaactcacccggcttgtctcccgcccccgccttactggggagagggaggcccttggtgaaaggcatgggagccccgctgccgacggggagagatggggcgccccccctccgccccgtcggagagctgagaaacttgctgggaaggttctgggctgagggtggcctcttttggttgggcgccgtt

SEQ ID NO: 223821 - DNA, 606 bp, Homo sapiens
atataattttacttattgctaatagagaaggcagtttattcttgtttgcatgtcctaaaaaccagtattcatttctttctaaaaatgtttatgtagactgggcacagtggcacacgcctgtaatcccagcactttgggaggccaaggcagaagggttgcttgaggccaggagtttgagactagcctggccaacatagcaaggccccatatctgaatgaatgaatgaatgaatgaaaaacaaaggagattattatttccaatagtcttagtaatggaacatttccagttttcttgaggaatgagtttctttggttttaatgaattaaaatggcctttggaagtcccctccctctttctgagtctcttctccagatgagtttggtatccttaaattgtccctgatactttttcttttattcctctctcgttctcattcttttcctattttaaaaattgtcatatggaattgttgcatacactccttaggaatatgtcacactagaattaggaggtatccacgaggttatctaatcaaatcatttcaaaatgcaggaattccttctatagcatctgacaggtattcacccagcatctgctaaaatactt

SEQ ID NO: 223822 - DNA, 641 bp, Homo sapiens
aacatgtcgaggctcatactgtaatcccagtgctctggaaggcaaggtggtaggatcacctgaggccaggagttcgagacaaacccgggcaacacagcaagaccccgtctccacaaaaatttaaaaaattagctgggcacagtggcacacgcctgtaatcccagcactttgggaggccaaggcagaagggttgcttgaggccaggagtttgagactagcctggccaacatagcaaggccccatatctgaatgaatgaatgaatgaatgaaaaacaaaggagattattatttccaatagtcttagtaatggaacatttccagttttcttgaggaatgagtttctttggttttaatgaattaaaatggcctttggaagtcccctccctctttctgagtctcttctccagatgagtttggtatccttaaattgtccctgatactttttcttttattcctctctcgttctcattcttttcctattttaaaaattgtcatatggaattgttgcatacactccttaggaatatgtcacactagaattaggaggtatccacgaggttatctaatcaaatcatttcaaaatgcaggaattccttctatagcatctgacaggtattcacccagcatctgctaaaatactt

SEQ ID NO: 223823 - DNA, 250 bp, Homo sapiens
tgatacagaatatattttctaaaaatcacgctgatttatgacacattactctgaaatacacatctcaagtccttaaaagaatatatgacaactgtaagaagccattttagataagtaatttgaaacattcttttctacttccaaatgacttttttcctatcccttatttttgaaatgtttattcaataaatatgtatacagaactgatgaaataattaaatcaataaacggcatatcctgccctgaagtt

SEQ ID NO: 223824 - DNA, 579 bp, Homo sapiens
tctgaacatttccagataaatggaatcatacaatatgtggtcttttgtgtctgcctttttttcacttaggttcataatgttttcaagatttatttatattgtctcatgtattagcactttggagatttttttaatggctgtataatattctatacggatataccatgttttgtttatccacttactagttgatgaacatttggattatttctaccctttggctattatgaattatgctactgtgaataatcctgtgtatacctacaggtgaactgctgagttaagagtctttttggcctggcgcggtggctcacgcctgtaatcccagctctttgggaggccaaggtgggcggatcacttgaggtcaggagttcatgaccagcctggccaacatggtgaaacccgatctctactaaaaatacaaaaaattagctgggtgtggtggcgggcgcctgtaatcccagctactcgggaggctgaagcaggagaatttgctggaacccgggaggtggaggttgcagtgagccgagattgtgccattgcactccagcctgggcaacagagcaagactcgatctca

SEQ ID NO: 223825 - DNA, 495 bp, Homo sapiens
tctgaacatttccagataaatggaatcatacaatatgtggtcttttgtgtctgcctttttttcacttaggttcataatgttttcaagatttatttatattgtctcatgtattagcactttggagatttttttaatggctgtataatattctatacggatataccatgttttgtttatccacttactagttgatgaacatttggattatttctaccctttggctattatgaattatgctactgtgaataatcctgtgtatacctacaggtgaactgctgagttaagagtctttatgagccaccgtgcccagcctgttacaccattttatataaaggatttgagcatcctgaaatgttggtatctgtaggagtcctggaaccaacctcctattcgataccaagggacaacttttcatttttagctatgataaagtttataaattaggcatgagagactagcaatgataactaataaatagaacaagtgtaactatag

SEQ ID NO: 223826 - DNA, 334 bp, Homo sapiens
gccctaggcagagggctggggactgcggatccgtccctgaagcgggacgcgaaccggcagagttgggagaagagcctccaaccccaggagccgagcatgtgcgtatcaacaaaatgaaactcggggagacaggagggcagatagctccaggttctcggagcccccgcccgggccgctcgacctccccaccgtacccatctcccgccgcagcccctacgcccggccggagcccgcggggaagttgcagccctggcgcgcccccgcccgcccgcgccccctcgccggcccgggggcgctttgccgcagtcattaataaagaaggtcgccaagctca

SEQ ID NO: 223827 - DNA, 292 bp, Homo sapiens
tgagcccagcgcgaggtcatgtgcaccggctcagcccggttcggcgcccggacgtgctgcgtatcaacaaaatgaaactcggggagacaggagggcagatagctccaggttctcggagcccccgcccgggccgctcgacctccccaccgtacccatctcccgccgcagcccctacgcccggccggagcccgcggggaagttgcagccctggcgcgcccccgcccgcccgcgccccctcgccggcccgggggcgctttgccgcagtcattaataaagaaggtcgccaagctca

SEQ ID NO: 223828 - DNA, 429 bp, Homo sapiens
catcttaaccttaagatgaatagatgtaaccatatggatatacatacatgtatgtatatacatgtatcattttagctttttttttctgtcagaggaaagctgcaacatactaaagtttgacagtaatccctagaatcttaatttgtaaaaagtaaaaaactacaaggtttctactttcaaaacagttatagtctttactcaaaatgtaaattaataaatgtataaagtttgtaatagtataataatgtataataatagtataaatgaagttgcataacctgcttttaaaatgtgtgtaattttatgtatttgacaacttaagcatgataaacacttaactgtttatattctacaagctcagtgtaatgtaaaaaatttgctaaagtcattttgttttaacttcaagtaaacaatgttttctgaattttt

SEQ ID NO: 223829 - DNA, 2139 bp, Homo sapiens
  misc_feature (1542)..(1542): n is a, c, g, or t
  misc_feature (1578)..(1578): n is a, c, g, or t
  misc_feature (1588)..(1588): n is a, c, g, or t
  misc_feature (1590)..(1590): n is a, c, g, or t
  misc_feature (1632)..(1632): n is a, c, g, or t
  misc_feature (1651)..(1651): n is a, c, g, or t
gaattcatgtttggatgtgttaactttgagatgcctattagacgtctaatggagacagcaagtagcaattgaatgtacaaggcaggaaagagggctgggataaagatgcgcctcttagagatatcagcgctttcagccatgggactaactgggatcacctgggagtaaatatacactaggagtgggctgagaattgagcccttgggctccctggagtttagaggtcaggaaaatgagggcaatgtcataaaggacactgaggaagagtagctggagtagaagaaaaaagagaatggcattcattccaggggtcaagtgaaaaaggatgtaatgagtttcctcaaatgctgctgctagagtaagatgaggactgagagttgactactgaatctagcaacatggaaatggtgaccttgacagaaacagtgtcattgaagtgagagcaatggaagcaaactcaagcaggtttggactcagggagtaaatggctttgtaggggaagcaaaatttccttctaccctcttcagttctgttgttggtccaagaattaaactgacataagacagattaacaggagaaaagcataccaattttattaatatttttacacggacgtggcagtcttcaaaagggaaatgaagaccctaggaagacagtaggccgtgaagcttatatacattttcacgcaaagaacaataaattatggggatgtgacaagacaaaggggcttgggcttggggcattaaattgtaggacagtgcctaggaaatacatgggggaaattaacgaaagacagggtcgttttggtagtttgttgtggaagtccatttcggcatcaactcctagtctctggtgataagaatgttctcttcctagtacagggaaggcacctttttcatggaaaattttatgatctgtttttaggtagaaatgaggaggtcagagagcctatgttagtttgttttgcatcgctgtaaaggaatacctgagactcagtaatttataaagaaaagaggtttaattggctcacagtttggcaagctgctcaagcatggaaccagcatttgcttggcttctggcgaggcctcaggaagtttttactcatggcagaaggtgaagcgggagcaggcatgtcacatggtgagaaagaagcaggagcgagaggaggagcttccaggctcagctctgcatgaatgaacagagtgagaactcactcattatcgcagggacagcatgaagacattcatgagggatctgcccccatgacccaaacacctcccactaggctcatctctaacactggaggtcacaatgcaacataaaatttggaggggaaacacatccataccatatcagagcccttctgcatgagctgtttctcaagtgccttcagattaaaataatcaatatgccaaaacagcatattttgggatggcacgaatcccttcagccccctttttttttgggaatagagtcttgctcttgttgcccaggctggagtgcagtggtgccatctcagttcactgcaacctccacctcccnggttcaagtgattcttgtgcctcagcttctcaagtngctgggattncnggtgtgtgccaccactcccggctaatttttgtatttttagtngagacaggggttcaccatnttggccaggctggtctcaaaactcttgacctcaggcgatccacccacctctgcctcccaaagtgctgggattacaggcatgagccagtacacctgttccccttcagctcttttgaggagttttgctgtcaatatgaacactggaacagtggctggggaggatgagatctcaatacttccctgacatcccttaagactcaagtcttgatactttgtctgctctctggctctttctttgtcattactattatttttatcttcttgatgttgactcttgctaaaattttttgtcttccttattgttaatgcttatagaaaatgattccttgttatcttttagcccatgtcatccgaatcatttgctgtttctagcctaggtgctttgactatgccagcttgtatttcttcagaattttcattaactatatgtgtggtattgtaggcattacatattttaaaataaatttagccattgcttcaatcacatcc

SEQ ID NO: 223830 - DNA, 220 bp, Homo sapiens
aagaaaaggaagaagcagcagcagaagtgattaaacttgctcagcgtaagatgggattcctgcagcctggaggtggcgtttcatttactgtggcagttacataccttcagttgatctgctctgatcagtagcctgtttatccccaccaggtgcttttggccctttgggcttccacatactgacctggtttttggctcatggtgttatctgttggggttta

SEQ ID NO: 223831 - DNA, 422 bp, Homo sapiens
tgctgtcttgccttcccccattccatcagttgccattgcaacgccaatcctgttacacgatacagactcgcatcgccgaacggggagaggaggaagaggaggaggaggaagaggaggagtggggctaggggaacgggggtggggaagagggaagggaggagggagagcaaggaggaggaaagggtccaacagggagcggagtgtgcgtctggagctcgcttgggcacaccagcccagccgccaccgccaccgctctccaaaatagcctttagcgcccggccagcgtagaggtgctctggccggccgcaccaattcccggagccgaaagcagagtccaggcaccgccacttgcaagagagggagaatgccaggcaaatacccgatccgcacacacgtctacgcgtgcccaccggcactgcgcg

SEQ ID NO: 223832 - DNA, 680 bp, Homo sapiens
aggtttctttgagatgataaaaatgttacaaaattggcaatggttgtacattatctgtgactctactgaaaacactaaattatacacaataagtgaactaattatactgtatgtcgattatttcttaataaagctgctttttaaaagttcagattcgatggagccatcaaagcccaaaatttttaagttcttaaatcttaaaggacagattactatctgagttggtgaccgtgctaggggcttcaaataccttgtcaatcaattttacaacaatcttatcaagcatatgaggaaagtgaggcacggataagtaatctgcccaaaggaacactgtacagctaagtcagagctagaacctgaacccaggtcagtcaactcccaagtcctatgttgtttccactatttctatttgtagatttggtcctttactgaacccagaaaagatgccaacatcacattaacttattaactaatcagaatgccaggctgaacactccagctgaaatatgaaattatcaacagaactaataaaaaataaaatacataccaataggtgctgggttattacatacagaaataagtaaacaaacagagaccctaccattacctcagtaatttcctttcttttactatcttctacagagcttccccttttctctcagcatgaaattttacctttc

SEQ ID NO: 223833 - DNA, 731 bp, Homo sapiens
  misc_feature (270)..(270): n is a, c, g, or t
  misc_feature (438)..(438): n is a, c, g, or t
  misc_feature (447)..(447): n is a, c, g, or t
  misc_feature (489)..(489): n is a, c, g, or t
  misc_feature (491)..(491): n is a, c, g, or t
  misc_feature (507)..(507): n is a, c, g, or t
cgggaaaagagaacaagattactatcactaatgacaagggccgtttgagcaaggaagacattgaacgtatggtccaggaagctgagaagtacaaagctgaagatgagaagcagagggacaaggtgtcatccaagaattcacttgagttctatgccttcaacatgaaagcaactgttgaagatgagaaacttcaaggcaagattaacgatgaggacaaacagaagattctggacaagtgtaatgaaattatcaactggcttgataagaatnagactgctgagaaggaagaatttgaacatcaacagaaagagctggagaaagtttgcaaccccatcatcaccaagctgtaccagagtgcaggaggcatgccaggaggaatgcctgggggatttcctggtggtggagctcctccctctggtggtgcttcctcagggcccnccattgaanaggttgattaagccaaccaagtgtagatgtagcattgttccncncatttaaaacatttgnacgaatttaggtccttcaaatgttttaaatgtgtggacctaaattcgtagcaaattctgtggcagttttaaaaagttaagctgctatagtaagttactgggcatctcaatacttgaatatggaacatatgcacaggggaaggaaataacattgcactttataaacactgtattgtaagtggaaaatgcaatgttttaaataaaactatttaaaattggcaccaa

SEQ ID NO: 223834 - DNA, 698 bp, Homo sapiens
  misc_feature (270)..(270): n is a, c, g, or t
  misc_feature (438)..(438): n is a, c, g, or t
  misc_feature (447)..(447): n is a, c, g, or t
  misc_feature (489)..(489): n is a, c, g, or t
  misc_feature (491)..(491): n is a, c, g, or t
  misc_feature (507)..(507): n is a, c, g, or t
cgggaaaagagaacaagattactatcactaatgacaagggccgtttgagcaaggaagacattgaacgtatggtccaggaagctgagaagtacaaagctgaagatgagaagcagagggacaaggtgtcatccaagaattcacttgagttctatgccttcaacatgaaagcaactgttgaagatgagaaacttcaaggcaagattaacgatgaggacaaacagaagattctggacaagtgtaatgaaattatcaactggcttgataagaatnagactgctgagaaggaagaatttgaacatcaacagaaagagctggagaaagtttgcaaccccatcatcaccaagctgtaccagagtgcaggaggcatgccaggaggaatgcctgggggatttcctggtggtggagctcctccctctggtggtgcttcctcagggcccnccattgaanaggttgattaagccaaccaagtgtagatgtagcattgttccncncatttaaaacatttgnaggacctaaattcgtagcaaattctgtggcagttttaaaaagttaagctgctatagtaagttactgggcatctcaatacttgaatatggaacatatgcacaggggaaggaaataacattgcactttataaacactgtattgtaagtggaaaatgcaatgttttaaataaaactatttaaaattggcaccaa

SEQ ID NO: 223835 - DNA, 435 bp, Homo sapiens
gattacaggtgtgagccaccatgcccgaactgacctggtttcctagcagtacgattgtgttggtaagtattttgttggtgtatagctttccttctctctcatttcttaaatgcctgattgtacaaccatcctcctaccagtctgatcgtaaatctggccttttggctgtataactgctggagtatctgatacaaccaccacaccgtctaactgtctgatcagatgataatcctagagaaggaatggttttatacctgaacacctttctggctgtcttactcagtgctgggctaggtgactatagcagggataagattattccatagctccactggttcgctgtctgaggatatgtctctgctgtcccctggatagaactccctattttttctttttgagacggagtcttgctgtgtcgcccaggctggggtgcaa

SEQ ID NO: 223836 - DNA, 279 bp, Homo sapiens
tggagacagagttacctctattctggttatattccctgttggggcatgattctggtttgcctctcagattaccatttcctcacctacaaaatagatcttcaactacatttatcccttcccttgcacacatccatttattccaagaaatttcaagaatagaaattcaagaaaacttcttccccttgacactctcccatttcccttaataactgctgtgtttgcagaattccatgccatacctcaagccttcctctactccctctcccctcctccccttcc

SEQ ID NO: 223837 - DNA, 444 bp, Homo sapiens
catttcccggaatttatgtgatacaccctgctaacccccgggcttcagtaataccagtgcgtgctgtttagatgtgcagataaaatacacttcctcatggtaaaagggtaaagtgtcatggatgagggcacaggctgttgagacaaactggttcaaatctttcctacagttcatctcacctttgtgttctggtttccttatctttgaagagatggggattacatgatttaattctgtagggacagcatctggtacatttattacattggcagcttctaagtcaaaaataagaaatatctcttgaaagaatttaaaagtttattgtaaattaggttataattttcctgaaccctcccactttctggctctgatgctgacatcatggtctctttgctcacaacctcaaaagttttcataatactgccattaggaaaacactgtttc

SEQ ID NO: 223838 - DNA, 527 bp, Homo sapiens
tttaattgccaattagcagtttgttttagatgtgtttgttgagccattcagtcccacttgtaatattagaccagatagaatattgttttcaaccactataacataacaatataccagtagtaaaagatttttacacttggattgctaccctgtaccattagctgtctgtctgaacctaccatcagctatggagtactcattgcaggccttttggtaagtcattcaactctaaaatgccattccaacatctgctttttgggccattcctggtgccaactatgtaagctgggttttctggattgcaaatgccaggatggagattaatactcaggaggattgttaaggagtagttttctggatagaagaaataaatcatatttaggtaggaaattgagagcgatatagtctcaacaagtctccaatgattgcatgggacattctaaaactgggatgaacaatccatgttcttctgaattgagttaatcaattttcaatattgatcaaataccgtagtaaagctaaatcag

SEQ ID NO: 223839 - DNA, 593 bp, Homo sapiens
gagtgccgtggctagagtgtaaaatcctgtggaatgaaacagtcatagttggtgaaagttgttcaggcaaatcatatatcattcctgatagttggtgagctgttataattctcattaaactttttaaatggagactttcctctagattgatcaactttctcatggctatattgaaatatttttattagattatttagtcttagtttagactttctgtgttcacagaggtttggaatctatttatatctaagttaatgtaagattattttaatctttttcttgtgaaaagaaatgtgaattgtattttttattagaatttgttcagatagatcagtctttccttcttattggtaagtgcttctatccccccatctgactatagttactgaacagaatatctttctttgtctgctctctcaggctgcctgagcgagtgattgagcagaaggtgggatcccaggttttcttgagcctgctttagtttcagttagaaagataatgtaagttaaaaatgccagcaaaatagataatgtaaatgagcagaacatactcctccttctgataaatgttactggaaaaatgaagaactaaga

SEQ ID NO: 223840 - DNA, 766 bp, Homo sapiens
aatcctgttcctgccttgggtttggtaaatactgctaggtttgacagaaagatgggaaggagtaggactgacttcatcgtttcttttcagtgggtcatactcttttatgcctgttcattgtctgaaaagaggtgggaagtctttccaagtcccaattgctctgttgtgcctataagccacatcgtactgtatttgaactactgattggtggagagaattatgctaaagtagacctactgtgctgtggcaaatttgcagtgaaaaatctttcatggctaataaagtgccacatcttagtctttgtagccctttctgtttagttgtgaagtcatttcattttgtgtaatatgtactcaatagaaatagtgtcagtgcagtgccattgtagatgcttttgccacagatgactgccagatagtgtccatgtttgtatagcagcatctaatatgtttatgtttcacagtatgtcttaaggaaacctaaacatttttagtgagaaagcctgaaaattgctccaagcagcttatgtttagaaaagtgaatacattttaaagcaatttaaaataaactgtttcaggttattcctaatggcaattactatattattagctctttaggaatgacatggaaaacttaattacaaaatctcatagaaaacttggaaaacataaaaaggttcaaagagaattataagcctgtgttagaaaaattaatggtgttatattttgatacatttcctttcagttcattctctgtgcaaatacag

SEQ ID NO: 223841 - DNA, 186 bp, Homo sapiens
acatgcacctaatatgcaacttgaaagtccaactcacaattcatgattcaaaaagcagaagtttcaaaccattgttttcagaagtccataatataaaatactccaaacataaattcaacattgcatgcaacaactggccatttgcttcaaaagaagtgatcacagtgtttatatatttaaaaaaga

SEQ ID NO: 223842 - DNA, 373 bp, Homo sapiens
tcctctctgttgctcaacgagctggcaacattgggctcccaatctttttcctgccagcccccagtttcctctcatttctgggtcgtgactgatcacgggctctaggatgatctgtcatttgaaggttcccacctcatttatcccaaacctattgattcctatttcttgacattttttttacttctagtggaatctgcctcacttgtgactaagcttgttgcatttttggacccatcctggtgtctgtgtgcacatgcgtgtgtgtgtgtgtgtgcatgtgggtgtggatgcacacgtgtgagagaaagaaatagctctccctccatttcagcacatatttgctctaattccaccttcctttagtctccattct

SEQ ID NO: 223843 - DNA, 589 bp, Homo sapiens
gggtcggagtcagagcccggggctctgatgtcaccgcgcggctgcgacggcccaggagcgcgtctcggcgggagcctcaggtacgcggcgggggcgggggagcgggaagcgggcggctgggtccgcttcccccgggaggccggcggggctgcgggcggacgggggtgaagagcgggcggcgaggcggtggtcgcggggcagcccgggcatcgttcggccgggacgtgtctggctcggcgccgcgtcaggttgcgccagtggagtcggaccccagcgcgcctctcccagctgcagagctgcagggcggagaggcggcccactctaagctggcggcgcggctcaggggcgcggctgggcgcgccgcgtgtggcgccggcgggcagcgcggtctcactccgccaccctccgctcctgccctttgtcgccaagcatctggagaagccgggtccttccctcccgggctcgcgctgtcccctgcgcgcgatccttccccgacggtgaacccaacgggaaaggcccagaactgcgcggggctgcggccatctgctgtcgagccgctccgcgtgtctctgccgccccctgcggccgc

SEQ ID NO: 223844 - DNA, 361 bp, Homo sapiens
ccgtgcaccctgagggctgtgatcttatcgggattgggtgagctcacaggctcgtggcagggatggagggaacggggaacggaggcatccggcggccatacctgggtcttctcggggcctggacctgccgcacttctctggggaggggctttcacagtctcctcgtccaccccgttggagatcctcctcatgggccagggtcaccatacgtgggcaccaaccttcccaaactgatccttctcatgggccagggtcgccatgcgtgggcaccaaccttcccaaactggaacatctccaatgactcccctttccttaaaagagttttgaagatcaataaaacatatttttaaaattaataaaa

SEQ ID NO: 223845 - DNA, 472 bp, Homo sapiens
cagaaaagttgtccaactggctacacttgaattatatcccctgattattaaactcaggcttctttagttttcatttattttatttcattgcatggagatgttttaaaagaggaaggcaaggggtgtgggggaaggattctgggatagcgaccattctcaccacatgcagaaggccaatactgcttccagaaggagacacaaggaatccttcactgagtgaaagttttttttcttccagagaatatcagtattcctactttataacaagccaggagctttttctgcttcctgatttaaaaattgattcctgactgcatagttctcacacaatagcttccttctcgcaggggcagtgtgattgcctggaatataaattcttagtgggttgaccagggatcacgagcagttattatgttctctgctgctcttaacatgttgtgattctcaataaataatccagagccaaagcatg

SEQ ID NO: 223846 - DNA, 450 bp, Homo sapiens
ggaacatttccctgctgtgagaggaggataaagggacccaaggaaaggagactgatggtgacattgagtggcattgatcgggtggaccaggccctctcttggatgcttgcaggtgcattatctcaatgaacctccactgggacccctccaggcaggcaccattagcctcccattttacagaaaagaccaggatgcagacaggggacatgacttgctcaaggccacacagctgagatctgaaagaggaccttccatgtcatgccactgcctgggatgggctcagcaaagcttggagtcctgcaaggccttccccaagacacctgggtccatttcccttccctgcagacagcccatcaccactcatttctactcctgccccacctcccttcacctgttcaccctgttccttcagcccaaatgtcaaatgcagcacaaaagaaaacaaagtga

SEQ ID NO: 223847 - DNA, 372 bp, Homo sapiens
agtaatcatgacaatgtcttatattctcagatgattttaaaaaagggtaattaacttttgtgtatctaggtaaacaagatacttaaaacatttttttttttttaaaatagataacactaagccttagagcaacggttcttcattctgggcagttttgctctccatgggatatttggtaatgtctgcagatatttttgatagttaggatatggaggggctgctattgtcatctagtgggcaaagatcaggggtgctgctgaacatcctacagtgcacagaaaacagcttcacacaacaaagaactatctagttcaaaacgttggtagtgcaagtttcagaaaccctgcactagagatatttaccatgagaaac

SEQ ID NO: 223848 - DNA, 188 bp, Homo sapiens
attcctcccttctcccaacttcccatacttcttttatttgtttggctcattttcaagagcattctagaatttctctaaaggagggccttagtggtggccatctatttgaagcgctaaggtgggtagaacgatgctagaggacatgtttcaaagttgcctggcagagcaggtaagctcctttccttcac

SEQ ID NO: 223849 - DNA, 410 bp, Homo sapiens
tgatctgtcatggtgagcacatggactcctgggccatccctaagaataacttctgggtgaagcaacaatgtcagctactggcccctacagcatttacctatgagtggtctcacgttcaaagcaggcttttctgggcatctctgagaagaggctcccatgatgatattggcacctttgggcaccatgtgcaccagcctgggacttctatgcgtgcccctcttctcattgtccctgctgggcttgcaggttaggagaggttctccatgacctccaaattaagaccatctgataaaaccatatttttctcccccacctcccatagccatcctgtcaaataaataccttcttatgtatcttgggaaggtaacattaggtatttttctccccatatacacaaaattaattaattt

SEQ ID NO: 223850 - DNA, 550 bp, Homo sapiens
ggatccctgccttgatgtactgctttggacagtaaagtatgtggataccctagtactacatgtaactctagagttatctacactgtaccctggggacacaaaggatggagggaggtgggtctgactgtagaaaggtggatggtaaccatggaaatgagcctgaaatatgcacaggattacaccaagtggagagggataggaagggcataagaagcagagggaccagcatttgccaagaagcgaggcttaacaatcctgggcatacttagttagataacataaagaaggccaaatggcttgagtccaggaggcatgcaagaagatgaggctttctgcagtgggaactggagaaagtttttgagtaggggtagacatgagccaatggcttcacaaaagagaccagttgaggagctggagccgaaattgtagcagaagagataatgaggcttgaacagggcagtgcatgtaaacccaggaacaaagggtgagattccataagcattttggagataaaacagataggacttcgatgtgagcatcagaggacagg

SEQ ID NO: 223851 - DNA, 551 bp, Homo sapiens
ggttaaaccaaatttgagactgagtgcagtggctcaagcccataatcccagcactttgggaggccgaggtgggcagattgcttgaggctgggaggtggagaccagcctggccaacatagaaaaaccccgtctctactaaaaatacaaaaattagccgggcacggtggtaggcacctgtagtcccagctactggggaggctgaggcacgagaattgcttgaactcaggaggcggaggttgcagtgagctgagatcgcaccactgcactccagcctgagcaacagagcgagattctgtctcaaaaaaaataatttttttttaacctaaagaagagatgagtgcagccaagaatgaggataagacgctgtcttcaagtatttggacactgggctagctttgttttgtgtgaactcagaaaacagaactggagtcagtgggtgttagagggagtcggggcagtcagtgccctacccagatcttgccttaccaggtattttcaatcccaagttgctgtaaggactggctgcaaacttctcacagctgcaccctttt

SEQ ID NO: 223852 - DNA, 844 bp, Homo sapiens
ggctgatgtgcaagtgacaatggctttcagaaaaaagactagtgatgttaaaaatgaatacaagagggtataattgaatatgacagaaggaaagctatacctgtcagagaatcttaccagagttgtgagcatctcctaaatgggcttaaaactactagcacaaataactaagaaataatactttttaaacagcaggtgatcaaatttagtgcatgttagtttgtcaaagctgcattttcaagttgtaacagattggtgccttagactatgggatggacatggacagaagaaaaatctgatggtgaatataagaaaagctgtgaaaaaagaaatggagaggagtgtggggatggttaattcacagagaagggaagccggccttgcctggagtcagcagccaggagtccagcattcacattctccccagaaggaacaaaaggccacatgtgccctgttttgcagatgtgccttccccacgcctccatgggggcctttggcccagttctcattggcagtgtcacttcctgatactcattttccagaagcctcccaggtgattagccatcatatgtctccaagaaaggaagtgttcggcacataatctgccaatgattgctgatgacaacacaagtgtcagacactgtgttagcaatgacaaggacatggtctctgccttctaccccactgtgcctctgtatctgccatgagaagggcatgcctgggagctgctggtccaagaacaaggagtcagagaacagccctgaaatcaacccacagcctgatgcagagtggccccaacccacagacctgtgagcaagaaaaataaatgtttgttgctgtagga

SEQ ID NO: 223853 - DNA, 1398 bp, Homo sapiens
ggctgatgtgcaagtgacaatggctttcagaaaaaagactagtgatgttaaaaatgaatacaagagggtataattgaatatgacagaaggaaagctatacctgtcagagaatcttaccagagttgtgagcatctcctaaatgggcttaaaactactagcacaaataactaagaaataatactttttaaacagcaggtgatcaaatttagtgcatgttagtttgtcaaagctgcattttcaagttgtaacagattggtgccttagactatgggatggacatggacagaagaaaaatctgatggtgaatataagaaaagctgtgaaaaaagaaatggagaggagtgtggggatggttaattcacagagaagggaagccggccttgcctggagtcagcagccaggagtccagcattcacattctccccagaaggaacaaaaggccacatgtgccctgttttgcagatgtgccttccccacgcctccatgggggcctttggcccagttctcattggcagtgtcacttcctgatactcattttccagaagcctcccaggtgattagccatcatatgtctccaagaaaggaagtgttcggcacataatctgccaatgattgctgatgacaacacaagtgtcagacactgtgttagcaatgacaaggacatggtctctgccttctagtacgtgaggagtctggccttgagcctcaccctgaggctgcagtgtactcaaagttgtaacagaccaggacagagggctgagggtacaggagaaagggtgcccagccttgaagagtcaggagagacatcagtacagttaatacaggctccatggagtggggaggaacaggagggacagacagcagcaggaaactcatctggaaaggtgtgcaagggtcagagcacaggctagtggagagagccaggaaaaggcatgtgggccttgaaagcagacggacccagctcatctaatgactggctgtaaaaccttaggcaaattacatcatttctgaagcttcagagcttcttatatgtggattgggagaaactagttactcacaattcttccttcccaccccacctttcccaaggcccactgtaggcagagaatgctccctatgctgttgctgatgggcttggccctatgcctcatctcagccattggaatatgggtgggagtaagatggggcagctccaagccaaggccttaagagccaccactttcttccttctagccccactgtgcctctgtatctgccatgagaagggcatgcctgggagctgctggtccaagaacaaggagtcagagaacagccctgaaatcaacccacagcctgatgcagagtggccccaacccacagacctgtgagcaagaaaaataaatgtttgttgctgtagga

SEQ ID NO: 223854 - DNA, 892 bp, Homo sapiens
ctctatgaggatccccggcatacctggaccttctagaagcctcccaggtgattagccatcatatgtctccaagaaaggaagtgttcggcacataatctgccaatgattgctgatgacaacacaagtgtcagacactgtgttagcaatgacaaggacatggtctctgccttctagtacgtgaggagtctggccttgagcctcaccctgaggctgcagtgtactcaaagttgtaacagaccaggacagagggctgagggtacaggagaaagggtgcccagccttgaagagtcaggagagacatcagtacagttaatacaggctccatggagtggggaggaacaggagggacagacagcagcaggaaactcatctggaaaggtgtgcaagggtcagagcacaggctagtggagagagccaggaaaaggcatgtgggccttgaaagcagacggacccagctcatctaatgactggctgtaaaaccttaggcaaattacatcatttctgaagcttcagagcttcttatatgtggattgggagaaactagttactcacaattcttccttcccaccccacctttcccaaggcccactgtaggcagagaatgctccctatgctgttgctgatgggcttggccctatgcctcatctcagccattggaatatgggtgggagtaagatggggcagctccaagccaaggccttaagagccaccactttcttccttctagccccactgtgcctctgtatctgccatgagaagggcatgcctgggagctgctggtccaagaacaaggagtcagagaacagccctgaaatcaacccacagcctgatgcagagtggccccaacccacagacctgtgagcaagaaaaataaatgtttgttgctgtagga

SEQ ID NO: 223855 - DNA, 334 bp, Homo sapiens
aaattaagcagagttcttatgctacaagctggcctgatccttcagttaagcagatgtgtatttcctgcaaccccatgtttggggttgcttggagaagtagcagacgttggctgtgatttgaggagtctccatttgcgtgaccgtaggccctttaaacttaacatggcaaaaacagaatgtttgagttttcttcttaaatatgcttcttacttgtctttcctatctcaggaaatagtatggccatttttttctaattgctgaggcaaaaaacccaggagtcatcctaaactgttctctttgccttaagctttatattctccgttggctcttgtct

SEQ ID NO: 223856 - DNA, 562 bp, Homo sapiens
aatctagagcatcccccttatcacccaatcaacagtggtcaaatctctcttacacttgaatctctctgaccactccttctgccacatctctgacttactctgatgctaagagctcacatgattacactcggcccacgaagataatctatcctaattagtaacatttaacagctaattagtaacaattaacagctaattagtaacatttattccatgcacaaagtcccttcatatcggtactgaaattagtttgattaactagctagggacaggaatcttaagggcatagctttacaatcctgctgatcacagaatgtttagaccattaacatttaatgtgataattgatatttttgaatctagtcccatctttttattatttgttttctgtttgctcctctgtttttcctttccagttttcttttgtttttgaatagtttcagtattttttcggcaatatctttttatattttttttagtgattgctcgaggaattacaatatacatcactaatttttcgtagtctacattgtaccccttgaaataaaaagtacgaattgcc

SEQ ID NO: 223857 - DNA, 796 bp, Homo sapiens
tagactcaagcgatcctcccacctcagcctcccaatgtgctggggattacaagcgtgacccatcacacctggccggtttttcattcttgaaatgtcaaattacaaggcttttcctttatgatgtttagatttcatgtgatacttagatttccccacttcaaaattataaaaatattgtaccatgtattcttctgatatttcatttttaatatattaatcatttatcaatttgaaatttcctttgatgtgaggagcatgatagggatccagccttttcttttttccaaatggctaactagttgtctgcaacatcattgattaattttaaaatgtcatctttatcatatatttaattcatatttatctttggtctatttctggattttctttatggtgtcatgatcattctgtttctgagccattaccaaattgttttaattaccatatctttgtagtctgttttaatatctaatagcccattcctattagaggaaatacaccatactttcctctttcagaatgttcccagatatttattcttccaggttaattttataatttttttcatttccagtgttctattgtgatttcattggagttgcattgaatttataaaataatttataggttaaggacatatttgtaacacaaaggccctgtccatttactcgtcatattcacattcctcaaacagtttaacattttctgcatttggattcttcacatgtcttacttagtacaatcatgaatgttttatgttttcagtactgttaaaaatgagatctcttcattcgtg

SEQ ID NO: 223858 - DNA, 558 bp, Homo sapiens
ggaggttgcagtgagccgagattgcaccattgcactccagcctgggagacagagccagactccatctcaaaagaaaaaagaaaaaaaaaatgaaccaagaatttatatccagccaagatgttctgcaagtaaaaatactgcctttcagatttcatggagtataaataaagcaataattagaggaaatttcatagccttaaacagttctaccaataaaagtgaaggaatgaaaataattggcactataactgtacccacgagcgagacatacagacactatgggagctgccctccccctttctcccagtggttagtaactaatttccaattaattacaaagttgtgttatacttctttcccccactgctgttgctttcatataaatgtttttcttatttttctaatgtgccatttgccacctctatattaaaattttctcctataccactcatttacccctataactccagtgcttacttgacacatctcttcagtggctcctggtttctatattttcatctacacagtgaataggccgcatccaaagcggagatatat

SEQ ID NO: 223859 - DNA, 396 bp, Homo sapiens
ttgatggagctactactgagcagtcacatgccctgaagttggtcactttctacccagagcatcgtgttaatgcacatagattctgcaacacaggctacaaagattcaaagacagctttgctgtttgctagctttgtgacctcaagcaagttactgaaattcctgtccctccgttactgcatccataaaagggcagttgcaaaactagtacctgcctcatcagggtgttgtggggttgaaagtgaattaatatgtgttcggtctcgaggtcagtgcctgttgcataagcactttgtatctgttattattgccttcaaaactctcttcactgtctgtgtacgactttccagcgtcttgcatagattaagtgtttaataaatatctcttcatgacattt

SEQ ID NO: 223860 - DNA, 356 bp, Homo sapiens
  misc_feature (353)..(353): n is a, c, g, or t
gtagcagcatgttttaaccagctgaattactctgggaaaataatgcataaatatagtaacatatgaagaaaatgtttcctcgtgagaaaaatgaactaactatgttaaaagtatttcagcaggaataacattgcttttttttctttcttttttttgagacagcctgggtgacagagcaagactctgtatcaaaaaaaaaaaaaaaaaagatcccctgcacgtgctctctcttgcttgccaccatgcaagatgtgactttgctcctcctttgccttccgccatgattgtgaggcctccccagccatgtggaactgtgaatcaattaaacctctttcctttataaattaaaaaanaaa

SEQ ID NO: 223861 - DNA, 474 bp, Homo sapiens
aaaaattatctgcttgacaattggttgagtttatctaaagatcttggatcaatagaaaaaaaaggcctggatttcttttctggagactggaaaggattgcagagaccaaagttcttatttgtagaggaagccttcagagagaatacgttgtaaaatgtttcttatcagacttcatgtctgtgttgatgtcagtgccagcaaggtataatgaggcatgtctgaacaccacttcccttcatggctgaaccatctgggcaacatagagagacccctgtctttataaaaaaaaattttaaaaattagctgggtgtggtggtgcatatctgtagccccagccactctaggggctgaggtgggaggatcatttgagccccaaacattgaggctgcagtgagccataatcatgcctttgcacttcagcctggatgacagggcaagaccctgtctcaaaataaataaataaataaataaaac

SEQ ID NO: 223862 - DNA, 183 bp, Homo sapiens
gactcaaggatttagattttgacgcgttctcctgggtagtgtagtgctgaataaataggagtagggtggtgacagagatctgaattaccccgttaacagtggtgtattcatacaagaccacagcaacttcagcctgtgccttctcagaagaaagaattcaactgaggggaagcagaaaaagag

SEQ ID NO: 223863 - DNA, 303 bp, Homo sapiens
atttagagaaaaaggcagaaatcatgtctgtcctcagaatagtgtcatatttgtgaagggagaaaaactatgctgaaagacgaaatagacctaccccatggaggcaatgcaagaacctgcaaagcaaaaaagtaccagggacacagagtggggtacagtgcagtgtcttctgggagggtgatctttgagcacttcggtgagtagggtaagggtgggagaatgtcccaagtgatagggttgcctgatttgacacttgagtcagatatgtgtctgttgcaataaacactattactccctgagttt

SEQ ID NO: 223864 - DNA, 535 bp, Homo sapiens
attggcccaaatgtctaacagtaaagatttatgaagagaatttcagagtgctgtgaaaacatgtaatgtagaaatctaggatagattggtgagtcagggaatggtttcccaagaaggggccatttaagctgagatacaagatttagataggcaaagatataaaagataattattctagacaagtgtgataggcctcgaggaaggaagaacttggcattgtcaatgctgcagtgcttcccgctttgccttttgaatcccaggttccacgcaggaaaaggcaaggccaggctcctcccctctgcaaaggtgcaaacttgctcaggctccaccccagtgcacaggccggcaggagctctgccagggatcccctcccacttagctgtctcaatgggagggaccattttacaagatgtttaccatactggtttgcagaattagagagagtaaccttaggtgaggagaagactgggatttggagacagaaggaaagaaaatagattcagggtcattcttgaatgttagccttctttgagtt

SEQ ID NO: 223865 - DNA, 428 bp, Homo sapiens
atttgattaatactaataggttttccagaactgaaaaactaatgttaaaaccaaagctgatttctagaaaatttgaaaatgtaaatcagccttatccagaatatagtttctctaaaactttcttagtcattttacaatagtataactattaaaaaatgtaactgctattttaatgttttgaaataaattaaaacattttaaaatatgaatactgtagcttaaaagaaagaaactaggggaaggaaaagtaaagaaagaaatgccaattccagtccaaaactttatttgccaagttttcttataatgacttaccaatttaggaattcttgtaaacagaatctataatggaaatactgaaagacttttgcctaaagtggcattattgaatactgctgtgatgctactgtatgtaataaattattgttgca

SEQ ID NO: 223866 - DNA, 650 bp, Homo sapiens
gctttagaaaaaaaatgccatgaaaattgagccacatgcattgaatggtaaagggggactgtggcaaggagaaatgaatgcctttccaacccggccttattctctgcttagaaattgccttcacagttccgtgatttggtctaacatccttcaagactaatcttattttaagtgaaatagtggaagggataacagagttggaacctcaaaaaatttcacatttctcaagacaaatagcccaagggaccttgaggaagaatggccctcagctttctgcatattcacctgtttctgttcctctccttggaggatcttgatagactgcagtgggcggagtatgcattatttcagtgaccgctgtgaagcccatcactgggaaaggatgctaacaggctgatgaggactttaaaggaaaggcctggggacaggctgcgggcccagaagccagttaggcaagcttctcttgttccatcagacagttatggttcaaggcgctttgccactcctgccccaagttcctttccacgaaagatgacagagaattgtgtattacctcaatgacttctcatctaggttagacaaagtcttaaagcacactcagctctgtggaaggatccccctccagaaagttctacatgttcatatcagga

SEQ ID NO: 223867 - DNA, 597 bp, Homo sapiens
ctttgcctccagggttcaggcgattctcctgcctcagcctcccaagtagctgggattacaggcgcccgccaccacgcccagctaatttttgtatttttagtagagacagggtttcaccatgttggtcagggtggtcttgaactcctgacctcaggtgatacaccccccttggcctcccaagtgctgggattacaggcgtaagccactgtgcctggcctatgcagctctcttgagagtcccacaacaccttatgagtgaggtaattaaaaaaaaatttttttcttttaaataaatagagatgagggggagtctcactgtgttgcgcaggttggtcttgaactcctggcctcaagcaatcctcacacctcggcttcccaaagtgctgggattacaggtgtgagccaccacacccggcccagtgagataatattatctccattttatagctgaggaaaccaaagggggaagtgacttgtccaaggccacgcagtccaagagtaacccacatcttcctgttggctatgatgcccatacacgttctttttccagatggaaccaaaagagaaagtggcaggctttcagggataaagaggccca

SEQ ID NO: 223868 - DNA, 367 bp, Homo sapiens
tgggtgggagagaagagtggaatactgtcacttaagagttgtgtaatgagggtcacttagagaggctgtgcctgtgtgtgggaagaaggtatctgggggctgcttgtctctaggggcatactgcagtgtctgcatcagtccccagcagcccttgttctgggagctggaggaggtgcctccccacctgggaccaaggcctccagccagctctggagaccccgggggctcagctttcccaccaggctccttgtctctgtgtttccagctctccccctcctgcaggggggctataccctgttggtgctgggaatccctttggtggtctggtgaggcccaacaactcttctcagaacaaggtgcttgatta

SEQ ID NO: 223869 - DNA, 454 bp, Homo sapiens
agccacatccactatccactggtcccccctttcttaaaccggcatctacgaatctgtcttctgtttgcgtaattctcgtcctttcaagaatgttatgtaaatggaaatatacatcatgtaattttttgagatatgctttttttcactcagcataattctttgggcattcatccagattttgtgtattaattgttcatatctttttattgctgagtaatagtccatgatgtgaatgtaccacactttttttaactattcactgattgaaggatacttgggttgtttccagtttggggctattatgaataaagctgctataaacatttatctataggttttgtatgaacataagttttcatttctctgggtgaaatcccaggttttatattatgctattacgttgtattaaatatataacatatatttctaatatggattaaaacaaatttataac

SEQ ID NO: 223870 - DNA, 537 bp, Homo sapiens
tccttcttgtttcaccaaaatgcaagtaatggacagaggaaatggttttacgttagtcactttttgctaatatcttgtcaggttaagagtcttacatgaacaagaaataaactaaaccaaaacaaaaaggacaggcctcggttgctgatttatgtggaagcatgtgacaaagcaatttacataggcaaacaatgataaatgacctaacaagttcagttacaaactgaacgatcactgcagactgatgcacatttatattctatgtttgcatttctgcatgtcttataaaacaaattgcaaaatccattaattttgcattttggtgtttttgtgtttgcaactcattacaaagttaaactaggtcggatcatttcagcaagcacaaactatgtaaccaccttagcattcacccataaatattgtaaaattatcagaacctgacctaagccacccatttatcatcttttactttctttccaactcatttatttgtctctgcctgcccaccaacacacacatacacacacacacacacac

SEQ ID NO: 223871 - DNA, 523 bp, Homo sapiens
tgaatgttctgattctagtcttggtagtcaataagagttgaccagatgaatttcatagctttgtagaggatgaaatatttcaaggctgatttgcacaaatgtttacatagatcatgtatctttcataagtaatatgtttgtattattacaaggctgtaaaaatttaagcaggttgttaatagcacagggggtaacagattaataaaattaatgaataaaattactaaaagagtccagaagtaaacccaaatacgtggaggaattaagcatatgtatgatacacatgacattttaaaaatcagtgggaaaaggtaaattattttacaaatggtgttagaagcactgattgataattttgttaaaagaaacttagattccctattttactcctaatccaaaataaattctgagtggatctaagattaagcaaaaattaagccggaagctgagcatggtagcatgtgtctgtaatctccgcaatttaggagactgagtttggctggggaggtggtgatatgcgcct

SEQ ID NO: 223872 - DNA, 602 bp, Homo sapiens
tggacgttaactcttcatttgctatcatatcacttaattaactaagtatattaactcttcacttgctatcatattgagcctgatatatatgatgttcacggtttaaattttctggcctggaattcagcaagctctgacacaaattagccttatccttcttattcgtcatcacctccctattttacccagtcctgtagtgtttatttttgcacttatgtctcatctgaattaggactagctacattgtacgtgctcagtggccacatatggctaaatggatgctatactaggcagcacagtcctagaatattttcatcagatttctctatccttttcctcgccctgtacctcctcagttatatctcaactccctcttccttaatacagttctaaaactaatgttttttattattggggaattgctggctcttcctatgcaaatggaacacctctggctttaatagtcacttcttataccttatactcaggacaattcaggacaagttgtttgtttgtttgctttttaattgtggtaaaatatgataatacaaaatttaccattttaatcatttttaagtatatgtttcattgccgttaagtac

SEQ ID NO: 223873 - DNA, 471 bp, Homo sapiens
ataattctagtatgttgttctggtcaatttctttccaatatttacaatggctatttcaaacctattccattttcattaatcttctggctctccccatctgcccctgtcaattctcagcagatgatcttattcttcacaggagaaattgaagctgtcatatgggagctcttgtatcttttcatctttctagctacacccattcttttatctctataacttgtttaaaaaggcgagttatacatcttattttaataccaattcctttctagatatttaggaacgatatatttctgctcaccaatcccttcgttggtacttccacaagactcttttataggatcatcccaattagcagttaacaaactctagtctctcataaataaaattatactctcaactccacccctattcccactccccagtattgccctatatttctgcttacttgaaaattaaaattttaaaaagttt

SEQ ID NO: 223874 - DNA, 316 bp, Homo sapiens
aaatgaatttttttctctaggtatgtttaccttgctgcctcctccagcaacttggtaagtcattttgctaagataccatgatttttttaagctgaagcattgactaaatggaattttctaaattaaacttgattttaatatttcttctagctccattccccagtaggcttagctcttcaatttgactgctgtttttgcataatgatcaaaagttagacatattatttctcttcttccaagattgttttaatgctcattaaaatgtctttttacaacacatatagacaatgtttaagaattaaaaatttaaccatta

SEQ ID NO: 223875 - DNA, 438 bp, Homo sapiens
caaagaaattccacatgtaaaccaataaaactaattagaaagtccagaaggatcattgattacaacgctggcattaaaaaaaaaaaaaggtgctcctatacatgagcaacaccaaaacaaatgtacgtaaatagcaaaaagatactcttctctgcacaaaatcataaaatgttactgaaggacagagaaaataaaatcaacagagagatacaacacattcatatatgagacaaattgatgttgtaataatgttggtatgttctaaattaatgtatacatttaatgcaattccagaaaaatccaaatagcattttctcatcaaatcagactaattctaaaattaatatgaaaaagtaagttataaaaatgtattatatggtaaaaggaatttgagtaagaaaaaaagacaaaaaagagaataaaaagaagtaatatata

SEQ ID NO: 223876 - DNA, 654 bp, Homo sapiens
tgagacggagtctcattctgtcccccaggttggagtgcagtgacgcgatctcggctcactgcaacctccacctcccaggttcaagtgattcttctgcctcagcctcctgagtagctgggattacagacatacctcaccatgcccagttaatttttgtgtttttagtagagacagggtttcaccatgttggccaggctggtgtcaaactcctgacctcaggtgatccacgtgcctcggcctcccaaagtgctgggattacaggcgtgagccaccatgcatggcctgtttttttttgttttgtgtttttttttttaataaacttttaaaaaagtgtttattttcaaaataaaatatgtatagattaataggaagttgcaaagaaatgtgggaggttctgtgcaaccttcacccatctctgccaatattggtatcctatataactacagaacaagatcaaaatcagtaaatagttcagcatctcacagttatgacaaactgaggtcattgattaacagaattttagtgtaacatgactttttaataaaaaatagtattctttatactataaagcctttattttgataacttattaccaggaaatatatcgaaaaagagcatggtttagataattggtttttaaccttttaggacata

SEQ ID NO: 223877 - DNA, 1931 bp, Homo sapiens
gtggtttctaacgctgaacttaaaaagtgttgagatgaataatgaagaggaccttctgcaggaggactcaacaagagatgaaggcaatgagactgaagccaacagcatgaacacattaagaaggacaaggaagaaagtcactaaaccatatgtttgttcaactgaagtgggagaaacggatatgtccaattcaaatgattgcatgagggacagcagtcaaattttgaccccacctcaactctcttctagaatgaaacacattagacaagccatggccaaaaatcgcctccagtttgtacgatttgaagcaacagacctccacggcgtgtccaggtctaagactatccctgcacacttttttcaagagaaagtgagccatggtgtttgcatgccccgaggttatcttgaagtgataccaaatccaaaggacaatgaaatgaataacataagagccacatgttttaatagcgacatagtcctaatgccagagttatcaacctttagagttttgccatgggctgacagaactgcaagagtgatatgtgataccttcactgtgactggtgagcctcttttgacttccccaaggtacattgcaaagaggcagctgagccatctgcaggcctctggcttttccctgctttctgctttcatctatgatttttgcatttttggtgtgcccgaaattttaaattcaaagattatatcttttcctgctttaacatttttaaataaccatgatcagcccttcatgcaggaacttgttgatggcttgtatcacactggagccaatgtcgagagtttttcctcctctaccaggcctggtcagatggaaatctctttcctgcctgaatttggcattagctcagctgataatgcatttaccctcagaacaggtgtcaaagaagtggcaaggaaatataattacattgccagcttcttcattgagactggattttgtgattcagggattttgtctcatagtctctgggatgtcgataggaagaaaaacatgttctgcagcacttctggaactgagcagctcacgatcactgggaaaaaatggttggcaggactcttgaagcactctgctgcgctcagctgcctgatggcgccttctgttagctgccgaaagcgttattccaaggacaggaaagacctgaagaagagtgtgcctacaacatggggatacaatgacaacagctgtatatttaatatcaaatgtcatggagagaaaggcacccggatagaaaataaactaggctcagcaacagcaaacccttacttggtgctggctgcaactgttgctgccggcttagatggacttcatagcagtaatgaggtcttggctggtccagatgagagcacagacttttaccaagtggaaccttctgagatccctttaaaactagaagatgcccttgtggcactggaagaagatcaatgcctgagacaggctctaggagaaacctttattcgatattttgttgccatgaagaaatatgagttggagaatgaagaaatagctgcagagagaaataaattcttagagtattttatttagaatagagctcacaactactcctttagacatgtaattgttacttaaagctaatctaccaaaacaaaaagactgaacttttgtaattaacaacagcaacaataacaagattacgaatgcttttgacttttttttttgtccatggaatatttgacagatgaagtaggactgctgagaagattctgataacagaaacaaacaacaaagttgtggtgaagctataatatgcaaacttaccagatcttgtcagtcatttcctatgtgtatgttgacctggataagaatatccaattttgggtggcaataaatatattcgcacattaagaaaaaaaagacttaagcattagaaagcaaaatttaaatgactaaa

SEQ ID NO: 223878 - DNA, 294 bp, Homo sapiens
ttggcagtaaagtgaggaatagtcattggatgtattggaaatcttggggttcatggacatttgtcaggcttcccttgggtggtggtgcatcattcacagttaaaacgacgagatgcaccccaggacgaacggtgccagcctgagagtgtaactccgagtgtgtttacatgagtggccacaatctgaaaactttccttttgacataaactcaggttatatcataccaagagtgaggagtctcttttatgctgttttccaggaaaagggagaaaaaacaaatgagggtgaataagt

SEQ ID NO: 223879 - DNA, 570 bp, Homo sapiens
ttataaaagtattttctttcttattaaattgttaaagatattggaaatataagccaaaaatactttaaataagagtttaatttctcttgattgcatatgacaaacagtatttgtgaaactgtgtgtatacacacatatatataaatgagtatatatgcttatacacatataagctcctttatctgtttattaaatatacgcatatatataagcacatatactcagttatatatatgtacatttagttatatacataacagaaaagtatgatttttaatccattgtatcttccaaagctaaagcattattaggtaaaaagaatttttgaaaatttgttgaaatttgcagtaaaattggatatttaaaagttgtaatattttagtcagtcaattctaataatgagcaactatgaaatactataattataaaattctgtattgtagttgattaggaaggtataacattttactatagctatttttaaagtttctctactattttttctataaggatgtatacaaataaaagatgatttgaaaatttctattttattcataagataaaggaaaa

SEQ ID NO: 223880 - DNA, 365 bp, Homo sapiens
ccaggctaaatgtcctgctctaccaagtttaaagcctgagcctcagttttatcttgtgtaaaattggggataaaaagacaacctacctgacataacacataaggatcacgtttgcctggaaactggcaggtgttcgataaacataacaatgccatcttacatgcaaaatactggaagttaaaaagcactttctggacaggtgtggtggctcacgcctataatcccagcactttggaaggctaaggtgggaggatcacttgaggccacgagttcaagactagcctgggcaacatagcaagacccccatctcttaaaaaaaaaattacttgggcatggtagtgcatgcctgtagtctcagatcttgg

SEQ ID NO: 223881 - DNA, 518 bp, Homo sapiens
gactgcattgtaccatcactagaatctagtgcttaatggcaactcgccctttccaaagggtctcaacaagaagcaagacgatagacaacaattagctaaatctacattattggacatgatggctaagtaaaaaacatcacaccagaatcaaggattttggtatctgcatgagtcctggaatcaatcccccagagatactgatgggatcttaacaatgacagtaattgatggtgtgtgaagaaaaaagggaagatcaggagactttaacctgtggtattcccatgtttagaagcaaaatggggaacaaaaaggaagcgaataacaatcagaaaaataggaggataacaatagtgtaatatcatggatgccaaaggagagtttcaaaaagaagaaggcaaccaatagtgtcaaatgtttcagacaattgtaaaaattcaaaaataaaaatatttaaaactttcaaaataaaatatcaaaatatcaaaataaaatatcaaaaactttcttgatgccaggca

SEQ ID NO: 223882 - DNA, 292 bp, Homo sapiens
gagacacagcaaaagctgacgcctgtcacctgtgaatcaggctccagttctctcaccgaggcctgtcaccaaacgccctgagtccccgttacagcggccttctgctcttacagcagcaaacccagcactgagcttttctcttctgctctgttggttctccaacatctaccatcagtagccacccccgctcctgatgtcaccctcccatgttaaggatagatcccagttccactctccagaatcctgggtcctctggctctgaaaatgccctgaatctctcccaccctcatct

SEQ ID NO: 223883 - DNA, 780 bp, Homo sapiens
cctggggccctctgacaagaaaccctaggagacaccgcggagaactctgcctctgagctggtgggcgggccggatgtagccgagcgcggacagggctagtccggacagagtcccagagccatgggagcgaaaagagactgctgcggattaaggaggcctttcggttggcgcagcagccacaccacaaccaggcgaagcaggtagtggcgctgaatcgctcctgccgcggggtaagcgctcccggcccgcgcccgccccagccccgacctggcggggccaggacgctggttcatacactccaagagatagagttttgctcttgttgcccaggctggagtgcaatggcgcaatcttggctcaccgcaacctccacctcccgagttcaagcgattctcctcccacaacctcccgagtagctgggattacaggcacccgccaccacgcctggctaattttgtatttttattagagacggggtttctccatgttggtcaggctagtctcgaactcctgacctcaggtgatccgcccacattggcatcccaaagtgctgggattacaggcgtgataaattgaccatcttataccaggaagtcaaatgagaagacatcagtaaaaatattctggccaactcatgttttatttatcatatcttcatcattaattgcttctcataatgccacagtttgtcatggtatttgtggcagcaggcaaagtccttgttcagactttgattaaattgctgtggcatttttctattaaaaagatctcctgtttcaa

SEQ ID NO: 223884 - DNA, 707 bp, Homo sapiens
cctggggccctctgacaagaaaccctaggagacaccgcggagaactctgcctctgagctggtgggcgggccggatgtagccgagcgcggacagggctagtccggacagagtcccagagccatgggagcgaaaagagactgctgcggattaaggaggcctttcggttggcgcagcagccacaccacaaccaggcgaagcaggtagtggcgctgaatcgctcctgccgcgggagatagagttttgctcttgttgcccaggctggagtgcaatggcgcaatcttggctcaccgcaacctccacctcccgagttcaagcgattctcctcccacaacctcccgagtagctgggattacaggcacccgccaccacgcctggctaattttgtatttttattagagacggggtttctccatgttggtcaggctagtctcgaactcctgacctcaggtgatccgcccacattggcatcccaaagtgctgggattacaggcgtgataaattgaccatcttataccaggaagtcaaatgagaagacatcagtaaaaatattctggccaactcatgttttatttatcatatcttcatcattaattgcttctcataatgccacagtttgtcatggtatttgtggcagcaggcaaagtccttgttcagactttgattaaattgctgtggcatttttctattaaaaagatctcctgtttcaa

SEQ ID NO: 223885 - DNA, 455 bp, Homo sapiens
cctggggccctctgacaagaaaccctaggagacaccgcggagaactctgcctctgagctggtgggcgggccggatgtagccgagcgcggacagggctagtccggacagagtcccagagccatgggagcgaaaagagactgctgcggattaaggaggcctttcggttggcgcagcagccacaccacaaccaggcgaagcaggtagtggcgctgaatcgctcctgccgcggggtaagcgctcccggcccgcgcccgccccagccccgacctggcggggccaggacgctggttcatacactccaagaatgtgacttgtacgatgttggctgttggtttgaaataaacaaagaacaatacaaaaaccaagtacaaagaacaatacaaaaaccaagtacaaaaaaaaataaaagaatgtgatttgaataaagtcaaaatctgctgtttaaaaactcaaca

SEQ ID NO: 223886 - DNA, 438 bp, Homo sapiens
agcgattaccttgtgttttctcccgccatgcagacagtcactggagcctgcggatccttttgtctgcaactgaaaccgcctttgcaaaattatgactgagacagtgaaagaggtccaacttaaacgactccatcttgcctctaacctccaagctgtccttgttcatttctgggcgcaggctgaaaaaactttgggaggaacttagtttatagttttaaaaaatgacaataacagccctttcccagaacaaactcccttcttgcctggagactagactactaaagttagccacagtattagaaattacggtttaggagtcaagtagttggaggccacaagattctgaccttccctaaactgctcccaagatcagtgcctgagatgttttgcagactctactcttgatggatcaactggcaccacccatatcgagaaacc

SEQ ID NO: 223887 - DNA, 376 bp, Homo sapiens
ggttcacgccaccactcctggctaattttttgtatttttgacagaaatggggtttcaccatgttgcccaggctggtctcaaactcctgacctcaagtgatctgcccgccccggcctccgaaagtgttaggattacaggcatgagccaccacgcccagcctaaattctgatttttaatgtttaagtaaatttgttttccttgcaaccatcaataaaatgttttctattatttatatgtaggataatctttttgggtttcttccaagatttttcctttacctttgatttttcagtagtatgaccttaatgtacctggttgtggttcattttatcctgtttgtggttcactgagcttcttggatctggaagtctgtttt

SEQ ID NO: 223888 - DNA, 351 bp, Homo sapiens
gaatgttgatttctactatttagaaaactcacacattatgaatagatatttaaacattgcgtctattatacttcttgccttccaaatttaatattgtattttatctgcaagaatgatgtttatctgcttattagtcagtatgtatgacaaatcagtagacttaaagttcagtaaagcacacaattttgctataagtcaggatgtgtcaccttgcaagttggtcattacacattttatttgactttgccgctgagtttatagtgagaaattgggctgggtgtggtggttcacacttagagtcccaacactttgggaggccgaggcgggaggatccctttaaaccaggagttt

SEQ ID NO: 223889 - DNA, 1581 bp, Homo sapiens
agaactttcaccttacaacttatacttctacagcctcgacagcagtgggaatcaaaacctttatgccacgtaccagctttcacacttccagagcatatctgttttaggcaacctggaggccaggatggtggatactgttttgtatgacaacactcagctacagctaaaggcagagtcaccatgggaggctttggactggggacagaagctttgggaagtagtgcatgctgctgtgcccggttacatggggcggcagaatgagctgacaatctcaccagggcttggccatcatgatgactatacacagaatcatagtttccagaagaaaaccagtgggctgctgccaccgtcccctgtcctggacagctccaaacagtaccaaaacatcctcaaatcagggactctctacaggctgactgtccaaaacaactggaaggcatttacatttgtgctgagcagggcttaccttatggcttttcagcctggcaagctagacgaggatccactgttgagctacaacgtggacgtgtgtctggctgtccagatggacaacctggatggctgcgactcttgctttcaagtcattttcccccaggatgtccttcgcctccgagctgagacccgacagagggctcaggaatggatggaggctctgaagatagctgccaatgtggcgaggagttcagagcaaaacctgcaagtcacactgaggaacaaacccaaggatcaaatgggtgggcatgaactcaggaagaacaaacgccaatctgtgactaccagcttcctgagcattttgacgactttgtctttggaacgaggactcactgctcagagtttcaaatgtgcaggtatgaagcagattttcagcctatagctcattaaagaacaatcctgaaccccacaattggaattcactttaaaaatccccttaataggctagtcacagctatctcctgtttataaaaagtatctctcctcgagaagcttactgtattaaaacatcctatattaaattactatattaaaacataaggacaaccatctttatcccatgctgttgaagtaaatagaagcagctatgatatatcctgttgaatcaaaatgatttggctaaagcttaaccagactagaatttaggtttcctgagtcggctgtgattccattccctctgctttcttgaataaaggtcactgtgaatatggatgtcacaaattgtctcataagaaacattcaagtccaaagctgactactaaaactccttaggcaaggaaaatggccacagtcagtaactgtcattgatcttgaccttgtcaaatcgtcttaaggtgaaatctagaaaatcagtcttgacagaaaatgtgggggtggctaaaagcggagtaaatgatgattcagcagatgaccactgagtcactatgggcttatgcccatcatggggaagccaggccttctggaactgctatgtaaggatgagatgcaaagtggagtttgaggtcaacaatcttattttgtaaaagcttgttacttcatctttcctctactccccattctttccacctttcctgaaacagtaaaattacc

SEQ ID NO: 223890 - DNA, 500 bp, Homo sapiens
tcaatgtgtctctgcccatgttcttgccaacatagtgttaccaaatgttttgctctttgataatctgctagtgaagatattactttagtgtctttctgatttcttttttattttgaataagatcgagcatctttttgtatatttaagtcatttcttcttagcggacttttattttgggcacttccattttttattgtgctgtaatttacataaggcaaagtatacacttgtagatgtataactcagtaaactttcttttagttgaggtatgatttactttcaataaaatgaacagatgttaagtgtactgttttgatgagttttaacagctcatgtaaaactgaccatgtaacccaccccagtcaagatttagaacatttccatcactcagaaaatttcctcaggccccattttgtttttccttctctccatcttagacaatcagttttctaatttctgttaccataaattagttgtgcctatgattttttaaaattaaa

SEQ ID NO: 223891 - DNA, 154 bp, Homo sapiens
agctgcttaattctcccgaaactaaacttggtctgttactctgtctaaatatgttcttcttctttaatttcactgtcttatttaattactattactctaaggtacatatgcttttttgggctgctccaataaaatttctttcaatattccacta

SEQ ID NO: 223892 - DNA, 314 bp, Homo sapiens
gaacacccagaaccttcattattggtccaacacgtcctaaaaccaaaccttggccgcgcatggtggctcacgcctgtaatctcagtactttgagaggccaaggtgggcggatcacgaggtcaggagatcgagaccatcctgactaacatggtgaaaccccgtctctactaaaaatacaaaaaaaaattagctgggtgtggtggcggacacctgtagtcctagctactcgggaggctgaggcaggagaatggcgtgaacccgggaggcggagcttgcagtgagccgagatcgtgccactgcactacagcctgggg

SEQ ID NO: 223893 - DNA, 656 bp, Homo sapiens
gatgtccactactaaaaatgttttatgtgtggatcaaataatttattttaatattagtcttgaatagaaaaatatactaatatagtttttttcacatttgctgtttgtctcttcttccacctcaaaactcatttttaacatagttcagaaagttatcttataattgctaaataagaacatgatgatgtatttaacagtttggatttttctccaggtaaagatcaggtttccactgatgtttaacagggcttgtactgtgttaaatacttagctattctgaattatgattcaaggctaaaaggtataaatagccttcaaataatgtactttgaacttgaattatattgttgattatttcgactttataaaaatggccattttagtaagtcattctgtattgttattcaatggaaataatgtatttgtaaatgttctgccatagagtctttgaaaagatttctaatgctgtgtgtaactgaagctggacctgaagtcagtctttgcagtgtcatgaaaccataaaaatgtggaactgagagaaatgactttttactattatgaaattcttctggagaactttgaaacagcaaatggcatgtagaaggtatacagaaataagtgcacaaaaacatgcaacatagtatttgatacggtca

SEQ ID NO: 223894 - DNA, 528 bp, Homo sapiens
gagctcgtttcttacatcacccacttgaagtcctgtatcacaggcatgtcctcttagacctgctctatggtttttctcttactcagactccttgggtgagggttggagtatttgtggggagagacaactcggcagtgagatgtacgcgctgcttgggctgtggtaaatcctagtaacatggtcttaacactgttggtcaggcattgaatttaatgtcctaataggtctggctgctcctctgccatctggcaggatgtatcatctgtggttttgagcttatcacctcctcaaaggagaatccccacttgtactcctgtttctatttgcgtatttaccagcgattccccagtgctttcatttaccttaaaatcacagtggacacattgtctcagccctggaggggttttgttttgttttgttttgttttgtttttgaggagtctcgctctgtcacccaggctggagttgcagtgagctgagatggcgccattgcactccagccctggagacagtgcgagactgtgtctca

SEQ ID NO: 223895 - DNA, 750 bp, Homo sapiens
attatatatgggaaaaatattttaaaaatatttttattgtgggaaaaatatattaaaaacataggatttccctcacctgccattttaaatgtccaattcagtgacatacaatacgttcctggtgctgtgtgaccctcaccactgtccacctctgaaactccgtcatccctgtagaaactctgtgtcattaaacagcagccctcgctaacccacccccagcccctggcagcctctgttcattctttctgtgtctataaatctgaccattctagatgtttctcaaaagcggagttatacaatatttataatgttgatctggcttatttcagttagcatgatgttttcaagattcatttatgtggtggcctgtgtcagaactgcattcctttatatgtctgaacagtaatccattgtgtggacacccccccaccgccgccatgttttgtcgatccattcatctattgatgggcatttgggccatttctgcctttggctgttgtgaatagtcaacagtggacactggggcatgagtatgcgtgcaggtcccagtcttcccctccgttgctcatctccctcgggaatgacctacaagtggaattgcagggtcatatggtgattctggttttcattgtttctgtggggatgagagatggaagcggctcattcagacatctttctggaatagtgttttgcaggcattccagtgattgtaatgccattagttattggaaattaaactagacctccaaa

SEQ ID NO: 223896 - DNA, 412 bp, Homo sapiens
tagtttttgtttgaacataatttttcaaagcagctgtctaaacatacacaatttaggggtgcatttgttggattgtaaggtaagacttgtttatctttgggaaaaactgtcaaactatttcccaaagtggctgtacccattcatgcattctgccagtaatgaatggccgtacctattgttcttcaacctccaattgttactgttgagcttttttaagagtcccacagttgtactaggtgtgcagtgatatctcagcattattttaatttgcagtctcctaatgagatatattgagcatccttttgtgtgattatgtgctatcagtatattttctttttttttttattttattgagatagagtctcgttctgtcactcaggctggagtgcagtggcgtgatcttgggtcactg

SEQ ID NO: 223897 - DNA, 297 bp, Homo sapiens
tcaaagaaatatcatattaagagacctgttcagaaaatggtgaagactggcagtccaaaatcaaggttggtgtatggtgaagcctcttctcctggctttcagatctccagcttctgtgcccttgcatggctttctttggtgtgaatgccacgaaaagagcgagtctggtatctctttctcttcttataaaaacaccagtcttatcagattagggctccctaattactggaacttataaatgttaccttctaaggaaaaagagtctttgcagatataattaaattaaagatctttata

SEQ ID NO: 223898 - DNA, 576 bp, Homo sapiens
gtttcaccatgttagcccatgttggtctcaaatttctgacctcaagtgatcagcccgccttcgtcttccaaagtgctgggattacaggcgtgagccactgtgccctgcctgcctacatactttattgacattttggctaagtgtaaatttggaactttcccagatgttttaaggaattgatccattgttttccagcttccagtgtgggtattaagaaggcctgcaccaggtgaatgccttatcctttataatgacctgtcttctttgtatcttctttgagatcttctctttgtctccacatccagaaagtgatgtgctttggtgtggatctttgttcatttattgtgcagaacacttaatggaccatatctatattgacattgatgactttttttttgttggaaattgaattgaattattcttcagataatttccttctcttcattttctgtttttctgtctccatgtctttctggattgctattatgtattggatcttctggtttttaaaatcttcttctatatattatctctgttttttggttatatgctctggggtagagttgctcattttaa

SEQ ID NO: 223899 - DNA, 334 bp, Homo sapiens
cagtaaggtgttgaagacagcacttagtatgttaagtgatagttattagcttttgtgtgtcattttgtgtagtctacagatttagggctcgtggcacacgttctcactgataagtgagagccgaacaatgtgaacacatggacgtagggagggaacaacacacactgggccctgtcgcggggtgggaaccggggacaggagagtatcaggaaaaatagctaatgcacacagagtgtaatacctaggtaatgggttgatagatgcagcaaaccaccatgacacacatttatctatgtaataaagctgcacatcctgcatgtataccctggaactt

SEQ ID NO: 223900 - DNA, 383 bp, Homo sapiens
aataataggaatttgttatatgtttgacatttatcaggttactagttaaactcttttgagatgatagtacatgacactttaaaggcagaaaagcttaataaaaattacaaagtaggacatcaaacgccagtatccttggatagaaagccatcccagatcatgaggaatgaaaacctagaaacacctgtaggaaaataaagctcatatgtaagaagagaggaaggagagacatgcagcaaatgttgcctacgggcaacttcatgttaaggatccatgttctgatttgttctaagcccccaaagtatgagtatttattgtgtgcactgttagtgctattattatttactgtgaatgttataataatagttctctcaatgactcat

SEQ ID NO: 223901 - DNA, 327 bp, Homo sapiens
ggataaacatattcttttatttaccatttgtcaggttttgtatgctaaattgcaactgcttatatacactcatcaagtatctcaaggataaattaaaattcttagtaaaaatccaactgaccggtacagaccacaaaaagtactattttaagcctttgggggcttaaaaattgtgtgtgtgtgtgtgtgtgtgtgtgtattcacatggtgggagaaaaagaactttccagataattgtgaatggcatactattatataagagtttaaaacgcaatatttctgtacgatcaaagttcttaactcatgctttttttttttttttttttt

SEQ ID NO: 223902 - DNA, 454 bp, Homo sapiens
gcataaacaaatcaacaaagaattaactttactattcttattaatttctaatacaataaatttgactatttgtatcatttgagtttcatgaatataatcatattctacacttacaaaatgaaatagacataagaaagaactggtgatgtaagaaattcacagaaatgtgtaaaatatttcaagaattaacactcagtagatatttgcattgtcaaagaagcttataaatgcagatgaacctctagttgttttagttgcttgtaaaatgtatagaggtatgtgtatttcctctttaagcaggggtaacttggggtgggggatgggtgggttcatcttatctattcttcaggtcatgttctcaagaaggagctactgaatgggaagactgaaacaatttcttttctttgcacagttggtattgataaatctcaggtgtatccaaaataaaatctct

SEQ ID NO: 223903 - DNA, 724 bp, Homo sapiens
tcttgaatgagttttaagtgcttagttatttcctggagatagattcctagaattgaaatttgctgattgtatgtagtattttacagccctctcccccagccctaagcaatgttgagtgttttaaaaacaaaactaaccttaaattgtttttatgataggcggtttaaagtatgctattttcttttatcagtggccactttcttttaggagcgtagactttaaaagttggatgaaaatagaatgtttacattttgtttatattttgaagatgtaaataaaccaaggcagtctctggatgataccctttgtacctaaaagctattgagaaaatgttttatttggatttgttaaatgactcatttgtggggtcctttagtttgcagtggtttcagatcaactttctaggagatgtggcacccatgagcaccctgaaatacctcgggataattctctggttttgagggtggcccgcctcctacagataagattctttgtatggtcggttgtgaggccatttaaaacttttgccttaagacttcataaatcagagttgatacattgattgtcccttttggaggctgcagttcttaaaacatgtggctgtttttcctaggaatatttaagtaccacttgataataaagtactaccttttgctgggattatctacctggaaaaaaaaagggaacaaaaaattaaaaataaaatgtaatatctgtggtgttt

SEQ ID NO: 223904 - DNA, 445 bp, Homo sapiens
attatgaaagatacagtactggaattagccagctaggggccctgcccttgtgatgtatactttgtggtaagttgtaaacgtgagggtgggtccacaggccaagacttcagaggaagtctatgctttgacctaccttcataacaattatgtgtatacacataataactgtatataaactataaaggacaaaaccgaaaagacatagcgaatcccagaaacaagacaagtaatagagcagctacctaaggtggtgagcagagctaaatgaaacccaggcctggttagccccaggttgaggagcaaatagtgttggctgagaattaggctccaaccgggactaaaaacacttactgggaggaagggaggttggatctaggcttactgcttgaaaccaaaggcaaggctgtgggtctctctactccaacacctagttgtaaaagaagaa

SEQ ID NO: 223905 - DNA, 496 bp, Homo sapiens
tgctttatggcctacaatatcatctgtcttggtaaatattccaggagatcttgagaaggataggtattctgctcttgttacatggagtaatctataaatgataattagattaactagaatgacagtgttgttcaggtcaactatatcctaactgattttctgctagcttgatctacaaattactgaaagacgttgaaatttttaactataatagttgatttatctatttctgccttcatttctatcaatctttgccttatacattttgagactctgttgatagatggacacacaggaaaaatatgccttcttgagggattgatccttttatcattatataatgaccctctttatctctgataattttacttgctctgaaatcattgtatgaagttaataaagctatttcagctttcttttgattagtcttcacacagtataccttttcctatccctttacttgtgtcttggtggttgttttgttgtgtgtgtgtgt

SEQ ID NO: 223906 - DNA, 437 bp, Homo sapiens
ataatttattcccatgctcccttatcgatgggcatgtaaattgtgttaattttatatgatataatgagtatccttatatgtatatcttggcacagtttttcgagtgtatccataaagtttcttgcaatgaaattatagggcaacaagggtgtggtggctcttgtctgtaatttcaacactttgagaggctacggcaggaggattacttgaggccaggagtttgagaccagcgtggacaacatagtgagccctcacctctactaaaaattaaaaaaaaaaaaaagaaaaagtttggtatggtgatatgtacctgtagtcccagatacccaggaggctgaggtgggaggatcatttgaacctgggatgtcaaggctacagtgagctatgactgtgccactgcactgcagcctggatgacacagtgagaccctgtctcaa

SEQ ID NO: 223907 - DNA, 337 bp, Homo sapiens
ttggtctgcaagactcacctctggttcagcaaaatggaaggggccagattctgtcagaagcaaatatgaatacctagaggacacccagaccgacgaggccccctggaacctgctcctttggtcagccttgggtatctcatgcatgagtgaccatgaggtggcccctcacttctgcctcccgggtctccgggaggtgggggccttggtccgaggggtttcctcagctcagcagagggagccacacctggtcagcacagggtggaatccagggtcttccaggagtgacggggaggaagtttggtgaggactgaaggtaagaaggtacctccacgctctc

SEQ ID NO: 223908 - DNA, 105 bp, Homo sapiens
tttgggggttgtgtatattgactgaggccacttgtgcaaccgcttggtctaataataaagttcaacactttctggtctgagaagacgggaagccagttcccagta

SEQ ID NO: 223909 - DNA, 325 bp, Homo sapiens
gtggagcccttatgacctaaatgcctcctgaaggttccacctctcaataccaccacaagaggaaccaagttttcatgcttgaactttggggggacacattcattatatcaggcctcctggttatacaggcacattcatggtcttatatttgtgacttctgcttgttactgggaagaactgaggtttcttgaaaagactacaaaatttgaggccctacccaaactgtttaaggatcagagcactactgtctgtggctgcataaacttggcacgttgctacactactctgaaccttagtttgccatcaataaaatgaggagaaagca

SEQ ID NO: 223910 - DNA, 647 bp, Homo sapiens
gcacactatgggagctcagtaagggttaccgttgttatgcatctcttcaagaatatttcttgaggacctgctatgtgtcaggaactcttctaggctctggggagtttgcagtattggcatctgctcatagccttactttctagtgcaagagctagagaaaggataatttcagctgctggtaagtgttatgaaagaactaagacggttgtgaaagtgtcgcgcgaggacctgcagaggaggtgagatagggtgttaaggaaggcctctctgaggaggtgcattgagctgagacctcagtgattgagaaggagctggctctgaggtgactagggggagattattccactggagagaaataccagtgcacataaatgccctgcggcaggctgcaaatagtttgagcagcagaaaggaggcctttgtggctgaacatcaagagtagtgtaagagatggattgtgcagggtcttgtaggcgcttggatttcattctaaatgtagtgggaagccatcttatctgggaggatgtttaggaagggaagggctgtgatttctctgtagagagtggcctttccaggcataagagatgaagcaggcaggtcgcttaggaggccattgtcaggtaagagatgatggtgacttggagtag

SEQ ID NO: 223911 - DNA, 510 bp, Homo sapiens
ttcaaatacaacatgcaggtttgcagtgagagagtagggtgagggaagatttttttaaatcctgtaccacactaacaccaccaggcatactgttttaattggcatgattacattttaattggcatgaaaaaaattaaagacaaggattttaacttctaacaatagtaaaatagaggtatatggtttttaatattactttcatctaaggtgaacagtgtggaatggaaatacattagaatgaaatgtcagtggtgcgtacagtttaatctgtgaaattgtgtcccctgtgctgcatattactctgtctcaattgcatattaaacaaccctatcaaggcaggcattggcatctgctgtgctgacacaaattgtgaattaaatgaaattgatgtcctctgtcgtatatttatgaagacggaccattctctgaagtattctgtttatgaagaatttatgattgcaaactgttccagaacaaaaaagtggcaataaattcttttttgtgacccta

SEQ ID NO: 223912 - DNA, 446 bp, Homo sapiens
tgactgatgcaggggcacttcactaaacaaatacagaatattttgaagtaaatgccactaaaatggtatataaggagttacatatttgaagaggtactaatctataacttggtcctccaaagtgtactcaaagtcaggtttccaatatataatgactttttttttctggaaggaaaagagtaaatttttataattgataaacacatttttaaaatttttgaggtttgcttaagagcctaggatcacagtatcaagactagaggtagcaaaatagaaatagaatagatagaaatatgccacaaaccctcttcactgtagatggtcaattctacagcatggttcttacaactggtaaaataaaacaaaaccagaaagctcttttttccttcaactctttgctattaagagaactgcccatgcttcccaatttgaggattttttaaaat

SEQ ID NO: 223913 - DNA, 405 bp, Homo sapiens
cgagctcggtacccatggcatgtagtgggacagaaatcaggtattggcagtttttccattttcatttgtgtgtgaatttttaatataaatgcggagacgtaaagcattaatgcaagttaaaatgtttcagtgaacaagtttcagcggttcaactttataataattataaataaacctgttaaatttttctggacaatgccagcatttggatttttttaaaccaagtaaatttcttattgatggcaactaaatggtgtcttgtagcatttttatcatacagtagattccatccattcactatacttttctaactgagttgtcctacatgcaagtacatgtttttaatgttgtctgtcttctgtgctgttcctgtaagtttgctattaaaatacattaaactattaa

SEQ ID NO: 223914 - DNA, 419 bp, Homo sapiens
ctcttgaggacagaattttttgttaagggtcaaaaatgacagtttgagtccataaaagattgaaatctttgaagtgtgttttctagaacaggagtaagcaaacttacctatttttacatggctaaaaacatcaaaaaagaataattctttcaggtgatgggtgcaccaaaatctcagaaatcaccgctaaagaacttattcatgtaaccaatcactacctgttcccccaaaacctgttgaaataaaaaataaataattctttgtgacatgtgaaatttgaatttcattttctatttataaataaagtcttattggaacacagctgcttttgctttataatggcagagctgaggagttttgacagaaactgtatatggcattctcattacttcaagctactgtttggtgtaccacaaatt

SEQ ID NO: 223915 - DNA, 420 bp, Homo sapiens
actgatcaaaaatgctgggtaagtagaattattatttcaccctgaccaacttcagtcagattagcatatctgctgtcaccaggtatggcacaggcatgggtggaagctgtgcttggaaagtgaatgtgtttaggccaggtgtggtggttcatgcctgtaatcccagcactttgggaggccgaggtgggtggattacttgaggtcaggagttcaagaccagcctgaccaacatgacgaaaccccgtctctactaaaaaaaaatacagaattagccaggtgtggtggcacatgcctgtaatcctagctacttgggaggctgaggcaggagagtcacttgaatctgggaggcagaggttgcagtaaaccgagatggcaccattgcatcctagcctgggcaacaagagtgaaactctgtctcaa

SEQ ID NO: 223916 - DNA, 314 bp, Homo sapiens
ctgttccaggatcccatccagaatacattacctttagtcatcatgtctcctgtggctcttcttggctgtgacagtttctcagctttcccagttttaatgaacttgccattttcatcagattgtaccaagacctactatcaatatgacttatgactagtggtgctgaccttgatcacctggctgaggtagttcttgtcaggcttctccactgtcgagttgctctccccatcccccttttccatattgtactctttgaaagaaagtcactatatgcagcccttccttaaaaatattaaaatgaactagcttaatta

SEQ ID NO: 223917 - DNA, 182 bp, Homo sapiens
gggagcaacacaaaaaaaatgtggcttccttgaaagttcttcatgtatttaaagatcactctcaagcctgcagtcaacctggagtaggcagatgaagcagctggggaaaagacctcttgacctaccaacaaacagtcacaggtctgtaattttgaaatacagcatgtgcacaaaagagagta

SEQ ID NO: 223918 - DNA, 807 bp, Homo sapiens
atgggtactgtctaatgttcaaagaccccatcagctctggtcactgatgagacattctaagagtagtgcattaagaaccttggtagagaaagtcactgtgggaaatctgataggataaattgaatatttgaggggaaaaccctctttatcccttttgtcccaagcctgattcaggaaaaaagaaatgattaatgatctcacattaaaacccagtctcctacacctcctgtatctctttccatagtcctgaccccactccccccaaaaaatatttgaataagacccctgagtcctaatacttagtacataccgtatgctgtgtttactgagacaagaaaacaaaagactttctggttcacagggaaaaaatccaggtctgttgaatagcagaaaaatagatcagatcagtgctaaagttgtgaatgctgtgtggtgtcttcatatattttccaacttttttaaacgaaagagtttttggtgttgtaaggaaaaaaggagttgggagtgaaatgaaagacagagagaggcaggaaaaaaagagtgagagtgaaaggaagaaaagaaaagaaaaagaaaggctgaaagatttcaggcatctgtaatattatatgctaagtgctggcctgaagcaaaatgtcacaagcaacctacaaatggaagtttaaaatggaaagagggagaaacttatccacagccacatgagaaacactgttggacataaacaactggggggtcagagctggaaggggctcacattgacacatttttcacatttttatattgtagaattcacaaatctctacttgg

SEQ ID NO: 223919 - DNA, 487 bp, Homo sapiens
cttatgcaactcctaaaaagttgatcactgatggatgctaaagtgagtagatgtcaagaaaaatttatagtggatatatcaactgacaagattgaaatccagggatcatccagtcatgcttgcctcttggtatgataaaataggaagtattcagccttacctatcaaatattgcacacaaaataattgaatctgaatctaatcaagaatctagttctattgagattacaggaaattgtcagactagagaacgtgtggaatgatattctgagtatgtaatcagccaaatccatactgtgggaaattctacagaattaaaacctcatttctttagtaaatcaattttctaaaagaaggaagggaaatgtaactattgtaaccattatagatggaaagagtcttaagagacatatcaatcatatggactttggatattaattcaaacaaacctaaggtaagagaaaaaaccccacacattttaggacaaa

SEQ ID NO: 223920 - DNA, 579 bp, Homo sapiens
gctccagctgtggcaatttagaaactgcactacgcatttcttttttctgttttcagtgcagttagagtgcaaatgtaacaaaattaaaacctaacaatgcaaaatcttggttctgattccagtatgaccactaattagttgagtgatttagggcaaataatagaacttctctggcctttagttgcccattcacccaccagcgaatcttcattgcagttggggaagaactaggtttctggttctacttagaagaatagttacttggctttcggctctgctctgataattctgtggctctcttaagagttaaatcctgaaaagtgcagactcaagagccatgtgatacaagcaaactcgttgctaggtgtattctatatatatatgcgtttttttctctcagaaataacggaatcaatttcttttaatcactttctcaatgcaattcattttttcctgtgttttcttgtccgggcaatattgacactctcctctttctcttatatttttcttgtagtcaaccatcagctgttactctctttttgttgtccataatggaaataaaatatgtttttaaatatg

SEQ ID NO: 223921 - DNA, 455 bp, Homo sapiens
tagagttgtaaaggccctgccaatgtccagagttagaatggtcataggtgatctgagagccttctggaaaacctacacagattcccagttaaagtcatgcatcctcattcccagccccaatttgtaggcctgagcagaaaataggagtcctgcaggtttgatcatgctgctgggaccagtagtggtacccctggcattcttaagacagtacctagggacccagctggtgctggctagctgcagggatgtttgtttctataacacccagacagtcagtcttcagcttctgcccctcttttccctgccaagagcccttttcgggctttatcagctgtgccatcatgttgatactctgggttgttcagggctgccctgtatggctttccccagcctccagtctttattcaaggggtagtgatgctcggataccttcctcctggtggcctgtaggcttt

SEQ ID NO: 223922 - DNA, 371 bp, Homo sapiens
cgtatgaagagctagggtttatccatatataacaagcactttgcacagttaaggtggctgaaagattttagagagtggcaaattaagcgctttagggattcacgagccctcaggtcggagaggcctaaccacttgaacttgaccaattttacttacccttgacttcccactggtatcttcaacacatctctgcttgaatatctccagataccactgcatgtctgcaggcaggaggctcaagtctttttggaaggattaggctaatgaatgggaggggttaactgtgttttagaacagtgctagccaatagaaatatcatgtgtgagccacatatgtaattctaaattttctagtagccatgtttaaaaaaa

SEQ ID NO: 223923 - DNA, 342 bp, Homo sapiens
accgtggtagcatgctaccattgtggataaactaatacattcaaaataaacactccccttaaggttcatctgactcagttaaaagtgaatacattttgaagcaaataatttgtatataaccaattctcaaaggtgtgtggtcaacagtgccacttctggtaaaacaagaaatactcatcaataaatactaaattaggctgggcacagtggctcatgcttgtaatcccaggactttgggaagctgaggcaggaggatcgcttgagcctaggagttctggaccaatctggataacacagggagacactgtctctacaaaaaaaaaaataataataaaatgaaat

SEQ ID NO: 223924 - DNA, 346 bp, Homo sapiens
gaattgttctgttgcaaatatgttacccataaagaccctcattgctatttacatttttaaaaatctagaaatcgttttttaagcagttcctaagaacaaccagctgaaggaatacagaaatttaatgcaaagcctaatttcaacaaaatctttgccaaactatgtatatatatatattgaaaactctttgtcttgattattattgaagccaatggtgcactttttttctattttatttagatgttttctgggtactttatttagctgaaatggtaatgtcaactcttaaaaccaagtattaaaatgcattctatttggaaagaaactttggatgctgtaacaaaaa

SEQ ID NO: 223925 - DNA, 339 bp, Homo sapiens
atggctctagagaaatgttatatgttttgctttatgtggtgcataagtgactgttttctccatatacactgaattaagttttttcttactaatttgagaggtagataaacatacctcattggtgcaaaattttgaatttattccattttaaatgatgaacctttgaccttcagatgactttcaaacattttagtcctcatttttaatttgtagtggacaatagctataatgcagacatttaaggaatgaagaggatgaatctctggcacttggaagtgtaatgaccaggcaggtggagttaataagcaaagcaattcagataacttgattgtctaaaat

SEQ ID NO: 223926 - DNA, 456 bp, Homo sapiens
atgaatagtttaaacagattattgcatttacatagcattttcctgttttcaaaaaccatttccatatttagtactcaggaaacatggtaaacagatattaccgttcccatactatgggttaaaaaactgagatttagagatttaatttgccaaattgcattatgagaggaaatttaagtggagggatgattcctctacttctacatggaaataaagcaattagttggatgttccagagcaaaagaaaagcctcagacttctttatgggctgaaaggagacagaacatccataaactcatgctgtcttcaaaagcagtatttgagcttttgaagtggtggctcatgcatgcaatcctagcacttttgggaggcggaggtcagaggacagcttgagcccaggagttggagatcagcctaggcaacatggccaaactcagtctctacaaaagagataca

SEQ ID NO: 223927 - DNA, 481 bp, Homo sapiens
ttagtcaacccgaaatttacgagtaagtcggatcattaatcttaaccatgacgctcaccaatgtggatgcactttgaggaaatcctagcattttgtgcttggagttggactctggagaaaatagccattccctcgtgctgcgacagttccattcctaatgcagacttacaaaaactaggtgtaaggctggcattagggtgaggccaggatgagagcagggctttttgaaattgcaaggagaagcaggtcaaacctggccaaggtttccccagtcaaagcactttccttttccaggaatccctttaaggaagaaaataagaagaagcctgaagcttgcaagctgcttagctgccagttttcccccaactctccaacctccccaaagtccttgtcccctgcaacccagaagccatatctacaaagcaaatgaaatctcagccatgctacaaagtcaaagcctctgagaaaactgctcaggcgt

SEQ ID NO: 223928 - DNA, 263 bp, Homo sapiens
gaggagaggagaacctcattgtatgggtaaattttcctacataaagtgaacccagagcaatcagacagctaatatttattgaaaggaacaatgtctgttatgtgtcatgtaaattagccatacctagtattatttaaccttcacaaaactccagcaaactatcgcaaggacaaaaaaccaaacatcgcatgttctcactcataggtgggaattgagcaatgagaacacctggacacaggaagggggacatcacacaccggggc

SEQ ID NO: 223929 - DNA, 501 bp, Homo sapiens
caaagacaataagctgctccttcttcatttagcccatctcactgttgacttctccagagaagacgctgtaacagagtttgaagaacaagatctttcttggaaatcaacacctgtgaaagcaagagggtataagcagaattgtgcagaggaagaaggtaaaccccaatgtaggcccaactgtgcatctactgatgtggcaaagagcaaagtgaatgttgcttatcagactttctacattggacctgcatggtcaggaaattacatccctgcctgggtgagtcactgtatgtagtatccccaggaagggcatgacctcatcaaagtagatttctgcagttgagacagaccctgaagatgtcagatggaggctgtttactgacaatactccttgtaatagaacagctaccccttccttgtttcctttgactctcaaacaaaaaagacccatgcagctctttggatagaaataaatatatagatatttgggtgctgcctaaaaat

SEQ ID NO: 223930 - DNA, 545 bp, Homo sapiens
aagactgaattcatagtctgcgctcttaaccccacaatgaatagccactgaaggatgacttcctcttcgacagaggaatggatctgggaccaggttattaaataagagatctgagtttgaaaggtccttgggccctcacccacccatctaaacttgaacactatccaatgttaattcaacattaaagggtagaacaacttagtggttttaggagcgtggactgatgagtcacacaaaccaagtcttaaggcctgctgtgagccaaatactagctgggtgaccttaccctttctcatcatatgcaaaatggcgataagaacagcacctgcttaatcgagcagttttgagtattaatgtaaatgatccacgtaaaccacgcagcacagcgctcattaatgtaactgcaaatgagagccatggaaaagggcaggtaggagctataaaagaaagtggagcctgtccccgagtaacccagccgatgagagcaacgactctccccagcagcaggggcagtcgcccccgcccactgccgcaggcccgtcctt

SEQ ID NO: 223931 - DNA, 379 bp, Homo sapiens
attgaaagaattttaagtggatcaaaagactatgagggactttctattgaaaactaagtgttgtttggagcttactcttccacctatctactttgtgttatttgtgcctttcatcatctttgagctattttacaatcctgccgagacagacattaatttgtagaaaactggtgaaagacaaatatttcttgtttataaatatacacataaattatattcaattgaggttcaattgactttctttccccacagtaaaaagaagctaactttacattgattaaataaattcatttcagcaatcatcttttttttttcatttttcactctgttgcccaggctggagtgcagtgctgtgatctcggctcactgctacctccac

SEQ ID NO: 223932 - DNA, 381 bp, Homo sapiens
acactggaagaattttcccataacagtcaatattttgtcctgttattaagggagactgggggaaactgtctatgatctgccaagctaaagttcatcatttagcaagttacaatgtctcctacttgaaaaaactgaatgctcacggccctaatcaggaggctatctctttcccactggataccttcattgaaactgagatctaatgtgtctcaagctaagtgatagtatcttgataggacctcatgatctaagtatccagaatctacacgggcttgattaactgagaagagagatagaacgcatttaaactcagaatagttatgctaactattaactagttttactaagcactttaaactatacaatacatataattattta

SEQ ID NO: 223933 - DNA, 349 bp, Homo sapiens
ggtgcggcaccgctggcccaggcccgggcgcggctggacatggccacctactgcgacgacctgggcccctcctcggccccgcccggccaggcccaggccaccgcgcaccccccgggctatgagccaggggatctgggcgcggtgggcgggggccccctcctgtgggtgaacgcgccagcgctcagccccaagtcctacgcttcgggtcccgggcctgcgccgccctacgcggccccgagctacggggctcccggcccgctcctcggcgccccgggcggcctggcgggcgccgacctcgcctggctgagcctctccggccagcaggagctgctgaggctggtgcggccgc

SEQ ID NO: 223934 - DNA, 629 bp, Homo sapiens
tcaggccagtcaaattagtcatgtatgaaataacctagcataatcaaacatacacggacacatacacacacacaaatgagtgtacttaaaagtggagaaataggagtagggttgtggattgtatcaatgtcaattttctcattggaatatgctattccagtggtgcaagatgctaccatagggagaaactggccaaggagtgtacagaatttctcagtattatttgttacagcttcatgtgaatctattatctcaaaataaaaagctgaagaaaaaaggcaaggaagaaaacaatatagtatactgccacttagttttttaaaaaaaaatacgtatgtatatgtatctatatagatatatacacagaaagacgcacatgcatttacaagtataagagctatatgtatactatttctgtaaggataactaagaaatcattaatactgattggttctgaggagaactaaagaaactaatggaatgcgtatttacttttcatagtatacctgtctgtggctgttgaattttgagctactggcattattcattcaaaaaataattttgggggattgagaacaaaatagccatttcaaacctaaaacaaaaacaaaacaaaaaaacagctcggc

SEQ ID NO: 223935 - DNA, 256 bp, Homo sapiens
cgtaggatatcagttttagcaccagtcttggggacacagtggcaaaaacgtagcagtttcgaaaatgtcagatatatttaacattcgatattcctttctgcatatgaacagttgtaagcttttttaagtataataggtcgcaggcagctttggtagcctatatctagaactattttttttctttaagagacagagtctacaacatttcccaggctagacttgagctcctgggctaaagtactcttcccacctcagc

SEQ ID NO: 223936 - DNA, 613 bp, Homo sapiens
gaatgagtgctaggattacaggcgtgagacagacacacatacacacacatacacacacacagagtctttattgcagaagacagtgtgttgccttataggcgtgagacacacacacacacacacacacacacacacacacacacagtctttattgcagaagacagtgtgttgccttaccagaatgagtgcttggattacaggcgtgagccactgtgcccagccctaacttttaatgtacatcacacacacactcacactcacatacacacacacacacacactctgactgtctttattgcagaagacagtgtgttgccttacccagaatgagattgaattgttttgcttcgttttgttttgttattcagtgttgcggtagcagatgcattatcaaaggaaaaatatttggctcctttaattcctctgaaaacatgagtattttgagttctgcagcacaatgactgtaggactaagctaagtctgctttgcagatatctgatcagatagtcccttcattctgtagacgtgtattggttggtccaagacacagtgagtaggagctctgtggaccaagacaaagctggactagagagtacagttcaaacttggcagt

SEQ ID NO: 223937 - DNA, 638 bp, Homo sapiens
tgtaaccttttctcgctctctgtgtgactgagatatggaaaggcttctgtggggcatttttgcccttgcattgttgccttttgggtcaacaaccttgacacttaaacaaacagcagactgggaatcctctttgtaccagtgtgttgctgggtgctgctgataaaagggactagagagtaaaggccttctggtcagcaggtcacttagtcaacagctcttgtgtgtatgtgggggtgtgggttctgccttgctgtcagcactagggtgtgttccctcttaagcctggaattaggagttccagattcctagtacttaactaaaatttggccaggcgcggtggctcacacctgtaatcccagcagtttgggaggccaaggtgggtgaatcgcctgaggtcaggagttcgagaccagcctgaccaacgtggtgaaaccccatctctactaaaaaataaaaataaaaaaactagctgggcatggtggtgggtgcctgtaattccagctactcgggaggctgaggcaggagaattgcttgaacccaggagatggaggttgtagtgagctgacatggtgccactgcactctagcctcagtgacagagtgacagagtgggactccgtctcaaaaaaaaaaaaaaaa

SEQ ID NO: 223938 - DNA, 363 bp, Homo sapiens
gagtttcctggaggtggtttgtggccaaccgtcaattacttgggctgctgtgcagtggggatagaaggatgattagaatccacagacaacccattggcctttgtttaccattaacttctgttttctccaccagccaagctcctccagacccaggagatggctcttccctctgtgtagcacactctttccagtcaaggggtcttgcactgctatttccccttctgctttgcttggttcattcttactgaccctccaaatactgaaggaatgaatggagaaataagtaaatgagagatgtggccaagagtctccaagagaggaaattaaaaaatcctatacctgtgaggaactggcccacttgca

SEQ ID NO: 223939 - DNA, 499 bp, Homo sapiens
ttattagtagctgtgaaagaaaataaagaaatacataaagtgcagaaaagcataaggaaaaaatgaaaatagtcgtcccccacgtagagatgtcatcttaacactttgataattacctttccagatgtttttctggaaatcgaaaggtgtttaagggtcggtgaatatcacttatgggctgttaggtaacctactttttacttaatatatgaagctctttctatgttgataaatagataattttttacagctacagagtattacattttgaattttctataatttcttgaaactaattaatgagtgtttgtattatcagtagcactttgaaatcattatgtatatatacttatgccttgtctaattgttttctgtcactctgataggtaaaatgtagtgaactgcatgttttttgttttgttttgttttttgtgttttattttggtttttgagacagggtcttgctctgtcaccctggctggagtgtagtgatgagaac

SEQ ID NO: 223940 - DNA, 1272 bp, Homo sapiens
ccaaccaaaaccaaactcctggtaagctttattagccttttctacaatgtgtctcagtttctctttcacaccttggagtggaagacaatctctactcacactgttgtggtatgtgtctgtctgtctcagatgtgtgtataagactgctgtcttaaggcttaaaagtaatttaaggttttgttttttgttattttaagagttgcagtttctttggagacaacaaagtactttttttccaaagatgaaaaaggcatattcagactttctatgttatgttccataattgttttgcttatcactgtataacattctcattatcatgggctactttaagctaatcagttgcattttggggtcctcatttagaagtcaatctggaaaaaagatggctgtaaaacttagataaaccagtatgctatttctccttccttgtctgcctttacagatgtttcctctttctctctctcttccctgactatctctctcaatgatcattgacagctcccgcatcccctctttcactcagcttcactccaccatgaccagagcacctctcctgctactatgtgttgccctggtgctgcttgggcatgtgaatggagccacagtaagaaatgaggacaaatggaagccactcaacaaccccagaaacagagatctgtttttcagaaggcttcaggcatattttaagggcagaggtcttgatcttggaacatttccaaatcctttccccacgaatgaaaatcctagacctctctctttccagtcagaacttactgcttctgcatctgcagattatgaagagcagaaaaactcctttcacaattatctcaaaggctgaaagtttcttctgagctcaggtgtctggctattttaaaactacagatgaagcttctcattagaaaaattcaaccattgtcatagctaaactttcatggagtttctttccccctcacttttatttttcagtttgtaatgattttattccacatttccatatttacatataaatcgctggaactatgatttctatgcatatttatggagtttttttcctatgaaaccataaatattgatgtagagcaccgcatgtatttgtaggagttacaaaaacatcacaaactgaaaaaagattataatctaaattagatgtttctttaagcttgtttttaaaacttgtcttttatgtttattatcttttatcgaccaatatatttttttaaagggacatgctcacttttagtatagtaaaattcattatatgtgatagag

SEQ ID NO: 223941 - DNA, 1219 bp, Homo sapiens
ccaaccaaaaccaaactcctggtaagctttattagccttttctacaatgtgtctcagtttctctttcacaccttggagtggaagacaatctctactcacactgttgtggtatgtgtctgtctgtctcagatgtgtgtataagactgctgtcttaaggcttaaaagtaatttaaggttttgttttttgttattttaagagttgcagtttctttggagacaacaaagtactttttttccaaagatgaaaaaggcatattcagactttctatgttatgttccataattgttttgcttatcactgtataacattctcattatcatgggctactttaagctaatcagttgcattttggggtcctcatttagaagtcaatctggaaaaaagatggctgtaaaacttagataaaccagtatgctatttctccttccttgtctgcctttacagatgtttcctctttctctctctcttccctgactatctctctcaatgatcattgacagctcccgcatcccctctttcactcagcttcactccaccatgaccagagcacctctcctgctactatgtgttgccctggtgctgcttgggcatgtgaatggagccacagtaagaaatgaggacaaatggaagccactcaacaaccccagaaacagagatctgtttttcagaaggcttcaggcatattttaagggcagaggtcttgatcttggaacatttccaaatcctttccccacgaatgaaaatcctagacctctctctttccagtcagaacttactgcttctgcatctgcagattatgaagagcagaaaaactcctttcacaattatctcaaaggctgaaagtttcttctgagctcaggtgtctggctattttaaaactacagatgaagcttctcattagattttatttttcagtttgtaatgattttattccacatttccatatttacatataaatcgctggaactatgatttctatgcatatttatggagtttttttcctatgaaaccataaatattgatgtagagcaccgcatgtatttgtaggagttacaaaaacatcacaaactgaaaaaagattataatctaaattagatgtttctttaagcttgtttttaaaacttgtcttttatgtttattatcttttatcgaccaatatatttttttaaagggacatgctcacttttagtatagtaaaattcattatatgtgatagag

SEQ ID NO: 223942 - DNA, 427 bp, Homo sapiens
ggcagaggttgcagtgagccgagatgccgccactgcattccagcctgggcgacaagagcgaggagactccgtcttaaaaaaaaaaaaaaaaaaaaagtgacaccctgtctcaaacaacaacaacaacaacaacaaacaacaacaaaggcatagagctagtaaaggccgatccaatgccatgtcactccagaacctagcgcttagctacaaatttcattcattccttcagatacttattgaacgtttacagtgtaccagcattgtgctgggtgttgtggatacaatgatgatcaaaacagataaagcccctgtctttaaattgcttataaatctagcaagggagatagtaaatatataaataaaactaaatattaattacgattgtgatgcatgctgtggaggacagtagagggtgctgtgaggatac

SEQ ID NO: 223943 - DNA, 288 bp, Homo sapiens
tatatagagaaaagtgactgggcacggtggcttgtacctgcaatcccagcaccttgagggtgctgaggtgggaggatcacttgaggctaggagttccagacaaaactgggcaacatagcgaggccctgtctctacaaaaagtaaaaatactagctaggtgcagtggcctgtagtcccagctactcgggacgctgaggtgggcggatcgtttaagctcagaaagtctaggctactgtgagccatgattgcgccatgtactctagcttggacgacatagcaagaaaagag

SEQ ID NO: 223944 - DNA, 698 bp, Homo sapiens
aagctttggaatggatgcaaatgttctaaaatataagagtcttcaagctgaagaaactaaccagcaaagctctaagcatacagccctccatctaactaaaaataaggatgagcaggccaataagaatgatggacaacccaccttatatctgaagttccaaagggagagttaatctagctttatactgctctgagaactgtgaatgaaggataacatatgcttatgtagtaaaaagaaaaaaaggaaagccctccccttcccctttccctatctctccccttacacatgcatatgcataaactaaaaattttagatatcccatcttctgtagtgggaacatctttcagagatttaaaaagaaatccagagaaaatatggaaaaatattaaagcagatatttatatttagtttttatcagcatggaaaaaaatctctgaagttttgatttcttccaaaactacttacacattcgacaccaaaaaaacttaagaactcaaagtaggaatgacatataatatgtcactgattttaacctccctactagacactttaatcaattagtcaacaaacatcatttcctgattttctgttatatcattagtgtgctaggaaccatttctctctactaggagattaccacataattgtacagataaaacatacctgaataaaatgattacagaataagaaaaaattaa

SEQ ID NO: 223945 - DNA, 539 bp, Homo sapiens
gagaggtggtggtagttttgggagcaggcagcaggcagctcatggggcagtggcaagagcctggtttcgggaaccacacagacctcagctcaaatccaggctccatcactgtgtgactttagaaaaatgaccaccctctctgggactcagttttcccacatggaagatgaggataccaatttcacataatttattggtaagctgtaaagtgcagtgcacttaaggaggccctaccctatccccccagctgcctcccagagtcagtgcctggagttgtatgggtttcctgaacctctgggctggctctgacccaagaagtctgtctttctccttatgggctgtgacgggtatggaaccacctagaccaggaccatcctgaggtccatcccacctctgactgatgaggaagcatcctggctgggagttaggacaggctctgcatgtggacacacaggctgtgcacacttaagtggaaaagactgtcgactaaagaagaaatatcaagcttttaaagaattaaagttcactttacttagaag

SEQ ID NO: 223946 - DNA, 477 bp, Homo sapiens
taagaaatgaagcaggaagatgccgcttgaaggacaatacaagatgagtaacagggaccagaacacgctaccctagaatatgacatgctggcatttaaggagacagcagaagcaggaaggtctctctgaccttcttccaccattctcccctgaagcaggccatgaaagaattctctggcctttctctaaaataagtcataagactctcattacagaagactgttccttatattggggggaaaggaatgaagacaaaaaaacaccaagacgaatctgaacaaaggccttgctaagttcccctcattttataaccattaggtcacacccacttgtccaatcatatttctgcatgactgtccaagtcttcatcaaacctaaacatccatagatttccctgtttccttgggtcttcatttctgaaggctcccatgttacataaaacttacattgaatacatgtatgtgctttcttcttgtg

SEQ ID NO: 223947 - DNA, 418 bp, Homo sapiens
tttcatataaatggagtcaatcaatatgtgtggccttttgtgactagcctctctgaggtagcagacataatgttttcaaggttcatcgatgtaatagcatgtatgagtaccctgttccttttttatggctgaataatatctcattgaatggatagaccacattttgcctatccattcatccatagatgaacatttgggttatgtgaatagtgctgctatgcacattcatgaataggtagttgtgagtacatggtgtggctttggatttctctaaactttatatcacactgcagcttgctttgttttttcagtgttaggttatttccatgttgatatgcacagctctagttaattcattttcactgctccaaagcatcccatttttaaaattattttattttattattttttttgagac

SEQ ID NO: 223948 - DNA, 554 bp, Homo sapiens
acgtggattttacacttttatcacacacacacccatattcagaggaaatagttaaataagagacagagcaaggtaccaacagtagtaacatgtcagtggtaacattatagatggttttcattttctttttcatagttgttggtatgtttcaaaaatgatcaggtctttgaaaatcagaaggaaaatcagaagcaagagcaccaattgctaccaggtgaaaaccacaatattctctagcaatttctgcaaactataggatccttcataaaatatacaggtcctttaataattgatatgttcaatttttcaataaaaattctgatgtaaaataaggaaagaaacattcaaagtattcattttgatcttgtactcatgtttgagaaagatacagagcagtcaaattactttggaaagtgtaaaaattggtggtttcattttaaattgctacctctaacaccttcatgtgacttcagtaacctatctgctccctgacaaccttaaagtgcttaattaccacaaatttctgaaataaatctatcatttgaataacctta

SEQ ID NO: 223949 - DNA, 450 bp, Homo sapiens
cttttaaatattgtttgaattacaaaaatgaagtcatcaggtctaaatgtctcttgtgttttataagataatgctattttaatatcttttgccttccacatttttaattcttgacacctagcatttgagatctggatgaaaccctggaaagctctgattcaacccttttatttaacagataaattagccaaaggctgggaggctacatagcttacagagggtcacagagttaagtagaactgagattagaatccaaaattggagtctaatatttttttgcagtgccggagttaatctgttcatggttttccgtattttagtagcacaataacttttaaagtgttttcaggagaatcacttgaacccaggaggtggaggttgcagtgagctgagatggcgccattgcactccagcctgggcaacaaagtgagactccataaaaaaaaaaaa

SEQ ID NO: 223950 - DNA, 510 bp, Homo sapiens
taagcagctttctcttctcacttcagtatcctttccaggcccccggctgtgtaaacagaaattcaagttgttctggttaacttgggaaaaacccctaagctgcatagtctttaggtgtgctccgctccagccccacgttcttaatttaaagagctctgctgcacggaagttaggctgctgcactgctatttccagagagatccaacagtatctgcctttctcttattttggtccaggaggccaaacctgattttgtaccctctagtggtcaaggatatgggggaagaccccatcacaagagggcccacctgataagaaccctctggagactgctggcagagtcttcttaacaggacttggactgtgaccagataaaacatcttctataggtgcagaaactggccaatctggaaggtccaatggcttctacgttaaggttttcttaacaagatggtataccccgacttttacatggattgcttcttttaagtcctaaaagaagttgtattt

SEQ ID NO: 223951 - DNA, 415 bp, Homo sapiens
aattctatgggcaggtgcgcccctgtgaagcactcagacagcagagtagggctgacctggcaaggatatggcctgtctgccaactgtggttcctacctgagagagccctgtggaccagaacactcaacaccaggaacatccagattcataaaatgagttcttatagatctacaaagagacttagataaccacacaataatactgggagacttcaacgccccacttgacagtattagatcattgagacaaaactatcagtgacgttcgggacctgaactcaacacttgatcagatagggccaacagacatctatggaactctccacccagaaataacagaatatacatttttctcgtctgcaggtggtacatactctaaaattgaccacataggcataaaacaatcctcagcaaat

SEQ ID NO: 223952 - DNA, 309 bp, Homo sapiens
aagaataattttaatgtcgcccaaatggattatgctgacctcaacccagatccccctgggagatataaacttcttatatgttcctggctgggtcattgtaaataatatctacatgtatcccaaagctctgaattatcctcatctgtaacagacacaacgactaaatggtatctggaacgtagttaattttctggaaaatattcaaaggaacaaaatgagcactgcaatacaaaattgctgtcgacttaacttttgccagtttccctggatgtgtaagtagaattatattttcacagaacttgcaaaaat

SEQ ID NO: 223953 - DNA, 438 bp, Homo sapiens
atgtactcattgactcctttgtctgaaggcaaaatggttatttattgattcttttattcatccatattgctgataaaattaagcagtgattaatctgcttggtcaagtaggtatcatgctaagtaataaacatactaatgtaagtgaaaaaactctagatactaccttctaataggaaagataggcaaatattgatagtatatttttagaatgaaaagggttagacttgcaatataaatatacaaagtgtgatgggaacaccagtttgaatgcctgatcctattatttgtttatttttgatagagcgtagtgcctcaggaacatgggctcagatctatttgtttcttcaaatccatttgattttctacctgtgaggcccagactgtaaggagagtattagtacaaccgtatgaaaagtgaggagaggaatgcaatgta

SEQ ID NO: 223954 - DNA, 323 bp, Homo sapiens
taccccaccatcaaacaccagatcttttagtagtctaaggtagtatctatcaccactgagccatgtgaacttataaaatccatttcctaaactcggtgtcctcataatctaaaacatttccaaaacctacccattgtttcaattgtatttattaagtgcctacatatggcaggcatttcattggccaaccaccaacaataaggtaaccactgttctagggatacaacagagaacaaaactgattaaaaatgtatttgaaggctacattctcacaggatgttgtctggtatacagtgactgttcaatatatgggaagtgatcta

SEQ ID NO: 223955 - DNA, 556 bp, Homo sapiens
aattaaccaaatcaacattttgtgtgtatttataagctacaaaggttaacttttcattgatgacagtcagtacatttgcatatggggcagttttgagacccaaatgaccaaccccagaatacagacacatctgctgaattttaattctggagccattcaccatagtactcttctcacagtatgccattcccatggtttttttcacagtaaataaactggtgatataagctcatgataaatcataaagatcctaatactatgaatcttaagtaatggtatttaagagaaaacctctaggtcttttcaaacacttctgtatagtacaaggcagtctgcttggtacagaacgagagaatctttgtaggctttagagacccagttcatataatcagatcttagggttgcatttttaaaaaatttactacaaagcaaatctaattttagagacaaaaattaaaaattattccatagcaactaaaatgcccaatgatgatgaaacaaaagacatcgaagttctatgtaattaattcagtaaaaaaacagttgtggagctttg

SEQ ID NO: 223956 - DNA, 399 bp, Homo sapiens
aaacccccttccctcaatgtctgattaccctctcacctccaccatcccccaggtgatatctgttcaccctggtttgctttcaccaacagtactgttagggtggtttggccagaatccccctcatccctgatgtttcctcttaataattttccatctactgacctccatcctgcttcttgtctataaattcccactttttcttgctatatttgaagttggctcaatctctcttctctactgcgaaacccatcagagtagttcatatgcctatcttgatacttctgaatagtctatttgatacagtttggcttcatcttcacccaaatctcatcttgaattgtaatcccaataatccctatgtccccctgagaggtaattgaatcatggaggttgttttcc

SEQ ID NO: 223957 - DNA, 525 bp, Homo sapiens
agacctggattcgtgatagcttagtcgacatgtgaatagcgcaataatgattttcgagatcattggtgttactagtgaaaggtttaggacttttaaaataatttgactaaaaggctctttagtggaaaaaacgactcgccagtgttatggttatttttatgaggaaattatcgatcagcaaatattccctaagtagtgtttgtatacattgccctgggtaaggcataattagaattagtaagcaagtttggcgattcctgttccccgagaacttagttttagtgggtttttaacctgaggtctgtggatctggtggtaggtgattgggcttcagagttcataactcgcctgacattgtatacataattctatgtgcatttttctgggaagttagttttcctacaactttataatcagaatctcatacttgctcctaattccctatattgttaaagagccactggctcatttgactatctccagtattcatgcaacaactcttaagtacttgacattgagaaaaaa

SEQ ID NO: 223958 - DNA, 332 bp, Homo sapiens
cacacacaaccacgtctggctaatttttgtatttttaatagagacggggtttcaccatgatggccaggctggtctcgaactcctcacctcagatgattcacccacctcggcctctcagagtgctaggattataggtatgagccactgtacccggccaataatttttttaatttttaatttattttttgggcctggggtggtttcagcctcttatttgggaggctgaggcaggacaattgcttgaaaccaagaggcggaggttgcagtgagccgagattgcaccactgcactccagcctgggtgacagagtgagactccatcccccgcaacca

SEQ ID NO: 223959 - DNA, 479 bp, Homo sapiens
atgggagttatttaagctaaaataaaagtctgctaattaataacaaaaaacaaatgaaaacgagaaaaaaaggctcaatggtataagtgatgcatatccatactcagaattctctaacactctaagggtggtgtgtaaagcagttttagagagttagaagaaaaagctattaaaaacaactgctgaagtaaattgttaagagatacaaattaggggcagggccaagatggccaactagaagcagcagctatcagaggcttccattgaaaagaaccataacagtgtgcaaatcctgcactggcaattaaggtatccaggttctgtcattagaactgagtaggcagctggtgtgacccacagagaggaaggaagagcagtatggtgcagtgggccacctgagagccacatagggcagggcagcccccaccccccagccaagggaggcagtaagtgagcgtgctaccctgcataggaaacca

SEQ ID NO: 223960 - DNA, 449 bp, Homo sapiens
agtgtggagccaggcagggcccctcttcccccttcctctctctcccagcagagcccagatggggccctggggccagctcttgggagcttccagacttagcaggaggatggaatggggtggagtctgggggctgttgttcagggccagggactcagagcaggcacttggtgaacggatgccatgtaaatgtcaacaggaccacagattaggagatttctgtgtgtggttttgttagtgttatttcagaaaagggtgtgtgcatgtgtgtgtatgggggggctattgaaaatagggttgccagataaaatatcagatgcccaatttgggagacgtactaaaacattattcattgtttacctggattcacatgtagcagggtatcctattattgatgtattttgattttgctaaacctggaagctctaatgagaagagcattggctcaggag

SEQ ID NO: 223961 - DNA, 370 bp, Homo sapiens
attgttattgctggcattcaggaagttccaggagaaggtagttccaaatagcaaaacattgtacttaacagaggttcttctaaggagttaaaaactttatgtggcttttgaagaaatagaataccttctaagacgacaacaacagtagaacaaattttacaaagccatgaaaattagaattagaaatatattaggtggccagtggtggtagagtcaggatagaaaatagaagaaaccaaaaataaagtcagatagaacaagggtggatgcagttaatgaaaatttttggtggttatgtagattactttttaatccttttgcaaagctaagtaagcatatgagttggcaagcctaggctgccattccaaga

SEQ ID NO: 223962 - DNA, 329 bp, Homo sapiens
cattctgcctcagggcctttgcacttcttgttctttctgcttctaatgctcttatttcagattacttcagggctcactttttttaccttttccaagtcttccctcaaatgttacctgatcagagcttccttctctggctaacatatattactcaatttttttcataataatgttatatcatatatttattacttttgtttattgtctcttcttctaattagaatgtaagctctagtaaggcaaagcctttatctgtttatgtataactgtttccctagggcctgccatgaaatatgttttcaataaacatttgttaagtgaataaacac

SEQ ID NO: 223963 - DNA, 471 bp, Homo sapiens
agccaccagaaagatgaataaaataaaagattgaagaagtagcaagtagcagtatggaagacttgtggctaagaagacacttcgcactgttatgcaccaggaggattgactgtctctgtggcttggaggcagttatacgtagcagcagcagcagcagcagcagcaaaagttaacaggagccggagtctgtcttcaaagagcagtcagtagagatgaagagtagattactgattccatagtacatgtcagatactgcctagggacttcctaagtagaggtcaaggtcccactgttatacaggtaggggttaatgagctagcaaattaggatattaatattaatggagcatctttagtacccacaggctaatgaagtctggggtcatttgggttatattaacatgaaacaaagtggaattttaggccaaacgcatttaccagaataaagagagcaattttcctgattaaagga

SEQ ID NO: 223964 - DNA, 179 bp, Homo sapiens
tttgttgatagctttgtgagagtacctgtaatgttgacatactataaagggtacatcttaaaatatgtaatttgataagttttctcatgaatgtaaccaggtaatgagcatattcatcaccctagaacatttcctcatgcccctttataatccttttctccccttttccttgctccttc

SEQ ID NO: 223965 - DNA, 870 bp, Homo sapiens
gcatctttttaaaatcagagataaattcttgccaccaaagttgtaattgttcattacttcattcctctattcgtgtgcgtgtgcatgtttgtgtttgtgtgtgtgtagagtatgtatatctgataaactgtcagcttttgatttctgaagctgtgtgggaattgatttttctagtcaatttgactacatctctagaacacggtagggatgatagggaatgccttgtttgtctgtgagattaaaccattacacctttttattcataattgagtagattttgagttacattggagagtcctggctttacagttggatagtctgtttcacagtccacctcctagctgcaaagtccttggctggtgatgtagcttttctagggatcagtcttctcatctataacacagtgctaattctcaccttgttgggttgctgagaattgagtgagcccatgcatttgaaggccaacctcagtgcctgaaacagataaacccaatgaacagtagttctttcaatcttgaatgagaatcatattctgaaggctaaatgatttttgaaaaactttactgttaatttacatttttttttcttttttttgagacagggtcttgctatgttgcccaggctggtcttgaacccttgggctcaagtgatcctccagccttggccttccgaagtgttaggatcacaagtgtgagcttcctcaccctgtcctttgttctttttaagggggaaaaatgcacctctgcatacttacatactctgaattatttggagctgtgcctctcagactatctatggtgaaggcctaattttgttccgaattcgtcatgaactgatgcttttataaagtacaatacaatgaattaatat

SEQ ID NO: 223966 - DNA, 717 bp, Homo sapiens
gcatctttttaaaatcagagataaattcttgccaccaaagttgtaattgttcattacttcattcctctattcgtgtgcgtgtgcatgtttgtgtttgtgtgtgtgtagagtatgtatatctgataaactgtcagcttttgatttctgaagctgtgtgggaattgatttttctagtcaatttgactacatctctagaacacggtagggatgatagggaatgccttgtttgtctgtgagattaaaccattacacctttttattcataattgagtagattttgagttacattggagagtcctggctttacagttggatagtctgtttcacagtccacctcctagctgcaaagtccttggctggtgatgtagcttttctagggatcagtcttctcatctataacacagtgctaattctcaccttgttgggttgctgagaattgagtgagcccatgcatttgaaggccaacctcagtgcctaggtaagtctttgccccagaaagtgacaagaagaaaacttgctttttgttcgtttgaggaatcccatatggtagattgacacatctcatagcaaatgttcttgttgttatgaccaaacgccttccataatgtggaatcagtgggagccccgagcttgttttcctggaactggacagtctgtcgtagcggggaaaataagaagtcgtgcgataaggtttttcattgacaggaaaaattatgg

SEQ ID NO: 223967 - DNA, 452 bp, Homo sapiens
agtaggcaccctgctttgttctccattatattccaagtgcccgggacgttgcctggcccatggcaggagtctgctgagtactggatgaatgtgtgaacgaatggatgccattaggaatgaatgccaggcacccaagtgcacacgtacacaggaggtttccaaatcgcagggtattcatggcagaatgcccgttatatagttggtaactgaggcacagaggaatcaagagactggcccagatgcccagctggggtaggaaccagggcttctggttccctgttccatgctccctccagtaccctacatctactacagcaatgctgtgtttactctagggaccaaactggaaggttaaaaaaaaaatgcattctctaccccttgaaaaaaattgggtgtattctactactcaagaaaaataagattaaagattaaaggaacaagtacacttaatt

SEQ ID NO: 223968 - DNA, 461 bp, Homo sapiens
atgtataaatattttatctgagactcctgctactattgccacccgatgcatcttccaaaaggtaaagcttccatctttgcatcaccttctcagaaatctgaattggtcccattgctttcagaatgaagttaagttcatatgctaacactcagggcctctgtctgtcaatcagcaaaaatatattgaacgtgtactatgtggctaagcatgtttctgcagatacaaggtaacatggagacctcatggagcttgttcaccttttctttaacgtgaacactctgctccaagcattctggccttccctctgccctcttgtgttgtcttcactgtttctggaacaattccccatttgacatacccttttctattcctttagcctagttaaaacttaccccacgacacgacacttctattgcaaagctaggtggtatttggttacccttcctttcctttcctggctg

SEQ ID NO: 223969 - DNA, 459 bp, Homo sapiens
aattacacatgtgtgtctcgcctgtgtttggttcctgtgttggtgcctctggatatttgtcaaactagagttcctacattccttatcaggttatttctgtcgaatctctagcacttttaagtgacgtataatcttgtaggcaagtgaatgaagtcagtgagtatatgtcacattgacttactcctgactcacatgcagcttgtctttagatgggcagataagatgctggccctactggagcgactgtggttgtgccgtcctgagcacccttcctccagtggccccggttttcaaggctttgacacaatggacctaaagtctcctttttcaagcttggctgcatatccacagtgcttttgtgcatgatgttacgttgttctggaggtttcattttgtaattccagttacctttgatgaaagaaattagtaaaaactttttggatgtgagtaattgcagaa

SEQ ID NO: 223970 - DNA, 723 bp, Homo sapiens
ttcaggattcctgctgacctgtgtctctggatgagggagtcccatgccatcttcattccagaatcttattttcttaataagggtgattcagagcttaaggacaatgacacctagcaatatgtagcatggcatggcttagaaaatattctcatatccattttcacacactttgagaagtaggcagagaagatatgactgtcaatgaaaagggacttacctaaaaccacgtagcaagtttgcagcagagccaagactaaaaccagcccctatctttaggttaggtctcttgcacccaagcatacccccttcctctttcatccacctgcacctcctgtgcatgacagccccagacaatgaaggcctaggcaccataagttggcacgtgccctctgtaatagcaagctaaggtcatcctggggcaggggcagaggcaagagaggatggcagggagaattatgcatagcattgtcattttctgagtccccagtgtagctaaagaggcagcctaatgaagcagcttcttctggaaactccaaggactatgtcctgggagggaaagccaagccctcaggcagcactcaggggaagaacagatccacatatgcatagtgctccagctaggatctggccactcaggggttgtcacagaagatatgacagtcatatcttctctgcctatttctgagacacccccatggtcacccttatgggatactgcagccc

SEQ ID NO: 223971 - DNA, 969 bp, Homo sapiens
gtagatcatcatcataacagctcccagtgaatcaatgcctccctgcatccacacccctttgtaacatgatattgttgctcttcccatcaagaaatggtctcttttggccgggcacagtagctcacgtcatcccagcactttgggaggctgaggcaggcagatggcttgagtgtaacaatatgttgaatttgccatgggcctttaaagcttcaatgttgtgaagagctctgcatgaaattttaaagagactggacctttcatctgcacaacagcagggcacctcgctatagggacaagaaaggaagagagagagagaacatttctgaagtaatagtgaaaaataacagcagaagcaattatttcatcaaagattgcagggagaggctcctccgtgctcctgagaggccgaacacagggtcgccagcacagcttactgctcggtgtctcctgagccacagaggaagacgtggcaggagcacctggtgctaatatatattcatgtctatggcaatgccgaccatctggctggtctgaaccaggataaaagtgaagacttcctctgtgaagacccagctctttctttggctccttttttgaagccatctttgctctgctctcctctgctgcccagaaagttccagagtgaagctcagctctagatgaacaaaaactggttgagtccagagatgcctgagttggagatgaaccttgcaaactttcctcattaccatactaaaaaccccacccaggaaggagcttatctgccatttcctacacatgtgacatatggagaagcatgatcagctacttcacagtctctgcctttactctgcctccgcatacaatggctcagccaactagcctaacgaaagctgttttcaccattgtttgggaggtactgctttgggaaactgccccagctgtcctccttacttgttgtaggtaataaaatccctttgttaaatctta

SEQ ID NO: 223972 - DNA, 525 bp, Homo sapiens
gtccggcctgggcgacagaacgagactccgtctcaaaaaaaaaaaaaaaaagaaaatattatgcttagtaaaataagtcagtcacagaaggacaaatattgtacggttccactaatatgggtgaggtacccagagtaggcaagttcatagagatagaaagtataatagagagaaggaatggagaaactgtttcttcatttctagagagaggagggaatgggaaattattatttaatgggtacagagcttctatttgggatgatgaaaaagttctgcaaatggatagtggagatggttgtgcaacattacaaatgtgcttaatgccactgaattgtatactttaaaatgcttaaaatgataagttttacaagtttttttaattaaaatttttaaaggatatattcatgtatgcagaatatttcttccaatgagggcagagggaaggattaatatagagattttgattgcataaataaataatagcatattgtataaataatatataaataaatataaataaatgac

SEQ ID NO: 223973 - DNA, 393 bp, Homo sapiens
cttaattcattcaagaaatgctgactgagttcctgctgtgtgttggacactttcttagaagtgggacacactgcagtgtgtgggacaaaggctgggccgctcattgcttatgttctagttgaagagagagtcaatcaacaacattctactttcagacattgataaatgctgtcatgaaaagacaaggaacatgaaaaggtaagaaaagggatggagagagatgggatgaggggtgcctgggcagacaatgcaatgatctggcaaaagagtaggacaatcatgagactgcatgtgttccagtttctgctgctgtaaaacagcatccacaggttacatctttactattctgttacatacatactattatttaaataaaaaatagtactagttaac

SEQ ID NO: 223974 - DNA, 420 bp, Homo sapiens
  misc_feature (29)..(29): n is a, c, g, or t
acaagtaatttcagtctatgcacaaaagnacgtgagtagtaactggttaccatttgatgttagcggggtttcaccatgttggccaggatggtcttgatctcttgacctcgtgatccacccgactcagcctcccaaagtgctggaattacaggtgcgagccacctcacctagctcccatacttgaaaaatttgagaggaatgctgggtgtggaggcacttgcctattgtcccagctactcaggaagttgaggtaaggagattgtttgagaccagaaatgtgagaccagaccgggcaacttagtgagaccccatgggggagaaaataaaaaaagaaacaatttgggggaaagaatctatcttttaaatatcaactttgggctgggcctaatggctttccttgagcccaggaagttgaggctg

SEQ ID NO: 223975 - DNA, 312 bp, Homo sapiens
tgggtcatagaaaatgtgtaaatttaccttcagtagatcttgctaaactgtttcctaaaatgatggtaccagttaacactcataccatcattgtatgaaggctccatttatttcagatatttgccaacacttggtatcagtcatttgttaccattctagtgggtgtgaagcagtatctcattgtggtttagatttgcatttccctaatggctactgatgttgagcatattttcatgtgctttgttgaagatgtgtatactttccttggagaaatgtctcttcaactatctgattttaaaatggtcaacagta

SEQ ID NO: 223976 - DNA, 782 bp, Homo sapiens
ggaaatgagacttaaattcacatccagcagaacagtatcagaaaagtgggtgtgtgagctccatgagggtgacttgtggaaggggaaaggttgaacatttcattctcaagtactaaaaggatctgtaactctaatgtaccgattaatggatgatagcacagctttttattgttatggaagtgacgtttccactcttgtcattcccatttttggagtttattgttactagatttcatagaacctatttgaaactagaaaatatttctatttcattactttatatgtttttgtatgcatatgtatatatgttttatctaaaaaacaaaattgaagactttaaaagtgaatttgagttttggacactaagctttatttatttacttatttttttttgagacggagtctcactctgttgcccaggctggagtgcagtggcacgatcttggctcactgcaacctctgcctcagcctcccaagtagctggtattacaggtgcctgccaccacacctggctaatttttgtattttttagtagagacagggtttcgccatgttggccaggctagtcttgaactcctgaccttaggtgatcagcctgcctcagcctctcagagtactgggattacaggtgtgagccaccatgcccggccaggacactaagctttaaatgttgaatgtaaacaattaatcaaaaaagactccaagttgacatacatattctattttcttttctttctttcttttttttttttttttttgagacggagtctcgctctgtcacc

SEQ ID NO: 223977 - DNA, 708 bp, Homo sapiens
ggaaatgagacttaaattcacatccagcagaacagtatcagaaaagtgggtgtgtgagctccatgagggtgacttgtggaaggggaaaggttgaacatttcattctcaagtactaaaaggatctgtaactctaatgtaccgattaatggatgatagcacagctttttattgttatggaagtgacgtttccactcttgtcattcccatttttggagtttattgttactagatttcatagaacctatttgaaactagaaaatatttctatttcattactttatatgtttttgtatgcatatgtatatatgttttatctaaaaaacaaaattgaagactttaaaagtgaatttgagttttggacactaagctttatttatttacttatttttttttgagacggagtctcactctgttgcccaggctggagtgcagtggcacgatcttggctcactgcaacctctgcctcagcctcacacctgtaatctcagtgttctgggaagctgaggcaggaggattgcttgagcccagcagttctgaccagcctgggcaatgtagcgagattagccaggcatgatggcatctacctgtggtcccacctactcaggaagctgaagcaggaggatcacctgagcccagaagttgaaggctgcagggagctatgatcacaccactgcattcagcctgggtgacagagccagactctttaaa

SEQ ID NO: 223978 - DNA, 660 bp, Homo sapiens
ataatctggtattttctgttgagctatctgctatgaattccgactaaaaattctttcatatgaataatatgtgcttgtaatatgtttcatatatggcgtatgtacacatgtttataaagaaatatagtcacatggactacatataaaatgtgcatttcatattcataaatttacttgaaatatttattttatcaagtgacctatgtaaaaatagtaatttttcacttagtggagtcttttgataggatcaggatatgaactccttgccactgtagctcatagtttatggcaaaatcttgagctaattatagccctcattcatgtaaaaaaaaatggtaacttattcagggttagtctcataaacgtagaagtcaacccaataggctagactttcaagtctagcttttaatgtttagaataggaatatacgtttttatatgaaccatgactgcagatagttatatgatattgaacaatattatgaaacgtcttttcacactctggaactttttgttattcactgatagggagagtgccaacaatttcacagaatcagtttttcctgcttttgtgtcttctgtatcttcacaaagattttttttccatgcaacagcaagttgatgtagaatgtacagaagaaagtttaataaatttcagggc

SEQ ID NO: 223979 - DNA, 355 bp, Homo sapiens
tgagtcagggtcttactctgctgcccaggctggagtgccgtagtattatcacagtttactgtagccgcaaactcctgggctcaagtgatcctcctgactcagccttctgagtaactgggacaacaggtacacaccagcacgcctagataattttttattttttgtagaaatggggtctccctatgttgcccaggctagtctcaaactcctggcctcacatgatcctcccacctcagcctcccaaagcgctcggattataggtgtgagccaccacctacagcctcacaggggtctttaagtaacaagatacaagctcctcctagtctcaagacctcacacatgcccttccctcctc

SEQ ID NO: 223980 - DNA, 704 bp, Homo sapiens
  misc_feature (45)..(45): n is a, c, g, or t
tttaactgagtaggtgatagcaaagaatatttatgctaaggcacntcattgcaaaagtcaacactgaaaaaagcaaataatgtccttagtattatcatgacaataattttggcctcctggacttcctaaagggtctcaaggatctctgggggtctgttgacctcactttgagaagttcttttctaaagtatagtatgtatattatatctgatcacttattcaagaaatttcagtgctgtatggcagcacaggtctgggtttcagggatatacccctgaacaaaatagatgagacaagcagaccagaaaaaattgacttaatttatttttgttttatagctctgtgtttcctattgttaatgtaaaaaataagtgaatagaatgttttataacctcttaagttcaactaactttaagttgctttttacttactgactcctgtttgattagtgacctctattaaatgtttcttggagttactggagtgaaaacaactggacaagtctttgtgttatgttgattgttattgacctatagatctctaagaaataggtgactagtctctgaactcttgtagacatttctagaaaggaaggagtatagaaggtagcagtccttaccctcccatcccttgtcattcttgccttagtcctgccaacacagcaaatgtattagagtgtatgtgtctgtgtatgtatatgtgta

SEQ ID NO: 223981 - DNA, 771 bp, Homo sapiens
  misc_feature (45)..(45): n is a, c, g, or t
tttaactgagtaggtgatagcaaagaatatttatgctaaggcacntcattgcaaaagtcaacactgaaaaaagcaaataatgtccttagtattatcatgacaataattttggcctcctggacttcctaaagggtctcaaggatctctgggggtctgttgacctcactttgagaagttcttttctaaagtatagtatgtatattatatctgatcacttattcaagaaatttcagtgctgtatggcagcacaggtctgggtttcagggatatacccctgaacaaaatagatgaaaatatctgccctcatggagcttacattgtgtctttgatttttcccttctatcttagatcatgatgcctcactggatatgtagagtataccctcccccacctttttcttctggtctgcttgtttcctattgttaatgtaaaaaataagtgaatagaatgttttataacctcttaagttcaactaactttaagttgctttttacttactgactcctgtttgattagtgacctctattaaatgtttcttggagttactggagtgaaaacaactggacaagtctttgtgttatgttgattgttattgacctatagatctctaagaaataggtgactagtctctgaactcttgtagacatttctagaaaggaaggagtatagaaggtagcagtccttaccctcccatcccttgtcattcttgccttagtcctgccaacacagcaaatgtattagagtgtatgtgtctgtgtatgtatatgtgta

SEQ ID NO: 223982 - DNA, 386 bp, Homo sapiens
  misc_feature (261)..(261): n is a, c, g, or t
tattttatttttctatttccatctttggacagagagctactattcttttaatggacgtgaaatggtgaaggcacacaagcatattgctgtcattgttttcttgctttcctaaattacttttaccagtggtatatctttttttaaaagctatctacttggagatggtgtgtcttgattgacatctcatggagaagtggatggggaaaatactggttctgtggaaagactctctccgttagtggcttgctcatccagctctgntctttctgttccaggactctccctgtttcaacaacagcaacaacatgataataacaaacctcacatatgttgttccactggataattgtaattttttaaaataaatcgttgtaaaaccaaggaca

SEQ ID NO: 223983 - DNA, 434 bp, Homo sapiens
tcactgagtatagacacacaaacacatgcacacacacgcatatgtattcatggtttatgtgtgtgtgtgtgtgtgtgtgtgtgtgtgtgtgtgtgtgtgtgtagatagatagattctagacctggaattcctgggttcaaattcccatgctgctgttaactgtataatactaagtataataccaagtgtgtaaattacactgtttgatgttttgggttcctaatctgtaaaacaaagatgataataacattttatttgtgaaattgttatgaagattaaatgaattaatacacgtaaagaagttagaacagtaactggtagaggccgagtgttgaaaagattttgctatttttacaattatgcacaaatttaatgtaatagtagttgaaattgtgtttatttttggtaaaaattaaacatatcttgcattctcc

SEQ ID NO: 223984 - DNA, 371 bp, Homo sapiens
aaccgccataaatccgtagaagttgtatgtctccattcaggagctctgtttgcttctttaggcatacccttcccctctcttgagtgaagagggcaaagacacagaaaacttagtagggaaccaggcgcagtggctcacgcctgtagttccagctacttgggaagctgaagcaggaggatcacgtgagcctaggagttaaaggctactgtgagctatgagcaagcacaccactgcactccagcctgggtgacagaatgagaccctgtctcaaaaaaacaacaaattgttttatattaaatgccttattcatattgaatatcagctgtgtgttttcagttttatgaatggaaaattaagtaaataaaattttg

SEQ ID NO: 223985 - DNA, 412 bp, Homo sapiens
cgggcagggcagggaaaatctgcctgactagatgggcccaggacatctgaacaggatgattcccggaccaagacgtggaggacgatcaaggatacattgaaacaaggctgaggccagagaaagggacattttccagtgacgaaaacaactttctaccaacttccccaaactgaactgtagaataagaaaccaagggattgttgtttaggtctgtgagaagcagcggggaggggaagctggaggacaggcccagggacactgaccaggtgggggtaggactagctccctgggaaggctcagtcccacagcggctacctgcctagcagcaggcaaaagggtaaagaatgtccccaggtgagaggccggggcttggccagggcactggggacactgtccactgggttgccctgcc

SEQ ID NO: 223986 - DNA, 254 bp, Homo sapiens
agcatattggctatgagttaaggagaggtgattccttagaaatctttgtacagtttctgtttaaaagggtgaatgcttggcagccatgtttactataactgcctgctcttggcctctagatgcttcacatataccttaattcagaattgcctggctacctcagttggtagagcatgggactcttaatcccagagtcagtgggttcaagcctcacattgagtggttctactttttttttttaacacctgtgaaaa

SEQ ID NO: 223987 - DNA, 714 bp, Homo sapiens
tgagagatttaggatggatgcaacgtgtcattaaacctgaaaggaactgttatttatcagtaatgatgttttccacaggcctttttcctcacctgcgcgggcacaggtaccacctgggtggtggatgcggggcgggggtgccaggaggcctgggtgggggtaaactgtgtgcgggcctagccggaggcggccggggcaccgctggaggccacctctccagactccgggaacccgagggcctctccttcacttggaggcacggtgctgcacccccgttggggggttccccttgcagagctgcctagaacagcaatgtgttaggagacgcctccgaagagcctcctcctcctcagctggcaagaaacgcagactctcggcagtgccattcttgcagcagaaaggccctgtgtgactccagcactcggagcagccgccttatctggggtgatttcccatctgcctccctgggcccaggatttccttcctgcacagaacttatcttgtcgggaagcagagctgtgcgctagaggcaggcccagcaaatggaatgctcgttcggtcttgtgttcttaatgacccataacagagtcctcagaggtgaaaaacaaaaccctccacccccttaaccatttctgtgcccatcctggtctgggagatttcttaatcctgctgcgccgtcacacggactcctctctggattttatcctgcggccg

SEQ ID NO: 223988 - DNA, 548 bp, Homo sapiens
ccctaccttcttctcttgcactcttgaacccacctgttgactttaggactgaattaggaagagaaaggagaaggatactacttcactttgaaagtttaaaaagaatctgtctaaatcaatgaggcatttcagaggtagggaagaaataaaacatgtatgtctcactgagcttaaggaataaagtaatacggatacaattgaggcacatctttccatgtattcttccccaattccattccctttctctcaaaggtggttactatcttcatttatttgtttttattcctatgcatgtttttataccataatatattgttttgcatattttaaaacttgatataaatgatatactatatgtagtgatatacgacttgcatttgtttctgctgaatgttttttagattttgctaaattgatacctatatctctggtttgctgattttgcttgctgtatcatattctgctatatgaatatgatacataaatatgttatttcccactttaattattacaaacagtgttgcaataaatattcttgtacatgtctc

SEQ ID NO: 223989 - DNA, 493 bp, Homo sapiens
gagcaggttctagctacacccagacacagtgaaagggcaattgctagaattatgtgaagcacctggaacaagttctgctccataaaactgcagccagccccactcagatgaactcccaccaataaagtcatccacaactgcaaagatggagaggtggcctccagccaccaagcatctccaagggatgcatccatttacgtacttgctcatatcctttgaaagcagtgagattagaaggaaggcagagaagcctggcagaaccatcaaggggcagcagaggacgtggtaggcactaggaagctaggcttaactgcagggggtaagaaatggcacaaactggggacatagaagcgggagagctgaagacaccactaaggtttttcctggaagttttaaatattctggaaaaatagtttagatacaattctaattgtcacattttaatttttaatacatgtataattttaagttattagaacgtttcacaagcaaa

SEQ ID NO: 223990 - DNA, 502 bp, Homo sapiens
atactatttatctaactcacgtttaaaactcttcaattttaattgattcatagagactctgaccagaaaccatatttcaaactcttaatattatcttcctaatagtcataatagtagcctccccaaaatactatattttctcaaatgtttacatacagacatctataaactgtcaactggtccctcttcaacccaaacaacaaaaactccaaaaagtgatcaacaagtcactgtaacatataagacacactgagaccgaaaactgaaaataataatagctaaaagtaccacgaagccaacagtaaagtttgggtcaccctctcacctatccaataaatgaataaataaataaataaacaaacaaacaaataaataaataaaacataaaattataagaggctattgcttttgactaaactcatgtactaggctccaaccgaccagaccaaaccaaactaaagtcactcatactaaatatcacataaacaaactaaaacttaaa

SEQ ID NO: 223991 - DNA, 566 bp, Homo sapiens
tgagattttaaaattataccaccaaacccacccaaaaaagatagctagtgaatttttttagttatggcaaacaaagtccagagttcagaacattagtgtaagaaaataacaattgattcattttatttattagtgaaattgaaaaattggggattggcaaagcagttaaggtgttggtaatctatcatcatgggtatttattgaactaccacatagttttagatcctatagaggagtcgtaattgtatgatattttaaacttgctgttttaaaacttaaaatattaggtagacatggaggcacccacctgtagtcccagctacttgggaagctaaggtaggattcccttgagcccaggagtttgaggctatagtgtgctgtgattgcacctgtggatagccactgcacttgcttgggcaaaatagcaagaccttgtctcccaaaataaacaaacaaaatccttaaaatgttattggtcatataaagatgtgataagtgaaatagagagcagtagatgctagtatgcaaaatagtgcattctgaaatatatgagtgtgaaactgcat

SEQ ID NO: 223992 - DNA, 596 bp, Homo sapiens
ttgtttgagatagagtcttgctctgtcacccaggctggagtacagtggcacgatctcagctcactgcaacctccgcctcctgggttcaagcaattctcctgcctcagcctcccaagtagcagggattacaggcatgcgccaccatgcccagctaatgtttttgtattctcagtagagacggggtttcaccatgttggccagggtggccttgaactcctgacctcaaatgatccgcccacctcagccacccaaagtgctgggattacaggtgtgagccaccgcacctggccgattcatcttcatttgtttcccgccagccccagaacagcctggggcagacattcttgtttcttttgttcacttgtccattagcagtgctctaagcgcagagcccagcacacaggaagtgctcaagaaaaggattgttgaatgaatgaatgagcctcatccagaacacaaaattcacccaactgcactgctgaatcctttggtctctgactagcttccacctcgtaaatcaggagtggacaagctttcctgccaaaggctggagtctctgctcccactactcaactctgcccttctggtgtgagagc

SEQ ID NO: 223993 - DNA, 234 bp, Homo sapiens
tgagatggagtctcgctctctctcccaggctggagtgcagtggcgtgatctcagcttagcgcaacttccactccccgggatcaagcgattcccatgtctcagcctcccaagtagctggggaagaaatcttggctcagtatttacaacagcagcagcctggagtcatgaggtcagtgtaacggttgctcctgcccttcttgccaaccgcaaccctcccttgacttcttacgcact

SEQ ID NO: 223994 - DNA, 2304 bp, Homo sapiens
cggcgcggctgaggcgcggcggccccgtgtgagcagcgcagtatggcgggcggggcccgggaggtgctcacactgcagttgggacattttgccggtttcgtgggcgcgcactggtggaaccagcaggatgctgcgctgggccgagcgaccgattccaaggagcccccgggagagctgtgccccgacgtcctgtatcgtacgggccggacgctgcacggccaggagacctacacgccgcgactcatcctcatggatctgaagggtagtttgagctccctaaaagaggaaggtggactctacagggacaaacagttggatgctgcaatagcatggcaggggaagctcaccacacacaaagaggaactctatcccaagaacccttatctccaagactttctgagtgcagagggagtgctgagtagtgatggtgtctggagggtcaaatccattcccaatggcaaaggttcctcaccactccccaccgctacaactccaaaaccacttatccctacagaggccagcatcagggtctggtcagacttcctcagagtccatctccatccccggagcatctgtatgattcagaagtacaaccacgatgggacaagaggctgaggagttgagggaagagatgtaagtcttggatcgtgtttacttgtggcagggaagcaggtcggctggaggcttttggccaaggggaaagtgtcctaaaggaacccaagtaccaggaagagctggaggacaggctgcatttctacgtggaggaatgtgactacttgcaggtagtggcgtggcaatgtgcactccagggtggaagctcttctcatcctgctaactatctttcgtcactcacccccgcccagggcttccagatcctgtgtgacctgcacgatggcttctctggggtaggcgcgaaggcggcagagctgctacaagatgaatattcagggcggggaataataacttggggcctgctacctggtccctaccatcgtggggtgagtggaacttggaggagtaaacattcgaatcccattgggagagtggcttaatgcaaactggtttttttctttacgaggaggcccagagaaacatctatcgtctattaaacacagcttttggtctcgtgcacctgactgctcacagctctcgtctgccccttgtccttgggtgggagcctgggcctgcgacctgagccacctgtcaacttcccttacctgcattatgatgtaagtctcggtgctcttgttctgactgcggcaggctacagggcctcctcatgctcccagtcagtcgctgtctgtactggctctgttcctgaggcccgagcttgaactcagctgtgatgtggcctctcagatcacactgtcctatgcttgtccagcctggggtcaaacatacccctgattcatcccctgggtctctctggtgttaacattctgcctccacacattcttttccaggcccgaggccaagtgcccctcttggtgtcttcttacaggccattctgcccttccactgcagtgccatcctggctacagccctggacacagtcactgttccttatcgcctgtgttcctctccagtttccatggttcatctggctgacatgctgagcttctgtgggaaaaagtggtgacagcaggagcaatcatccctttccccttggctccaggccagtcccttcctgattccctgatgcagtttggaggagccaccccatggaccccactgtctgcatgtggggagccttctggaacacgttgctttgcccagtcagtggtgctgagggtatagacagagcatgccacacaagccagctcaccccagggacacctccaccctctgcccttcatgcatgtaccactggggaagaaatcttggctcagtatttacaacagcagcagcctggagtcatgagttcttcccatctgctgctgactccctgcagggtggctcctcctataaacccagctcttctcaagctgcagtccaccgggtatggttctggatggttccccaagggagcagcagtggagagcatcccagtgttggggcactgtgttcctcttcgtccctgcaccagaacctggaagcttggcagagacctcacaaactcgacttgcggcgctgggccagcttcatggatgctggagtggagcacgatgacgtagcagagctgctgcaggagctacaaagcctggcccagtgctaccagggtggtgacagcctcgtggactaaagttcccagtgtgggagaaaggagctagtttgcaataaaaacagctggatgcaggaaaaaaa

SEQ ID NO: 223995 - DNA, 2306 bp, Homo sapiens
cggcgcggctgaggcgcggcggccccgtgtgagcagcgcagtatggcgggcggggcccgggaggtgctcacactgcagttgggacattttgccggtttcgtgggcgcgcactggtggaaccagcaggatgctgcgctgggccgagcgaccgattccaaggagcccccgggagagctgtgccccgacgtcctgtatcgtacgggccggacgctgcacggccaggagacctacacgccgcgactcatcctcatggatctgaagggtagtttgagctccctaaaagaggaaggtggactctacagggacaaacagttggatgctgcaatagcatggcaggggaagctcaccacacacaaagaggaactctatcccaagaacccttatctccaagactttctgagtgcagaggtgagggcctctgtcctgaactttttaacccggtgccacaacctgagggtctccataggggcagggagtgctgagtagtgatggtgtctggagggtcaaatccattcccaatggcaaaggttcctcaccactccccaccgctacaactccaaaaccacttatccctacagaggccagcatcagggtctggtcagacttcctcagagtccatctccatccccggagcatctgtatgattcagaagtacaaccacgatggggaagcaggtcggctggaggcttttggccaaggggaaagtgtcctaaaggaacccaagtaccaggaagagctggaggacaggctgcatttctacgtggaggaatgtgactacttgcaggtagtggcgtggcaatgtgcactccagggtggaagctcttctcatcctgctaactatctttcgtcactcacccccgcccagggcttccagatcctgtgtgacctgcacgatggcttctctggggtaggcgcgaaggcggcagagctgctacaagatgaatattcagggcggggaataataacttggggcctgctacctggtccctaccatcgtggggtgagtggaacttggaggagtaaacattcgaatcccattgggagagtggcttaatgcaaactggtttttttctttacgaggaggcccagagaaacatctatcgtctattaaacacagcttttggtctcgtgcacctgactgctcacagctctcgtctgccccttgtccttgggtgggagcctgggcctgcgacctgagccacctgtcaacttcccttacctgcattatgatgtaagtctcggtgctcttgttctgactgcggcaggctacagggcctcctcatgctcccagtcagtcgctgtctgtactggctctgttcctgaggcccgagcttgaactcagctgtgatgtggcctctcagatcacactgtcctatgcttgtccagcctggggtcaaacatacccctgattcatcccctgggtctctctggtgttaacattctgcctccacacattcttttccaggcccgaggccaagtgcccctcttggtgtcttcttacaggccattctgcccttccactgcagtgccatcctggctacagccctggacacagtcactgttccttatcgcctgtgttcctctccagtttccatggttcatctggctgacatgctgagcttctgtgggaaaaagtggtgacagcaggagcaatcatccctttccccttggctccaggccagtcccttcctgattccctgatgcagtttggaggagccaccccatggaccccactgtctgcatgtggggagccttctggaacacgttgctttgcccagtcagtggtgctgagggtatagacagagcatgccacacaagccagctcaccccagggacacctccaccctctgcccttcatgcatgtaccactggggaagaaatcttggctcagtatttacaacagcagcagcctggagtcatgagttcttcccatctgctgctgactccctgcagggtggctcctcctataaacccagctcttctcaagctgcagtccaccgggtatggttctggatggttccccaagggagcagcagtggagagcatcccagtgttggggcactgtgttcctcttcgtccctgcaccagaacctggaagcttggcagagacctcacaaactcgacttgcggcgctgggccagcttcatggatgctggagtggagcacgatgacgtagcagagctgctgcaggagctacaaagcctggcccagtgctaccagggtggtgacagcctcgtggactaaagttcccagtgtgggagaaaggagctagtttgcaataaaaacagctggatgcaggaaaaaaa

SEQ ID NO: 223996 - DNA, 2324 bp, Homo sapiens
cggcgcggctgaggcgcggcggccccgtgtgagcagcgcagtatggcgggcggggcccgggaggtgctcacactgcagttgggacattttgccggtttcgtgggcgcgcactggtggaaccagcaggatgctgcgctgggccgagcgaccgattccaaggagcccccgggagagctgtgccccgacgtcctgtatcgtacgggccggacgctgcacggccaggagacctacacgccgcgactcatcctcatggatctgaagggtagtttgagctccctaaaagaggaaggtggactctacagggacaaacagttggatgctgcaatagcatggcaggggaagctcaccacacacaaagaggaactctatcccaagaacccttatctccaagactttctgagtgcagagcactccttttcctaaggactgcgactcggtgaacagaaaggaggctatgcggtgtggccagccaactcaaggaggatgaagcaacctttgcctctaaactgcctggaactaaatgtcgatttttctgacccctcccagggagtgctgagtagtgatggtgtctggagggtcaaatccattcccaatggcaaaggttcctcaccactccccaccgctacaactccaaaaccacttatccctacagaggccagcatcagggtctggtcagacttcctcagagtccatctccatccccggagcatctgtatgattcagaagtacaaccacgatgggtatggggaccccagaggctttgagggaagcaggtcggctggaggcttttggccaaggggaaagtgtcctaaaggaacccaagtaccaggaagagctggaggacaggctgcatttctacgtggaggaatgtgactacttgcagggcttccagatcctgtgtgacctgcacgatggcttctctggggtaggcgcgaaggcggcagagctgctacaagatgaatattcagggcggggaataataacttggggcctgctacctggtccctaccatcgtggggtgagtggaacttggaggagtaaacattcgaatcccattgggagagtggcttaatgcaaactggtttttttctttacgaggaggcccagagaaacatctatcgtctattaaacacagcttttggtctcgtgcacctgactgctcacagctctcgtctgccccttgtccttgggtgggagcctgggcctgcgacctgagccacctgtcaacttcccttacctgcattatgatgtaagtctcggtgctcttgttctgactgcggcaggctacagggcctcctcatgctcccagtcagtcgctgtctgtactggctctgttcctgaggcccgagcttgaactcagctgtgatgtggcctctcagatcacactgtcctatgcttgtccagcctggggtcaaacatacccctgattcatcccctgggtctctctggtgttaacattctgcctccacacattcttttccaggcccgaggccaagtgcccctcttggtgtcttcttacaggccattctgcccttccactgcagtgccatcctggctacagccctggacacagtcactgttccttatcgcctgtgttcctctccagtttccatggttcatctggctgacatgctgagcttctgtgggaaaaagtggtgacagcaggagcaatcatccctttccccttggctccaggccagtcccttcctgattccctgatgcagtttggaggagccaccccatggaccccactgtctgcatgtggggagccttctggaacacgttgctttgcccagtcagtggtgctgagggtatagacagagcatgccacacaagccagctcaccccagggacacctccaccctctgcccttcatgcatgtaccactggggaagaaatcttggctcagtatttacaacagcagcagcctggagtcatgagttcttcccatctgctgctgactccctgcagggtggctcctcctataaacccagctcttctcaagctgcagtccaccgggtatggttctggatggttccccaagggagcagcagtggagagcatcccagtgttggggcactgtgttcctcttcgtccctgcaccagaacctggaagcttggcagagacctcacaaactcgacttgcggcgctgggccagcttcatggatgctggagtggagcacgatgacgtagcagagctgctgcaggagctacaaagcctggcccagtgctaccagggtggtgacagcctcgtggactaaagttcccagtgtgggagaaaggagctagtttgcaataaaaacagctggatgcaggaaaaaaa

SEQ ID NO: 223997 - DNA, 730 bp, Homo sapiens
cggcgcggctgaggcgcggcggccccgtgtgagcagcgcagtatggcgggcggggcccgggaggtgctcacactgcagttgggacattttgccggtttcgtgggcgcgcactggtggaaccagcaggatgctgcgctgggccgagcgaccgattccaaggagcccccgggagagctgtgccccgacgtcctgtatcgtacgggccggacgctgcacggccaggagacctacacgccgcgactcatcctcatggatctgaagggtagtttgagctccctaaaagaggaaggtggactctacagggacaaacagttggatgctgcaatagcatggcaggggaagctcaccacacacaaagaggaactctatcccaagaacccttatctccaagactttctgagtgcagagggagtgctgagtagtgatggtgtctggagggtcaaatccattcccaatggcaaaggttcctcaccactccccaccgctacaactccaaaaccacttatccctacagagtggaagcttggcagagacctcacaaactcgacttgcggcgctgggccagcttcatggatgctggagtggagcacgatgacgtagcagagctgctgcaggagctacaaagcctggcccagtgctaccagggtggtgacagcctcgtggactaaagttcccagtgtgggagaaaggagctagtttgcaataaaaacagctggatgcaggaaaaaaa

SEQ ID NO: 223998 - DNA, 2115 bp, Homo sapiens
cggcgcggctgaggcgcggcggccccgtgtgagcagcgcagtatggcgggcggggcccgggaggtgctcacactgcagttgggacattttgccggtttcgtgggcgcgcactggtggaaccagcaggatgctgcgctgggccgagcgaccgattccaaggagcccccgggagagctgtgccccgacgtcctgtatcgtacgggccggacgctgcacggccaggagacctacacgccgcgactcatcctcatggatctgaagggtagtttgagctccctaaaagaggaaggtggactctacagggacaaacagttggatgctgcaatagcatggcaggggaagctcaccacacacaaagaggaactctatcccaagaacccttatctccaagactttctgagtgcagaggccagcatcagggtctggtcagacttcctcagagtccatctccatccccggagcatctgtatgattcagaagtacaaccacgatgggacaagaggctgaggagttgagggaagagatgtaagtcttggatcgtgtttacttgtggcagggaagcaggtcggctggaggcttttggccaaggggaaagtgtcctaaaggaacccaagtaccaggaagagctggaggacaggctgcatttctacgtggaggaatgtgactacttgcagggcttccagatcctgtgtgacctgcacgatggcttctctggggtaggcgcgaaggcggcagagctgctacaagatgaatattcagggcggggaataataacttggggcctgctacctggtccctaccatcgtggggtgagtggaacttggaggagtaaacattcgaatcccattgggagagtggcttaatgcaaactggtttttttctttacgaggaggcccagagaaacatctatcgtctattaaacacagcttttggtctcgtgcacctgactgctcacagctctcgtctgccccttgtccttgggtgggagcctgggcctgcgacctgagccacctgtcaacttcccttacctgcattatgatgtaagtctcggtgctcttgttctgactgcggcaggctacagggcctcctcatgctcccagtcagtcgctgtctgtactggctctgttcctgaggcccgagcttgaactcagctgtgatgtggcctctcagatcacactgtcctatgcttgtccagcctggggtcaaacatacccctgattcatcccctgggtctctctggtgttaacattctgcctccacacattcttttccaggcccgaggccaagtgcccctcttggtgtcttcttacaggccattctgcccttccactgcagtgccatcctggctacagccctggacacagtcactgttccttatcgcctgtgttcctctccagtttccatggttcatctggctgacatgctgagcttctgtgggaaaaagtggtgacagcaggagcaatcatccctttccccttggctccaggccagtcccttcctgattccctgatgcagtttggaggagccaccccatggaccccactgtctgcatgtggggagccttctggaacacgttgctttgcccagtcagtggtgctgagggtatagacagagcatgccacacaagccagctcaccccagggacacctccaccctctgcccttcatgcatgtaccactggggaagaaatcttggctcagtatttacaacagcagcagcctggagtcatgagttcttcccatctgctgctgactccctgcagggtggctcctcctataaacccagctcttctcaagctgcagtccaccgggtatggttctggatggttccccaagggagcagcagtggagagcatcccagtgttggggcactgtgttcctcttcgtccctgcaccagaacctggaagcttggcagagacctcacaaactcgacttgcggcgctgggccagcttcatggatgctggagtggagcacgatgacgtagcagagctgctgcaggagctacaaagcctggcccagtgctaccagggtggtgacagcctcgtggactaaagttcccagtgtgggagaaaggagctagtttgcaataaaaacagctggatgcaggaaaaaaa

SEQ ID NO: 223999 - DNA, 397 bp, Homo sapiens
ggagggtcaaatccattcccaatggcaaaggtgagacttctccagatactgatggatgggggcttgggtagagcagaaacatggagaaaggtacatttcctctgcttgtcttcaggttcctcaccactccccaccgctacaactccaaaaccacttatccctacagaggccagcatcagggtctggtcagacttcctcagagtccatctccatccccggagcatctgtatgattcagaagtacaaccacgatgggtatggggaccccagaggctttgaggcaagaaacatgggtccccaccaatgcaggatgaggctcttgaggccatcttccctgcccttccccaggacaagaggctgaggagttgagggaagagatgtaagtcttggatcgtgtt

SEQ ID NO: 224000 - DNA, 414 bp, Homo sapiens
agtctcatagcccaggtcctggaggtccacctggacctgcttgctgtcctgcttcagcaagggttcacctgcgtgggaagagacagcaggtgttacagaatgtctgaatttcccacatatgccctgagcctcaatggcacataccctaaccttgtggggcagggagggcagatccacagtgcgagagaagcttctttgaactggtgggagaagagaccaccagctccaggaagcagaatttctttccacaggaggagcctgcatttgccattgataatctccccttcagataacctaggccttagttgggacaaggtatctgtaagtcagggattgtgtactctcatctctagcagccccactgaagctggcaagtgctttatcagcaggggttcaataaatgttgaatgtaaa

SEQ ID NO: 224001 - DNA, 5583 bp, Homo sapiens
ggcccggctgcgaggaggaggcggcggcggcgcaggaggatgtacttggtggcgggggacagggggttggccggctgcgggcacctcctggtctcgctgctggggctgctgctgctgctggcgcgctccggcacccgggcgctggtctgcctgccctgtgacgagtccaagtgcgaggagcccaggaactgcccggggagcatcgtgcagggcgtctgcggctgctgctacacgtgcgccagccagaggaacgagagctgcggcggcaccttcgggatttacggaacctgcgaccgggggctgcgttgtgtcatccgccccccgctcaatggcgactccctcaccgagtacgaagcgggcgtttgcgaagatgagaactggactgatgaccaactgcttggttttaaaccatgcaatgaaaaccttattgctggctgcaatataatcaatgggaaatgtgaatgtaacaccattcgaacctgcagcaatccctttgagtttccaagtcaggatatgtgcctttcagctttaaagagaattgaagaagagaagccagattgctccaaggcccgctgtgaagtccagttctctccacgttgtcctgaagattctgttctgatcgagggttatgctcctcctggggagtgctgtcccttacccagccgctgcgtgtgcaaccccgcaggctgtctgcgcaaagtctgccagccgggaaacctgaacatactagtgtcaaaagcctcagggaagccgggagagtgctgtgacctctatgagtgcaaaccagttttcggcgtggactgcaggactgtggaatgccctcctgttcagcagaccgcgtgtcccccggacagctatgaaactcaagtcagactaactgcagatggttgctgtactttgccaacaagatgcgagtgtctctctggcttatgtggtttccccgtgtgtgaggtgggatccactccccgcatagtctctcgtggcgatgggacacctggaaagtgctgtgatgtctttgaatgtgttaatgatacaaagccagcctgcgtatttaacaatgtggaatattatgatggagacatgtttcgaatggacaactgtcggttctgtcgatgccaagggggcgttgccatctgcttcactgcccagtgtggtgagataaactgcgagaggtactacgtgcccgaaggagagtgctgcccagtgtgtgaagatccagtgtatccttttaataatcccgctggctgctatgccaatggcctgatccttgcccacggagaccggtggcgggaagacgactgcacattctgccagtgcgtcaacggtgaacgccactgcgttgcgaccgtctgcggacagacctgcacaaaccctgtgaaagtgcctggggagtgttgccctgtgtgcgaagaaccaaccatcatcacagttgatccacctgcatgtggggagttatcaaactgcactctgacagggaaggactgcattaatggtttcaaacgcgatcacaatggttgtcggacctgtcagtgcataaacaccgaggaactatgttcagaacgtaaacaaggctgcaccttgaactgtcccttcggtttccttactgatgcccaaaactgtgagatctgtgagtgccgcccaaggcccaagaagtgcagacccataatctgtgacaagtattgtccacttggattgctgaagaataagcacggctgtgacatctgtcgctgtaagaaatgtccagagctctcatgcagtaagatctgccccttgggtttccagcaggacagtcacggctgtcttatctgcaagtgcagagaggcctctgcttcagctgggccacccatcctgtcgggcacttgtctcaccgtggatggtcatcatcataaaaatgaggagagctggcacgatgggtgccgggaatgctactgtctcaatggacgggaaatgtgtgccctgatcacctgcccggtgcctgcctgtggcaaccccaccattcaccctggacagtgctgcccatcatgtgcagatgactttgtggtgcagaagccagagctcagtactccctccatttgccacgcccctggaggagaatactttgtggaaggagaaacgtggaacattgactcctgtactcagtgcacctgccacagcggacgggtgctgtgtgagacagaggtgtgcccaccgctgctctgccagaacccctcacgcacccaggattcctgctgcccacagtgtacagatcaaccttttcggccttccttgtcccgcaataacagcgtacctaattactgcaaaaatgatgaaggggatatattcctggcagctgagtcctggaagcctgacgtttgtaccagctgcatctgcattgatagcgtaattagctgtttctctgagtcctgcccttctgtatcctgtgaaagacctgtcttgagaaaaggccagtgttgtccctactgcatagaagacacaattccaaagaaggtggtgtgccacttcagtgggaaggcctatgccgacgaggagcggtgggaccttgacagctgcacccactgctactgcctgcagggccagaccctctgctcgaccgtcagctgcccccctctgccctgtgttgagcccatcaacgtggaaggaagttgctgcccaatgtgtccagaaatgtatgtcccagaaccaaccaatatacccattgagaagacaaaccatcgaggagaggttgacctggaggttcccctgtggcccacgcctagtgaaaatgatatcgtccatctccctagagatatgggtcacctccaggtagattacagagataacaggctgcacccaagtgaagattcttcactggactccattgcctcagttgtggttcccataattatatgcctctctattataatagcattcctattcatcaatcagaagaaacagtggataccactgctttgctggtatcgaacaccaactaagccttcttccttaaataatcagctagtatctgtggactgcaagaaaggaaccagagtccaggtggacagttcccagagaatgctaagaattgcagaaccagatgcaagattcagtggcttctacagcatgcaaaaacagaaccatctacaggcagacaatttctaccaaacagtgtgaagaaaggcaactaggatgaggtttcaaaagacggaagacgactaaatctgctctaaaaagtaaactagaatttgtgcacttgcttagtggattgtattggattgtgacttgatgtacagcgctaagaccttactgggatgggctctgtctacagcaatgtgcagaacaagcattcccacttttcctcaagataactgaccaagtgttttcttagaaccaaagtttttaaagttgctaagatatatttgcctgtaagatagctgtagagatatttggggtggggacagtgagtttggatggggaaatgggtgggagggtggtgttgggaagaaaaattggtcagcttggctcggggagaaacctggtaacataaaagcagttcagtggcccagaggttatttttttcctattgctctgaagactgcactggttgctgcaaagctcaggcctgaatgagcaggaaacaaaaaaggccttgcgacccagctgccataaccaccttagaactaccagacgagcacatcagaaccctttgacagccatcccaggtctaaagccacaagtttcttttctatacagtcacaactgcagtaggcagtgaggaagccagagaaatgcgatagcggcatttctctaaagcgggttattaaggatatatacagttacactttttgctgcttttattttcttccaagccaatcaatcagccagttcctagcagagtcagcacatgaacaagatctaagtcatttcttgatgtgagcactggagcttttttttttttacaacgtgacaggaagaggagggagagggtgacgaacaccaggcatttccaggggctatatttcactgtttgttgttgctttgttctgttatattgttggttgttcatagtttttgttgaagctctagcttaagaagaaactttttttaaaaagactgtttggggattctttttccttattatatactgattctacaaaatagaaactacttcattttaattgtatattattcaagcacctttgttgaagctcaaaaaaaatgatgcctctttaaactttagcaattataggagtatttatgtaactatcttatgcttcaaaaaacaaaagtatttgtgtgcatgtgtatataatatatatatatacatatatatttatacacatacaatttatgttttcctgttgaatgtatttttatgagattttaaccagaacaaaggcagataaacaggcattccatagcagtgcttttgatcacttacaaattttttgaataacacaaaatctcattctacctgcagtttaattggaaagatgtgtgtgtgagagtatgtatgtgtgtgtgtgtgtgtgtgtgtgtgcgcgcgcacgcacgccttgagcagtcagcattgcacctgctatggagaagggtattcctttattaaaatcttcctcatttggatttgctttcagttggttttcaatttgctcactggccagagacattgatggcagttcttatctgcatcactaatcagctcctggattttttttttttttttttcaaacaatggtttgaaacaactactggaatattgtccacaataagctggaagtttgttgtagtatgcctcaaatataactgactgtatactatagtggtaacttttcaaacagcccttagcacttttatactaattaacccatttgtgcattgagttttcttttaaaaatgcttgttgtgaaagacacagatacccagtatgcttaacgtgaaaagaaaatgtgttctgttttgtaaaggaactttcaagtattgttgtaaatacttggacagaggttgctgaactttaaaaaaaattaatttattattataatgacctaatttattaatctgaagattaaccatttttttgtcttagaatatcaaaaagaaaaagaaaaaggtgttctagctgtttgcatcaaaggaaaaaaagatttattatcaaggggcaatatttttatcttttccaaaataaatttgttaatgatacattacaaaaatagattgacatcagcctgattagtataaattttgttggtaattaatccattcctggcataaaaagtctttatcaaaaaaaattgtagatgcttgctttttgttttttcaatcatggccatattatgaaaatactaacaggatataggacaaggtgtaaatttttttattattattttaaagatatgatttatcctgagtgctgtatctattactcttttactttggttcctgttgtgctcttgtaaaagaaaaatataatttcctgaagaataaaatagatatatggcacttggagtgcatcatagttctacagtttgtttttgttttcttcaaaaaagctgtaagagaattatctgcaacttgattcttggcaggaaataaacattttgagttgaaatc

SEQ ID NO: 224002 - DNA, 1605 bp, Homo sapiens
ggcccggctgcgaggaggaggcggcggcggcgcaggaggatgtacttggtggcgggggacagggggttggccggctgcgggcacctcctggtctcgctgctggggctgctgctgctgctggcgcgctccggcacccgggcgctggtctgcctgccctgtgacgagtccaagtgcgaggagcccaggaactgcccggggagcatcgtgcagggcgtctgcggctgctgctacacgtgcgccagccagaggaacgagagctgcggcggcaccttcgggatttacggaacctgcgaccgggggctgcgttgtgtcatccgccccccgctcaatggcgactccctcaccgagtacgaagcgggcgtttgcgaagatgagaactggactgatgaccaactgcttggttttaaaccatgcaatgaaaaccttattgctggctgcaatataatcaatgggaaatgtgaatgtaacaccattcgaacctgcagcaatccctttgagtttccaagtcaggatatgtgcctttcagctttaaagagaattgaagaagagaagccagattgctccaaggcccgctgtgaagtccagttctctccacgttgtcctgaagattctgttctgatcgagggttatgctcctcctggggagtgctgtcccttacccagccgctgcgtgtgcaaccccgcaggctgtctgcgcaaagtctgccagccgggaaacctgaacatactagtgtcaaaagcctcagggaagccgggagagtgctgtgacctctatgagtgcaaaccagttttcggcgtggactgcaggactgtggaatgccctcctgttcagcagaccgcgtgtcccccggacagctatgaaactcaagtcagactaactgcagatggttgctgtactttgccaacaagatgcgagtgtctctctggcttatgtggtttccccgtgtgtgaggtgggatccactccccgcatagtctctcgtggcgatgggacacctggaaagtgctgtgatgtctttgaatgtgttaatgatacaaagccagcctgcgtatttaacaatgtggaatattatgatggagacatgtttcgaatggacaactgtcggttctgtcgatgccaagggggcgttgccatctgcttcactgcccagtgtggtgagataaactgcgagaggtactacgtgcccgaaggagagtgctgcccagtgtgtgaagatccagtgtatccttttaataatcccgctggctgctatgccaatggcctgatccttgcccacggagaccggtggcgggaagacgactgcacattctgccagtgcgtcaacggtgaacgccactgcgttgcgaccgtctgcggacagacctgcacaaaccctgtgaaagtgcctggggagtgttgccctgtgtgcgaagaaccaaccatcatcacagttgatccacctgcatgtggggagttatcaaactgcactctgacagggaaggactgcattaatggtttcaaacgcgatcacaatggttgtcggacctgtcagtgcataaacagtgagtagacagaagactgtatgttttttctgaggcctaatatgatattgtcaaagcatattatg

SEQ ID NO: 224003 - DNA, 456 bp, Homo sapiens
tagcacttcactaaatatacaccaaactgaggcacttacatacatgatttcatctagtctaaattgtctctctgagagatgggtcctatcactcctatcttatgtgttaggaaatggaggcttagaggatttggaacctgctccaggccacatagcttaataaataaatggcagactgactgatcaacttgtaactctaaagacagtaatgcaattactgggctctgaagaatacctacctcactggttgttgtgttaagagagtgagtttaaataaggctcctacacacgtggctggccatcagagaggtgttcaagaaatacaactttcagccttcctagcacagtgggttgggtgtggggcgggcagtaggggtcaggataggctggtggcaagatgagcattctcctttgtttgtgataagaagaaataagaaaagtgtgggaagaatacca

SEQ ID NO: 224004 - DNA, 270 bp, Homo sapiens
tcttgagctgttctaagataatatcttttactttggagatacgcagtttttattatatgtctagctatagatttatcatggatttaggttcattatgaatctgcagatttgtgtcttccatcaaatctggattgttttcaatattaaaaaaacttctattttaaaatctgtatatagaaaggtacataaacataaatgaacatgttaatgagtaattgtaacaactatgtaactgtccaagtcaagaaataaaacatatcaagtaatcaa

SEQ ID NO: 224005 - DNA, 574 bp, Homo sapiens
ggaaaaaagagattcagaaaggctacgtgaattgcattttagcatagaagagtcaggactggaactcagtgttggcctagttcttgggggtggttggatggcaaactagtgcaggtatgttcataacttgtaagatcaaatttgtcatataaattacggggatatgtaatctctctcccttctggctcttttcatccttgggtgagttctaaataaaactattttgtgttatttttttaaccctcattccattgctttcagactctggttctcaaccttggctgcccatttagaatcacctggagtgggatctgggcgttagcattttttaaagctcctctagtgattccaggtaggcaacctgcactaaagacctctgctttaaaatctctctacctcaggcgtaggtgttttcattgcccatagtattaagcctagcttttagcagagatttgccaaggttgattatgatcctcttgcttgtttggaagaagaaatatggaagctgtgaaatcttttccagttgtgatagatgttgtttatgcattaattagcatgtaaaaattaaacactg

SEQ ID NO: 224006 - DNA, 182 bp, Homo sapiens
ggatacagtgaggtttgaagatccttggtgagaggtaagctcatgctgaggaagaaattagaaaagtgaaaaaagccagaccctgtgtttcaacaccttgcctcccagaaggatggaatactaaactggacatccacttctgatttgagggaagtttacagaggtcagtttacatctggggc

SEQ ID NO: 224007 - DNA, 337 bp, Homo sapiens
caatgtggatgaacctcaaaaagaatatgcaggctgggcgctgtgcctcacacctgtaatcccagcactttgggaggccgaggcgggaggatcgttttagcccaagagatcgagactagcttgagcaatgtggcgaaaccccttctccacaaaaaatacaaaagaagttagctgggcgtggtggtgcgtacctgttgtcccagctaccccaggaggctgaggtgagaagatcacctgagccccagaggtcaagccatagtcaagccactgcactccagttgggtgacagagcagccctgtatcaaaaagaaacaacaacaaaaacaaaacaaacaaa

SEQ ID NO: 224008 - DNA, 529 bp, Homo sapiens
cagagaaataagattgaaaatataattttattttcattcatgtatgcgtttattcattcatacttgcctagtctttaaaagcccatgttctatacttatctgaggatagtttccattgaagataaaagtgaaaatattattggttatctgtcagatttttgcaactttgggtaattctactcatgtacacatagagggcattctagggatgacagaaattgatacaaattaactccaggtgcagactactttttcctttgttaaggggtaaaaatgaagctaagaagttaaataaggctgggcatggtggcttgtgggaggattgcctgagctcaggagttctacaacagactaggcaacatagtgagaccccatctcttaaaaaaaacattagccgggcatggtggcatatgcctgtagtcccagccacttgagaggctgaagtgggaggattgcttgagcctgggtggttgaggctgcaataagctgtgatcacaccactgcattccagcttgggtgactctgtctc

SEQ ID NO: 224009 - DNA, 606 bp, Homo sapiens
tctagaaagccagtacttaatggcaaacatactgaatggaagcctggaggtaggtgatatgagtctgaacagaactgtggaactactttccacggcttatgcttaatcagttacaattccagccatttgggttgtacagaggagggagagatttttcctgcggtaactggataagtattgtaagagacaaaagggggaaaggattaaagagaaaggcttccttacatgagaaagaactgagtaggaagaaagagggagtgcagagaggtgaacagagtgaacgtatacacattgggttgaatgaagggttcccaaaccaccatgtgattggggagcacaagattgttattttcaaccttgaactctcttggttagcatactgacattctaggtcaaactttggatttaaaagaaggatctgtgtgaccttttctcacttgagagaagatgactaatgaactatgttacatatcattttgataatctaatgaaaataattatgcacttatgaaactgtaaaaatatgtaaatgttaatatacagataaaatgttttgatataaaagtgtcttatcaattggggatttaccaatccccatcctcccca

SEQ ID NO: 224010 - DNA, 421 bp, Homo sapiens
ggataatatagggcatcttattccagagtttgtaagtatggaagttggaggttatagaaattacgtgagatatataaggtttatgcttatacttaaataggtaaactgtagcataggagatgtgctcaagtttgttggaattctacgttgttttaagaaagttgaaatttgtcagaagctactttccataaaaacaatttatagttagattgttttttgtagttagatatatctagttagatttatagttagatccataaaaatcaattgtttttatttattctttgtatttttaatgaattctgcttgacaatctttgttcaatttgccaaataagtttcctaaaacttaattttactattcaggtgcgtgtttcttagttgacttaaacagaaaatttctggtgctgtgtcactgaaaa

SEQ ID NO: 224011 - DNA, 512 bp, Homo sapiens
tcaatacattttatgtcatgatttgtatctcatttgttaatttagcataggttagactgccatgacaaatacacatggtcacgaatggccaacagcggaatggtggtttacaggttggcaggcaattttctttattcagggacccagggtccttcactcttgtggctctataatctccccaggggcttttcctgcatatgtgtccagccagccaaagggtcaagggcatgggaagtgagtacaggagggtttgcgggtcgagcctgcaaatggtgcacttgccttgcactcaccactcctggtcagtcctcagtctcgtggccacgcccaaccgtgaaggaggctgggaagtgtagtccttgtgctcaggaacaaaaggaaaaggaaagttgggagcagctgatggtgtctgccacaggctcacgtgcgggtgtagcacaaaccagtggccttcctgcaggaggtgcacactattttctattctgtttgatttcatcttttaaaaaaaaaaa

SEQ ID NO: 224012 - DNA, 858 bp, Homo sapiens
tcagcttccctatctgtaaaatgggatgggatattcatgcatcgactcacaggttcatacaagtgaattgcatagttcaatgcttggcacagagtgagagctcagcaaatggaagcttgtactgttattagccatcgcaaggctaccctcatgatggggacaggtgatggattcgagtgggaggaacacctgtggcctgggccctgtccggcaggtgtcagaaaagtccaggagagtcatgcttaggccttctccaaagatggaggtgcaagagccccacagcatagcagcctctttttgaagtgatgtcaatgtgcttcttcctctttgggcccttgaagctcaggctcagtgttgagtcccaacctgacttctctgcccatctcattggcgctttatgccagagacagggggagcatgattggcacctactcaccctgaagggactgccttggtaaggcaactcaggggaggcctggggagccagaaccgtgtgagggtgcccaaggcagcaagggaaagactcagagcacgatggccacattcagagatcacatgccctgcccccaaagccccagctgtggacaagaatgactcaggtcccttggacaggctgtcaccagtgatgacttaggaccagcctgcccggctccagcaaagcacaggaagctcgaaggtttagaaatgggtcattgttgtgctgaggccatgcgtcaaagaggacatcccacagccagctccttctatcctggccagcactcttgacaaaggcagagggagtgcagcttagtgagctggtccctttacacaggttattcactccagaatctggagaattctgtccttaagaaaaaaaaa

SEQ ID NO: 224013 - DNA, 371 bp, Homo sapiens
aaactcctggacttaagcgatcctccctccttggcttcccaaagtgctgggatgacaggcgtgagccactgcacctggactttctttagttatggtactgtcattttatatatctgattttctaggaaacactcttaccattttatgtcagtattttcagttacacccttaagttttgaagttaccgatgtacatacaacctgtggttataatggatgtatatataaagataataacaacagtttgggcatgatgtcttatgctggtagtcctacctactcaggaggctgaggaggagggatcacttgaacctaagagtttgaggctgcgccactgcactctggcctgacagagcgagtcactgtctctta

SEQ ID NO: 224014 - DNA, 251 bp, Homo sapiens
tcatcccagctcaccagctgctcacactctccctaaagccccttgcaatttcccatcccccagtcacctaatagcctgcctgagctaaggaccctcttcattcctgagtgtctgccaaattccacccagttctgcgccgtcccctcctttcctgagttgcccccagtggcatgggtcagggggaaaaggtctcttgaaagtttttctgggtcttctggggtgtgatgagtaaagagtcacatatttctaac

SEQ ID NO: 224015 - DNA, 473 bp, Homo sapiens
agtgccatcagcttcacttttcctttctgtaaaatagaaataataacagcacctgcctcacagagttataaggaggactcgaaaatgtgggtgaaaccttcagtatagtgcctgggacagaggaagcatttgataatgtcattattcactcaggacctcagagtctttctaatttttagtgtctcatccttgacaatagggaaagtgttactacctcccagagttcttttaagacttaaaaaagaaagatgacatcaacgaatgcttttcaaacttgattcatgcatatgaatcccctggggatctggttaaaattcggtagctgtgaagtggggtttgcgagtctgaatttttcttttctttttttttttttgagacaaagtttcgctctttgttgcccaggctggagtgcagtggcaggatctcggctcactgcaacctccacctcctgggttcaagggattctcctgcct

SEQ ID NO: 224016 - DNA, 440 bp, Homo sapiens
gctggcagcggcttcccacaatttttcctttatgctctttgcagcttttgagagtttatgatgggtgcttgttgatactggccatgaaagggttagaccagattgatgagatttatagcaggaaatgattcgctgccgcttagaggtttagagcaattcacaatggccttacctggaataggctttttactgcatgaaccctagtgggcccgacaaattcaagcaagggaggtcgtccacctgtgggcacagcgctgcctgtccagcactgtgcagcacttgtagcatttatcctggacagaggagtgaaggagcagagttttgtctcatttcaagaacatgctacagttctggatcaaaaacactgtgaggataataggtcaaaagaaccagaaaacaatgactgactgacctgaagtatgaatttagaaaagatggac

SEQ ID NO: 224017 - DNA, 517 bp, Homo sapiens
taaaaatgagttaacaaaactctcttgttcgtaaaacaaatagtaccttccaggaaaggaatagtggcaacttagtcagctcagcctttcctgctgcagaaaatgcatagataaagacaattaagacaaatctgacctagacaccaaaagtgaatcaggaattattagaatttttatacttatttctctggtctagagactctttggcaataaattaaggcgtgaggccagttccctcattaaccctttgggtgtgctatagtattttttattaagctaattttttgtctaccaaatggtaaccaatatttctgcttttgtgtgagttgagcatgcatgggttaaaatgctgtataattcatggtattaccactgaaagggtgacagctcttggggagctctagatttcccttgaagaacctgctaggaagtgaggactactctcaagctgtggcaatatggagccagccacggtttttcccaggattcatcagcttttggaggcagggacttatgt

SEQ ID NO: 224018 - DNA, 453 bp, Homo sapiens
aagatatccaaatggtcaaccagtacatgaacagatagatgctcaaaattgttagtcattagggaaatggaaatcaaaactatgagaataccactttacaaccattagtatggctatcatttttttttaaaaaggaaaataacaagtattggtaaggatgtgaagaaactggaatcctcatatattgctggtgtgaatgtagcatggtgccacagctgtgtaaaataatttttcagctcctcaattagatagatacagagttatatggcttagcaattccattcctagctatataccaaaagaaaacaggtgttcaaacaaaaacttgtacataatattcatagcagcattatttaccatagccaaaaggtggaaacaacccaaatgtccatcaacttttgtgcatcagtggacaatgtggcatattcatataatgggatatgattcagctat

SEQ ID NO: 224019 - DNA, 414 bp, Homo sapiens
caccaccaacatatttaaaacctactaagtaattattatatgccaggctccgttctaaattcattaatttttaaatctttagaataatacaattatgtgaatattgttgtcaaatgttgatgaaacaaagagagagtttaagttgataatttgaggtcatggtgttaggcgcaggcagacaaactcttttacccttgttcaaagccactatgaagtcctgttcgcatgaatgatctttattttcttcagtatgcctttggttttattgtcaacattttactataataaatgactattattattaacaagaataaaatgtgaagtaacagttatgaaaaatttttagctcaagacaaataattactggaagcatttatgtggacactaaaaatattaaaacatttgtcaagttca

SEQ ID NO: 224020 - DNA, 429 bp, Homo sapiens
ccattaaattattattttctaattttatcctttcaatatttaataattgtcatttgtcattaaaagaagaaagattttgtctgagctctaaatcagtcactcaaacaattttattatttttttagaatcaaataatttacttcttgattccctaacttagatatatctggttttttattcaaattctagtatattgatttcaaagtatgggcatctagggttctggtatttttctcaggtaagctacattatttttatttttttcttatctcctttgactcagaagaggtttgtttatatggaatgacatatatagtgttaaacactttaaatatattaggaactaatatgtttggcatataatacatctaaaaacattgtttctcttcttcctttcctctttaccactcccaaccatatcacgtttga

SEQ ID NO: 224021 - DNA, 568 bp, Homo sapiens
tgcaaaggagctacattaatgagatgtttaatttgaggttttaattttgcaaatgttgggaagcataattaaggttcaggcagtatcataagtgtcttcaggaatacaaaataactgtttttgcatctagagtttctgggaacattttctgcctaaacacaagccacttatagctgttttcctgtgttctaaaagcaccccaggcactgtgaagacacagaacatgtggtactcatagaggtggcaaataatcagcatggctgtcattgtgacgattagcagaaagcagtgtgctgagaggagtgaaggtataggtgaaaggcagcgggcactggcttatatttattttattctcataattgcagggcagttttcttcaattttattctatatgctatctcagatcattaaagcagtggagaaggacaggaatattgagttagttagggatatagataggatggaaaagcattctggacaaaaaaaaatgagcatagaaaggatttgaaaacttaagaaacaaattattctcaagcattttctttgtatcagcataccatataattta

SEQ ID NO: 224022 - DNA, 554 bp, Homo sapiens
  misc_feature (8)..(8): n is a, c, g, or t
  misc_feature (11)..(11): n is a, c, g, or t
  misc_feature (13)..(13): n is a, c, g, or t
  misc_feature (17)..(17): n is a, c, g, or t
tctagagnatncncggncagaatcacactcaaaatccacttaaaaccacacagaaaaaccaactttattacttcataaatatactttgtctttagacccaacaaagcattaactcagcttgatcagtttattcacaagtcttggcaccaaatgaattctgactatatacaaagccaaatggttggaatttcacatcacttgaattgttcaaaagaataagatgcagaccctaaagtcattccacaaaagaaatctaaaacttttcagaacaatggtaacatcattggggaaaaaagcacaataagctttttgtctgctctaaagaagacaatgcttacttggcttttattactaatgaaagatctgttttaagaaaaaatctttaaaaacttgttcttcaattgatccaatgaccttatagtcatagattattgtcatcatcatctttataaaagggagactgaaaaaggagacacgacatgaaatacatgagtatattaaaagatttaatatactgagattttttttttttttttttgaggtggagtcttgct

SEQ ID NO: 224023 - DNA, 559 bp, Homo sapiens
ttcttcaatatttgaaaaccttttttaaactttttttttgtaacccagttgaatgcagtagcacaaactatcatgatttgcatttctgcctcttaaattcagaggattgcaaacaatattaaaataacagtgctgccggagagaagaaataccttttacttgcgtgctgtgtatagcagtgtatcagagttgtattaatgccaccctatgagatgttatagatcactttatttcatacttaaatcattttggagaaagaagaaagacagcaatatatgcctatacttcttaaacatttttttcaccatctttaagaaagttcaactttccaaaaaatttcaaacacaaataattgggaaaagaattttgagttttttttcctggacctttatatccttagcattgaatagttatcacctttcgaaatgctctaaaacatggagggctctgtgaaaaacatctgtcttgttattgaggtgaaaaatgtgaacaaaatgatacacagctactcctcttttttttttttttaagtattaagcaagatttctttttcttccaa

SEQ ID NO: 224024 - DNA, 621 bp, Homo sapiens
ggagaggcaatagaagctggggcttggctggataacaagcctggcacactgagtttgtctctgaggtttagtttctcacctgtaagatgatgatataataatgtgcctcatgggattaaagaaaataagagatgcctagatacttatacattgctataaaaatgtctgtgttataagagtgacatggcattccacaaaatgcagtgtagatgtaaattagttggaatggtgacctcacccctgctaggtagcactggcttatgtcccacctgagagtagtagcatctgagggctagccacactgaacaagccacacacctgacctcagcatcctcttctgtgaggggaatgctctctgctcttctacctgcatgcaccgtgtttgtggaagtgctctgtgtaggacagggaaagcaccttgcagagagcaagggcccactggctgcagagagcctggtgggtgatggaccagagataagggtgagggacagtttagagtgtcacagtttctcatagagctttgggcagtgacaccagtattagtctcaggaccatcattgactcctggttagtttttctgttttcaaaacactttatcagctgtaaagcacttaaaaatgt

SEQ ID NO: 224025 - DNA, 428 bp, Homo sapiens
gtggtgttggtcttttcaatgtgaaccatgctaacgggtgtggaacggtatttcactgtggttttaatctgcagtcccctagggaccaatgctattgggctgttgccctgtatcccactgtttcactcatcttccccagtgaacgatgtctcagggcaggtgtgtatgttacttatcattttatgcccagcatctatcccaagtccagacacatgcccagttgtttacagaatgaacacttcttttagaaataaacacagaccacgtagatatagcccaaaaggttgaaaaacaggtttaaaaagctatagactaaagaaatcaaaatcggatgggcacagtggctcacgcctgtaatcccagcactttgggaggccgaggtgagtggatcctggctaacacggtgaaaccccatctctactaaaaat

SEQ ID NO: 224026 - DNA, 391 bp, Homo sapiens
caaaatagacttttggtaaagtacaaataccattttcccttttagtattcaggcaactcagaagctcttttttaaaagcctcctctaggctagatgtggtggctcacgcctgttatcccagcacttgggaggccaaggtgggaggattgcttgagtccaggagttcgagaccagcctgggcaatgtagcaagaccctgtctctacaaaaaatgtacaaaaattagccaagcgtggtggtacacatcaaatctgtagtcccagctactcaggaggctgaggtagaaggattcctttagcccaggagttcaaggatgtagtgtgcaatgattgtgcctgtgaaaagctactgcactccagcctgggcaacataatgaaaccctgtctttacca

SEQ ID NO: 224027 - DNA, 663 bp, Homo sapiens
gcaaaatttattttcataagcataaattaaaaggactttcctaaggtggtactctgaccatgtaatcacatttttgatctttcatcccaaggaaataatcagaatattgtcaaagattcctgatgtttgtttcagtatcattttttccaccagtccattggaatctgtattgtttttaatatgaattagaaaaaacccagtcctaacctttagtttctttaataaagaacacttaagcttattttataccacaattaaacaagaatagcgaaagaaaagtttatgccactctttataaacatagatgcaaaagtcataaataaaatatcagaaactagaattcagtggtttattaaaaacaaaaccacaaaaacataactaggcatggtggctcacgcctgtaatcctagcactttgggaggccgaggcaggcagatcacctgaggtcaggagtttcagactagcctggccaacatagtgaaacccggtctctactgaaaatacaaaaactagctgggtgtggtggcatgtgcctgtaatcccagctactcgggaggctgaggcaggagaattgcttgaacccaggaggcacaggttgcggtgagcccagattgagccactgcactgcagcttgggcgatgagcaaaattccgtctcaaaaaa

SEQ ID NO: 224028 - DNA, 323 bp, Homo sapiens
gcacagcagcagagtccccgctacggggtcggcattttctcatcctcttgctcaggcgggcatgattagggggctgggaaggactcacagaaggcgacgcagcaagaagtgacagagacccagaccctccggagccccagctgctcacctgaccctgcaccgccccccaggaagaatcaaacgtctctaggcagaaagggcggccgtatccagaagagagaacagccatgcagtgatgtgcttagggaaatctggcgcaacaatgtcaaggcgagcactcaccttgtgcccagccctgtaataaaaggtttatatacagtatt

SEQ ID NO: 224029 - DNA, 597 bp, Homo sapiens
aattgacacacaatcaactgtagatatttgaagtgtacaatttgataagcttgatactcctatgaaatcattaccacactcaagataatgaatatagccaacacccccccaaatttcctcttgcatctgaaggtgttcagaacacacccctccaaaatatgctacttgaacatattgactagtttagctgaacgcccttgagaaacaacagatgcaggaagggctttctgaccatcccttttctacctaaaaggttacaaaatttcccatgaaaaaggtaccctccctgtaccaggaaaagaacattcttatcaccagagattgggagagttgaaatggacctatacaaacaaacctacaaaataacccttatcttccattagtttcctccgtatattttctagtcactgttctacaattcactgttcctagtccaaacccctctgtcttgtcacatacctacaatttattgttctttttgtaaaaaggtacataaacttttgggtctaatggcttctttgggtcctcattttccttctgaagattctgcttgcatgtaaaaatattaaataaaatctgtatgctttttctcctctc

SEQ ID NO: 224030 - DNA, 457 bp, Homo sapiens
actttgactattgcaagcagttttatcgcactgtaggtaaaacatgtgctttgaaatcatatgataaatttattaaatgctaaggactttatattcactgtttaattttatcatcttaataaccttcattattacctccattaaacactatttgttggctacttacattattctgattttgcaaatctaaatttgagaggctttcccaatgtcacataagttaataagtggcatagctggggtttgaattaaagtctaccggattccaagatctgtttaccgttgttctacaatatgtactttttaggtccctgagaatgctaacaacatttcttttgaaatctggatagcagctttattaatatgtgattagggcaccatatttcaggcaacaaattctttgaaatctttcatttccatagtgagataaggatcagttctgtggcattgtcagcca

SEQ ID NO: 224031 - DNA, 584 bp, Homo sapiens
tttaactaataaaatgtaataaattaaaatatgacaacacattttgttagccagatcttaggaaaataatcactcttttcattgctgttaaggaatacaaactgctacaacccttctcaatggaaacttggcaatacctaatataactacataaggagccctataatctcacttataaaatctaccctgaagatacatatccaacaatatgaaaaacatatgtacaagtttattcattgtaagattatatataattgctaaatttaagaaacaaattaaatactcatatatagaacagtggtttttaaataaactctaacaattcacacaagagagcactatgcagctataaaataaatgaggaagagctctatggattcatattcagagatttccaaggtatattcttatgtggaaagcaaagtacagaagaatatctagagtatactactcttcatgtaagaaagaagtatatataagaaaatatacatatatccacatatatgaggaaaaacatactggaaagttaaactagaaacaaatgagattcgtcacctacagaggttaagtaggatcagcgtgga

SEQ ID NO: 224032 - DNA, 218 bp, Homo sapiens
gccgaggcgggtggatcacctgaggtcaagagttccagaccagcctggccaatatggtgaaaccttgtctctactaaaactacaaaaattagcagggtggggtggcaggcgcctgtaatccgagctactcgggagactaggactacaggtgctcaccaccgcgcttggctaatttttatatttttacaaagctttaaataaaaattgcttaaagctga

SEQ ID NO: 224033 - DNA, 476 bp, Homo sapiens
atgcccggctaattttttgtattttcagtagagacagggtttctccatgttagcagaatggtctcaatctcctgacctcgtaatccgcccacctcagactcccaaagtgctgggattacaagcatgagccactgcagtttacttttaaagagatttatatcaaattacatcttgattatcttgaattttaaagttccctagaaggaccaaatggccaataactataattcaaatggttcagagctataaagaacaaataggtaattttgaaatttcacccattgtaacttggtcattaacggagaatgtgtaaatgtgtagcacagatattatgtgaggtactggtggtaaggcgacataatcctcaaactaatggtttatagtaaggaagagagacacacacaaaatatgaagctatgccattaatattagaaagagtgaaaatgcacagtccattccacaaaacactactattg

SEQ ID NO: 224034 - DNA, 362 bp, Homo sapiens
ctcaagtttgcctgcaaaatgtagctaatctacctatctcccatcaagaagacttaaaggtgagccaggcgcggaggctcacacctctaatcccagcactttgggaggctgaggtaggcggatcacctgaggtcaggagttcaagaccagcctagccaacgtggtgaaacctcatctctactagaaatacaaaaatcagctgggtgtggtggcaggctacctgtaatcccagctcctccagaggctgaggcaggagaatagcttgaacccgggaggcagaggttgcagcgagccgagatcctgccactgcactccagcctgggtgacagagcgagactctgtctcaaaaaacaaaacaaaac

SEQ ID NO: 224035 - DNA, 647 bp, Homo sapiens
tgtttagagacaagggtcacgctgtactgcccaggctgggtgtaggttttttctgaagagcatttgggagttttgtttttgcttggttacttttcctatgcacccttctaccactagggggagatgattaatcactaattgaagggattttgttcgttttttatgttttgggtttttttgtttgtttgtttgtttgtttcaataaagaaagagtttaattgcagtaaggcaggccgcgcaggagatggcgttcttattcaaatcggtctctctgaaggctcagaggttaggggttttcaaggcggagttcttgctatcattccactccttaggtacatgaagttggtagatgtgtagtttgatgttaaattattgggtggatgcatgcaccgctggttgtagagactggtaaagcccactagcaggaccccacctggaccaaagcaatccctcaacccgctggaccatgaccgagaacaaacacaaaggacctgaaatgcgttgtgaaggccagaagccgacatccacattctccacccacggagagccccagagtccctcatgcacatcctgcttgatctattacacacattcacacattcgcaacacatttgtttggttttcaagcttacaacatattagaaaca

SEQ ID NO: 224036 - DNA, 549 bp, Homo sapiens
cttaagatgagctatgcaggaagaatcagacaaaaattagccaaaaaaaatgcagaaaagcattttaggcagagatgccaataatgaaggtacagcgaggcaaactgcatattacactggtgatagtgtgtatgcccagttgagtggcgggaaagaatcacatgggaaataaggctgaaatggcagagggcagacaaatacatacaaatactaccatgcaaggataaaatgtagccatggtgacactaggaaaaatccagaaatcgcaaagacgacaggaaagaacaactgataaaagtgacttatgcttacaaataaggcaacaggatcatctactaatcagctgtgagactgtatgagacatgccttcggtttaggccctttctcccctgcctgagtctctaagagaaggtctaggccgttgctcagtgtgctgtgagcctgacatggagtgttaatgcacatggaccatgggaatgaataccaaaaagaccaagcacattttatttttatttggagctatatattaatacgattggtaaaaatgcc

SEQ ID NO: 224037 - DNA, 159 bp, Homo sapiens
catcctgttacatagacctaattttaattagcacatttctaaagaagactcagactaagaaacacatcttttagtaactgacatgttactaaaaggctaacatgaaggtcatattaagctttttccatgttaccagtacacacacacacacacacacac

SEQ ID NO: 224038 - DNA, 571 bp, Homo sapiens
tgtgggcggaggacgattagagggcagttggctgtgtcagacctgtgggtggagggccattggctgtgtcaggcctgtgtgcgcagggcgattggctgtgtcagcctgtgggccaagggtgattggctgtgtcaggcctgtgggcggagggcgattggctgtgtcaggcctgtgagcgaggagcgttggctgtgtcaggcctgtgggaggagtgcgattggctgtgtcaggcttgtgggccaagggcgattggctgtttcaggcctgtgggaggagcgcgaatggctgtttcaggcccgtgggccgagggcgattggctgtgtcaggcctgtgggcggagggcgattggagcgtgaaaggcaggtcaagtcctgggggaagcacagaggttggctgtggcctggaaaagagcgtggcccaaaacacttactggctgcgtggtccgaccatggtgcaggtgattgcatagtcagtatgtcagctcctgaagtcaaatgaattagtccttaggaacatcccaggcatatatgttgtgtgacttgattttgtgttagctcaggcatacgcatta

SEQ ID NO: 224039 - DNA, 143 bp, Homo sapiens
gattgtaaggatgtttgtatgtggggggtgcttgtggctccttaactggctctggaaagagctacttcccatagtgaaccctgtgaggtccaattctgttcctccccttggagctccaagagaaggtcattgtccttgtagca

SEQ ID NO: 224040 - DNA, 440 bp, Homo sapiens
acaaaacaatggaaatgaaccattggaaggtttctagtggttacatgaggtacagaagagtagcaaatgtggccacagttacaagtgccagcctggagccagccctagattttagtcctgactgtatcaactactggctatgcgatcccaggcaagccacttaccttcttgccttctccataataaaatggaaacagcatggcaccaacctcccaggttggtaagttagctgatttacacagcaacacggggaagccctcaggctttgatggtgcccagacctggattcaaattccttttctttcacaaataagcaaagtactttgtaaacgtcaattttctcatttgtcaataaggataattattaaatcagttaatatttgtaagacacttgagttagaactgtacttgtgatatagtgaacacccctgccccgtgcc

SEQ ID NO: 224041 - DNA, 415 bp, Homo sapiens
ctttgggaggctgaggtgggtggatcacttgaggtcaagagttcaagcccaggagttcaagaccaccctggccaacagtgtaaaaccttgtctccactggatcatgccactgcatccagactgggcaacagcgtgagaccccgtctcaaaaaaaaaaagaaaagaaaaagaaaaatatggaacccttcgtgaatctgtgtcatccttgtactgaggccttgctaatctctgtatctttccaattgtagggtatctactaccaaaggaggcacttgaatattttaatccaaattatatgaggaaaaaaagctggaatttctaatatttaaacctagttggctctagtttaaagatataaatacgtacctcacttaaacaccatgtaaataaaatctaatttaagcacaaatcccta

SEQ ID NO: 224042 - DNA, 582 bp, Homo sapiens
  misc_feature (8)..(8): n is a, c, g, or t
  misc_feature (10)..(10): n is a, c, g, or t
  misc_feature (12)..(12): n is a, c, g, or t
ccaaattngncntttggccggggtagtttggttctaggaggcgctagtgtgaaatcaaagggcaaagtaagatcatgtatagctccctaaaaaaaaaaagtagctccctactttaaaatataataaatgaagggaaggaaaaactagtttaaaagcgtagaaactgacaacaatagttgtctttcataaaggtaacgtaggctggacacggtggctcacgtctgtaatccaagcactttgggaggccgaggcggatggatcaccagaggtcaggagtttgagaccagcctggccaacatggcaaaaccccttctctactaaaaatgaaaaaaattagccaagcgtagtggcaggtgcctgtagtcccagctgctagggaggctgaggtgggagaatcgcttgaaccggggaggcagaggttgcagtgagccgagatcgcgccactgcactccagcctgggcgacagagtgagactccgtctcaaaaaaaccaaaaccaaaaacaaaaaacgtaatgcatataatctatttagtaatcatggttttagttttcttaggttagatattaagagctgaagacctt

SEQ ID NO: 224043 - DNA, 320 bp, Homo sapiens
tatgggagaccagggcattgacagaaagccaggaaaaggagagtttaatggtttgcggttttgatatttttgtccattgtagaaaatttggaaagtttagaaatgtttaaagaagcagccagaagtccactcctagagttcgggtctgtcatcagacccatctccttgcctcagcttcctccttcaaaaacatccagccaggctgggtgcggtggctcatacctgtaatctcagcactttgggaggctgaggtgggcagatcacatgaggtaaggagttcgagaccaacctggccaacatggtaaaaccccgtctctact

SEQ ID NO: 224044 - DNA, 408 bp, Homo sapiens
gaagtctcccagccccccttggtcccaggtggtcctgaaatgctgatgcattctgcttaggtttcaagcagtagataactctggctttcagcacaaataaatcccgagactaaaattttggggggaggaggactggaatttctgcctcttctcttccctctgcaaaagagaaatcccaactattgtcattgttccagggtaataatttgaaagaagtttcacaacctttccatatacttatattttcagctgctaacatgatctcattttgatgaaaaagcaagtgccacctttggatgtctgggtgagttgaaggttaatataggcaaaccttttgtcctaagaactaattgttatttagtattcttggaactgtgggaatgattgataaagccatttgaaaaccca

SEQ ID NO: 224045 - DNA, 342 bp, Homo sapiens
caaaaagtgggaaaaacattttcagaacaaatatcatggctccttaattttaaaaagatgccttgggtgcgttggctcacgcctgtaatcccagcactttgggaggccgaggcgggaggatcatgaggtcaggagatcgagaccatcctggctaacatggtgaaaccccatctctactaaaaatacaaaaaaattagccgggcatggtggtgggcgcctggagtcccagctacttgggaggctgaggcaggagaatggtgtgaacccgggaggcagagcttgcagtgagctgagatcgcaccactgcactccagcctgggcgacagagcgagactccgtctc

SEQ ID NO: 224046 - DNA, 246 bp, Homo sapiens
gggcaagccgaggagtaatggagaggctgcgggctgggttaaatgggagcgagtgggtgggttggagctacgtgttctaccctgtgactccaggcacgtctggccactgccggggagggaaggagcgacctgcccgccctcccccggcttcatcacatgagtctcacgtgttggacaacgctccggcggctgctagggagcccccacccccagccccggcccccaggtgtctgcggctgcggccgc

SEQ ID NO: 224047 - DNA, 314 bp, Homo sapiens
tcagtgattttcaagagctgggggttgggggaggggttgactacctagggcacaagggaatttgagggagttgtggaactgttccgtatcttgattgagtttggggtttacttttatcaaaacttatagaactgtacgatataaagggtaaaattcactgtatgtaagttatatctcttttttttaagttttaagattaaaaactaaaaaggaggcaaaactaacctatggatgtcagcagagtggtagctttgggaaggagggaaagtgccttctggggttccgggactgttctgtttcttggccttatcgag

SEQ ID NO: 224048 - DNA, 498 bp, Homo sapiens
cggtccattagctgtgtattacaggcgtgagccactacgcctggcccacaaaatctttttagtacctcatacttaagtaaatatgagcagtcagatagttgaggaatgagagcctgggaccaagatatgtcgaggaaatagcataggaagcataagaaagctggaaaataacctataaataatggcaaaaaaaaaaagcaaacaataggaagaggaactatataaaaggaacatttggagcatagaagagagttcatggaaatgtaaaaaatgatggtaccctgggttttgatatagtaagtaaaaaactaagggtaagagggtcatgaaagcatctagaagtaggagggaaagccagtcaaattcacaggatgaagtcaggaagataatagagcagtgcccgcaagatcctgagggaaagcaagttcccaatctataagtctgtaaccctcacacctgatggccccttgaacatattcagggcttcaaaagatcgat

SEQ ID NO: 224049 - DNA, 545 bp, Homo sapiens
aacagggaccccagtgtggaaggaactgaatcacaccccaagcaggtgtgattggaagaggatcctgagctccagatgacaagggaccccagccaggaccttgcttttggccttgggaagccctgtatatagaacccggtcatgtcatgcccagccttctgtttacccagataaagtttgaacagagctgtgagctgataaatgggtcgtgttttaagttgctaagtttgtggtgatttgttgtgaagcattagaaaacccatacagggcaacattaaccagtctggaatatcccagtgccagtggcaggatcccatacatcaatgtctcttcagaacatttgatgttgtactaaggtcatagtaggttccaataaatagtaagttgaattttcaaaatcactatacttgtagtgtaggtcatctgaattttagagttttgtagcatatcaaggtacattgagtgatgaggaaaaacatcttgagattttccttaaaaaaaaaaattttttttaacctagtaaagaaattgagaaacatcatttt

SEQ ID NO: 224050 - DNA, 435 bp, Homo sapiens
cgtgggcccagacttgaataaggaggagacaaaggggtgacaggaggaaagtatgccaggctgaggggacagccctgcacgcagcttctgaggactccagcctagacatggagggagagatgtgactcagccaaacagggacccaaagacagtggctgaagcaggtgctgctcctgggtcagaaagacctgagttccgggcggggcacagtggctcacgcctgtaatcccagcactttgggaggccggggcgggcagatcacttgaggtcaggagttcaagaccagcctggccaacatggtgaaaccccgtctctactaaagatacaaaaattggccggatgttgtggcacatgcctgtaatctcagctactcaagagtttgaggtcgggagttccagaccagcccggccaacatgatgagacctcatctctact

SEQ ID NO: 224051 - DNA, 556 bp, Homo sapiens
aagagttcattggtttagcagtcagcactgatggcaggaatgcaaactggtatatcttttaaaaatgttatccccttttatatcatataagattagattggtcatgttaaaataccaaaactacagttacccaagcaagatatgagtttaatttgctctcaagtggtcctgggttggtgtggaggctctatagtcatcaggaacccaactttcttccatcttgctgctgtgccgttcttaatacatgattcccagctagtggtgcagtgctggctttcatgtttatatttctagccggcagaaaggattgaggaaagagttatccacctcctgcaagtagatttgcaggaattctcactcctgttagccagatattacccacctagccacatgggggagtctgggaaatggggtccttattctagatagtcatggacccaaccaaaattccaggcttctgttactaagcaagagcagggaaaagaataagaggaccgccaaccattctgccttagtgtagttgatcctgtaattctacttttaggagtttatccta

SEQ ID NO: 224052 - DNA, 460 bp, Homo sapiens
tcattctagtcatgcccatgcagcagaggggagtttcatctttaatgccacatctggctttacactagaggcctgaacctgccggatgcacaattttgttcttttccctgctggctaggatttgcaggcacccagaagctgaagaccctcggggtctccagaggaggtcacatgtgcctctggccacagccacccctggactttcagctggccagtgctcccagctcccagcccttggctggcagaggtgagcaggagtcccacccactcctccccagcttagccgagtcatgttgatattctggcggcatagtcaggcttgttattgagcacatgctttgcagattagcctgtttgtatagccaatcgaacatgtgctccattaaaaattaaagcatcctgttttaaggatggagcaggagacatcagctgccactgtgtagcagacatgcaaagcccc

SEQ ID NO: 224053 - DNA, 911 bp, Homo sapiens
tctaaagacatgcagcttctgatcgaagtgtaacaatctagtaatgagtttaaaataggtaattcttctataaactagattcaggatgatctttaccaaatccgtaagttctatgtttgtcatagaaatttgattcttcaaaagccaatgttaaaaatacaaattataatattgatttctatctaatttgacattttaatttggggaattaacactatttactattttcagaaaagtgcttgaaaatagaagcctgaaatcttaatctttatctcataatttaaaaacaaaaagagtcctttgcaggaacatgaatggagctggaggctattattcttcaaactagtgcaggaacaaaaaaccagataccgtatgttctcattgtaagtgggagctaaatgatgagaacacatggatacttagaggggaacagaagacacaggggcctgcctgaggggaggaggtggaagaagggagaggatcaggacaaataactaatgggtactcggcttaatactagggtgacagttataatctcttcacaatctcccatgatacaagtttacctatataacatacctgcacgtatacccctgaacttaaaagttttaaaaaaatgggaaaattaaaaaaagagagaaagctgtaacagtagcagttgaattttatattcaaaaagcaaacatttcaaaacaaatcatgaaattgtttttatttgttattgattttataacatgggtttaatttcaaatctatgttttagagtatcttttggtgtgaagacgttattagccaatggtgcctttttctttcataattaattcactatggatttaatttatgtaaatgaaatagtggcattatttattgcacaggaaaattaaaattttatgttacaaagttcaaactta

SEQ ID NO: 224054 - DNA, 205 bp, Homo sapiens
taccctgtgatccttttcaacacaaaaactgactgctctttcaactgtaaggtgattggcttccaaaattaatgtttccagtcaagcagtctgacttaggggtttatacagcctagctcaattacgcaaccactagtgatccatttaaccttgcaatatataggtgtccctcagcaaaaatgggataaaatttaaaaatgagttt

SEQ ID NO: 224055 - DNA, 437 bp, Homo sapiens
gtagagatggggtctcactatgttgcctgggctggtctggaactcctaggctcaagagattctccaaccttggcctccctaagtgctgggatttcaggcataagccaccacacccagcctacaggtggaatttttaagggtgattaggaattaactggacaaagaagagggaaagtctttgcaagtagaggaaagaatctgcttggagctcagataactattatttgaaaacataatgacatctagttcaaacttgtgactgagttccacagtagaattcacagaaaaaaaattattaaatataatatttccatcagtctgtgtctaaaagattaaaaaagagcaaataacaatcttaataaactgatgatagattatagcctcatctcttccaacatccgattctgtggaaatttgcatggacatctggtcgacgc

SEQ ID NO: 224056 - DNA, 426 bp, Homo sapiens
caagtgcgtggaacagcacctggcacagaatagggctcaaaaagtgtctgatgttccatccgtcagaagatcagcacctatgccaaagtgagcgcagggactgctgcccaaggagaggaggctgggtgcggcagctcacgcctgtaatgccagcactttgggaggccaaggccaggagatagcttgaggccagggatcgagaccagcctgggcaacgtagcgagaccccacctctacaaaaacatttaattagcggggtgtggtggcatgcacctgtggtctcagctactttggaggctgaggcgggaggatcgcttgagccccaagaggtcgaggctgtagtgacccttgatcagctccactgcataccagcccaggcaacagggcaagaccctgtctctcatagagagctagagaaagagaaag

SEQ ID NO: 224057 - DNA, 558 bp, Homo sapiens
cagaaaatgcctaactaattcaggagtagacatggaggtggggttagtagtcatggtgggagccatgagattgtatgggctttcattagcaggctgtaggcaacaggtgaagacctcagccaggcaagaaatgggaacagtcagagagatagaaaggagaacatgaaaggttttattttggttttttacagcactgtcaggacacttgagtagaagactctatttagccaagagggaatctttgctggcccgttatttcactagtgtgttgggaaatggaatatgactagaggagaatgtgaggtggaaagaaagccagtgcatgcagcttgagaggaagtagaagagagcgatgtgtttgagggggcggaagagtccagtcagagggcttgtgcacatctgaaggggaaatgcctcttgcttggctgagaggtgtctctctaatggcggggaaggaagaagccagagacatggagatgagcatagggaaggctgtgtgcagagagctgatgaggggggtctgcctgctctgtggcccctgggctctctgatggggac

SEQ ID NO: 224058 - DNA, 443 bp, Homo sapiens
caaagtgttgggattacaggcgtgagccaccatacccagcctctatttttaaattaataacaaagaagatatgacaacaaaagcacaagcaacaaaagaaaaatagacaaattgggcatcattaaaattaaaaacttttctgcttcaaaggatgtcatcaagaaagtggaaagacaagccacacaatgagagaaaatatttacaaatcagataactgataagggacttgtatgcagaatatataaagaactaatcacccataataaaaggacaaatgacacaattaaaaagtgggcaaagggtctgagaagatatttctccaaagaagatatagaaatgggcaataagcccatgaaaagatgctcaacatcattagtcattaagaaaatgcaaattaaaaccacagtgagataccgcatggcactggcaaggatgcttataat

SEQ ID NO: 224059 - DNA, 424 bp, Homo sapiens
aaaatctgctataagacattatgttggatggaggatgaccaaccatgaagtttaccaagccatttagttcagctgccatattcactggccgctactgtgtggcgtacgttaaaatagagcattatttaggggggtggggtgtgagaagacataaaatcaacagccttcatctagtctgataggtactatagttgaggtatatccctaagttaataaggatgagaatgtggtgtaaaattcattctaaagtgatggggaatcattgaagaattttaaatagagaatgacatatcctctagtagggtgactctatgttccagtgtgttgggacagtcctactttatctctgttatcctagtgtcagtattaataatgtcctttcattccttgaagtgtctgagtttggacaataaattatgtggtc

SEQ ID NO: 224060 - DNA, 540 bp, Homo sapiens
agacttgaggctgaggaacagatggatttaagaaaaaaaaccattcctttccttttaaaaggtcttaaaaacttttgagaagcttcaggaaaaaggcaagtaagatacgattattttgtggcataataagatttcattttctgaaactcaatcaggagaactaatgaagaagaaatgtgccccttgcttgtggaagccagcttaaactggtaagagcccaatcactcacagtatttgttaagcaaaatccatttatgttggaacagtaggcatttaagcattaatatgaaagttaaaatagagaagacagtacagaatacttaagttacaatttcaaattcgacagtgttgacagagctactccagagaccactaaatatattgctttaaaaaaaaaagttggcggggcataatggctcacacctgtaataatcccagcatattaggaggccgaagtggaaggatcacttgagctcagactcaggatagaccagcctgggcaacattacaagaccttgtctctactaaaagaaaaaaact

SEQ ID NO: 224061 - DNA, 422 bp, Homo sapiens
caggacgttagaatgggtgacagccactcagggatgtgggccttggcagggagggacttgagcttgagcccaccttcccactcctgctgccatacaactgtaatgcccgtcttcttatgatacgcacatcttcaaaacaagcctcaaggtgcagttcatgaatggggcaggaagtagggaatctctggtctcttcttaaaagaatcccacggcataactctccttttctacttagggaggcacctaagaattacaaaatttaaaatcctaggtctatccactaagaaatatgcactggtgttcctccctggctcctggccagagctgctaaaacccttctaatttcctcggtgacagaagtgttttctgttctaatgaggcaacacttggtgggctcctggatggggactggtcactagaaa

SEQ ID NO: 224062 - DNA, 469 bp, Homo sapiens
tgaactaacttcttcccaccatttttgtcagaaaatgacaaaacctgaacatactcagtatgaaaaagttcagcaaacttattctgtaattccaaaaaatattttctggtacctgatatatgccaggttctatgcaagatgctaggcaatacagtagcagccaaagagataaacttctgcctttaatgtgcctatttataaactactcagtgagaagcacattataaaacataataaattagtaagctcatactctgacaagagctttgaagcaaaattgtaggatgctatgagagagaacagttctcatagcatagtcatagtgatgacttttttcaaatagagtaaaatatgatttggaatgcatagattcccactatcatgatcaagttagagaagaagaaaatcaacagtaattcaatgctacattactagtcaaaataaatttggcaaaatcattggaaacaaa

SEQ ID NO: 224063 - DNA, 700 bp, Homo sapiens
ggagccgatcccaggggatgattggatggagatgtagacactttatttggaaggtgctaggagtcactgccaggctcaaagaacggggaaggggtggacaagacacaggagcagcacgaggaggagacacaaagaggggagggaagctgatgggcaggggggagagatgagcggacccaggtgcaagggtggagagcagtgggctggggcatgactgccgcttaaccagcctcatggtgtcactcgccgagcctcagtttccccttctgaattgaggggcaagagatgacctctaaggaccaccaaccctgctgtctatgaggccatggtgatactaaggcccagagggagcccggacctccagtgtcctccgtccatccattctctctgctcggctttgcactggcgtgggctgcatcgagtcccaggctgtacaccttggcagtcacgcggcgggggctctcgtgtgaggacgggagcagagccaaatgcaccagctgtcagccagactgaaggtgaagggagccaacaggctcatgtctgaatacaaggtcttcagcccacccctggaggcagtatgtcaggattcttccgaacagagaatctggggtctgttctaaaggggcctagagcatggccatggtcactgtatcttcagaaatgtttaaagttttgtctttcttggtcattggaagaggca

SEQ ID NO: 224064 - DNA, 869 bp, Homo sapiens
cgagctgaagggggctgaaattattccctctgaagaagaagaagaagaagaaaacatactgcagctcccgatttgaaacatcatatttgaaaacaaggtggggccttcatcatatgcaaccttcatattttagggcctgcctctttctattccttgacataaaccggactcttcatgctaatcaggctggaagtgtatcataaggatgctgaagctaaaaacaatgtccaaggccaaataactgacaagaagaaggccaaggcatctagaaaccatgtcttctgattcacagttgatcatatttttctatcacctttgataaggcataaaatattattttgatgagtaaataaaaagactttggacacctgctgtttgtctaatttatggtttccttctcttttctctagttgatatgactatattaagccaagaaaaaagttagatttgacaaacggattttaacaattttatgcacagaatattttttaaagttatttttacgagtctacagttttacaagtttaatgacatgttcagagggactagaaaatttacaaataacatgatttataaaatccatgatttcccaggaatatttttgccaccacatgggggtgtagtgttcttaatatgtactttgcaggaattctgagcatctcagctgagcaagcctggggagcagcagggagaactggattttatgtgcaagtttgtcttatctgcaccaagcatgaggccaggaataggagtcgatcttaattcatcctccaagtgtctcaaatataaaattggctttgtgatattaatttgtttaaattgttcaatctcaggaaaaacttcacagtatgtatgagttacccacatac

SEQ ID NO: 224065 - DNA, 844 bp, Homo sapiens
catacagagcctctgaaatttttaattagctggttgtacagtttaacattttctagctggaaattgcatggtataattaagaggatttaaagcataatttaacaaaatattactctatacttgacattttttaaaatgacaaattaaaatagaaatcatgcccttgttttgcagataaggatgctgaagctaaaaacaatgtccaaggccaaataactgacaagaagaaggccaaggcatctagaaaccatgtcttctgattcacagttgatcatatttttctatcacctttgataaggcataaaatattattttgatgagtaaataaaaagactttggacacctgctgtttgtctaatttatggtttccttctcttttctctagttgatatgactatattaagccaagaaaaaagttagatttgacaaacggattttaacaattttatgcacagaatattttttaaagttatttttacgagtctacagttttacaagtttaatgacatgttcagagggactagaaaatttacaaataacatgatttataaaatccatgatttcccaggaatatttttgccaccacatgggggtgtagtgttcttaatatgtactttgcaggaattctgagcatctcagctgagcaagcctggggagcagcagggagaactggattttatgtgcaagtttgtcttatctgcaccaagcatgaggccaggaataggagtcgatcttaattcatcctccaagtgtctcaaatataaaattggctttgtgatattaatttgtttaaattgttcaatctcaggaaaaacttcacagtatgtatgagttacccacatac

SEQ ID NO: 224066 - DNA, 462 bp, Homo sapiens
ccgagcccttgtccctcctctccgttagggtgcctggaggggggtacacttggggcttgcctggccccaggttcccagtccttaatgctccttaacccactgtgatgacttcctaggccttgaggaaagggaaggagaggggaggctgccggtggcttaccaagatgccggaaaccccggaatcctcagggtgagcctcttggggtcatgtccccaagctcctgtccttggggtcaggagatgccacccccccccccgggggacatgaaacagctctccctcctcacccctcacctcagggccacctgatgaccctggggcgatggtggaccccctgactcataagccccccagtcccctgggaagggggttcattgaccctttgggggtccttggactcactgatgcccccttggggcccagcgggttcaacaatgacactgcaaaaaggtttctttttac

SEQ ID NO: 224067 - DNA, 468 bp, Homo sapiens
cctgaagcagattattgataagatatatataatgcaagcttagagcaatcactaaagaaaataaaacattgtcatgaagtatattaaaaggcctatataccaaaacctagtaggatttatcccaggatttcaggagtggttcaacaaatgaaaatcagtcaacatattacacaagattaatagaatgagaggggaaaaaaaacatgattatcttaattgttgctgaaaaaaaaaaacatttaacaaactccagtaacctttcatgattgaaaaacaaaaacactcaataaactaggaatagaagggaactttctcaatatgataaaggccatatatgaaaaacctgcaactaacatcatactcaatggtgaaagcttcttccgtaaaataagaaacacaacaagtatgctcagttttaccacctctatttatcatagtactggaagttccagctaaagtcattaagca

SEQ ID NO: 224068 - DNA, 385 bp, Homo sapiens
aatcttcccactttgacctcccaaagtgctgcaattacaggcatgagccaccatgcccagtcccgtgtatcttgagtggagtcctgggtggatggtggggaggcccctggggtggggaacacagcatggagagccagtttgagggacaggatagtggactcagacacagccaagtggggcccagcagacacttagatcctggtgtccagggctcaggaagagatttagctggaagcactagcccagggctgtcaccactcagagtaatggggaccctaagcataagtgagattaccagggagagtgtgtagagaaaaaatgggagagggctcaggtcagaatcatgagtcatagtgacatttgaggagccaggtgtgggcaggca

SEQ ID NO: 224069 - DNA, 1486 bp, Homo sapiens
tgatttactatcagggaaattatgtaagagagactccctatgaatatagtgagtgtggaaaaatcttcaatcaacatattcttcttactgatcatattcatactgcagagaaacccagtgagtgtgggaaggccttcagccacacctcatctcttagccagcctcagatgttgcttacaggagagaagccctataagtgtgatgaatgtggaaaaagattcagccagaggatacatctcattcaacatcagagaattcacacaggagaaaagccttttatatgcaatggatgtgggaaagccttccgtcagcattcatcctttactcaacatctgaggattcatactggagaaaagccctataaatgtaatcaatgtggtaaagcttttagccgcatcacatcccttactgaacatcatagacttcataccggagagaaaccttacgaatgtggtttctgtggcaaagccttcagtcagaggacacatctgaatcaacatgaaagaactcatacaggagagaaaccctataaatgtaatgaatgcgggaaagcctttagccagagtgcacaccttaatcaacacaggaaaatccatactcgggagaaattatgtgaatataaatgtgagcaaactgttcgccacagtccttcatttagcagcacataacttatggtgggggaaatcagataaatatataaatgtaggagattttttggtcagacctttttatcccattcaatatcaaattattcatagtggagagaaagcttatacataaatttttgttttgttttgtttttgagaactgtctcaaaaaaaaaaaaaagtaaaatttaaaaataaaggcgatgctgtagtgcagccagtcacattaacttgaaataaacataaaagaggaatatttcacgaacgtcagttatttgtatgctttctttacagtttttaccatatctagtatttacttaatattctttataaagggatgcaagatttttagccttctcctaggaaatactatttagcatataaaataagttatatgctagttttatatgctaattaaatttattctactcttcatcaaaatagatacataaccttgaaattaaaaatattcgttgatgtccccccaaaaatcttgtgtgccgttgtttgagaaacagtgtgatagtttgtggcaatatcctgtgatgattctttttgcaatcttgacattattttcatcaaatgaatcctaggatcactttgagaagagccttgaagaagacttgagggtcctattgatgaactttgaaatattgattcagagaagtctgcttttctattttgttttagctttaaatttccctgtggcaagtctagattttttttcagttaaaattatttctgctgtatttgtagaacagaagttttgggattttgtaaaataatgaccagagactaagaattcccatgccaccccgtatcactgtggaagatggaga

SEQ ID NO: 224070 - DNA, 960 bp, Homo sapiens
tgatttactatcagggaaattatgtaagagagactccctatgaatatagtgagtgtggaaaaatcttcaatcaacatattcttcttactgatcatattcatactgcagagaaacccagtgagtgtgggaaggccttcagccacacctcatctcttagccagcctcagatgttgcttacaggagagaagccctataagtgtgatgaatgtggaaaaagattcagccagaggatacatctcattcaacatcagagaattcacacaggagaaaagccttttatatgcaatggatgtgggaaagccttccgtcagcattcatcctttactcaacatctgaggattcatactggagaaaagccctataaatgtaatcaatgtggtaaagcttttagccgcatcacatcccttactgaacatcatagacttcataccggagagaaaccttacgaatgtggtttctgtggcaaagccttcagtcagaggacacatctgaatcaacatgaaagaactcatacaggagagaaaccctataaatgtaatgaatgcgggaaagcctttagccagagtgcacaccttaatcaacacaggaaaatccatactcgggagaaattataggaagcttgggttcattgtaagtaacctgggacctgataagctagaattccaacttggattatttggaaaatttttgttcttccccccattttgcatggcctgccaggcagctgctgatgagttatataccatagtcctctttcgtgtttcttatgaacaatcttcgtctgggaattcatgttccttggtcttctgtctgttaacccgttgttggttcttcactaacatttctagagttgaggggctggcagtgttatacctcgcatccaccaccacatcttcagcttctttgtcacttctcagtctgccttttcagaattgaaaggtgcatcgataacaccgtacc

SEQ ID NO: 224071 - DNA, 1057 bp, Homo sapiens
tgatttactatcagggaaattatgtaagagagactccctatgaatatagtgagtgtggaaaaatcttcaatcaacatattcttcttactgatcatattcatactgcagagaaacccagtgagtgtgggaaggccttcagccacacctcatctcttagccagcctcagatgttgcttacaggagagaagccctataagtgtgatgaatgtggaaaaagattcagccagaggatacatctcattcaacatcagagaattcacacaggagaaaagccttttatatgcaatggatgtgggaaagccttccgtcagcattcatcctttactcaacatctgaggattcatactggagaaaagccctataaatgtaatcaatgtggtaaagcttttagccgcatcacatcccttactgaacatcatagacttcataccggagagaaaccttacgaatgtggtttctgtggcaaagccttcagtcagaggacacatctgaatcaacatgaaagaactcatacaggagagaaaccctataaatgtaatgaatgcgggaaagcctttagccagagtgcacaccttaatcaacacaggaaaatccatactcgggagaaattatatgctagttttatatgctaattaaatttattctactcttcatcaaaatagatacataaccttgaaattaaaaatattcgttgatgtccccccaaaaatcttgtgtgccgttgtttgagaaacagtgtgatagtttgtggcaatatcctgtgatgattctttttgcaatcttgacattattttcatcaaatgaatcctaggatcactttgagaagagccttgaagaagacttgagggtcctattgatgaactttgaaatattgattcagagaagtctgcttttctattttgttttagctttaaatttccctgtggcaagtctagattttttttcagttaaaattatttctgctgtatttgtagaacagaagttttgggattttgtaaaataatgaccagagactaagaattcccatgccaccccgtatcactgtggaagatggaga

SEQ ID NO: 224072 - DNA, 1569 bp, Homo sapiens
tgatttactatcagggaaattatgtaagagagactccctatgaatatagtgagtgtggaaaaatcttcaatcaacatattcttcttactgatcatattcatactgcagagaaacccagtgagtgtgggaaggccttcagccacacctcatctcttagccagcctcagatgttgcttacaggagagaagccctataagtgtgatgaatgtggaaaaagattcagccagaggatacatctcattcaacatcagagaattcacacaggagaaaagccttttatatgcaatggatgtgggaaagccttccgtcagcattcatcctttactcaacatctgaggattcatactggagaaaagccctataaatgtaatcaatgtggtaaagcttttagccgcatcacatcccttactgaacatcatagacttcataccggagagaaaccttacgaatgtggtttctgtggcaaagccttcagtcagaggacacatctgaatcaacatgaaagaactcatacaggagagaaaccctataaatgtaatgaatgcgggaaagcctttagccagagtgcacaccttaatcaacacaggaaaatccatactcgggagaaattatgtgaatataaatgtgagcaaactgttcgccacagtccttcatttagcagcacataacttatggtgggggaaatcagataaatatataaatgtaggagattttttggtcagacctttttatcccattcaatatcaaattattcatagtggagagaaagcttatacataaatttttgttttgttttgtttttgagactgagtctcactctgtcacccaggctgaagttgcagtgagccaagatcacgccactgtactccagcctgggcaacagagtgagactgtctcaaaaaaaaaaaaaagtaaaatttaaaaataaaggcgatgctgtagtgcagccagtcacattaacttgaaataaacataaaagaggaatatttcacgaacgtcagttatttgtatgctttctttacagtttttaccatatctagtatttacttaatattctttataaagggatgcaagatttttagccttctcctaggaaatactatttagcatataaaataagttatatgctagttttatatgctaattaaatttattctactcttcatcaaaatagatacataaccttgaaattaaaaatattcgttgatgtccccccaaaaatcttgtgtgccgttgtttgagaaacagtgtgatagtttgtggcaatatcctgtgatgattctttttgcaatcttgacattattttcatcaaatgaatcctaggatcactttgagaagagccttgaagaagacttgagggtcctattgatgaactttgaaatattgattcagagaagtctgcttttctattttgttttagctttaaatttccctgtggcaagtctagattttttttcagttaaaattatttctgctgtatttgtagaacagaagttttgggattttgtaaaataatgaccagagactaagaattcccatgccaccccgtatcactgtggaagatggaga

SEQ ID NO: 224073 - DNA, 535 bp, Homo sapiens
gcgctaagatcataagagttagccactgcgcccggcccctgggacttctttttagaggtttcgtttgcttgccaccaccatgcttcccatccctgttaacttactgtgaataggtaatacagtcacgtgtttcaaaaaatcagaaaatataaggtgtacagagaaaggttttcatccctttcctctccctcatctgcccagtttctcttaacacacacacacacacacacacacacacacacacgagcacttttatcagtcgctgtttacccttccagagattatacaaatggcaaatacagccttctcagacctctttttttacagaaaaagtagtaaactgttgtgcaccttgcacttttcattcaacaacgaaaacaggctccttgtttttttgccatgactgtgcagtattctcttttgtggagatgccacatttatttaaccaaccctctgtagaaagacatttgaagatgctggagacaaaattaaagatctaatccagaaaacctttccacaaaagtagaagagaaaa

SEQ ID NO: 224074 - DNA, 328 bp, Homo sapiens
tagccatttcagaatgaaatgggtgaagatgcactcaacagaatttgtgatagatccaaacataaattgatgaattttatcttgcttgtaattttggaaagtgaaaaaaacttggtctgagaaaaatgatactggtagaagaaaacctgatgacagctgtcactaactacacccagtcacacttgttatgatggaacaagtgacggaagcatcagtcttacaaaattcggacattccaaatgtaacccagggaatttggaacttcatagaaataatgaaaacagccaacacctcacagagcaggaatcttaaacagtaaagtttcacg

SEQ ID NO: 224075 - DNA, 385 bp, Homo sapiens
tctgatgagtgcattgaagaggatgacctgcttggttattctgcttcccgaatacaaaaaattaggcttctgaaatcaaacataagaagtcattgttgcttttattccagagactgggtctcgctgtgtttcccaggcaggtctctaactactgggctcaaatatctgtctgctgcagcctcccaaagtgatgggattagaggcattagccaccccacccagcctcaaccaaggttaaatcttaataatggcttttttataatttttagacaatatactttttataattttctgtttctaatttatttttctaacaagaatacattaacgttatagtcttgaagtgctcattaaattttataaaataaatgttattaagcataac

SEQ ID NO: 224076 - DNA, 827 bp, Homo sapiens
cttttaaacgtgccaatttactgcctttatgttattttctggagaagggccacaatcttgaacatggctaaagagaacttgtatgatctggtgaactttctcagctccatagaaggccactcaactccaacttcaatactccagccaagataattttctctgatgtcccttatgttcttgtctcagggtctctgctcttcctcctactcccatttatctctgttcattattcagctctctcctgcagggggctgggctctcctgtgatgggcttcaaagtactatgctcttttctccttcatggcaccaatcagagttggtaataacagatttctttgttaagatgtttgattaatgtctttttctccactaccctataaactttatgagggcagtaatcatatttgcttcctttttttaaaccatgaatctctcttgattggtatgtcgtagttctcagtgaatatttgatgactctatcctctatcttcttcctaaattgccctcagtgagcgccatgtaaagaattatttgcatttcttttcactactcttaaaaatactaccttaagctacaggcaaacaaggcttttaaaagtaagcatggctgattttttttctgaagcttaattcaagctaggtgacactttgggcagaaaaagatgactctgagtcctagccagggtactttgtttcactattagattggattggaattgggggaagaaaagagagaagaaatgtcctctctatccatcagaggaagtatctcctgctgatcatgacaaaagagatgtgggagaaaacactttcgaacctcattgaacc

SEQ ID NO: 224077 - DNA, 525 bp, Homo sapiens
ttctttcttctgcttgatcaattaggatactgataacctgtgaatgcttcacgaagttctcgtgctgcttttcagctccatcaggtcatttatgttcttctctaaactggttattctagttagcagttggaagtaaaacactcctgacgaaatgcaaaagaatggaaatcataacaaactggtctctcagaccacagtgcaatcaaattagaactcaggattaagaaattcactccaaaccacacaactacatggaaactgaacaacatgctcctgaatgattactgggtaagtaatgaaattaaggcagaaataaagaagttctttaaaaccaatgagaacaaagagacgacaaaccagaatctctgagtcctagccagggtactttgtttcactattagattggattggaattgggggaagaaaagagagaagaaatgtcctctctatccatcagaggaagtatctcctgctgatcatgacaaaagagatgtgggagaaaacactttcgaacctcattgaacc

SEQ ID NO: 224078 - DNA, 538 bp, Homo sapiens
aataaatctgggcaacactctagtattataagctttaggacatagttccagatatgtcaagttgttactaactcattacatatggcttgctcaagttactttaagtaagttgcttgaaaactgcttaattacatatgattgttctgggacaaaattctccatgagtttcttgtgtttccacacattttgcatgtgagacactggctgctatttgttccaaaccatttttttttcaaagacgtttgattagcaatcgaaaatgaaagattgagagtatttctccctatatcaaagatcagacatgcttacttccaattataaaatgtttaggttccctaaactcatatttcctctcttgtaacataatatactacagagatcatgtgttcctgtttgcattaccatgtaggtgggaactggggcttcagtatctggcaatgaataaataataaaataaaataactggtactctgattacagttattgctgtgtataataaactattcttcatctctgaaaaaaaaaaaccaacaagcat

SEQ ID NO: 224079 - DNA, 255 bp, Homo sapiens
cagcttcaaactcctgggctcaagcaatccttctgcctcagtcccttgactagctgggataactggcctgcgctaccacgcctgacctcatttcgttttcttgacctgttcttccctctccttgaattatcagtctcagctcttttcctcaccaaatccaagtctggcattctcctttccggccactcaaggactgagtgacaacttttgttattgcatcagcctacagatacttctgtcatggtgcttgccata

SEQ ID NO: 224080 - DNA, 119 bp, Homo sapiens
tattagagtcatttggggcacgtaagtggccaagtactttaaaagtccctttgggggcatttttaaccacctaggctcattggataaatttgttttttttttaaactgtgatactatct

SEQ ID NO: 224081 - DNA, 318 bp, Homo sapiens
aatcgtggttgtcaggggtgaaagggaggggagggggaaatgtggagttactagtcagcaggcatgaagtttcagttaagcaggatgaataagttccgccatacagtattgtacctatagtcaacagtactgtattgtacacttaaacatttgttaagaaggtagtattcatgtatgagaataaagtaaaaagtaatagttttggcagtggctcatgcctgtaatcccagcatgttgggaggcagaggcaggaggatcgcttgagcccgggagtttgatactagtctgagcaacatagggagactccatctctacaaa

SEQ ID NO: 224082 - DNA, 2026 bp, Homo sapiens
  misc_feature (111)..(111): n is a, c, g, or t
  misc_feature (449)..(449): n is a, c, g, or t
  misc_feature (901)..(901): n is a, c, g, or t
  misc_feature (915)..(915): n is a, c, g, or t
  misc_feature (1097)..(1097): n is a, c, g, or t
  misc_feature (1900)..(1900): n is a, c, g, or t
gagaaccaagctatgcttccatgctaatatcaaggttccttgcttttgacagctccctgcccctgctctctaccattctccattaatatttacttatttttgcttgcctanaagtttttaggcaatagttttagatccattacaaggtagatcctcctgtgtttgtcttccctattgaacctgcccatcacaatgtatctcacagaaaccatgagtatttcatagccttcatagcacttttaatgtagcaaatacattttataatcatttgtattactttgttcccaaatataatgcaagagacaagttggctagatcagtcttatcttgcagatattggtcgggagttcaagggtcataaaactttcctaactggggtgcagggccttaagtggcagagtgagaatcaaacccccctctccaaaactcctgtcttgttccttaacttntgcaaatgagcatagttgatgtgaacatccctgcaagccctttacacaggtgagaagtagttattattatttcactagtactaattagtagcattaggtgactatattcaaggctttggaaggcaagactaaaaatcagatttgggacagggagttcaaagatctgggcttcaccataccggatcattttggcaatagtggtgatttttggtgtagggaaaacaaagacctatgtttgggctaaccacaagccctgtgatcttgaacaagttctggaacatccctgagcctaaattacctttcaatggagatcctgtgatctatcacaatgcatttgtgagaatcaggggcatttctgtgatggcgctttgtcagtggtaatgcagtctgtacatgtgtccgattctgggtgcccagcggggcatctggcacacagtgatgacaccttactntgcttgtggggctnaaaggatttagacctagacaactcctagttcaagtcctcgttgtgctgtttaatacagggtgctcccttggtggtcacaggcactatttgttttctccacgtattcatttttagatctcttattaatgaggtcaccacagttgagtatagtgtgcccgcaaaagtgggatgagtgccacagncattcacgggcatttccaggttgtgcgctgatttgtcaccagtggatggctgtgcagtgtcccttcttccactgccaccatcccaccttctcttgggttttgtttgcactgtttgtatctgttacccgtggagggtctgcttctactgttgtaattgcttgtgttgtgactttgcatcatagctggagatccctctgtagttcaaatggaaagctggtgttgaaggtgaaaccaggtcttcttcagaaacttgtgtgggaacctttcatgggctggataagcatgaggatcaggacagggcagggtcactgaccttaaaggaggatgctttgacctgcctccagcatgcacccttcctgctgaagccattgttagtgtcccttaattactcaggccaccacccagcagcgcaactgtcaacttgcagaggacttcagtggtatcagtagtgttcctttttactctcataggtgtcctgattcggaggatacgttatatggtcaccctacttataggtgaatattgagtgaggtagtgtaaataatgtgcataaggccaggcataaggcaaggactcaacaaacatccactgtttttgttagagggggtgctaggtgctcaagaaatgtctgctgagtggccaggcatggtggctcacgcctgtagtcccagcactttgggagactgagttgggtggatcacgtgaggtcaggagtttgagaccagcctggtcaacatgatttaacctcgtctctactaaatatacaaaaaaaaaaaaaattagccaggtgtggtagtgggcgnctgtaatcccagctactcgggaggctgaggcaggagaatcgcttgaacccaggaggctgaggttgcagtgagccaggatggcaccactgcactccagcctgggcaatagagcaagactctgtctcc

SEQ ID NO: 224083 - DNA, 480 bp, Homo sapiens
ggcttctccgagggtgttcaggagtctcccaagtgcacaggggctcgtgcccaaagggtggaggtcggcccacttcgctcaattcaggagtggagaaggaagctagaggaccctctggaggtggcaggtttaatgtcctgcttttttatttatttatttatttatttatttatttattttgtaatcaactgaaagaaggcagaaggagtcgatggcctcttaggccggaaaccttacaagcataggaccaaggcagaaaaggtccagagggttcatggtcctccgttccacctgaatccagctagagagcgagccagggggataggtgtgcccctcgtcgcccgtgcgctgaggcactgtcacgcaaagagacattcaccttccacgtcaacgcacctttaagggcgagagcggtccgccgtgcccaagaggaacgggatgacattcaactgggacttgcctcaccttggcttgggggac

SEQ ID NO: 224084 - DNA, 397 bp, Homo sapiens
cctttaggcttttacttgatgtctccatcatcttattttgcaagcccacagataatttgaggaagatgagttgccgcagtagaaatgatagggagaaaaaaaaaactacaaaaaacagaaataaaaaattctaaaaccacagcaatatagtagctttattataggacatgctggataaacaatccaacagctacctcagggagcttctgagagaatgcatgatgcaatgatcagtgaggcaagatcaaattgtgtttgatgttcaagaaaggaaaaacaattcatgtaagtctatccaaagtagtaaatgttttatatttaagtagtgtatattcacttgtcagatgctcagttcacttatctgaaacctatgaaataaagtcttatattttagaat

SEQ ID NO: 224085 - DNA, 584 bp, Homo sapiens
gtgtctccatgggccctaggatatgatcagcagagaactacaggacagatcattaccatagagaatgatgaattattctaacaaagggagattcagggtaaacagaaggcaagaagctcacaaatcatccaagacagaaaatgttaaatattgacggctgcctggcgatgctattttaggaaagtgcattaggtggacgtggtaaatgccaggtttgccattccagaaaaacagtcccatcagtccctggatggcatccctggccttccccggcctctgtgttccatcacacctaccgctgggtaaacacctcatcgtctttgaagcacaggaatgcacaccagtggaaaaaacactcaggcaccttccaggggaactaaaggccacatattttatcctaatgtagtcagaggcttcgatgcctcggccaggacaaggtctccccagctgacacccaggcccatctgtttcttgccaaacagctcaacaaactctgtctctggaaactccgggaaactaaatggcaagaaagctcaagaaaaggttaagtaaagccggtagccgggctcagtatttcacatctg

SEQ ID NO: 224086 - DNA, 622 bp, Homo sapiens
tgtgtccacagtagccacacctccagcatcttggcagcagtgagcacacagtgagtatctatgccaggccccattccagatacaccagatgccttcacattcacgtctcaccatgatccaatgaggcagagaccactgtgacccctactgcaccatgcaccaaagacagcagggcctcccaggttgggccaagagcattggctcatgcctgtaatcccagcattttgggaggccaaggagggagaattacttgaggtcagaagttggagaccagcctggccaacatggtgaaaccccatctctaccaaaaatgcaaaaattagccaggtatggcggtgcacgcttgtaatcccagctattcaggaggctgaggcaggacaatcgcttgaacacgagaggcagaggttgctgagctgagatcgcaccacggcactccaaaaaaaaagaggcctcccaggtctaagctcgcccagaaggaagcgaggtgggggctgaggctgactgtgtggccctggctggacaccgatgaggctgctccccccggtgccaagtgcttctgaatccctccgtgcaagaaccccaaggaggaggccccggccatgcttcgtttccagttggcaaa

SEQ ID NO: 224087 - DNA, 354 bp, Homo sapiens
caaatattcttattttgacattttccctccaattattgaagtgtgtacaaccactcttagctcacagggctgtccagaacagacagcacagggatttggctcatggacagtttgccgacctctgccctagagccactttgtccacttgagtggccaccaaccctatgtggctaatgagcacttgaaacatggctggtctgaaccaagatgttctgtgagtgtaaaatgcacactggatttccttagtacaaagaaaaccttggaaaatatctcaacaatattctgtattgattacatgttgacatgacaataccttggacattctgggtttaataaaatatattgttaaaattt

SEQ ID NO: 224088 - DNA, 140 bp, Homo sapiens
ccatgaggctcagcgggataagaccctcaaagcagctagagcatgcctggtgcacgggtagaaccccacatgccagaagtcacattgtcccggtggacgcagcaagcctttgagaccagaacagagcagggaagagggac

SEQ ID NO: 224089 - DNA, 442 bp, Homo sapiens
ttgaagatggcagagcctctatcattctagatctttgaaggactccatggagcacactcctatttccttcaaccccctcttctatcacattgtgatggggtattacaggagtgggaaataagtctctcttctggtgtacagtggaattgtctacaggctggataacatgtgatgtcacaacagatttaatgaagaaacaaatataaaaatcaagttctttccaaattgagccagaccttaaagacaagttgtgaaatccgtgaaaatacaaatcaatgttacttttttcactattttttgttctggaaaatatagttgtctttcataataatgttatttgtgttaacatgctcttttaaagtaaatgaacaaatatttattttaaaaacctctcagttgtaaatcctaatatggtaaatataaatataaacaaaagctcttt

SEQ ID NO: 224090 - DNA, 549 bp, Homo sapiens
tggtcccattgctacggattagaactaatttgtacaactatcagaattttaagactgattaaaggttttaggtgtttttctcctactttgcatactgagaataatatgtatagtatttttccagtatgatttacaattttataaatgtcagtatacatatgtatatataaattattctcaactccatttttttttaaataaaataagtacatgtttgtgtgctaaattgctcatttggcagtgatagattgaaaaacatttataaatttaaaaataaagcactataagatatgaggaatgaatagcttctatgtgaatttctatgtaattaatatcaatatttagaataaaagtgtatttgaggataagatatttgtttactaaaatgttttatttactaagagtagaggtgaattatgcatctttctaaggaaaagttcttttaatttctgtgtctatgaaaaagaattcataattcataattcttaattgccctcttttgatccatataattctttaaataaacgaaacaataccaattcaaaaagg

SEQ ID NO: 224091 - DNA, 392 bp, Homo sapiens
tatagagtatttcttctacatataaaaccaagctttttaaaatttaatttttataaactcaacaagtttatgtaatcataatgttctaaattatatcttttctttaaaaaaaatttccctcagatttgagactgtttgattcttgggggaattttcaaaattataaggattttattgaaaatatcatttattagtgtaatatgccaaaaatataacttttcaaatagcaaactgatacatacttagaggcattaaaatctcctataaattgatgataatgataggtaatatttattgagtgcttatacagtgccaggccctgtgccatttcacaggatatttaacaatcctctattgaggcatctatctctgttattataatacccatttta

SEQ ID NO: 224092 - DNA, 500 bp, Homo sapiens
acatttctctgggtccaatataggatttgtcttaaacttgtccgtattctctaattttttatccgttcattgccaatttcatttcatttcttcaaaatctctattttgtcatctctctagtcccacagcttaatatggactcttatttactttcggaactaataaaattacactgtccattcacacaactaagaactgggtaacctaacccaaacttttgtctccagtgttacaatctatcctacaaatatcaaaagttataaccactcagtgctctttccagaatgtctttctccactataatctcactgtctactgggtcaagttcaatcagctctcccagacactcaacatcctctacatctatccaccctacccctaagacatactctttgatcctatactttctctttcccatagcatgtttatttcacttttcaaaatcctatgttgattcttttcttcttgaatgaaggcccttccctctccatccacttctt

SEQ ID NO: 224093 - DNA, 177 bp, Homo sapiens
ccatggtgctggggaggtgtgagcggtatcttgaaggtggctttaagtttgggaagttcgggaagagcagtaaaggcacgatactgggactgagcccagtaggagtctgggaggcaggtcgggctggagaagcagggctgggcccgcggtgggctcagctgccctcagtaatagcga

SEQ ID NO: 224094 - DNA, 485 bp, Homo sapiens
gggtgaggagccaatgctgcctctgatgtcttaggttgtggagctggaaactcgtggaggagctggtattggtgtttctagttgtgggtcgtggtatttccagggtttcacaaaggccagattttatttcagttactcagaagcgaaagaaaatgtcttctgaaagaggtgaactcaatcattaccaatagaaaaagtatccactgtattcatctcttatagaaacagaaaaatataacatttccccccttagaatataacttaatgttccattgtatgtagctgaacaataacatctggaaaccagcatgaaaccctattattcacatgttaaaatgttgaaactatgaccaaaatatgaaaactgctagagctatcagaaagagacaagacaaaaaccttcttgcatatgtataaactaaatgtgacaatctcaaaaaacttttcaacattatgattaccttccagtttaaaaaccttaatcc

SEQ ID NO: 224095 - DNA, 1895 bp, Homo sapiens
tacggagattaggtcttgttatgttgcccaggctggtctcaaactcctgggcgcaataaatccttccacatcagccttccaaagtgttgggattacatgctgcacccccagtgtatcagcacttcttaaattaaaataatcttgccaactaatgtcttgttttacatccttcccctttagtctactacttgccattctatccttagtagcctcgatgacggctccccttttaccccatacctctctcccccaaaaaagcttggacagcaaccaaattggcttgtatcagtattgtcaactggaggcctacatgaggactcagcttactgtttttcttctggttaattgtggacataatcaagttcattgcttttactccccatctgctaccactcttgtgcagctatttatggtgatggctttgttacgtatatacacatagaccattgttaatcccctccttttcctttggctgccaaacagtattcatttgaacatcatcagaaggtgtgcaagcactttgggaggccgaggcgggtggatcacgaggtccagagattgagaccatcctggccaacatggtgaaaccccgtctacactgaaaatacaaaaattagctgggcatggtggctcgtgcctgtggtcccggctacttgggaggctgaggcaggagaatagcttgaaccagggagtcagaggttgcagtgagccgagatcgcgccattgcactccagcttggcaacagagcgagactccatctttaaaaaaaaaaaaaaaaaaaaaaccagcttgcaagctaagtagttatcacatgccaatttacatgatttttcttaaagtcatgagcatattgctgacagaagttacagaaagtacttgccttttgaggttaatctgagtcttccttaatttacaggaggaggatatgtaaaacattctaagcttaggtaaccaaataaacagctttttaaatctagatgaatatccagcaggatgacacgtttttgttgttctatactgtcttccacattgtcatcttacaacctgttttccatccactgaatgctgtttgctccctagatcactgtgtaaacccagttgaccccaccttcatttgtatagccactgaagagcatttgcaaaaatgcgtgtaaatgtagtagagaatatgtttgttagatttattattactgtcatattgcatgagacttaagagtttgattcagttcagagggaggttccatcttcgtgcaagtacaaagatcatttaaaaggctaaatgctgcctcttcaaaaaggtcacaagaaaggctctatgtgcttgatgagtgtaaatgcagtgtttttaaatttaccctgagagactatttttgtacttgtgatgagagaaaatttggaggaagatgtgacattagaattggtcctttaaacatagacttcagatagacctaagggaagaacattctagttgagaacaaagccattgaaatgttaatacgcaagttgggggaatctttgagttagactggttgggctagtaaagtatgatggagtgccaggatttcaggaatgtgttgagagataagaatggaaaagtagtacaactggtttactgaggaatcttaaatctgggtataaacgtgaaatggttttattttttccttactgggtctccagtcatacagtgtaaaacactcctaacctctgtactttcctctgcagtgcagtcctttaagaatcccttggtccgatgtaactttgccgccacttttggttactacaaaaaacttattccagaaattaagacaggttctagccattaaaaaaaaaatgaagtcacaaactcattgttttctctgaagaaaagttgaagctgttcccagctgcttggcatg

SEQ ID NO: 224096 - DNA, 394 bp, Homo sapiens
gagtccttactattttggaaaaatattggtgaacgagatggatttggatgtcatgaataattgaaatagttggtataaaggcaaatgagaagggaggggaatttcagttttcaagatccagtcattcaaatgaaagatagagagaataaaattactgttaggtcctacacctttctgaacagatgtttgttcgatcaacaaatatttattgagcatcctactctgtgctagttactttttgggggctttggtgtatattagtgaacaaaataaaaaggttcctgcccctgcggaacttaatgttgtagcagggagaagctgacattaaacaataatcctaggaaacaagcctgtaatatgttaaaggtcaaagtgctactgaataaaagaaaaa

SEQ ID NO: 224097 - DNA, 264 bp, Homo sapiens
attaaatcttcacatcccttttgatcctattatatttttaatggcagaagctcccagcgagggctcgagtgggatgcaatagaagttttaacattcaagggagcagatgaacttgcctcggtttgtgtgactgaatgagaaattacccagcgcagctctgctcagggcaataggtccctttgcctgtgctggatttgggtcaaacagctaaacctcaaatcagaaaatatcagcatcattttgtggggacacagaagtgtgggt

SEQ ID NO: 224098 - DNA, 270 bp, Homo sapiens
gcttgagtggacaaatatgcttttcattcattaaattggctcttccaaataattaagtagatcttgggaaaatatatgccacacttttacaagagggtataaaaggattagtggccgagaacagaaatttccaaaatgtgagctgtgtgacactgagatagctgaaatagctttaagtggtgcttgggtgaactttattctatatactaataataatgagatattatttgcaatgggctaaagtagacatttgttaaagagatcaatcta

SEQ ID NO: 224099 - DNA, 499 bp, Homo sapiens
gagtgtgtgtagcaggttgacttttgtgttacaaagggaaaatagtaacatatgttcatacttgcaggtttctaatcctgtctccaccgcttacatctgggtaaatttgggcaagttacatgttgtgtctgggcttcaatggtatcacctagaaacgaagataatcactaccacctaaaaaaaattgggaagattaaatgagaaaaatatttacaaagcacttagcaaggtatttggttcacaattgttgtaaaaaggacagttactactctaaggggctctgccttctctatataaacttataaactttagaaactaatctgacagcctagcacctactaatatttatttgctatagttcacccagtgtatttgtacatttaaaaatatatatctcatgaagtcccagagtgcctgaggattgaaaggggacagcatcacagctctaatgctaagagatacagaccattaaggctccatctgaaatcaagtatcttta

SEQ ID NO: 224100 - DNA, 348 bp, Homo sapiens
ctcagaagcacaactgcagtaagccagtgccagtgaaggagagatgggtgttgctgtgttgcccaggcttgtcttcaactcctggcctcaaggaatctgccctcattggcctctcagtgtgcttggtattataggcatgtgccaccatgtccagactaaaacattttctaattacaaaaattgtatgcatcataaagctttaaacttgcttttcaagacaaaagaagaaattttgaagaaacaaaccgctacaaaagcaaaaataatggtaggaaacgtgtagattaagagatacagtgtatgcaccttatttagatcttaatgcaaataaaatgtattttaaaaatg

SEQ ID NO: 224101 - DNA, 867 bp, Homo sapiens
gggctcaagtgatcgtcccaccttagcctcccaaagtgctaggattacaggcgtgagccaccgcacccagcccattttgtctttctaggcctcattttctccatgtgtttaatacaggcaaaagtagcatctgccttctagggctgtgctatccaatatggtagatactagccacatgtgactatttacatttaaattaattataattaaatagtttttcagttgcactaagccacatttcattagccacatgtggctagtgactaccatagtagacggtgcagatacaaaacgtttcacagaaaatctgactggacagtgctgttctaaggttaaaggagataatgtaggttaggaccctaggttctagaggcagcttctgacactttccagctgtgtgacttcaggcaaattacttaaccttgcagggcctcattttcctcatctataaattagtgcaaatcctaatagtgcccactccttgggcttgttttgaggactaaaccagttggtactgtattttaaaacagtttactaatattaactttttaaacacgttggctgggtgcagtggctcacacctgtaatctcaacactttgggagaccaaggcgggtagatcgcttgaggccaggagttcgataccagcctgagctacaaagtgagatcctgtctctacaaaaaaatttaaaagttagttggtcatagtgatgcacgcctgtggtcccagctacttggaagcctgaggtgggaggctgacttgagccctggaggtcaaagccacagtgagtaaaattacaccactgccctccagcctgggcaacacagtgagacgctgtctcaaaaataaataaaaataaaaaaagaa

SEQ ID NO: 224102 - DNA, 517 bp, Homo sapiens
agcacctgagaaaattcagtcagtataaaataaactttctagcaattaaactacattaaaatgtggtagaaaaagagaggcatggccactattggggactaaatagtggccttggatatcatgtagaagtagttatctttggaaaagtaaaaatccaaagacacggagatttcaaaaatcaaaacacctagaagacgagtctaagatatttaatgtgagtaagtgaagaaccacaaggagaaaaagggaaacgatacaggagggcacaattactaaatactataggaaactttagttcgaaagggctctcactctaataggttccaagcaacatgggtggggttggagtgtggggacacacctaggcagataaatttcattcaaatatttattgttacttcctgcagtgacaagtactgttttagttgctgggaatacagggtgaacaaagcaatgttagttcctttattgggtggaaggaagtaaatgaataaatatgtctcaggtggtaataagt

SEQ ID NO: 224103 - DNA, 321 bp, Homo sapiens
ctcaatcatgctttagactcacattaaagggcatcctaattggtaatcagtgcataaggaaccaaataaaattttaattaaatgctgtcgtgtgaattttccagtcattttatgcctgttgagacggttttcttatttaaagtcctcttctagtgctctgccttccctctttaaactttatcaagattttgtgctttttctcatgtaagggtttaattagcatcattaaagttttagtctgctgcatatttgcttaatgggcattttggtgcagtggaaagagcttggggtttggagtccaaagtggggaagttccttaaa

SEQ ID NO: 224104 - DNA, 387 bp, Homo sapiens
agctagtctcagaaatcttgagatctctgagcatcggtggacccttgaattggggtttaggatcaactttttaaacatgtgttatgtatgaataactgagatccaaagaaaagctaataaacaaatagtagaaagatatggaaaaaataaaagcagtgttataaacacacgatatgctcctccgaatctcagtcaccaattttagtctattgagtctttcattggacttccaggcttagcattagatgttgaaactatcttaagatcagaggagctggatacagtggctcatgcctgtaatgccagctgctcaggaggctgacacaggaggatcacttgagcccaggagtttgagatcagcctgggcgacatagcaagaccctgtct

SEQ ID NO: 224105 - DNA, 465 bp, Homo sapiens
actacgtccctaggctgtatgatatatatagcctgtcattcctaggcgacaaatttgtgtatcatgtaactatactgaataatgtaggcaactgtaacacaaatggtgagtatgtgtgtatctaaacataaaaagcgtaaggtaaaaatatggtattagaatcttagggggactaggttcagtggctcatgcctgtaatcccagctctttgggaggccaaggcaggaggatcacttgaggccgggagttccataccagcctgggaaacacagtgagacctccgtctctataaaattttttaaaaaattagccaggtatggtggtgagcatctgtagtttagctacttgggatgctgaggtgggaagatcactatttgagttcagtagttcaaagtgacagtgagctatgattgtgtcactgccttcctgcctgggcaacaaagcaagaccatgtctctctcttaa

SEQ ID NO: 224106 - DNA, 377 bp, Homo sapiens
atccacccacctcggcctcccaaagtgcagggattacaggcgtgagccactgcgcccggccaaatattctttttattttcgaaatgttcaactactactagaacagaatactggatcaccaagtacctaccagtcagcttcatactcattaacatttaggtgtttaaaaaaacctttctatggccgagcacagtggttcacacttgtaattccagcactttggaggcccaggtgggaggatgcttgagcccaggagtttgagaccagcctgggcagtgtggtgagacccccgtctctacaaaaaatacaaaacttagccaggcatggtggtgtgtgcctgtggtcccagctacgtgggaggctgaggtgggagaatc

SEQ ID NO: 224107 - DNA, 260 bp, Homo sapiens
catcttcagtgagggagctctgagtgaaggaagatctgggagttggctgtcttgtggaaggtcagcgtgatgacgtctctagacttaatcatgctgaatcctgtcccttgaatttgaaaggctatacaataattttgtcctgcttatcagagccataaaaccacattaaggtatagatagagggcacagctctttcacacatgtgtattgctaatggttctgaatctagtttttaaataaagcttgtcattttctgggtg

SEQ ID NO: 224108 - DNA, 259 bp, Homo sapiens
acccccacccccaccccaaataagggctcttcaaggggcagttgccagctccagagccagctgcttgacacctattgtccccgtttgggcgtcaaacgatttcgcctgaaggaccctagcgtcgattgctctcaaaactcaaggggcctttccttcggccttgccggggccatccccacctgcgtccaggaggcgccccacagcgccggggccgggggacggcggagaagctagcgggcggcctcttccgggcaggcgt

SEQ ID NO: 224109 - DNA, 561 bp, Homo sapiens
gacaagatccgctacagctgtgtaactggatacatccttgatggccaccctcagctcacctgcatagccaattcagttaatacagcttcgtgggattttcctgttcctatctgtagagctgaagatgcttgtggaggaacaatgagaggatccagtggcatcatatccagccctagttttcctaatgagtaccataacaatgctgattgcacttggaccattgtagcagagcctggggacacaatttcactcatatttactgattttcaaatggaagagaaatatgattacttagaaatagaaggttctgagccacctaccatatggtaagtaaatagcttctattaaccttgcattgatgttgttgaagcaaactaaggaacaaagaacaactgaatgtggacttttacaggtttggatatttaaaagatcttacaggaaagttatgtgaagaggttgtcagagctgaaggatatttttgaagatcgagctatttacataaaaaatagatgaaattcaaaacttgtataaacaaataaaagttattcctattgtaaaata

SEQ ID NO: 224110 - DNA, 475 bp, Homo sapiens
gacaagatccgctacagctgtgtaactggatacatccttgatggccaccctcagctcacctgcatagccaattcagttaatacagcttcgtgggattttcctgttcctatctgtagagctgaagatgcttgtggaggaacaatgagaggatccagtggcatcatatccagccctagttttcctaatgagtaccataacaatgctgattgcacttggaccattgtagcagagcctggggacacaatttcactcatatttactgattttcaaatggaagagaaatatgattacttagaaatagaaggttctgagccacctaccatatggtttggatatttaaaagatcttacaggaaagttatgtgaagaggttgtcagagctgaaggatatttttgaagatcgagctatttacataaaaaatagatgaaattcaaaacttgtataaacaaataaaagttattcctattgtaaaata

SEQ ID NO: 224111 - DNA, 677 bp, Homo sapiens
taaccagagacaccaatcaaccaaaggcaaagcgtaagccttgattggattttggtttaggaaaaatctcataggtataaaagacaactgggaatgttgaatgtggatctggtggtaggtgatattgttagtgatgtgagtgatgcctgctgaagtactgagagatgaagcatcatattgacaacttactccaggaaaaaaggtgtgtgtataggtgtgtgttcggagagtgtgagcgagaactaacatggtaaaatgttaggtggagcatatacagttctcattatactcttattttaaatttatatttgaacacagtcaaatctgaatggaaatacatttaaataagcatttctttcagtcatataagtaatttgcctaaaaatgccctctaagtccatcattaggttaagcgatttactgaaggtgcagatatcatgcttatttcattgggttgttttggaatgtcccccacttggagagtttgaggaatggaaatgagaatcggaggagaaataaggccagaggctcacattgcttgcagggaaccgactgagtaatgaagaagaggaaggaagcccttggaaggaacgtaaaatccatttcagcctgccgccccttggaatggagggtcttctagggaccagaaacaccagacacttcttctgccccaagca

SEQ ID NO: 224112 - DNA, 483 bp, Homo sapiens
tattgagagcagtaataggtgttgctcaatattgtaacacattggtaactatgtgtgtatctaaacatttctatattatacaaccattatacacaaacatattatagatatgtttagatattacatgctgtaaaggtttgcagcctaggagcaataagctatatcatatggcctaagtgtgtaaaagactgtgtcacctgggtttgtgtaagtacacactgctgttctcacaatgcagacatcgcctaatgacacgtttctcagaacgtatcatggtcattaagcgaagcatggccctatgtgttctaaaacaactactgctcactgttacactgcattgtctcattactgaaaactttctttaagacaaaaatcttctactatatcaatttttgttggtgttgtaagtctacttgtaggtagatgggacaaatagttagcagggcaattgtcgacgcggccgcgaatttagtagtagtaggc

SEQ ID NO: 224113 - DNA, 791 bp, Homo sapiens
ggctagtttctaagtcctctatttgtgtactggatttttcccccttttacctacttgataacttccctcttacaatcattgcatcatcgattttcccctctgctgtattatttccatcaggatataggcaatccatactatttcatgaccacaaaatactctcccatgacatcatatttccctctacattttagaaggtggtaatttacagggagtcacgtgacctagctctgccaccatctcaccaatgaccttgagtttgcacctttgagtgcctttgtacatctcagttttctcatgttaaaatgaagagatgatactagttatcttggaggtctatgacatattgcttcacaatgtgcatatgcggcaacagacacagcccatctagcctgtgttaggaagatgccaagctaagcaccatagggagtggaggaatggataaggcatgcagttttctgcctgtggaaacatagggggacccaagacaggaacacaagcgactcttctgcaaggttaaggataagggcctaaaaatagggattaagttcagagcagagcagcagaggcagatcaatgaggttagaagaactgggcaaagctttatggaaggtagtgcttataatgggactttaaggatactcaaaggaacagtataaattcaaagagatgaagcagctttgggttaaattcagttttcttttgaggtaaaataaaggaaagtagagggggagggcaagatggccaactagacacagacaggtggaatcatttccaccaagggactgaga

SEQ ID NO: 224114 - DNA, 231 bp, Homo sapiens
agactgattttaaagtttttccaacagcacatactcatatcatgtatacacacaaatacacagaatttgaaatttaaaaaaaagcaaagtcttgatatgaagaataaagaaagacaaagcaggcatttgacaacccattttcagatgtttgaaggattgtcagtggagaagcagcaagctgatcttttatgacaagaaggctgaacctcctgaagctaaaacaaaagccaa

SEQ ID NO: 224115 - DNA, 457 bp, Homo sapiens
gttatattagtaaatgcttagatttatacaattattataactttctggtgaactaaatatttatcattatgtaggaaacatttttctttctaatggtgttttacgtcttatagtctgttttgtctgatattaatatacctacaccagaattgttttagttagtatttgtttaaatatacattttatttacttttaaattctctgtcattatattttagagctgtctctcataaactgtacataactagagaactactctctctgaccatctttgtctattatctattaattggaatgtttagtccatttacatttgttgtaatgtatttatatttatgattttaatttgtggggttttttaaatctttttttcccccttctttaagtttcatcgaaggcttttgtgtgtgtgtgtatgtgtgtgtgcacgtgtgtgtgtttgagacagggtctcact

SEQ ID NO: 224116 - DNA, 207 bp, Homo sapiens
cctattaggtaggtgcaaaagtaattgcggttttggcaaaaaccgcagttacttccacaccagtctaatattaaatggaactagagtcaaatagaatttagcgattgccagttctgttccacagatttcaaagtacactaaggaaaatttcagcaaattgtgtatggctgttttacttgggggagagtaaaacagccataataaact

SEQ ID NO: 224117 - DNA, 401 bp, Homo sapiens
attccacgatgtactggaagttcttgccagagcaattagacaagaaaaagaaatgaagggcatccaaattggagaggaagaagtaaaactcaattcgcagatgaaaactcccatatatagaaaatcccaaagaatctataagaaagccactagcactaataaatgaattcatcaaagttcaagggtacaagatcaacacacaaaaatcaattgtggttctatatatctgcaaggaacaatctgcaaatgaaatttagaaaataattgtacttaataataccatctaaaagaataaaatacctagaaacaaattttacccaaaagatgactttaaccaagaagatgaaaacttacacagtgaaaaattttaaaaatggctaaaagaaattaaagaagaccta

SEQ ID NO: 224118 - DNA, 511 bp, Homo sapiens
tgtgacaaatggattaatctggtaaagacaggtgctgttttaggtataaagtttagcattgatccctaagtttacttctggaatagctgctcatctggagtcatcacttgcaggccatttctggtggacccaccagctgcaagatacagatttattatttgacctgttttcctccagtgcaaggatactgtgactgttaagcagcatgcattaaataactaactcatctgttaataagtgtgcacatagactttggccagaacacattagacccctgaacagagaatcttaaaatactaatgcatttattttaggtggcaaagaactagattagtcaactaaaagcacatgaaaactgtcaactccagttttacaatctacatgccatgtcgatacacaacttgtgataatgtgaatggcatttttagcagagaattgtagtatttaaagacaaaagttcatgagtgttctgaaataatggtactttttctcaacctctcgctacatggga

SEQ ID NO: 224119 - DNA, 671 bp, Homo sapiens
tggtatttggataagacttttggggaatcaaattctacccagcaaatacttaagtgatgatttgacctgttggtggtctttccagttggcacagacacattcagagagcttgattagaaaaaaagccctttcgactgagtgcggttgctcacgcctgtaatcccagcactttggaaggctgagttgggcagatcggttgaacctgggaggccaaggctgcagtgagctgagatcaagccactgtactccagcctgggtgtcagagagaccctatctcaaagagaaaaaataaaacacaaaaaagaaaatagtcctttatacagtagagaggttcttgaaagttgctcatagagtaagatgtttattgagtatgagtactgttaataatatagagggttcattgtctttccttgttaatcttagatatgagatacttcaggtttaaacttctgtttaattcttttccactctctgttactgagtatatataaatttaaatgcaccaaaggaactgtttcttaaagaatatttcgagtaaattattgtatatttaaatattgtatatttacaataattaatttacttatatttatagtaattaatttactcaaagggaataatgtccttccctttattgggatcaaggactcccaatgtattataaacataat

SEQ ID NO: 224120 - DNA, 522 bp, Homo sapiens
ggattacaggtgtgagttgccatgcctggcccggttatctttctaaagcataaagcaaccctgttgatcctctgcttaattttgatgattaagtagtatgttcaaaatatagaaatccatgtattgataatgatcttttaaaaaaagtaaaagccaaaatatcagctactcatcctacaccattgaaagtagtgaccattaaactgctctacctctacctccacctctctacctctctacctctctacctctacctctacccacggtctccctctctttccatggtctccctctcatgtggagccgaagctggactgtactgctgccatctcggctcactgcaacctccctgcctgattctcctgcctcagcctgccgagtgcctgcgattgcaggcacgcgctgccacgcctgactggttttggtggagacggggtttcgctgtgttggccgggccggtctccagcccctaaccgcgagtgatccgccagcctcggcctcccgaggtgccgggattgcaga

SEQ ID NO: 224121 - DNA, 414 bp, Homo sapiens
tctgatcttgactcactgctacctctgcctcctgggttcaagtgattctcctgcctcagcctcccgagtagctgtgattacaggtgcctaccaccacgcccagctaatttttcttttttgtatttttaggagagatgggatttcaccatgttggccaggctggtctcaaactcctggcctcaggtaatccgcccgtctcggcctctaaaagtggttggattacaggcatgagccaccgtgcccagccaatctgatggttttaaaaatgggaatttccctgcacagggtctctttatttgcctgctgccatccacataaaatgtgacttgctcctctttgtcttgccccatgattgtgaggcctccctagccatgtggaactgcaagtgcattaaacctctttcttttgtaaatt

SEQ ID NO: 224122 - DNA, 571 bp, Homo sapiens
ttcggcacgagtcaacatttagctctaaccacatttttcttcccaagctcgtaatcatcccaagggactggcattgttttacaactcttctttttaaaaagcttccagagttcattgttttctttctccaaggcaatgtgttgacaccctagtgttgacctcttgagcagctttctaattttgttcagtgtttaaaaccaaatattatctctgatgatgctatgtcaggaaactcagcagcaaactcagtgtcatggagagttactaatagtttaaaagcaaatgggagtctgggagtggtggctcatacctgtaatcccagcactttcggaggctgaggcaggcagatcccttgaggtcaggagtccaagactagcctgaccgacatggtgaaaccctgtctccactaaaaatacaaaaattagctgggcactgtggtacgcgcctgtaatcccagcaactcgggaggctgaggcatgagaatcacttgaacccggtgggtggagattgcagtgagccgagattgtgcctctgcactccagcctgggtgacagagtgagactttgcttta

SEQ ID NO: 224123 - DNA, 351 bp, Homo sapiens
actattttaaatattaatatggcatatagtatgattccatgtatataaagttccaaaccaggaaaaactatagcattgaaggctgcatacttaggagaaaagtaaaaagaaaagcaaatgttcattgtaaatgtcaggagagtagtttaagagagacttgggaaggagcctgtgcgacagcaatgttcaacgttttgacctcagtggtggtaacaaagggtgtccactttacagtcattcgttaagctgtatttgtatgatttaagcacttttctatatttgtcgtacatttcacaataaatgatgttgaaagagaaactgaacttaaaaaataaaactatatttgactaa

SEQ ID NO: 224124 - DNA, 387 bp, Homo sapiens
caagaactctataaatcactaataaatagaggtttaagaatggcttgggtaaactggtgggttagtaagtccataataagttatgcagctaggcggggtgcagtggctcacgcctgtaattccaacactttgggagaccaaggtgggcagatcacttaagatcaggagttcaagaccagcttggccaacacagtgaaaccccatctctactaaaaaatacaaaacaaaaactagctggacatggtggcacgcacctgtaattccagctatttgggaggctaaggcaggagaatggcttgaacccaggaggtagaggttgcagtgagctgagattgcgccactgcactccagcctgagcgacagagagacactctgtctcaaaaaaaa

SEQ ID NO: 224125 - DNA, 1596 bp, Homo sapiens
  misc_feature (671)..(671): n is a, c, g, or t
  misc_feature (1083)..(1083): n is a, c, g, or t
  misc_feature (1132)..(1132): n is a, c, g, or t
  misc_feature (1284)..(1284): n is a, c, g, or t
  misc_feature (1495)..(1495): n is a, c, g, or t
tatagagtctaaatgttaatttccaaaatagatgtgcaagtagagtgttacataatttcagaggaggaggccagttctcccagcctcagaggtgagaatgggcttgtggaagagtggtctttgaactcagttttaaaatatgtgcaggattgctttatgtggaaagcagagaggaagaacataccaggtgatgagatgtttcagcaagggcacagagctgaggaaagtaacagcaaccggaactggttagcttggacataggatgcattacaaggagtaaatggagataggattttgggaagagaggctggctggagccagatgttagtgttgaattagacaatttaatcaagaaaaacttctgtgccaagagttgcaagattgagatcactttgggattatgactgttgccccattgtgctgaatggattgttatcaagatagagcggaggctctaggagagagatttctgtgtctgtgtgaaaggtaaggagggaaaggagagacactaatccagcctgtgaaatcaccttcagaattaagagaaactgataagaggaattaaagtctggattaaaaatgacttggaaactgaaggaatataggcggcaagtagagggtcaaagatgacggggtttttgacgttgggtaaatgaaaatcattggtgctnttaattcaaattgggatatttggaaaaagaatacattttaaaggaagaaaatggcacataagtttattttagtacatgctgaatttgacataattgcttcttattgtacacctttttgatgtttgcatgtttgtgaaaatttaaactaactctcttgtatgttaataaggaaataagttaatgttcatttcactaactacttgagtttctactcagttctgtgcattctgagaggctctgtgtattacttatatgggcaatgtggaactagatattcctggatgatcaatatggtgaatttttctcttttccttgtaaaaatagagttctcaaattattctggctttgagtgtaagattctgtaattctttgctttgcaagagaatgtctagataacccatctctaagaatnatgcttattaaattgcgataaagaaaaaaataggttaatgggactcagnaattagtgaaacatacagaataatagacattgagtcattgttactttcttaacccacccccaaactgggagaccccgtgccaggctggtaggaacatgggctttggagtgagacttaggttaaaatgccaactttaccactctttagcagtntgactgtaagttagttctttaacttccatgagccacaattttttcatctgtaaaaagaaaaaaaatgtgggaggaaggtaattgtgaagatcactttagataaatcgaatgaggcatcttatatcctacttagaccacaatgtggtccgtaatgaatatctctttttcttttcatgtttaggtcttgtagagtcagtgacacttggagagnaaataaatgataaaatctctaaatgttggtgctgttaataagttgtctagagcaaatttatacagtgagtttttttttaagacacaggaaaacaataaaaa

SEQ ID NO: 224126 - DNA, 411 bp, Homo sapiens
tctaaagaaaaatttgtaataatgagtgataaacaatgttagtgggctgaggggatatcatagcagaaagctgtgcggtaatcttaggcagggtcctaaaatgccctagggtaggttacattattgttcacaaatatttgctgcccctgcctggggaagacatacatcccagccccactgacagcccgcttggctctctgacttgctttggccaatgcagtacgtgtcccttccaggcggaagctttaagagccaggggcacatggtttgccatatgctttttgtccctttgcaataatagcacagcaatattctagatccaacttgtccaacctgcggctggctggccacctgtgaccagctttgaatgcagcccaacacaaattcataaactttcttaacacattatga

SEQ ID NO: 224127 - DNA, 1168 bp, Homo sapiens
gctgggagcttgccttccctccccaccaccctccgccctggcagctcctccctcctctactcccgggcaacagcagaatctggggacgtagtgggttcaagtcccaagctcgtgaggactttctgtccttgtgcttgtcgcttcatccccaggagtcggaggctcctcttttgtaaaatagggccaatggggggggggggtgctattaaattttaaaacatggaggaaactcctagtgaaatgtctgtcccagaatagatgctttgaaaaggggagctgctggaattggtcaaaaccggcgggctgtgtttgagcccagtttggttgcctcctggttcaagcacttgccagtcttacgcacaggccttgctcagatgtgtcggaatgggagcaccagggctggtggtgccctggatgttcctttcctagggaatctttgcgaaggtatgttttagactcccccaagaaccgcccagtccctgttcagttcaggtgccacactggggcagaggtagagaaaagaaaattctggaaagtggcttaattgtggaggttgggagtaggtaggacctgtgccctaggaaagggcagtgcctggcctgcaggggccttctggcacgttctcactcctcgccgttgctcttcttctatcttcaaagcagaagagattttgaagtccgaaagacctggtttggctctgctactctctgtgccacttgggcaagttgagtcatccctgtgtttcagtctcctcatctgtagaatggaggaaatactacctgcctcaaaaatggttttgtgggccgggcgtcgtggctcacacttgtaatcccagcactttggtaagctgaggccggtggatcacctgaggttgggagttcaagaccaccctggccaacatggtgaaaccctgtctctactaaaaatacaaaaattagctgggcatgatggtgcgtgcctgtaatcccagctactcaggaggctgaggcaggagaatcgcttgaacctaggaggtggaggttgcagtgagccgagatagtgccattgcactccagcctgggtgacaagagcaaaactccatctcaaaaagaaaaaaaaagtggttttgtgaggatagcgaaggacccagggcagaagctttgagtcaaatctaatctgcagagattca

SEQ ID NO: 224128 - DNA, 711 bp, Homo sapiens
aagtaggtttaggaggttgtggcagagaaaaatcaaaagcatggtgttttagaaacctttcatttttcttcatgtcccataaaatgttcatatccttaagacgcaaaagagaatctggctttctgtactttaagtcactgtcaatttgtagcatttattagataacaggaagggctgtaagagctgtgttcataggcttctattcaaaacatcagaaaatatcagggtgacatgtgacatgacgttggtctgggtgtatacacatacatatgttcactgagctgcacatttaaaatctgtgtacctcactgtatacagtctatacctcaatcagaaaaataaaagatactggctatatattaaaggaggaatcctggctacatcaatcaactttgtatcttggatgccaattatactccctttttctcctaacaataaaaaatgaaaatctaccagacttcatcatacaatgggatcagaatgatggctttcctcaagacacacatggactggaaaagcttctcaaggtgattctatctggaacagtgggagaaagggcacaaagaccattctttgacctggcagcaccatttatttcatggaacagcaaatggtgtcatactttcaaatctgatttccagaaaaaagaagaaaaaaagcaaactaaaagtaactattcaagaaaattaccaaataaaagttaaaaataac

SEQ ID NO: 224129 - DNA, 655 bp, Homo sapiens
aaaatgtaaggacatgtaaatttattcttttaatgtcatttatcctggttgaggcaaatgcccatagtctaatcccgtggtggctagtgtttcttttttttaatcatatactacaaaaacaatttttaggatacaccagaatatatgtatatgtactttttttttttttttttttttttttaagaaacagggcctcactttgttgccaaggctggtctccaattgctgggattacagatgtaagccactgtgcccagccaaaaataaatataaataaataaaaggaaatataaaaaaagatataagtataaaatataagataaaatgtaattggatatacagaaccctttttgaagaccacagatctcattaataactcattaacatttttttggaatgaaattagtgaattttgcaatcttaaggataaatgtccagtttattttctaatatcaccagtatgatattggacttaatttcttaccgaaaatgatctagaaaaccttttatacatagtaacactaattgttccatacagtttgtgaatcagaattatgactggaggccaggcaccatggctcacgcctgtaatcccagcactttgggaggctggggcgggcaaatcacttgagctcaggagtttgagaccagcctg

SEQ ID NO: 224130 - DNA, 713 bp, Homo sapiens
aaaatgtaaggacatgtaaatttattcttttaatgtcatttatcctggttgaggcaaatgcccatagtctaatcccgtggtggctagtgtttcttttttttaatcatatactacaaaaacaatttttaggatacaccagaatatatgtatatgtactttttttttttttttttttttttttaagaaacagggcctcactttgttgccaaggctggtctccaattgctgggattacagatgtaagccactgtgcccagccaaaaataaatataaataaataaaaggaaatataaaaaaagatataagtataaaatataagataaaatgtaattggatatacagaaccctttttgaagaccacagatctcattaataactcattaacatttttttggaatgaaattagtgaattttgcaatcttaaggataaatgtccagtttattttctaatatcaccagtatgatattggacttaatttcttaccgaaaatgatctagaaaaccttttatacatagtaacagtggaaaaaacttgagtcgacaatggatgcaatagttcatttatagtacatatacaacctaattgttccatacagtttgtgaatcagaattatgactggaggccaggcaccatggctcacgcctgtaatcccagcactttgggaggctggggcgggcaaatcacttgagctcaggagtttgagaccagcctg

SEQ ID NO: 224131 - DNA, 621 bp, Homo sapiens
agaaaacagcccatttactgctgggccagcactggttgttttgaaggccaaatttctcataccttttataatagcattgcccaacagaactttctgcagtgataaatgttttatatctgttctgtccaacgtagcagccaccaatcacatgtgcttattgagcatgtaaatgtggccatttagactaagaaaccgtatttttgtttttgtcttaaattaatggagccacacatggccagtggctactaaggagtgccttacttcacttaaatcagaataggaaatggaaggtcaagatctcataaggacactgaggttagaagtatgaagtcacctgctagtaagttagtaagttcctaactagtggtccttccacaaggacttattcacaacaatattattgcctttccaccaactgaaaaaagttctcaaactcgtttctgtacaatatgcctaatgaacattttaactttctaatcaagcatgaaataccattaattatgtccttctgcttatagttccacctttagttttggcacgctaaaatctagctgcccttattttgaacagtgttgagtataaggaaggaaaaataaagcttctagagcttgatgaagcgca

SEQ ID NO: 224132 - DNA, 254 bp, Homo sapiens
ctttggtccttttgttacttaggtgtgacaagttggggttttccttttgatttagttctaggaagtcagcgtgaatcagccttaggtgtcctgccttccgaccctattctcctgcttcagctcagaccaattgaacagggaattccgggatccctggtacctggaaggctgtcagggtttaggagaaggtcagtgcgagctcagtgtgggcacagggctctcagactccttgatgcatgaggaggagcacacac

SEQ ID NO: 224133 - DNA, 436 bp, Homo sapiens
ggagtttcaggcttcagtgagctataatgacactactgcacttcagtcctgcatgacacagcaagattctgtctccaaaaaaaaggaaaagaaaaaacaacttatacgatttattcattcaagggagaagtagcctgggtaagtattttagatttttcagtacaggtataaacaatacagaaccaccacaagttttgcgtaggaacaaaatggcaagttgattcccactcagaaatgactaccttcttctccacattcgatctcaaatgtcacttcatcgaaaattttctccatttgtttcttttgtttccatcaggaaacaagagctctcgtataaaaaataaataaataaaataaaaattttcagccaggcgcagtggctcacacctgtaatcccagcactttggaaggccaaggtgagcaggacattaaggca

SEQ ID NO: 224134 - DNA, 592 bp, Homo sapiens
agaaggagccagcatggacaatctcctttacagtttcggaagcaggtttgttgccatggagttcacattttgacgggagttgagaagtataaaggtaaccatttgttttagtttcaacgatctgacaaaaagataggctgttgctcttcttctggaaaagcctgattggtaagattcctttaagggctcagccccaaagagctttatcccatcccctcgcagactgaaaactaaagcctgcagagacctctgaaggaaaacctgtcccgggctctgtcacttcacacccatggctaaccctggaggtggtgctgtttgcaacgggaaacttcacaatcacaagaaacagagcaatggctcacaaagcagaaactgcacaaagaatggaatagtgaaggaagcccagcaaaatgggaagccacatttttatgataagctcattgttgaatcgtttgaggaagcaccccttcatgttatggttttcacttacatgggatatggaattggaaccctgtttggctatctcagagactttttaagaaactggggaatagaaaaatgcaacgcagctgtggaacgaaaagaacaaaaa

SEQ ID NO: 224135 - DNA, 3683 bp, Homo sapiens
agaaggagccagcatggacaatctcctttacagtttcggaagcaggtttgttgccatggagttcacattttgacgggagttgagaagtataaaggtaaccatttgttttagtttcaacgatctgacaaaaagataggctgttgctcttcttctggaaaagcctgattggtaagattcctttaagggctcagccccaaagagctttatcccatcccctcgcagactgaaaactaaagcctgcagagacctctgaaggaaaacctgtcccgggctctgtcacttcacacccatggctaaccctggaggtggtgctgtttgcaacgggaaacttcacaatcacaagaaacagagcaatggctcacaaagcagaaactgcacaaagaatggaatagtgaaggaagcccagcaaaatgggaagccacatttttatgataagctcattgttgaatcgtttgaggaagcaccccttcatgttatggttttcacttacatgggatatggaattggaaccctgtttggctatctcagagactttttaagaaactggggaatagaaaaatgcaacgcagctgtggaacgaaaagaacaaaaagtacgtatgcgcacctccctggatctttgtcaatgcctactcctctctaaagtgttctcagaagtggtgatgcaggtgcagattctagaaagcatgaggtgctcaggaactattcagggcaaatttcattcatctccacctgctaaaccccattacccatgggcttatggacctgtttttacaaacatctcatgggcaactactatttgccacataccaaactaaggcttttcccataccttgtaatatttaatttttgtaacaaccccatgatatagatattaaactataattttgaagataaaaacatcaaaatataaaagcaagtgctcctgggtgggactgtactttggtcttctagttgtaagttgggtattatttatgctctatcctgaaaaggaaagtgcatttgagtgaactgggacttttttatttcatctaaatctgatttctcacctttgacactattaatattttgaaccaattttttgggcattgtaagaattttaacagcatctgaaaaatatagcattaaaccactaaagctaaggaccctgatgaagtcactgcaccctccactacctctactggaacaggcactggtatccactgctgagagacccatagacggttcacatcacaggactctgtggagacaatccccagtaccaacttggagccgggtagactcggtgggtggcgagacccagaagagagacaacaatcactgcagtcagctcacaggaagccacatccataggaaaagggggagagtaatacatcaagggaacaccccaagggacaaaagaatctgaacaacagtcttcagccctagactttcccaaatgagaaggaaccagaaaaccaaccttggtaatatgacaaaacaaggctcttcaacaccccccaaaatataatactagttcaccggcaatggatccaaaccaagaagaaatccctgatttacctgaaaaagaattcaggaggttattaagctaatcagggagaggccagagaaaggcaaagcccaatgcaagaaaatccaaaaaatgttacaagaagtgaagagagaaatattcaaggaaatagatggcttaaagtaaaaacaatcaaaaattcaagaaactttggacacacttttagaaatgcaaaatgctctggaaagtctcagcaatagaattgaactagtagaagaaaaaaattcagagcttaaagacaaggtcttcgaattaacccaattcaacaaagacaaagaaaaattaataagaaaatatgaacaaagcctccaagaagtctgggattatgttaaacaaccaaacctaagaataatcaatgttcctgaggaagaagagaattctaaaagcctggaaaacatatttgggggaataattgaggaaaacttccctggccttgctagagacctagacatccaaatacaagaagcacaaagatcacccaggaaattcatcaccaaaagatcttcacctaggtacactgtcatcaggttatccaaaggaaaccattttaagagctgtgagacagaagcaccaggtaacttacaaaggaaaaatctatcagattaacagcagatttctcagcagaaaccctacaagctaagacagaattggggccctatcttcagccccctcaaacaaaacaattatcagccaagaattttgtatacagcgaaactaagcatcatatttgaaggaaagatacagtcatcttcagacaaacaaatgccaagataattcacaccaagccaccactacaagaactgataaaaggagctctaaatattgaaacaaatcctggaaaacagagcttctttaaagcataaatcacgtgggacctattaaaaaacacacacacacaagttaaaaagcaaaaacaaaaaagaaaaaacccaaagtacacagacaacaatgagcatgacgaatgtaatgatacctcacatttcaatactaacattgaatgtaaatggcctaaatgatccacttaaaagatacagaaccacagaatgggtaagaactcaccaaccaactatctgctgccttcaggagactcacttaacacataaggactcacataaagtaaacgggtggaaagaggcatttcatgcaaatagacaccaaaagatagcaggggtagctattctaatatcagacaactgtaaagcaacagtggttaaaaggaacaaagagggacattatgtaatggtaaaaggccttgtccaacaggaaaatatcacaatcctaaacatatatgcacctaacactggagatcctaaatttataaaacgattactaacagacctaagaaatgagacagacagcaacacgataatagtgagggacttcagtactccactgacagcactagacaggtcatcaagagagaaagtcaacaaagaaacaatggatttaaactataccttggaacaaatggacttaacagatatatacagaacatttcatccaacaaccgcagaatacacattctattcaacagcacatggaactttctccaagatagaccatatgacaggccataaaatgagactcaataaatttaggaaaattgaaataatatcaagcactctctcaggccacagtggaataaaactggaaatcaactccaaaaggaaccttcgaaaccatgcaaatacatggaaattaaataacctgctcctgaatgagcactgggtcaaaaatgaaatcaacatggaaattaaaatgttctttgaagtgactgacaataatgacataacttatcaaaacctaaggcagtgctaagagaaagttcatagccctaaactcctacatcagaatgtctgaaagagcacaaatagacactctaaggccacacctcaaggaactagagaaacttgaacaaaccaaacgcaaacccacagaggggcctgactgttagaaggaaaactaacaaaacagaaaggaatagcgtcaacatcaacaaaaaggacgtccacacaaaaaccccattcgaaggtcaccaacatagaagaccaaaggtcgataaatccatgaggatgaggaaaaaccagcacaaaaaaaggctgaaaaccagaatg

SEQ ID NO: 224136 - DNA, 998 bp, Homo sapiens
agaaggagccagcatggacaatctcctttacagtttcggaagcaggtttgttgccatggagttcacattttgacgggagttgagaagtataaaggtaaccatttgttttagtttcaacgatctgacaaaaagataggctgttgctcttcttctggaaaagcctgattggtaagattcctttaagggctcagccccaaagagctttatcccatcccctcgcagactgaaaactaaagcctgcagagacctctgaaggaaaacctgtcccgggctctgtcacttcacacccatggctaaccctggaggtggtgctgtttgcaacgggaaacttcacaatcacaagaaacagagcaatggctcacaaagcagaaactgcacaaagaatggaatagtgaaggaagcccagcaaaatgggaagccacatttttatgataagctcattgttgaatcgtttgaggaagcaccccttcatgttatggttttcacttacatgggatatggaattggaaccctgtttggctatctcagagactttttaagaaactggggaatagaaaaatgcaacgcagctgtggaacgaaaagaacaaaaagattttgtgccactgtatcaagactttgaaaatttttatacaagaaacctttacatgcgaatcagagacaactggaaccggcccatctgcagtgccccagggcctctgtttgatgtgatggagagggtatcagacgactataactggacgtttaggtttactggaagagtcatcaaagatgtcatcaacatgggctcctataacttccttggtcttgcagccaagtatgatgagtctatgaggacaataaaggatgttttagaggtgtatggcacaggcgtggccagcaccaggcatgaaatgggcaccttggataagcacaaggagttggaggaccttgtggctaagttcctgaatgtggaagcagctatggtctttgggatgggattcgcaactaactcaatga

SEQ ID NO: 224137 - DNA, 201 bp, Homo sapiens
agtttggttattacacttaaaaaatgaagtattgaggttctgagtggttttattattttaagttgggacgctgactgtcttatgaattctgtaaagaaagttggccagcatcgccttcatcatttttttttcagagttctacctaaactttaggtaatctgaccaaatatttcataacataaagtattatctttatcaaaa

SEQ ID NO: 224138 - DNA, 831 bp, Homo sapiens
actctcctccagccctgctcatctttaggtgaggaggagagaacctgtagatagactttcttaaaaaggagaatgctgacaaaatgatatgagaattcaggggttggagaggttatttgtaactgagggcatggagagacttcagtaagaaactgagctttgaaggttgggcagtgtttcaaggcacaagaggaggctgagcagcactggtgagcatgggcaaatacctggagcacactaagaggaataatgcaaatgtgctttgaggacagaagatggaaggacttgaaaactttaccagcctgggatgtctggacttgttttggtaggaatggaaagcattagaaagctttgagcagggaggcacatgaccttaggaagatgaatataaagacgtataaaactcctttggtttgctcatagaacttaataggttcttatattgcaccctattttaactaatcaggttttctgatctaaagtggtttagaagcagggatcgagaaacctgaaaggcagcagctttgactgccggaagaaatgactgcttaccagagagaaaaagacagaaaaatgcttttagaatataagaatccagaactgtaaaagatagagcccagtcaatattgaggaaatcggtataacacaagttctttgcctccatagcccctgaagacagtaattaataactctgagtcagtgtgctttgcttgaagaaggtggtaatctagtctagaaatatccccaaagtttaaataaaatacaattttgcccttgtgaaggttttcattatctagataatatatttagatatgaagcttcattcttctt

SEQ ID NO: 224139 - DNA, 317 bp, Homo sapiens
gcatattgaggacttgggatcagtcaaactcaatgcaacagcaaatcttcactgaaggtgccagcctatgggtggactcgtgatctagacctaaagggttagtgtgagttcctagaggaaaagaaagccatgaggcagattgtggaaggctttgaaggccaggtggagggccttgaactttattccatagacaatggggagctattgaaggtttctgtgcaggggtggagtgatctgtgtggagcagtgtttagaaagaatgatcaaggccaggcacggtggctcacgcctgtaatcccaggactttcggaggccaa

SEQ ID NO: 224140 - DNA, 440 bp, Homo sapiens
cctgtaaaactgtgctataggatcccttgtagaattcctttttgatgaaaataggattctttcactaagggatacgtgagaattaaagtttaaattggattactggggctttaaaaaaattgtaaaaatatctgtagcaaagttaatcattttaactctttttttaagtgtacagttcagtgggggcattcttaaagtcatgaaaatgatatgttgttgcttaatgcttttggatcttagcttttagaataatgtaaggattgaggagtttacttatttgtttatgtcatggcattattgaattcctgaaagcgtatgagtatttactgtgtggcaggaattaaattagtagatgttaggaatacaaagatgaataagaaccagcctctgcactcatcttgtttagtagggataaagtagtgtgtaaaatatggaatcca

SEQ ID NO: 224141 - DNA, 718 bp, Homo sapiens
caaactagaataccacaatagaaagatatcagaaaagtctccaaacacttgaaaatcaagcaccctatgtctaaataatttacatgtcaaagagaaagaggttagggaaaggggagatgagaggatggtgggttggttataaaagggcaacagaagggttctctgtggtattggaactgttcggtatcttgactgtgatggtggatacaggaacctacaaaggtgacaaaattgtttaatatttaatacacacacacaagtacacatgcaatgagtacaagtaaaaccagaaaaatctacataatatcaatgggttttattaatgtcaatatcatggttgtaaaattatactatgttttggagaatattatcactggggggaatctgggcaaagtatataagggctatatctctctgtattatttcttaaccactgcatgtaaatctgtgggatatagctaaagcactgcttaggggagatttatagcaataaaaagctcatcctttaacccaagttgccactaatttttgctcagaaagctctgactgcaaaactatgaaaatattagctgtattagtcgtattctagacaaatagatcatagatttaaatgtgaaatgtaaaatgatacaacttttagaagaaaacaggtgaaacttttggtgatctagggttaggtgaccagttagacatgacatcaaaagcatgagtcataaaa

SEQ ID NO: 224142 - DNA, 492 bp, Homo sapiens
agagaaaccattctaggtatatgagattctgggcccagatcacataatactattattaatattttcttaattttagaaataacgaatataaaattcctgaaagttagtaggcgttcactgaagagcaactattattattgaagaaagtctataacacattctccatcctccatcccaccttttctagacttctagcacttgattattgatagtcacatactattttgtttctctttcatatatctacatttcactcctctaaccagattataaatgcctcaaaatagaaaccgcgtcattgtctttgtttaaaaccaccctacatcacagtgtctactcaatactgatgaacagagtaagttctcaagaaacatttgatagaaattaaatagaatgttgtctgttcaaattgtattatatcttttcttaaaattttgttttgcatatattccatgtgtgatgttgacaatagtcccataatatatattgtac

SEQ ID NO: 224143 - DNA, 745 bp, Homo sapiens
aagaaaaaattgaaaagtacagtctaactccaatttggaacttgttcatgctatctgagctttacagaaatcctggtcagtagactggactgacacaataaaactataggaagttgcaaataagtttgcatatttttgaaatgagtgacctcatccctcccaaagctaacatttagtacacgtgtccccttaggtggccagcctttgctgtaactgagtcatgcttcagggtttattaaaacgctaacttgaattatgcctgattttagaaacgtattgattttcatagttgttatatctggtttattctcggttaaccctacaaaaatttgagtgtcttcttcgttcacattacaaagaaacagaagtcccccaattcctgctctgaaggagcttacaacctggtcgaggaaataaatccatggaaacttgacgagaaaaaaatgtaaaaaaatttagaataacaggtcaggcgctgtggctcatgccagcactttgggaggccaaggcaggtggattgcttgatcacaggagtttgaaaccaacctgggcaacacggtgaaacaccatctctacaaaaaataccaaaaagtgagcgggcatggtggcacatgcctgtggtcccagctacttggaaggctgaagtgggaagatctcttgagcccaagaggtcaaggctgcagtgagccatgatcgcaccactgcaccccagcctgggcaacaaagtgagatgctgtcccaaaaa

SEQ ID NO: 224144 - DNA, 959 bp, Homo sapiens
ttacagatgcccaccacgacacccggctagtttttgtatttttattagagacggggtttcaccatgttgttagccaggctagtctcgaactcctgacctcaagcgatccgcctgccttcatctcccaaagtgctgggattacaggtgttagccaccgcgcccagccccggaaagtttaattaactgatcagagtgacactaccagccaggcagaaaggggacaagactccaggtctgtgactctcaggacagtgctccttccacagggatccagattgcctcatcccacaaacatgtttgctgagcaccagctatttgctgggccagtgaattcggatcattcctggccttcatggagctaggcagtctgaaggggaagactgacttaggggaaatttgattataaagtgtcacaggtgtgggacagacagacagatgtggggccttggaagcattgaggaggggaggtggtgttacagctggttctagaagatgagtgggtaagagctaagataggaactttgttccagccagaggacaaagaaccctgggaggtgagagcaagtgcaagcaggaacattcaggcctgatcttgatggcccagcctgagagaaagcaggagagagggcagggtgggatcggagagagggcagggtgggatcagagaggccttgagtgccactccaccctgaggcgccctttgcctttaattatgctggttcccactggcatttgcgggaaggactcagagcttcagaatagcgtaccatcaccacagttagggaaggttcttcccatccttgtctcctgagctgcataaactgtgtcacactgggtcttagaataaaaattccatgagggcaggaattttaggctgttaaaccagttcttggcacatagtagacattcagtaaatatttgcaagatgaataaaaggcagtattttcccaagatatcat

SEQ ID NO: 224145 - DNA, 220 bp, Homo sapiens
aaaaaataaagaaaaaaagagccagatatggtggtgtgctacttgtagtcccagctacttgagaggctgaggtggaaaaatcgcttgagcccagtggttggaggctgcagtgagctgtgatcccaccactgcactccagtctggatgacagagcaagagcccatcactaaggaaaaaaaaagtatttttctcaaagaccgaggctaaaagattagaaaaa

SEQ ID NO: 224146 - DNA, 644 bp, Homo sapiens
ctcaaataagtgcactcagcaaattttgtcttaaaaatgtggacatattcttactttcccagtcactagcatggggggaaagaaagcacctttgcttggtagatgtgatacttggcctgatgcaggaaggagacaagcccatggactgttccagacgggatcagtggagaggagcggggaactgaaagagaggtgctgccaaggaagggaggagtggggcatggaagactccctcaccctgtgaagtggactttctgtttcattccacaaactcaagcaagacctaaggaaatcatgacatgctgagtatggctgtgttttcgtgtgtgtgtggaaggaagctggtgtacagccacagcctgcgcatgaattgacggaggacaagacacaataagaaggatggatgagggcactgctgacctccggccgggcctagccacaatgtcagtccctgctctcagggaggccctatcttgaagaagacaggctactgacttgatggtgtccccacccacaggctgctttggtggctttgaggctgggtgatcttcatggagatctctattaattatgtcttgaccttgcaaggagagaagaaaaggccctttcccccttgccctgagtttctcttctaagggtctggc

SEQ ID NO: 224147 - DNA, 296 bp, Homo sapiens
gaatccagccattccagaaagcacccccagcacattaaagaattccaaatgcttacttttctggtgcagaaagattttatcccagtgaaaattgttgatcttgctgtagggaaaaattaaactctttgaatctccaaacaaggaagtttcagcattcccttatggatcagaggaaccttagaggcctgaaattgttgcttccagtttagctgcccctcaaattcaagtgaatattttcccttctccctttacccttctccagaaataaagcaggtgacagggttttcagaatctta

SEQ ID NO: 224148 - DNA, 338 bp, Homo sapiens
tttctttgcactctgcccctgcagaaggtttggtattgttattgttgttgctgttctttttcttagaaggcctcactccatactccatctcataaataaataaataaataaataaataaataaataaatgggatttcgagaccaggctgtccaacatgatgaccatgtttgtattaacttagctgggcgtcgtggcacatgcctgtgatcccagctacttgggaggccgaggcaggagaatcacttgaacccgggaggcagaggttgcagtgagccgagatcatgccattgtactctagcctgggtgacaagagcgaaactctgtctcaaaaataatt

SEQ ID NO: 224149 - DNA, 450 bp, Homo sapiens
ttctttttcttggggaaatgccaacaagcagaagggttgggtcacatggtagtgaagtatgatttgcttcttaagcagctgcaatcaattttccaaaatgattgtatcatcatacattcccgccagccgagtttgaaagtcccagtgcctccacatcttggtaagttattattattattattgagacggcgtttccctcttgttgcgcaggctggagtacaatggcgcgatctcagctcatcgccacctctgcctcccaggttcaaattattctcctgcctcagcctcccgagtagctgggattacaggaatgctccaccatgcccagctaattttctattttcagtagagacagggtttctccatgttgatcaggctggtctcgaactcctgacctcaggtgatccacccgcctcagcctcccaaagtgctgggattacaggcatgagc

SEQ ID NO: 224150 - DNA, 343 bp, Homo sapiens
aggttaggtcagtcacccaaggtgactcagctggtcttacaacattggttctgccaccctggaaatgtgtggcttaggaactcccaagtggacatttagacacttgggagtactttagaaatgccatgttactaccgaggtccctaaaagttaaggttgggaagcaggcagcatgtctagaatgcagatgtgctttaagctgtctactgagctccatcttaaagtcttttctcattggaaataaagtgagagtttttgtgcagaaaagaatgtgccaacagtcatattctgccccaaatgagcgcctacggaatgctgttactctgataagtattcagtgctc

SEQ ID NO: 224151 - DNA, 614 bp, Homo sapiens
  misc_feature (41)..(41): n is a, c, g, or t
tgagggttatgaaaggtaagaaaaaaaaaaaaaagaatagncaaatggatttgtggaacatactagaaagccagtaagaggcctctaacaatatagtcatttgaggcatgagccaccacacccagccacaaattcatgtttctatgagactttagttatgttaaatttggcatttcaaattggtggaggaagaatgcactattcgataaatgaccttggggataattgcttaccaattagaaagaaaagatatttagaaacttcctcacacagttcacacacaaaaaaaaaattccatctccatgacaacctaaatgtaagaaagaaaaaatattagatagaaatataagaagaggatttattaccttggagaagaaatgtcttcttaagtatgacataaaagctataaaagaaaagattgacatgtctgactatttaagtgttaaaaacttcactatggccagggtagaattttttccaggaatgcatggttggtttgatatcaggaataatatctaataaattaccatagcaacaaaataagggagaaaaaagcacataaatatattgggagggccaggtgcagtggctcacacctgtaatcctagcacttt

SEQ ID NO: 224152 - DNA, 553 bp, Homo sapiens
acttgatttggagcctgcctgaaattgatttttcagaagctgaaaaagctggagtgcaatggcaccatctcagctcactgcgacctccacctcccatgttcaagtgattctcctgcctcagcctcccaagtaactgggattacaggcatgcgccaccatgccccactaattctgtatttttagtagagatggggtttctccatgttggtcaggctggtcttgaactcctgacctcaggtgatccgcccccccttgacctcccaaagtgctgggattacaggcgtgagccaccatgctgggataattttgtatttgtagtagagatggggtttcactatgttggtcaggccggtcttgaactcctgacctcaagtgatccacccacctcagcctctcaaagtgctgggattacaggcgtgagccaccacgcccagcccactttctttaactttaatagaatgaaaatacaaatcaaaccaatccaatttcttgagaataaattttgaacttgtaacaccatttcaatataaaaatgacactttgttgcctttag

SEQ ID NO: 224153 - DNA, 401 bp, Homo sapiens
ccttccgtaacagtttgcttatttccttcctgatttgttttggctctctgtccccacccaaatctcaccttgaattgtaataatccccatgtcaagggtgggaccaggtggaggtgattggatcatgggggcggttttccctatgctgttctcatgataatgagtgagttttcatgaaatctgatggttttataagcatctggcatttcccctgctggctctcattctctatcctttcaccgtgtgaaaagatgccttctgccatgattgtaagtttcctgagggcttcctagccatgcagaattgtgagcaaattaaatctcttttctttgtaaattacccagtcatgggtatttcttcatagcagcatgagaacagactaatacacttcctaatactta

SEQ ID NO: 224154 - DNA, 447 bp, Homo sapiens
cagggtctggtttgggctcccttccggcatgctggctggccacgcggaagctgtgtcggctgttctaacccagctccagaagccaagctgcggtacacgtaccacagcccattaattgagtgagctacaaagatccacccgaagccaaggggagcacacgtgaactcctgctctgactggggggggcaggagggcaggaagattcagaaaaagcaatgaaactagaaaccacacagaggccatttttagaaaataccagttgctataattaacctccagagtctttcaagagctggaggaagagcaggggaaaagaaggtgagaggggctggctggagtcttccttcacaatccctcagaactcactagttctttttttctgtaattaggtgggatattactttccagttattcttttgttcgcactattgccaagtgttcctgtca

SEQ ID NO: 224155 - DNA, 473 bp, Homo sapiens
cagcttctggctggcatatattgactcaaggctcccattgtaggtcagatggttgacagtttattaatgttgggtggtttatacataaacattgggaacacttgtcagtgactggctgagcttactaattgtaaatcagtagaaaaacattgagcaaactctccttgagtgggcacaactttaacgtgaagctttttctaaatggataagcactcattatccctgtggtattgctgggttgtatttattaggtgtgtttgcctgagttttataaataatatatgagagctagcttatatttctaacagtgcctttttttagagggcctaagtagttggctaataaaatcaccactgtccatgtgcgacacttgcggggaatttaaaaggaatttttaaaaatcactattgtgcagctactctcattgaagtgaacttaccatctaatgataaattatatctgaccagctaaaa

SEQ ID NO: 224156 - DNA, 465 bp, Homo sapiens
gtattctactctattggtttttgtgtcaataccacactgtcttaattacagtaactttgttatgataacatgataagcactatgttagagacttaccatttaatacctggccaaataatcaaagacaataaaggtaaaatatggatattgggaagcattcaaagactcaaaaattatatctcccatgctgttttactttggaacctaatgcaaaatgtgcttcagtaaaataaagagtaaatcatgacagggattcagtaaacatgtgagccatagaacactactaaagagaaatcctgggatgacagctgtttagcgggtgtaggggagaaacaatccaaatcagaacatctaaagtacataaaactgtgtttgagtgttttgaaaatgttaatattcaaacattttttattatgatttcaaaaatcatagtcaatgtttgactaacatttcaaacatgactgt

SEQ ID NO: 224157 - DNA, 326 bp, Homo sapiens
taaataaataaaaataaggttctctaaatgactgctaaattagtaggactaatcttcatagtgatttagaattggtcccattagtttgagattgaaaattttctctagctgtttacaagatagttcttatatacttaaggtaaaatttccttatgtcctgttattatattccttgcaatctgaagtaagactgaaataattgtaataaatcaaagttcatctctacccaccctcaagcctcttatctaattataaatggaagcatggaacttgtatttgaattccaattattgaaataattgttactaaaaattttcccaaggcaa

SEQ ID NO: 224158 - DNA, 226 bp, Homo sapiens
tgttgaattttaagagttctttgtatattttagatacagtttcatattgttttttaaagcccttttattccttattaggtgatcaagccacctgcaggctatttttaacttgtgactttattattagtaataccaactttacattactagaaaataaggtattctgtataaatgaaattttcaaataactgaaatatactttttttgccacaaaaaaaaagttagc

SEQ ID NO: 224159 - DNA, 256 bp, Homo sapiens
aagaaaagaaaaaaaatgtatttagcctttaggcctgggacacgggaatatgaaatcaaaacctttgctttgagaagttcacaggcttatagagagaacaagacagagctaactctgaggaatgtgtccagaattcaagagcaagttcacaagcacactggggtataatcaacagatggtcaaaacctgcagcactcatgaaacccttcttggtggactgcactccagcctgggcaacggagtcagaccaggtcaa

SEQ ID NO: 224160 - DNA, 574 bp, Homo sapiens
aatgattccaggggctgtggctgtccttgggtggttacattctaaggtcttgatccttgcattttcaggcctagagactccttatgtcctcccacccagaaatcattagctctcagatactggtgaattattgtataccaagctcaacttgaaatcaacagatgctacgttaacacatgctttctgtagccagatctccttgggaaacctagtagtcatcaaaaagctactcagtgactcaatgatagggagttggttgtgtataataacaagtggcatcaaagctataatgacattgtatcccctttcgatcaaccactcaacatttgtctgcactggcagtgcacctttactgaagaatattagattgctaatgtctgcctctctctcttttggaagtatcatgtaaactgcccccttttgttgttgtacagtataatacagttaattcagatttaagtcttttgtgtttacagattttagttattccatttctcttccctccctacacacatatcaccttaattatattgttgctatgcctaaacttgagtaaaaaaataatttgaatgtc

SEQ ID NO: 224161 - DNA, 412 bp, Homo sapiens
tggcctttgtgttaggaagacaagagggggtgcatgggacttgggaaatggaaaatatgtagtccatctgaaggtggcagctgctactcaattcttgtagctttattgtcacagggaaatggcagcccaacattgtctgatcattttactgttttagagagaaaccagaaatctaacattttatgggattattaaatattgaccaatagtctttgtgccaaataaaacgggtctgtgagctgggctgggccactgaacactaagctttgagcacagttccagagacttccttctctttccaacccaatctatcttaaacactattttaaacaatttcaccctctcaaagtgtaattcacatcatgttcctctcctgcttaaaagttttcaatagcttcccactgcctaccaa

SEQ ID NO: 224162 - DNA, 581 bp, Homo sapiens
ggcctgaacagtctcaagaacgagagaggatgtttggagttccacttcccatccagacagcactggaagcaggatcccatggcagaaatgcccatatgatcttcagtaaatgtatatgtgtcttcatttattttattttttaaattatactttaacttctgggatacatgtgcagaaagtgcaagtttgttacataggtatacaagtgccatggcagtttgctggaccaaccaacccgtcatctacattaggtatttttcctaatgctagtgtcttttttttttaatgatatgtgggtcctctaaagtattaagacaaaggaagaagcctcttttgcttgtgcctaaatcagactgatggacaacactcagatttacttgaaaaatatagcatattttgaagaggagagatttataatgtcagtgaatgctataacagaggaaagaaatgtgatttatcatgtgacttaatatatgtatttctaagtcctagaatattatccattagcattatcatatttatagcaaagtatatttttcttcctttatctaaagtaccgagtgcatttaattatttatttt

SEQ ID NO: 224163 - DNA, 514 bp, Homo sapiens
tcgaatgaaaatatttagttttaactacgtcaaatggttaagaaatgcaaaaaacactgcactttaccttgaaaaagacctgcagtgagcttgtggaggtcagagggttgcagcttgtgagttactgtgaagtgggggaaggagggcaatcttagtggaagggaagcttgcaacaccagctgtggatggatgtgacccacagttgagagggaggccctggtgaaatcggaggtttgttgtgtgtatgtgttttgtgttttcctacacaactccacagcattctgtagtcacttggtatttctcagggatgaaatcacacataagcaaacatgaaattcaggttaagctcccattgttctgataaatcttggtactgggataaatttgtttcagcataagtgttatagcagaagtcactgtgttcaagtttattcactgcaccattgtgtacggtgggtccatcaaaggagaactggctaaatacatgcatgcactcataccacaagatgccgtg

SEQ ID NO: 224164 - DNA, 361 bp, Homo sapiens
agactttaaaagttcatacacagacacacccaaaacagggaaatttaaagcatcaaacatttttatcacccggtgcaagtacgtgttaccttgtattcttttttcactgagtgttacctctggtacacattcctgtgtgctgtgttgtggacctatgttgcctacctgccatcttcgatggtgtcatcatattatgatcattttaatggtcagagttatttcatgtgtctatcttgacttctttccaagtcccctctgttttaaatgaaactcctgaaaacttctgtggatctagggtttagggaccatttccttgagatctgtcaccatcctggagcctttgagtccaagagtgaagcag

SEQ ID NO: 224165 - DNA, 378 bp, Homo sapiens
atgagttgggaagtgttcctctatgttcttcaaaagtttatgtagaaatggtatgtcttaaattcttgataagacttcagcagtaaagccatttgaccctgtgggtgagtttttaaactataatttctctagtagacataaacctattcaggttatgtttctttttgaatgagctttagcagtttgtgtctttcatgaaatgtgtccatttaatataaacagtaaaatttggccgggcgtggttggtggcgggctatagtaccagctactcgggacgctgaggcaggagaatggcgtgaacccgggaggcggagcttgcagtgagccgagatcgcgtcactgcactccagcctgggcgacacagcgagactctgtctc

SEQ ID NO: 224166 - DNA, 305 bp, Homo sapiens
gtcacccaaagccgtgatgacagcccgcttttctctggtggttctactcaaccgctccactgaggtgatgggagaggtgaggggcccaggaggaaggtggagctcaaaggcactgtcttcatagtccacaggtctcaaactccagcatctcagaatgaaaggattcacaagtgctcacaagaggcttggctgccaggggaagctccgacctgaagatttgaactaatgagggactataaaggccaagaccttgttcttgccattttagagattcagaatataatctacaaagttagagattataa

SEQ ID NO: 224167 - DNA, 727 bp, Homo sapiens
tccttacgttgtgactgttaattttaaaagccccttgagggtttagtgtggtgctaagctagggggaagagtccagcgggagggtgcagaggaagtagagaacaggtgcctcctctgtcagtttgtcaggcagggctgaggggaggagcctgcaggaatgctaaggacttggaggagcgggctctgggctctgtggcagctaagatgccaaagaaaacaagggctaaagaaaccccgctattgttcctgcccagctctggcatttcctgctggagcagctcctcccccaggtctctcctcttaaggccggaggtcagtctgtcctttcttccatgggtcccagcgctttgtccccagccaatcatgccagctgtacatgccagttgtacgcaggattttcttctgggcctgggacttgggctggacaatgaccctgatgaccccagaggccattgggggccaggctcctttgctgctgaacttgcctccagttcgcaccctttcacttgctttctcatcctctctccccaggcactgtcttcatagtccacaggtctcaaactccagcatctcagaatgaaaggattcacaagtgctcacaagaggcttggctgccaggggaagctccgacctgaagatttgaactaatgagggactataaaggccaagaccttgttcttgccattttagagattcagaatataatctacaaagttagagattataa

SEQ ID NO: 224168 - DNA, 375 bp, Homo sapiens
gagtagggggtcttgccatgttgcccaggttggtctcaaactcctgggctcaagtgatccttccaccacagcctcccaaggatctggggttagaggtacacaccaccacacccagtttagtctaccagtttttaagtgtcatataaaaagtaaattggcagccgggcacagtggctcatgcctgtaatcccagtactttgggaggccgaggcaggcggattgcttgaggccaggagttcaagaccagcctggccaacatggtgaaaccccgtctctactaaaaatacaaaaattagcggggcatagtggtgcatgcctgtaatcccagctactcgggaggttgaggcacgcgaattgctttaatccgggaggtgg

SEQ ID NO: 224169 - DNA, 448 bp, Homo sapiens
ctgtagacttccaagctgtataatttggattcactggccaaaatctcctctgagatacttacatttttaagagtctatggtctcttctcttcaagggcatgtatatggtgctgagtgtatgtaattttctgagatctatcaaagtatcaccattttctcatgcccaatgaaactgtggtatatgttattcatattctctgtcatttccagtcctcttttctctctgagaagacagaaaaattacagttctctacaaagttataggtaagcatgatcatgtgacctgctttggccaatgaaaatggtaagaacatttaagagacaatttatttcttgttctttctctgctgtagaaaaccctaaagactcatgtcgagatggtcacatcaaaaagcagccaagcttctgagcgtataggtccctgaacgtccaagataagcatagcccc

SEQ ID NO: 224170 - DNA, 508 bp, Homo sapiens
gtaacccgtgtgcttcttcgagatctgattcgtagattgggactgcccttctggatcggctcagataacgggcctgcgtttgtggctgacttgctacagaagacggcaaaagtattggggatcacacggaaactgcatgccgcctcccggcctcagagttccggaaaggtggagcggatgaatcggactatcaaaaataatattattgtcttccccgctggatatgtaaaacaacaccacgaggggcatcaaaccacctgctacattggagggaatcttatcctctccccacctcctccggtcccggatattagaggcaataacacaggggtaatgtacacccactgctttattgggagtaatgtcatcctctgccttcttggatattaggaacaatatcacagtgtgcgtgtatgcctgtcgcgaaattcaatggaatgtcatcctgtgcctccctggatatgacgaacaatatcacgggggatgtacaacttctgagatattggga

SEQ ID NO: 224171 - DNA, 406 bp, Homo sapiens
aaaaggggctggtagcaagatctgttttaccacttatgtaaaaagctcctctacagagagcaaagcataaagtgagacttccaaaattgctttttatcaccagagccattggctaaatagttgaggacccacaagcaaacttctacattggcaatttcctttctagcatcatttttcacagtcataagtcatgttataagaattttctaattgctaatgatggtccttgtaaggaaatatatgataaatgttactataataataccaagacctaactggtacttgtggctgccttctatgaagtcattcttccccatttaaacacataagagtctgccttacatcagaatgagacgtaactatcccctgttagtgtggttttaaatcttgaatctaacagctaatg

SEQ ID NO: 224172 - DNA, 668 bp, Homo sapiens
gggatttggatcctgccagctcgtccctgcaaccccctactccggtcccctcaaacctgtccgtggctggcagccctgtgatacctcgccacattctgcaacagaatccgagatagaggtagaagtgggggagtacgtcgtggctgtcagggcagctttctgtaaaatgctgcctggaggagcatgtgattccagaccctcctctctgcaacgaaagtgaggttgacacctgcaggcctggggcctcctggcccactgagcagaacacacagaagctgggcccacccctgccctccccacaaagggtcacgggagccaccgcctgactttgaagcccactgacttgcggctgacaagagaaaagaatgtgcccctgtgatcatgtgaaagcatcagccaggggtccaagaacttccctctggagcctcacactcccagcgtggcacccagcagggaacagattctctccaaacctttgtgaatgaatgaaggatgacgtcactagaatccatccctgttttattttttatttttattttttgagacagagtctcgctctagcctgggcgaaagagtgagactgtatcccaaaaataataaaataaaataaaataaaataaaataaaataaaataaaataaaataaaataaaataaagcacactcagtt

SEQ ID NO: 224173 - DNA, 314 bp, Homo sapiens
aagtcttgttagagatatttgcccctagttaaatggctccagctatgcttttgttagttctttctcctttttgtggtttttatgtatcttccttgactgtgagactcaacctcttctccctaacctaaaataattactaaaggcaagaaataattactaaataattacttaagatatatggcaattatttttatttctatactactatttctatttctatttctatgtgaattaccactactactatttctatattaattacagatgagatttttatataaatgatcccagtggaattagaagtaatatctagg

SEQ ID NO: 224174 - DNA, 673 bp, Homo sapiens
agagggagttcttaacctctgtggcagagcaacctgaaaacagaattatactccatacacatagctacaatgcctcatgcagaatgctcttcccaaaaccgtgctcaaggatacaaacccaggctgtccaatttggggaaatcattgtttgagggtggcacagacaagcagtcggcttggggtttgctccctgtgcacagctcgatcatcaaggaaaggcctcttccgggcctcaaagctccctttgtgaggaatgaggcccactgtcgaggctcacacaggcagctgtaaccaggctgcccctctctctgggtgtttgttttgatagaggttcatttatgccagagacaatgcccgctctctttgttctgcccccagcaggaagcagtgcagggagggggaccagcattgtcacacagcttccaattcaggttttggtggccacaacaatggggcctcaagggccacaaataaagagccgctcacggggagcagggcagagagactggcacatgtggaccccagcacaccccaggtagaagtcacctcctaacaagtgctcaggctcactatcaagggctttgagggctctgaggttggggagagggaggccacctcctcttctcttaagtggtgctgggagggagaagtaagcaaggtccccggggatgac

SEQ ID NO: 224175 - DNA, 782 bp, Homo sapiens
ctcttccttatagaataattctaattaataaatgtagaagaaatgagaaaaatatagaattaccactaggcaaataccacagtagtaacccttgcgagcaagatccatccatagataatagaaatcaatgggtcaaagtttgaggaacaagaagatatttatcaatccaaagggagaaacagtaactttaccatggagaaacttggcagacaccactttaaacaagtaatcaaggttaatactaccaataaaataagacatagcaactacaggtaccccctgaaaaaaatgcactatgaaggacacaacatcacttctctggtattcttgacaaaaaggcacaacctgaatccaaaaatgagaaaacatcaggcagaaataaacttagatattgtacaaatcaattatcaaagcacaatacgcatcaaagtgttaaagtcatgactaaggaagtgtcacagagtgaaggatactgaagagtcacaacaaccaaatgcaacgtgagatcctgaattggttcctggcaccaagaaggacatgaagaaaaaaacctggtaaaacttgagtaaggtctgtagttgagtcagtaatactataccaacatgttaatctcctagttctggtaattgcactacgattgagtacgttttaacattaaggaaagctgggtaaagagtatatatgaactcttctgtaatattcttgcaacttttctgtaagtttaaaattatttcatacaaaatcagattaattcaaaatgtctagggcctaaagacaaatta

SEQ ID NO: 224176 - DNA, 598 bp, Homo sapiens
tccacgttaacaacacttggtatggtcattctttttaatgttagccattctatttttagcccttctgtgtagtggtgtcttattatggtttgatttgcatttccctaatgactaacaatgttgagcatcttttttttttttttttttttttttttgagacggagtctcgctctgtcgcccaggctggagtgcagtggcgggatctcggctcactgcaagctccgcctcccgggttcacgccattctcctgcctcagcctcccaagtagctgggactacaggcgcccgccactacgcccggctaattttttgtatttttagtagagacggggtttcaccgttttagccgggatggtctcgatctcctgacctcgtgatccgcccgcctcggcctcccaaagtgctgggattacaggcgtgagccaccgcgcccggccgagcatctttttcaagtgtttatttgaagggttcaggccttttcccacattttaattgagttgtgtttgttatttcattttgattattttaaaatatattcttggtacaagtcctttataagacgcatgctttgcccatattttctccaggtccatcacttg

SEQ ID NO: 224177 - DNA, 735 bp, Homo sapiens
caccatgcccagctaattttttgtattttttagtagagacagagtttcactgtgttagccaggatgatctcgatctcctgaccttgtgatccgcccacctcaacctcccaaagtgctgggattacaggcgtgagccaccgcgcccagcccctctcttctttttttaagaggcaaggtttcgttctgccacccaagctggagtgcagtggctcaattagagctcactgcagcctcgaactcctagactcaagaaattctcttgcctcggcctcccaagtagctgggactacaggtatgcaccaccatgcctggataactttttaattttttgtagagatggggtcttgctatgttgcccaagctggtctcaaactcctgccttcaagcgatccttgaggcctcccaaagccctgacaatataggcctgaacaactgtgcccagctatcttatgagataagatatatcctcctcaaaaggcttgcaggaattatgactttatcattaaatctgaaagagggaataacaaaatgctcctttttatagggaggaaaccaatccattgagtagaacgtcctattaaacactgagaaggataagatacacattgaagaaggatggattttttccccccttgagacggagtttcgctcttgtcactcagcctggagtgcaatggcgcgatctcagctcaccacaacctcctcctccctggttcaagcaattctcctgcctca

SEQ ID NO: 224178 - DNA, 433 bp, Homo sapiens
cagtgaccactccctgatatgctgcagatgcaattgagtagcagcttcattccacatttctccaacatctttcatggtgaggtcaagagcatattcaaaaccatgtgtggctcagtccaactggagagaccaagtcaaagagcctcatttccataaggcacagagttaagaagtggcaagttaacacagccagagcatgcacagaagaaaacttcgacctcaaataacacctagaaccaaagtccctaccgcagaactaaaagattgggatgtggctggaactcaagcacctaaacactttcaaaaggctttgccttccagtgtctacttggccttccagtgtcagacagcttcttgcacctgacccacccagctgaggacacagatgtcaaaaaaaaaatcataaatacagaattccagaaaattttaccaa

SEQ ID NO: 224179 - DNA, 454 bp, Homo sapiens
atcatctttagaatttgatgagaaagtaaaattgcttcctcactgtcctcaccggattcacagggggaaatgattcagaggcttttgcctttacctcctagagcatgttcttgcaactgttgggctagtcttatctggccaaactctgttactaacagaatgtctagttattttgcaggcacagagttaagaagtggcaagttaacacagccagagcatgcacagaagaaaacttcgacctcaaataacacctagaaccaaagtccctaccgcagaactaaaagattgggatgtggctggaactcaagcacctaaacactttcaaaaggctttgccttccagtgtctacttggccttccagtgtcagacagcttcttgcacctgacccacccagctgaggacacagatgtcaaaaaaaaaatcataaatacagaattccagaaaattttaccaa

SEQ ID NO: 224180 - DNA, 405 bp, Homo sapiens
gataatttattttgtatttttgaataaaaaacatttgtacattcctgatactgggtaaaagagccatgtaccaatgtatggctttcaacttaaatcactgaggcatttttactactattctgttaaaatcaggatttttagtgcttgccaccaccagatgagaagttaagcagcctttctgtggagagtgagaataattgtgtacaaagtagagaaatatccaattatgtgacaacttttgtgtaataaaaatttgtttaaagttaaaaaaattttttttaattagtgaggcatggtggcatgtgcctgtagtcccagctactcaggaggcatgggtgggaggatcagttgagcccagaatgtcaaggctgcagcgaggcataatcaaggcacttcactccagcc

SEQ ID NO: 224181 - DNA, 655 bp, Homo sapiens
taaaaatggtatggaaatatatggaactaagttatgttactagaaaatcaaattagaatttgtaaatctagaatcaaaaaagtatagacaatttcagttgaaataagtttggggttaaatcaactccttttgttttaaaaggctgattttagttactgatagtttatcattatgtatgatgatagttttaggatggcaaatctattttcataaacacagattatttagtcagacaatgaaaatgtttttattagcaggtatagcaaagaaaagcagatgtcttataataaataggaccttgtgttctaaattcagaattatgagtgatctatataaaattggggaaaaattacaggggaaggggatacctcatgcctacaagccctcactgtttctgaatgtcatgttccttctactactagaagtgatggtctggactatgttgtaattttttacaactcatgatgtgaaaaaaatatcatgtaaatatatttctgctatttttcttaaaatgtataaaatctatggattaggatttatgttcctaaaaataacaccctggtattctacaccaaagaagaaattataaggggaaggtgataattaacaaatatttagaagactttatggaaaaactgattttgtgttacctata

SEQ ID NO: 224182 - DNA, 874 bp, Homo sapiens
tggtcttcatgcaaagtctttcttagatagcctttatggctccttctggctctgacattgtatgatatactattgattatttcccctggaaaactttctcactgtaatgtgttccttcattgcctgtgagaaggagcacaagacaaataaaactttttttttatcctggtatttttccaggctcctggtattagaatgtttgaaatgaaattatacaaaatgtcttcagataaattatgagttcttgggaaattatgtttgaatttgctggtgacagataataataataaataggtagaaatgaagatatgaataatgcttcaatttcctaaatgccaaaatatggtacaattagacatttgtttaaacttccttgaatgggtgttactttcctgaggtttaactttaaattagtggcctgcatttgcattcaattcaatgaatctattggggtgactaacctccttatacagtaacaagagtcacaagaggttaaggctaggcttctagaggtgttaagtcatctctgatagcagtgtatcctacctgcttttaaaaagaacattttagtaaggataggaggtatacgttagaggaatatataatttgctttgtttgtaacaggaatacctgagaatgtactgatgaccatgtaaacaaggtacagtttagggtagaatttctgcagatataagcaaagttttggtacaacaaatggttaatttatcaagtcttctattagtcaaggattgtttgagagtatgctaaaactgttgtctgttccttaaccgtgggttttcattgtcttgggatgagaatccatgctttcagattgccagaattctggaagtgttcacagctaggggaaaaaaag

SEQ ID NO: 224183 - DNA, 484 bp, Homo sapiens
atgagaaaagatacaactgaggcatatgaagttctaataaaaaagtataaaagaaaaatgtgagaaacatactcccagataaaccttgtatgacagaagaaaccaaaagtaaaaattatttagaaagcaataaagatataaacgcttcatatccaaaggagcaaaggctgtaggaaaatgtataaccttaaatatgctcatcatttagaaaagaaggttggtattcatctagataaattataaaatgatttttaaaaaataaaataaaccaacaaagagaattaacacagattaaggccaaaattaaggaaataggaaatataaaaataacagaggttaaggacatccacaagtattttccctttaccagtagataatacacttacaatcctaattaaggggggaaatgggagaaaacaaaagtatacaagattgcaaatgagaaacaataggataatgaccacaaatatagaagaggttgaaa

SEQ ID NO: 224184 - DNA, 375 bp, Homo sapiens
ttattatttttttaaatctttgtaggaattatcatcctcccttatcaacttcattttaaatgtcattaaaatgaaccatattacatgaatgtcttcttaattgtaccatagcacagaaccttgctcatagttgctaaaccagcatttctttaatttggtaaattccccaaagaggaatactaccttttaatatagaaagttaaattatttcctgcagcatatatttatattcgaagtcataattcaaaattttaaaacaaggagtacttatctataaagaagcaaataaatatgcagtcattataggaactcagatttcaggaaagcacatggattattttcattgatttaagaatttaatcatgttactcagta

SEQ ID NO: 224185 - DNA, 468 bp, Homo sapiens
gatctgggcacaaatgtgcaatacattggcaggaggacagttcacctatacctaggatgtgttagacttttaaaaatgaactagttgataaactagcctctcatttttccatgctatgtacaaatataactctagaattctcacacagacacaaagggaagataaatgacatgtggctctactttgttattagccctggtaatgttttctaaaaaaattccttgggttttcatcattatgatgtaattgtttttatacggtttagagatgtttttcaagtgccttctttcctctagtaagtgacatattcacattacactgttcgggtgagttactattcttcccaaaattgctaacacatgtattttgtaaagagtaaaagacttactacatctccatctctaaaagcagtgtaatctaaagtttccaaatttcttaattgtataataaataatggattagaataca

SEQ ID NO: 224186 - DNA, 490 bp, Homo sapiens
ggacatgatacaatcgagctcggtacctctcatggcattgtgtgaactaatccctattatttgggtaaatattgattcttgggctgtcactaatggacttgcaattggtctaacaagtgggtcacaaataactggacaatagaagggccctccatgtgaggagctgctctttggaaatctctatgaaaattctaagggaaaaatcaaagtagggcatgctgatcccaaagaaactctatgccagaattttaaggtgattggaaccaacagttgatggcctaacttgatctcttgaaatggcaaccaagtctatgaaatgggtggaggaactcaagccagccagtgacgcactgaacaatgacatataccagtgggctccattgaagcttaaactattaataaaaattgtcctggcatagataattgttgtcatggcttaaaaaaattttttttttaagagatggggtcttgctatgttgcccacactgga

SEQ ID NO: 224187 - DNA, 1055 bp, Homo sapiens
tgcggtggctcatgcctgtaatcccagtactttgggaggctgaggtgggtggatcacctgaggtcagcagttcaagattagcctgggcaacatggtgaaaccctgtctctactaaaaatacaaaaataagccgggcgtgctggtgggcgtctgtaatcccagctacttgggaggctgaggcagagaatcacttgaacccgggaagcagaggttgcagtgagccgagatcgcgccattgcactccagcctgggcgacagatcaaaactctgcctcaaaaataagatggacaatgtccaaagaagttctgtcataaaatggaaatgaactatatgcagcatgctaccaggggatctatgtgaaagaatcatcagattcatgagcaagtagtcttttcctcctaggatccctcctttcaattatttgcccatggatgccaggcaattggactggttcacagatgactgttctagaactgagggcaattctgtatgaaaagtagatgttcagagtccagcagaaagtaaaatcctatggaaaaagttaagaacgagttggtcaacagggctgaattataggctataatcatagtcctgatagaagaactggacacaaaagccctattatttgggtaaatattgattcttgggctgtcactaatggacttgcaattggtctaacaagtgggtcacaaataactggacaatagaagggccctccatgtgaggagctgctctttggaaatctctatgaaaattctaagggaaaaatcaaagtagggcatgctgatcccaaagaaactctatgccagaattttaaggtgattggaaccaacagttgatggcctaacttgatctcttgaaatggcaaccaagtctatgaaatgggtggaggaactcaagccagccagtgacgcactgaacaatgacatataccagtgggctccattgaagcttaaactattaataaaaattgtcctggcatagataattgttgtcatggcttaaaaaaattttttttttaagagatggggtcttgctatgttgcccacactgga

SEQ ID NO: 224188 - DNA, 81 bp, Homo sapiens
caccaacagaagctgctcccagttcaagtataaattcctggggtaggaggtggggggaataggaagagagataattggtgg

SEQ ID NO: 224189 - DNA, 464 bp, Homo sapiens
acttcactccagcctgagtgaaagcaaaacttcgtctccaaaaaaaaaaaaaaagtttgttttggtaagcctagtataattgattagttttgtccatgcaactttccccttgttggactctgtacttaataatacagtatttagattctcatttagtatcctgctttctctgtcgatttgatgaaggtacccaaaatgattcctaaactaacacatgaaatacgtgtgtaaaacattgctgttttaatctttagttttcctcatttctgatgtaaggcattgtatagttgttctactataaaagatgtagaatatggccatgtagtgcctcactgtaagttagtacatgtgtcttgagcaagtggaaatatcaaaacattgatactttgcttctccctaatcatttggaatgtcctgagatggatactatttccagggcaaaattaaaccttccagaaaagtag

SEQ ID NO: 224190 - DNA, 543 bp, Homo sapiens
aaacagagttgaaatttactcttcttataaatataccttcctactgaggaaacaatgatgaaagaacttccagaagtaattttttgcggacaataaaatgtggagggaaaaatcctgtacatcatctttactgtcatacattgtcacaggatttagaggggaaatatgcttttatctggggaattagggctctattgctaagcagctgagtacaggtattttcactttccctgcacagttatctccaaacaatatttgcaaataaaatagttatttcatttttcaatatccaaatataatttttaactatatagtaagtcatacttagtatagaaaatttggaaaaatacagaaagacctccagaaaaaaataaaaataacctgcaatcatataatctagaggtaatttgaatgtatttccttttagaatgtgtttctatgtgcttatgtctatatgtattttttatataagtggaatcacactgcacatacattttagattcttcacttctctctataacaataaacatgttatttaatggt

SEQ ID NO: 224191 - DNA, 515 bp, Homo sapiens
caaaaaaagcagtaattaatggttcccttaattgtcttcataaaatatttgcatgggtctaatttgcataatttgcatgtattaattaatctttcaaaggaattttgtgctgagagaagccaaaaaatctctttgttttatttaagagctaatgaaatatttatcttctttaatgaacttctcatcttcattaaaataaaaattgcacaagtttgtatgttttaaatgtttttataattgaagtattcaaaaaatctctttagtcttacaacagctgaaaaacaaacatattattttgcattcagtatcattttaacaacagcaacactttaaaataaagaaagttcaatttcactttctcaaagatggcaaatcatatggcaaatacatacagcgatttagttttaaaaataagatttataaagaccagctcattttttttaatgacaatgttatttttatggctgaaatactgggcaattagagggtatgggtatttttctcatccatatgag

SEQ ID NO: 224192 - DNA, 363 bp, Homo sapiens
ttcttaaacagattgaaagcattagaaagtttaaaaatataaggtagaaaatctgatgtaaataatcacctgttgtcaaatttaataaagaactgaaaaggcttgggtatataagaaatgtaactgatggatcttaggggatatgaaaatcatttcccacccctagcactttccttgaataaagtgacatgataggcttttgttcattcaactcagttgtacactaaatgtaatgtctcaccaccccctgcctttttggttgttgttgtcacctattttgggtctctacgtttaagagtcaggactgttttgttcatttgctgtgcctggtacaatgccttgaatataataaagaggtaccta

SEQ ID NO: 224193 - DNA, 233 bp, Homo sapiens
agggttgacctggcgaaggctaagtttgcagaaccagacctcacatctcagctcagacattggtaactcaggcagccctgacatggttttagtgacacttgaggtacattaatgacataaccttccctacctttgtctctctacatgccacagttgtgtttacttactctagtcactcactctaatcccagtccatgaaaccaagcctattactgctctgtggactttactta

SEQ ID NO: 224194 - DNA, 634 bp, Homo sapiens
  misc_feature (169)..(169): n is a, c, g, or t
tttggtttttttaaatattttcctgactttttaaagattttattgggtattatttaatgcttccattttaccttcagtattgactttttaattatgcctcttaaaaatatttatcttcatcggtcacaaaggaatagttgtgtttttgttgtttcacagttgtcttaantattatctaaaacaatacaattattttttttctgtttgcatgtcttccatgtttttacagggcagagtattttactctctcggcttccacattttttcatgtcattattaaactcatggaggatacaaccagaagctgagctctgaagagggatgaatacagagggctaccagcacagtgatagcagttctggaagctgggctctgaggagggatgaatagagggctaccagcacactgacagcagttctgccgtaaactgccacatagctggcaaaaagggcaagcacggttaaatcataagatttaatgaaacattatttaaaaaaattctttagaacaatgggaacagtgaattaagtttactatataccagccattaatttttttttttttaaaatacagggtctaactctatcgtgcaggctggaatacattggtgcaatcatagctcactgcagccttg

SEQ ID NO: 224195 - DNA, 555 bp, Homo sapiens
gttattcgtaaaaagtctgtcaactataacatagttaaaaaagaaaataaaaaatgatcgaacaatccatcactcaattatcttgtaatatcttgtttcagtctctttcttctggcatattttgggatggtgacctatttttccttcttttactctttatgctgtctctcagaaatctgctggttaataatttattgtatcattatactattttgtaaaggcaatgtaatgttacatcagtattactgatgtacttgtgataaatttgaattaatgtactattgttaatatgtactattgtactatttttaatttaaaatcattgtgagaggtgacagcgtgctggcagccctcacagccctcgctggctctcagcacctcctctgcctgggctcccactttggcggcacttgaggagcccttcagcctggcgctgcactgtggcagcccctttctaggctggccaaggcagagccggctccctcagcttgcagggaggtgtggagggagaggcgcaggcaggaaccggggctgcatgcagtgcttgcgagccag

SEQ ID NO: 224196 - DNA, 428 bp, Homo sapiens
actaatatcactgccattgtcttaatggtgcctacgtctggaacaataccaatgtttggcatcagcagaggaaaccaaaaagcagattcagagattaatttctaaatttaggtttacccccaaagagctcacactcatttctttcaaaacactgtgtttaacttgactttgcatgtcacttcttctgaaaatgtgagcctttaaaaacatcttttcacttttcaaaatgatttaccgcaactagaacaaatggtattactgatatttgacaaattgttttaaatgttaacattggtcgtttctgccaagcatttattttttgttttcggaagaatatttgtcttctgttgagtcatatggctgttcctaaattatttggctggaataattattaacagtttgtggagaggtccttccagataacgaaa

SEQ ID NO: 224197 - DNA, 356 bp, Homo sapiens
gaggtccacagatcaccaggaagcccatgtcttggcatggtaacctggaggagcctggagacgccaggtttcggaatctcattcaccacgctgcccagggaccaaggaagagggacccagacacagaccgaaaaccaggaaagtgcatgggactcagtgcccccccctcaacccagaatgcccagattgcaggctgaaccactgcagggtctgcaatgacatcgctctgtacaaggctcagatgtggagcctgggaggagatgatggccaccagtggcatcccagcagtggactgaggcgccggatttcatgccttaagtgtgcactgcccccaaaaataaattttttatgttact

SEQ ID NO: 224198 - DNA, 490 bp, Homo sapiens
cgggcgctgccctacccatgcccgcgccctcctggacaccagccccgtctttctgctgtctgaaagcccccacgcctgcctcttaggccactctaccagtcatgattctcctcatgtaaagaagtatgtaatgatttcttctgtgtgtctctagttctgaatttatgaacaataatgccttagccataaagactctatttttaaaaattgcttttagtgcttcgaaggcttagaaaatctacaggcagacttttaattaaccaaagtaatatctatcaatttttaaaatggagaaccatcactccaattgtaccaccctggcacaagcatcattaatgtttatttataaatctgtttagtgttttattgctgtgtgtactatgtattttaacatagatattaactatattgctgatgcaatttggtgttctgtttctctcatttaacatatattttgcatactcatgaataaaattttaagactgcttaa

SEQ ID NO: 224199 - DNA, 423 bp, Homo sapiens
acattaagagaatgattctcatgattttataggctgaacattgatctttctccctacaatttaagtttcaactatgttttttaaaatacctagtcttttcttaaatgaccaaaacaatattagttttgactgtgtgtagtagttgttaataataatagcaataacagaagtgcctggcatttattgagcatgtgtgtatactacataactaccatacactgggtcagcactggtttagtaagtgaagcaatcacttagtaaaacaggtgtatttataagatgaccactggtctgtcatgagctttgagtgatgttacgtgacactaatggacttctactgaactgttttgtcaacatcgtagtatttttagcttttttttcttttttgagtaaacatggagtgtctcataggggccagacccc

SEQ ID NO: 224200 - DNA, 517 bp, Homo sapiens
gaagacttacttgtgatccatgcaagaatgtttgtagcgccccatgatttgtaatggaaaacaaaattgggaacaatagaaatgtccatctttgagaggaagaaactctgtgatcacatgtggagaatgcccaagtggtgaatacgaatgaaccagagtgagacctagtagcccgaacgagcccagatgtcatgctgagtgagcacaggaagatgcgggacacatagaaggacagcgtgtatgtgttcaaaggcatgcagagtgacgacatatgctattcaaggatgcgtgtggatggagcagaaatgttaacacacatgggaataacaaatcactacgtccgagacagcgattttggggagcacacagggaggggacttcatctgggaggaacgcattattaggctgctgtgacaggtgtgtgggcgtggaccatctctgtacctttgtatatgtctggaatattgcataataagtaatagcttaagaaagagagagagacagccagggtgtgtgg

SEQ ID NO: 224201 - DNA, 217 bp, Homo sapiens
tcattctgcttttgggccggagactgggctcagacagggctagggacttgcccaaggtcacactaccctggtgggtcgcccagggcggaagctcccatggggtgagcgggctgcccgctctggcatgcgctctggctggctgtggagtcgggatctccactcccatttcggtcctgacacgcactggctctgtctgaacctcagtttcctcctcggc

SEQ ID NO: 224202 - DNA, 369 bp, Homo sapiens
tttgtatttttagtagatacggggttttaccatgttgatccggctggcctcgaactcctgatctcatgatcagctgacctcggcctcccaaagtgctgggattacaggcgtgagccatcgcgcccagcctagaactttttaagtagaacctgtttaagataatttgatgacttaatcctcaaaataataatgtcctctatatattcccaaattcaaaacacttgtcatttcatgagtactagctatttcatcatcatgatgagcaaaagagaacaaagctgactccctaaaatatcttcaggaataccggaaaattatggtacgaatagaaagatgtcaagacaatcaagcaattaatagatttcaggg

SEQ ID NO: 224203 - DNA, 428 bp, Homo sapiens
ccattcatatactttgagcctgtccatgtttatatttaaagtaggtctcaggtaaacaacatataactgagttttgcctttctgtccattttctgtgttttaattggaacaccaaatccatttatagttaatataatttttgatatggttggaatgagggctatcattcatccactgttttctgttgttccttttgaaagctgccatttgggggttaagggaatatttattatttaattatttaatatttattattataattctgtttttattggttttgtttttgttttttgagatgggttcttgctgtcacccaggatggagtgcagtggcacagtcatggcccactacagcctcgaactcctggactcaggccattctcccacctcagcctcccaggtactgggactacaggcatgccactgcac

SEQ ID NO: 224204 - DNA, 622 bp, Homo sapiens
cctcagtctttcccctttcagttggcgggcccccatcctccctgatgcgtaactcaaaagccttcatctatgaccactacttctctcacatagtatatccaaatccataacctatcttcttagtatcttctacacacacagtcagactacttctcactactctgatctgtgttctggattgctgcaataatctgctgagtgaggtccctgcttcaacttttgccccttttaatatattcctcaaaataggagccggagtgattccactgaaatgaaatacaaccctttagcagttccttatctcactcagaattaaaattagcacctttaaaatggcttgcaaaactccatactgtttggcccttcacttactctgagccagccacaatatttctcaaacctgacaggcatgctcttgctttagggctttgcccttgctgttccctctgcgtggagggggcccctcccctcagatatcctgagagctcactcctccttcttcaggtctttgctctcagagaagcccgccctcaactactctatttaaaattaaaatttccctagtccccaccaatccctatcttctgtctctacttactacagtatatgttgatcgctacca

SEQ ID NO: 224205 - DNA, 524 bp, Homo sapiens
attcaatgtatctgcttcatcccatcccttacctattgtcttgtgtgccctgagatgatgaacacacattttgttgccattcctattattaatatattatagctctgtggagggcaggagctggcacccagccttcacacggcaggagcaggttgacattctatctggactgacaccgactccataactagtgctcccgagttccatgtgtcatccacttgttatccaagcaactgcactgtctcctagcgaatgatctcacagtattctgtgtctgctcaccggtctgtcttgagaggacccattttatgttttactgatgcatattactattaaaagcaagaattttacgtgatctatattttattttagattggtatattactaaatattatatgttaaaattcattttaaaataataacagatttaaagattttgtattgataagcactgtatacttttaaatacatttcaaagcctgatttataaacatcaattaaaaaaaagtataccatgaaaggtt

SEQ ID NO: 224206 - DNA, 633 bp, Homo sapiens
cctgcctcagcctcccgagtagctgggattacaggggtgcaccaccatgcctggcttaatttttgtatttttagtagagatggggtttcaccatgttggccaggctgctcttgaactcctgacctcaggtgatccacccgcctcggcctgccaaagtgctgggattacaggcatgagccaccgcactcggccaggactcaattttgaagttcttatgcaagcaaagctgcccatatctaggagtttatgcacacagtactgattcaatacctgcgtcttagtggtccatcaggaatttttcactcatgaaatatgactttaatacacgtgttgggaccagagagaaaaccttccctctgtgcatctttttttggagaacactgtcatgaacagccgaaaacatcagatcaaaagcgagagggatactgacaaaacagggagtgcggatttccactgtgggtggggacattgggagacacggtgactcactcctcagtaagtgcattcttaggctctttactctgtgtgcatttttattttctcatgggcaacaatataatttctttcaaacatgaagagccatccagcatgtttctcaaaggcagacttaaatgatatgaggggtgtgcctaa

SEQ ID NO: 224207 - DNA, 542 bp, Homo sapiens
ccgggctgcaggctcgtgccgttctttttttgtttatttgttttgcttctgttttctgtaaatatctatttcttattttggacatgcagggatcaattgagattctggagtggggggaggggcggatgactgggtctttttattttttcctttctctcttggattttggtgtttgaacttgaaaaaaataattacaagtatatatataagcaaatgacttacctttaaacaaaagaaataagttgatttcattcttttgatttatcttgtttctcattggggtcgggtgggggtggggggtcttttgggtggagggcttttttgtgagctgtatagatttccagtttggacttgttcaaatgatgcaggaacaaaaattaaaacgaattaaaaaaaagacaacataaaaaaacaagaaaaactttgtgatgtataaaagctgtaaatagtcaaagattctttctcttttctaatggcaaattatttctgtcactttatattcaaaaaataaagaaacctaccacaaattatcagggttaaaa

SEQ ID NO: 224208 - DNA, 737 bp, Homo sapiens
ccgggctgcaggctcgtgccgttctttttttgtttatttgttttgcttctgttttctgtaaatatctatttcttattttggacatgcagggatcaattgagattctggagtggggggaggggcggatgactgggtctttttattttttcctttctctcttggattttggtgtttgaacttgaaaaaaataattacaagtatatatataagcaaatgacttacctttaaacgggtgggggtggggggtcttttgggtggagggcttttttgtgagctgtatagatttccagtttggacttgttcaaatgatgcaggaacaaaaattaaaacgaattaaaaaaaagacaacataaaaaaacaagaaaaactttgtgatgtataaaagctgtaaatagtcaaagattctttctcttttctaatggcaaattatttctgtcacttttatgtttgattattttgtaacctaacacatatttttaggtgttctataattatttataattctgattttttggccgtcctcattttcatctattttcgcttttttcatttactggtcgttcctttacatcttattcttgtgaatatctttttttgcttactatactgctttgtttaattacctcttttctttttgtgttttcttataggtctgtctctgtctgtctattcaaatttggtttttcttattgcactttctatatgtcatcgtcttttgctttacatctcttgtatcg

SEQ ID NO: 224209 - DNA, 438 bp, Homo sapiens
  misc_feature (237)..(237): n is a, c, g, or t
  misc_feature (239)..(239): n is a, c, g, or t
ccgggctgcaggctcgtgccgttctttttttgtttatttgttttgcttctgttttctgtaaatatctatttcttattttggacatgcagggatcaattgagattctggagtggggggaggggcggatgactgggtctttttattttttcctttctctcttggattttggtgtttgaacttgaaaaaaataattacaagtatatatataagcaaatgacttacctttaaacgcgtgtncncatctttctactttgctccttctcttctcttccttttcttctttcttttttagtttcctgttctctcttttttatgctttctttagctctatactcctttacttttttttctcttttctctgttctctacctcttcatcttctattcttttataactatcgtccttattcttctctccctcctgctctccttttcgtcc

SEQ ID NO: 224210 - DNA, 432 bp, Homo sapiens
gtgatggcatccggtttctgtgttaaaaaatgacccttcctgctgtgtggagaatcgaatgtagtcaggggtgtcagtcaggagacacattcaggcagccagacaagaggttttatgaagtaaataaagtggcagagagatgacaagaggtggagggatttgagatgtgttctggatctgcctgctgattgcacatagttgctgaggagcggacgagaaatgcggagggctttgatttttggcttaagaaacttggtgggtgctgagaagaaggaagtgggagagggagtggtggtaggaagtcaagagtcctggttgggcagtacttggtttgcagtgagtaggcatgtgaagtggggagctcggttaggactgagtatcttctctacatcatccaggtgctatttagagccttcatgggagtgcatttgg

SEQ ID NO: 224211 - DNA, 388 bp, Homo sapiens
ggaagagattagcgtttgaatcagtcaactgagtaaagaagattcaccctcaccgatgtgggctagcaccatctactccattgaaggcgcagatagaacaaaaagggagacgaaggatgaattctctgccttcttcagttggcacatccatctcttcctgccctcagacatcagtttccagttctaggccttcagactccagggcttacaccagcctctccaccctcaccctggttcttggagtctcaggcctttggcctcagcctgaattacaccacaagctttcttggttctccagcttgcaggtgttttattgtgggacttctcagcctctgcagtggtatgagccaatttccataataaatcccctcatctatttatcgctaaa

SEQ ID NO: 224212 - DNA, 392 bp, Homo sapiens
cagtgcttggcaacaggaggggctcaactgtgtgtcattatcatcgattcagcccccatgtaccattctgagaaccccacctccgctagaagtgagcctctctcctctgagccctgaagttctgtctgctcctccattcagcctccctgggctgaccttggggcagatcctgtgctgggctctggaacatagagcagaaggagtggtccttcctgcaggagacacaggctcattgggggatagccacaggctcacaaataggcatgacacaaggtggctgggctagaagaggagctaaaaagtgacatttcacattctgtcacactctaacaagattttttttaaaatctggctctcttcctactgactaaaagtggtttaactaactccta

SEQ ID NO: 224213 - DNA, 417 bp, Homo sapiens
gattacaaagaggtctgacttttggggtgctgctagctgataaagaatgctcattaagcaagttgctctctacaaattactctcactgcatttcataggcaccttttcaaacagataaaatgtttgggtgtataaatctcagaatggtaggaaaagaacagaccagaaattgtggccctgtgttgaaggtgatggtaaataaaatagttcttgtcatatactatgtggcataagttagggaaggacgaacgcatttctcgaagagatgtgaggggtaggggtggttgagagggtgagagaacaccttggttcttgctgcagtgatccagaaatccaattcctgagtaaaatgcagtcttcttaaacctcttgcgttcacccctgattttcgtactcatgaggcccatatgtgcatta

SEQ ID NO: 224214 - DNA, 171 bp, Homo sapiens
cgggggggagccttgaaaattcgtggtttctaatcatccttcagtcatccaccagttgaattgtattttcaacctggaccagtttttaatatacagggacccttttatctggagcccagggttctgggtttggatcctggctctatctcttacctgctatgtgggcttggg

SEQ ID NO: 224215 - DNA, 162 bp, Homo sapiens
ggcagaagtggatcaagtcaattgaagtcagaggggattgcaagcccggggcttcagctaagagaccctgctttcatccatatgaaggcgtatggctccaggaatggagagtcacagaaaccgtgcagagcagggggtggctgatgctataactgataggag

SEQ ID NO: 224216 - DNA, 654 bp, Homo sapiens
agcccaggaagaataaagcttactcaagactgcaaagaggccaacacactagaaatcagaaatcttgactcctagcccaccgtcccctaaaacatgggcttttttcttacacagagatgaagatggggtaaaaactaaatacatgagtttttaaacactgagatggaaatgtccaggtgacatacatgccaaaatgtatgtagtgacctttcagtgaaaaagaaaaaaaaattgagactagaactccattataaaaataagagcagactgacttcatccctgacatctattagcatttatgcattttactcactacgttctgagggtgctatggtttgaatgtctcccccaaaagttcatgtgttgaaaacttaattgccataggaacagtattaagagatagggccttaaagaagagattaggccatgaggactctgtcctcatgaatggattaataccattatcacaagggcagttattatggaagtgatttcttgattaaaaaaaagaaagatgagttcagcccaagttcttctgtgctttgcatactcgctgctgcctttctgccttctgccatgggataaccctcaccaggtgccagtgccatgctcttggacctccagaactgtgagccaaataaactggtctttatc

SEQ ID NO: 224217 - DNA, 408 bp, Homo sapiens
agaccccagggtaggtacaggcaggtgaagcgggtatatgcaggtgtagtgggtatatgcgggtagagggtatatgcaggtacagcgagtacatgtgggtgcaatggctctgtggacacacaggccctcccctgactgcctgttgtcccagcctgagtatcagttgtgttctgaggcttctattctgctgctatgggtcagaaggaacaacaatttcagccccagggcctagtgggaggagtcaggtccaagactagcctgaccaggagaatgagacgtgggaagagttggggaaagtctgggaagctcagaaaaggcactgcccctggaggcccatgccctttaacatgggagaagctggtgcgggggtgaccacaggcagctggaacctaccctccttttctatgc

SEQ ID NO: 224218 - DNA, 388 bp, Homo sapiens
tcctgatcacgtgcctggccctgagcatccacattgccttctagatttccaaaactattgtcacagccctgaattccagagggtgtcctttccaagtcttccttcctagggtttttcaacaagactatttttgccccaactgatatccttttctcagatgagtggggtcagccatttccatttaaatgtttttaacaggcatttagttattgatttgagatttttctgctttttcattgatggaattctgctgtaagcttccttcagagcatggttttcaattaatcctgtaagttttttttttaggttttgtctactttttcatttatcttaaaatactgtcttatactacttgtggtttcttttttggccttttattattttggaa

SEQ ID NO: 224219 - DNA, 463 bp, Homo sapiens
aaaaagtgcgtgggagccttgcttctcaaagtgaggtccaaggaccctcagcgtctgcatcatctggtttggggagcttgttagaaacgcccagcggcaagccgggcccagccctccagcaccagcaccgcattcaacctgatgccaccgattcctgtgcacctgagaggccccatggctgagccgtcccctcctccaccgcctcagccctgccagccccctggaaagatggtggaaactacagaccccctggcctcaccccggggatgcaggccgtgctggtttggctgagcctggtgcctctgtgcttctctagggctctgcaggtgatgctaaagtacagccggctgagaaccgctgccctgggccagggccgtccaatagaaacacagcatgagccgaagatgtgcttttcattgtctagtggccacattaaaaagatgcagatgaaactcaaagcggg

SEQ ID NO: 224220 - DNA, 360 bp, Homo sapiens
gggaactactttcctgaaacttgctatgctgcacatgacttcgagttgcagtgattcgcccggaggccgcggcttttagtcctacccacacaccctcacagcctgggcaccccgctcggcagccccaccccgcgcccgctctggcctccggggaaagcgggcggccgggagaagtcgcgagggactacttcgcctccttctctcgcgggcgcccccggttcgggcagcggctgcggcggcggaaggagcgggcggcgtgagcgcttccgccgcccccctcgcggctcccctctctcgggcgtgaggagctggcccgctgagctgctggtgggcactggctggcggggaacctgcagccgc

SEQ ID NO: 224221 - DNA, 602 bp, Homo sapiens
tatttattttgttaaaacactaaaatagtatagaaatctttctgagcaagagttaacactaaggttaactctattattgcggccaaagatagagaaagaaataagtggagcattgatatctaatgattactataatggctgatgtactccttaaggaaagagttttattgccatcattatattagattttaatataatagaaagtaaaaacaagaaattgttcagaatgttgttaagactcaataaatacttattgaacatctatgtgttaggaactatgctagttgtttacacagatattagccaaacagaaacgctgaggaggggtacttccaagtgtattttacacaaagcatacaccaaagctgagagttaagtaacttgtccaaattcacaccactaataatgtagaagtagtataatagcaaaggtcttcactttaaattcagtgctttttctattatgtctggttttagtgctgtatttagggggtaacttttaaaaaatttaataaaactttattttgaaagaaggaatgatttgtgcagtgctttcttcgtttcggatgccaagaaagtatggtagcaagtgctaacttctat

SEQ ID NO: 224222 - DNA, 495 bp, Homo sapiens
ggaatgggaatgtttacccaatgcctataccaccattctatcttagaagtaaatagttaattttttatcttacaggattataggtagaaagaagatggcttgaatctcagatgagattttggacttttgagttaatgctggaacgagttaaaactttgggggactattgagaagggatgattgtattttgtgatgtgagaaggacatgagatttggggggccagtggtggaatgatatggtttggatgttttgtcccctccaaatctcatgttgaagtgtgacctccattactgaggtggggctggtgggaggttttggatcatggaggcagatccctcatgaatgacttggtgccatccccatggtaatgagttctcaccccggtagttcactcaagagctggttgtttaatagcctggaacctcccatctccctcttgcttctgctcttgccatgtgatatgctgggtccccttttgccttccactgtgattg

SEQ ID NO: 224223 - DNA, 223 bp, Homo sapiens
ggtgtcactttctccctcaaattacacctgtaaaaatctcttgctcatggtgggcggaacttcagggtctagctgactgcctagcacacggtgggaaattgttaggttgtttgctgaactgactgtaaagtgtcatagtcaatattcaagtgtaaatagcagggctttaggtgagtactgttttagtccctgtctctttatttctcacagctgctgcaaggga

SEQ ID NO: 224224 - DNA, 334 bp, Homo sapiens
tggagctggcttttgacaagatggacacatgttcctttttttctcaggaatgtggtgattctgaaatgcctggcccttcggctagcactcagacttctgtgtttatggaaggcagtgtggtcacatgtggcccccagctctgcccccatgctgagtcagaacacaactattaacgatagggcggggagatggcttaaaaaaatctgtggccgggcgcagtggctcatgcctgtaatcccagcactttgggaggccgaggcgggcggatcacgaggtcaggggatcgagaccatcctggctaacatggtgaaaccctgtctctagtaaaaataca

SEQ ID NO: 224225 - DNA, 523 bp, Homo sapiens
cacaaagaaggtgacaattaagctttccctagaagagtgaatcagatttcttcagagggagacagtgaaggtaaaagatcattttggttagcatgaggaaaggcatggaggtgtaacggtataagatgtttgggatgttgtgacattacattgcatcaagtctaccaataacaatatataaacatatctgtttcatactttgtaatgaaaccatctgttaattgagaccttacctcactttttattgattttccccttagtttagtttctttacagtcagatttttttaaaactgtaggtcataaaacaaatttagcagctctctaatagcatttctttaaaattgaatagcatagaagagactataataatgtcaagtagaaaaatatcagagtgcaatataatagtaaagtacgtaatgtttttgtgaaacatacttagtttatttgtgtctaagtgttctatgtgtctgttccataatgtatttcatattgtgggtcacaataaaaatttgaaagccact

SEQ ID NO: 224226 - DNA, 481 bp, Homo sapiens
agttcatactaaaagatattttgcaaatacactaaatgggaaaaataagcaaaatcccatttaagtaaacaatggaggatttgaaggagaaaggaatagagcacggacacgttcagaaatgacactgaatccctgtgttgagtctacagagacatctagacttaaaatagatcatttatatttaagtttaaaaggaggatgagactgagtttttgtagagttataattacattcaaaatatacttttttgcattgaaaaaatgttaaatttttgaaaagcgaatattgatgtcattctattctcaaatcagtagatgctgtgtcttcatttctagtgctgatgtgaaaacacatggtcagttgttgctgcgtcagagatatgagaaattcttttctcttaggtgtgcatcactgatatacttgtccgtgaaaggtgaaagacactgaaatgtaagatgcgtgagtaaaatcttggtagaga

SEQ ID NO: 224227 - DNA, 940 bp, Homo sapiens
agttcatactaaaagatattttgcaaatacactaaatgggaaaaataagcaaaatcccatttaagtaaacaatggaggatttgaaggagaaaggaatagagcacggacacgttcagaaatgacactgaatccctgtgttgagtctacagagacatctagacttaaaatagatcatttatatttaagtttaaaaggaggatgagactgagtttttgtagagttataattacattcaaaatatacttttttgcattgaaaaaatgttaaatttttgaaaagcgaatattgatgtcattctattctcaaatcagtagatgctgtgtcttcatttctagtgctgatgtgaaaacacatggtcagttgttgctgcgtcagagatatgagaaattcttttctcttaggtgtgcatcactgatatacttgtccgtgaaaggtgaaagacactgaaatgtaagatgcgtgagtaaaatcttggtagagaggctctttgtggttgttttatatacttgtaagtgatttatgagataggtgtttagaataatactcttctgttagggtcaccctgatcagaccgttcccttcccctcccacaggacttacaatacggtcccttgtgctctctgcacagctaccccagggcaaaaaacaaaccccccttcactgatccctccagtaactgtgcagacagttacaggatgcggttaacatgtctgttcacctcgcataacaaagctggcaaaaaacatctccaggatgcagacaagacacctgcaccctcgactaagctcccccaccccaacccagttctcctgcacccccaactcagctcccgcaccccgacctagttctggccctataaaaacctgctatagtctgtaagcagggctgcctcctctaactgtggtggagcagccaagcagctcaataaagcttgcttgcc

SEQ ID NO: 224228 - DNA, 590 bp, Homo sapiens
cacaaaaattctatgagcctgaattgcaaactaatccttacaaacaaacccactttgttaatctgatattccccaaaagcataatcaaatcacaattattcaaaaatgaattgtctatattttgttaagactttgcttccaaattcccaatggcattaatagacatatttgtttactgtagctcagcaagtattagaaagaacttttcaaccaaaagaaatagagctctctcctgtggaatcgcatatgcgctgcaagtttgttgagagaattaaatgcaataatgaacgtagtaaagtgctaagcttcatacctggcatatggtgagctcaataaatgttagctatgatattattatcagttatgtaaatcagttaaaaacaacaacagttcttcactgtttggtgcactgcatcattccagagaggtatgaggtccattcccaacaagtatggagaggagaagagagacaggaacaggccaggaaacagaaaacttcccagctagagccaagccatgccttcacagaagtgtccgcttcactcagctatgtgtaaccacagctcccaatgaccaattactcagaagga

SEQ ID NO: 224229 - DNA, 526 bp, Homo sapiens
ggtccacacatctcatttcaagatccaggtaatttttctggattagatggttttcacggtagagggcagaaactcaagggaggacagagccaaatttagccaatgcacttaaagcttctgtgtagctgtgacacaccctgtgagcccatattccataggtcaagacaaattgcatgggaaatatgatgaggaaagaaaaaataatgagtaattcaacctactacaccccagatatccacgagacttactccttacttccttcaaatctttgttctaatatcaccatctctgtgatgccctccctaattccaccctatttaaagttttattactcttctattttctgtttcccttccctgatttatttttgttcctaacacttcatactatctgacatattatctaatttacatatatatatatttttattttatttactgcctttcccaactagaatatttgtaagcaccacaagcccagagatgttggtttttgtttattactgtgtactcagtacccagaatag

SEQ ID NO: 224230 - DNA, 456 bp, Homo sapiens
ttttttggagacagggtctcactctgtcacccaggctggaatgcagtggcgcgatcttggctcactacaacctccacctcccaggttcaagcaattctcccacctcaacctcgagtagctgggagtacaggcacgcgccaccacgcccagctaatttttttatttttagtagagacagggtttcaccatgttggccaggctggtctcgaatcctggcctcaagtgatccacctgccttggcctcccaaagtgttgggattacaggtgtgatacaggtgtgagccactgcacccggccagaagatagggtcaaacatcaaaaacagcaaggtctgatctgatgcgaaaaatctctgaagcattccggttgtttgttaatatataaatgaagcacctataaaatgatggatgttgtcaagaatgtatcgggccctaatcttaggtggtttaagccaag

SEQ ID NO: 224231 - DNA, 755 bp, Homo sapiens
aaacaggattgagtgaaccggacgctaccgtgagtttattctcccagggcatacataatctcatgtgattaccacatagccctgttagataatctgttatcctgtcctcattttacccatgaggaaatgaaggcccagagaggttaaatgacctattcaaattcactcagaaggtggcagagatgagttactatcattgtattttggatctctggaaagaaagaaaactagtgatggtattaaaaaatgttattaatagtttcttttaatcaaccaggaacttgagtcactagcttctctgggtgaaggactatacttcaacagtatgaaaaacggaaaagaaaatgaggaattttggctgggcacagtggctcacacctgtaattctagcactttgggaagccaagggaggagggtcgcttgagctcaggaattcgagatcagcctgggcgacatggtgaggccccatctctacaaaaataaattagctgggcatggtggtgcatgcgtatggtctcagctacttgggaggctgactcaggagggtcactgcaacctccgcctcctgtgttcgggtgattcagcctcccaagtacctgagactgcaggcgtgccactaccgtgcctgactaatttttgtatttttagtagaaatggggtttcaccgtgttggtcagcctggtctcgaactcctattctcaagtgatccgcctacctcgaccttcccaactggccgggacctctagaacaccaca

SEQ ID NO: 224232 - DNA, 406 bp, Homo sapiens
aaacaggattgagtgaaccggacgctaccgtgagtttattctcccagggcatacataatctcatgtgattaccacatagccctgttagataatctgttatcctgtcctcattttacccatgaggaaatgaaggcccagagaggttaaatgacctattcaaattcactcagaaggtggcagagatgagttactatcattgtattttggatctctggaaagaaagaaaactagtgatggtattaaaaaatgttattaatagtttcttttaatcaaccaggaacttgagtcactagcttctctgggtgaaggactatacttcaacagtatgaaaaacggaaaagaaaatgaggaattttggctgagccgaggggcccggccagactattggtttgggttgatttggccg

SEQ ID NO: 224233 - DNA, 556 bp, Homo sapiens
gagaatacctccctccaaattttatccaagaaccagccaatggccaaaccccactcaaaagagaaaacatgaacactaaaatattccatgtactgaatatttttaaagcaaagttaggattttctaggtttgtttccatgggggaagagggtggtaattaaatgatttacagaagaattttacaacctcttcattttacagataaagcaagcaagacataaagaagcaaatggttttttcaaagtaaccctgatagtcaatagcagaaccaaaaccagaatgcaagtgaaaaaatccagatttgccaaaaccttcctattggctctatgagagactaacttctgagtccgggctatcctgatgatactgacagggtccccaaaagctatcatgcctctctgagtatgttctcttggcaacctgaaatcactctcttccttagctcctctaccatctgtaattaattattctataacttttattgaagactttctcccctgcaatagtagaagctctactattatgctgggaacataataaatgtttgaaaatattt

SEQ ID NO: 224234 - DNA, 276 bp, Homo sapiens
agtaactgaaaatcactttattccagctggcctatttccgaatggaaaatattagtggtctttgatagtttagagaaacatgagggccatttaatgtcattgctacaaccaggctgctcttcaccgtgtttgggctgctgtggctctactggttgataaaatattgaaacactttcttatcagttgatgaataatacaacagtaaccgtgagaagtggtaaaactaacaatataattttcaacataaactcattcaccctagctgattttgtagga

SEQ ID NO: 224235 - DNA, 274 bp, Homo sapiens
gagcacgaggcgtgagtcactgtgcccagcctgttgtatttatttttctagattacagttaattttgttttcatttcttgaaacctagtagaatatgtatctgcctataattcaagggcaattgaaagaaagaaaaataactcaaggccaggcatggtggctcacatctgttatcccagaactttgggaggctgaggcaggaggatcatttgagcccaggagttcaagaccagcgtgggcaacataatgagactctgatgctacaaaaaactta

SEQ ID NO: 224236 - DNA, 640 bp, Homo sapiens
tcttatctttctgaaggatgcccagatcaaaattgttgtgagcaattaaaaaaataatttaagacctgtaatttcaatatttttgatatctgttagattaaaaaatgttatttttaatgtgccatttataattttaaagaacataactttgatctaaaagtaaagtcattgtaatttactagctgcctataaaagtatttttaaatgtgttttcccatatgaagatagtaatatttattaagaagaaccgcttcttaaggttttaacagacctaaaacgagtcctacagttgagaatattgtaatatacatcatacttctaaaactttatgtcatcattacacatgagaatatcacagataaatatataatatgtatacaataaatatatatgatataaatatgtaattatgctactatatttatacaaaatgactgaactctgtgtgtgtaatatcccataggagacagacagacagatatcattaacttaaaatcacattaagaacatgaaatttgtaataacttgctaagggttgatacagactatcaatgtcatatatagaacaaaaaagtgtttttcaaaaatagtagctattatatttaatgttctcaataaattaatattagtcagggttctc

SEQ ID NO: 224237 - DNA, 441 bp, Homo sapiens
tgtcaggtaagattgcaggtggcagatgtcacctaatatttggatgaatattttcaaaatcagttttttcctataaacccctaatggattatagaacaacttccaagcctgtgctttcatgagtaacttaagttcttaactgcagtatcactgaatgtgagaagagttgcaagtaatatgctaaaaagctttcagatcttttcttttctttcacagcaaaaggattatagccaatgacatggctagttacatttcccagcctccttcccagttaattacaaccacatgagtagtttttctccagtgtgagttggcaggatgtgtaccacttctgggctggtcttttgagaaatcaggtgtgccttctccatactttttccttcccctggctagagagaaatcatgttcttgtgtttttctgcattagtgacagtaaaaaaa

SEQ ID NO: 224238 - DNA, 473 bp, Homo sapiens
ggagacaattattcatctaccagctttatacaggaagtggtccaactagacttccgatgttgatggaagctttatgtcaccacaactgggctttacgtcaccagaattgagcattcatgaaagcagaaactcagagtcactgggggtgggtgggaaatggaggggtctgaatgtgtcctcaggcaaatgctggctttgttttttggttacttcttagatttcccacttttactttgatttttttggcttttatggctacctcagtttccttgccatgccagagcaacattaaatatgtgttatacttccttttttaaggcttaagttatttttattgattgaaacatttaagagagcaatgttccattgtgccacagattttacaattgttcttagaaaatacaagttcagtcttatctaatataatttacctctattccctgcagttgtaacatcaaaactgaaattcttac

SEQ ID NO: 224239 - DNA, 314 bp, Homo sapiens
attatgttgctttaaaaataaaataatatagggaaatgcatgtgtcataaaactattgaaagaaagataccaaggtgtatatacagaatgctttcatgtatcaaaagcagggcacagcctgggcaacacggcaagacctcatctctttacagaaggtaaaaaattagcaaggtgcagtggtccatgcctgttactcgagaggttgaggcaggagaatcgtttgagcccaggagttggaggctgcagtgagctatgatggcaccaccgcactatagcagcctgggtgacagagtgagaccctcatctctttaaaa

SEQ ID NO: 224240 - DNA, 425 bp, Homo sapiens
aagtggttagaacacagggcttctaatccctaatcctcatgtatgttttagccatcagaatcggatattaagttgagccttgattctggccacaaaatcatttcctaactgtagtcaagtctgagtcctggccctggtcacagattaagccccagtgtggccacagatggcaccctaagtccaggcagctaatacacaaatgatcattatcagatggattaagtcaaatacattctcacctctggcgacacagttcaaggcctgcgctttactagaggtgggtcagtagctgtgccttttgtctgtgaaggacagtgcattattgatatagcaatatgcttgtcagtgtttcttcttcaattgtctggctgcagagagcacaaatactttattgccgtggtagacagtcttttcctgaagaagat

SEQ ID NO: 224241 - DNA, 492 bp, Homo sapiens
gttttaaactgatatcattgttttctattatataccagttttgatatataatttatgactggtgtattgctgctgggtttggggtagttgagagagttgatcagtaacttgtgtctggtattctctgaagggaacataaatgttctgtctttatgcaatgagtttttttttttttttttttttgagacagttttgttcttgtttcccaggctggagtgtaatggtgcgatctcagctcactgcagcctcagcctctcgagtagctgggattacaggcacctgccaccacacccggccaggtttttttttatttttagtagagatggggtttcaccatgttggccaggctggtctcgaactcctgacctcaggtgatccaccttccacggcctcccaaagtcctgggattacaggcgtgagccactgcaccaggccgagattttctttttcttttttctttttttttttttttttttttttttaactaacagt

SEQ ID NO: 224242 - DNA, 256 bp, Homo sapiens
caggtcttttcatacttcaaaaccagcattccccaaccccatccctccccatcccatgattctgttgggaatgagtgtggcatgtttatgacatagtaattttaaaacttcacccatacaacaactgacataagtcaagaagatagaaattttatttaaaaggctgtcaaatgtattttcatcttttttgctttgatgatgggttacaaatagcgtatcgtttgacaaatgcttatactctgtttcttggatttgt

SEQ ID NO: 224243 - DNA, 594 bp, Homo sapiens
aaccccatctctactaaaaatacaaaaattagccgggtgttgtggcaggcacctgtaatcccagttactcccgaggctgaggcaggagaatcacttgaacctgggaggcagaggttgcagtgagccaagatagtgccactgtactccagcctaggtgcagagctagactatctcaaaaaaaaattagttttagagcagatagcatcatagttactcctgttagtctttttgttctgttttgttcatttaatttctctgaaactgccagtgtcattatcttttaccacccagttcatgatcagcttggatccagtcaagcaactgatgtatttgagactgtttgagtacattttcttttttttttttcttgtggtatcacacttgtcatcgttaaaaacagtagatcttctggtgtcactcttgtcaccattgaaaacaatgcttctttttcaataaactttgaattggaatattttcatttcactgagatatctaatatgtataaaataaatagtaattaatcaaaaagtactgatatgaataaattatttgtatatacaccgaagacttagtaggtactaaaaggaagctaca

SEQ ID NO: 224244 - DNA, 146 bp, Homo sapiens
tggaaattgcttgtgaaattatttgcttgtctgtctcctacacccccaagtcagtgtccttgggttggggactacgtgtctgtcttattcactgttgtattaccagggccagaagggtcagagagatctctcttgagctccctggg

SEQ ID NO: 224245 - DNA, 648 bp, Homo sapiens
tctaacctaacactatttctggtgagaaatctgctgtcatcctttcttttgcccctctgtatgtaaagtgtacttcctccccctaccccgactgcttttaagattttctctttactactagttttaggcaattcaatttttcatgtgccttggtatcattttcttcctgattttcgtgcctggaatttcctaggcttcttaagcctgaatttatagttttcttcaaatttgcaaaagttttggccattacttctgcaaatattttttctgttcctactcattcttcttcaggggctccagttacatatatattaggctgcttgaagttgttccatagctcactgatcgctttgctcgttttggggcgtcatttttctctctgtttcactttggatagtttcaattgctgtctttaagtttattagcatttttctgcaatgtttaatctgttgttaatcctgtgcagtgtatttttattgcagacattatctttttcatctctagttgttttatttggttcttgttttaatgttttctgtgtctctcttcagcatgctcatgcttttgcccaccttcttgagcatatggaaaacaattataataactggcttaatgtccttttctactaattatattatctgtgtcatg

SEQ ID NO: 224246 - DNA, 427 bp, Homo sapiens
caacttagagttttataaatgtaaatattaaagttttgtgactgtaaatgtgaattttataacacctgaagattttgattctttctagaacaaatgtgtaccctcaaatacttcagaatgaatgaagaaagttcaaatgtcttctgcccagcctcttttgatacacactaaaaacttcagaatcgtttttgtaggttttagaaaaatgcgtgtttgcacttgtgaaaaaagaaaatcattggattcgcatttcactgctggccttgtgcgggcctttgagtgaaccagaaggttctccccatgagtcagctgggaattgcttcaaatgccttccaaagcaaccaagtggcttaacgaatgcagtcctccgtaggcacggggaacactggtgtacagcacaccctttaaaatggctaaatgagaacca

SEQ ID NO: 224247 - DNA, 905 bp, Homo sapiens
ttatttctctggttttagtattctgtaatatccactcaaccccatctaccagtggtttatgtcaattagtatgttttcaaaaatctcttggatttcctaatcaacatgttcattagaggtattgtttagaagtcactgatcaaattctgagaacaaaaggcgcctgggatgctgattaggattacattatatggatatatatgatgaggtaggattgccacttttatggggttattgggaaatgtttacctttcaagttctgatttccatgagtgggattttccctatacccattcctagcttctctgccacattatgcattctgccccaggcatgaggaagtgggcttatctagttggtaagatagtgatgggtaactgggtttgctcagctgaactccctcttcattgtgggctgacctgcaagtataatttcttgtcacagatattgcctgtgattggtaaattggtctaattctgtcattcagctaattggcccattagctgaatggtcacactaagttgcatcctccaactcaatttgatcagtaataaaagtttcatcctgccccctgtctgctacttaattttttatcgtttagatggggggaaattgtgctatttatttggggcccttcagagaacccaatatgaacatgatttatctatttattcagtttttatgtccttcaggacagataaatgtatgtatacacacatatacatgtgttaatatatgtaagtatatacatatgtttaaatgtatgtgtatgtgtatactgatcttgctcttttcctgtgaaatgtattaatagtcacttcaaagatttggttgctattgtgaaagaaattaagttacctttcactttgaaactaatagagtaaagaaaaacaaaaatacctaag

SEQ ID NO: 224248 - DNA, 971 bp, Homo sapiens
ttatttctctggttttagtattctgtaatatccactcaaccccatctaccagtggtttatgtcaattagtatgttttcaaaaatctcttggatttcctaatcaacatgttcattagaggtattgtttagaagtcactgatcaaattctgagaacaaaaggcgcctgggatgctgattaggattacattatatggatatatatgatgaggtaggattgccacttttatggggttattgggaaatgtttacctttcaagttctgatttccatgagtgggattttccctatacccattcctagcttctctgccacattatgcattctgccccaggcatgaggaagtgggcttatctagttggtaagatagtgatgggtaactgggtttgctcagctgaactccctcttcattgtgggctgacctgcaagtataatttcttgtcacagatattgcctgtgattggtaaattggtctaattctgtcattcagctaattggcccattagctgaatggtcacactaagttgcatcctccaactcaatttgatcagtaataaaagtttcatcttgccccctgtctgctacttaattttttatcgtttagatggggggaaattaagtagcagacatggcctgccccctgtctgctacttaattttttatcgtttagatggggggaaattgtgctatttatttggggcccttcagagaacccaatatgaacatgatttatctatttattcagtttttatgtccttcaggacagataaatgtatgtatacacacatatacatgtgttaatatatgtaagtatatacatatgtttaaatgtatgtgtatgtgtatactgatcttgctcttttcctgtgaaatgtattaatagtcacttcaaagatttggttgctattgtgaaagaaattaagttacctttcactttgaaactaatagagtaaagaaaaacaaaaatacctaag

SEQ ID NO: 224249 - DNA, 632 bp, Homo sapiens
caactttactggtgactaggtgcagctattagaatgaatacatctgtaaaatgaagtcagcgtttcacttctgttcccttctgtctcacttggggactgtggcacagaagctgtgatgtgctgtaacgtgaaacctgagtgtctttaccggatgatccagcggtgggcgttgtccactctgacggtcagcatcctgctcatcccctggagaacaagctggatgtgtgtccaagcctgtggctcctgtggcaggtctgtgcccacaggaaggctgatgagggagctttgggcccatcattgctgtgggcatgtggacacttgacactggccctgccattgatcggcccagggcgtggtcaccctcctttcctggcccctcacagacatgccttcactggcttagggaggcagtggaatgagaggctcccagcccccaaaaccagtgctgtgtgctcgacacacgcagtttcatctgaactgtatcattggccccagcagggtattgtttgcctcatacgatggacaaacgcgctgaggctgaagcatgtgaaacttgcaaatgtggagctgggatttgagtccaggttgttagaatctaagccctgtgtattaaccaaattgctgacttttaa

SEQ ID NO: 224250 - DNA, 341 bp, Homo sapiens
ctcttttaaaattaatgttttacacctattctgccccccaaaatttaatgttttaaaagactgagttcttcgcattatactattaacaaaaaatagttttgtatatgtatcttgcattgaaatgcctgagttacgtacttagtaaaggtaaatacagtcatgtgccacataacgacatttcagttaacaatggaccacatatatgatggtggtcctgtaacattacaatggtgctgaaaaatccctatcatctagtaatgccttgatgttcctgaccctgtgtaggcataggctagtgcgtgtcttggtttttaacaaaaaagtttaaaagtaaaaaaaga

SEQ ID NO: 224251 - DNA, 494 bp, Homo sapiens
ttgaactcgggaggtggaggttgcagtgagccaagatcgcgccattgcattccagcttgggcgacagagcgaaactccatctcaaaaaaataaaaggaagctaacacagagtataaatggtgcaggcagtttgacaatatcaaaatagaaaatacacatgccctttgatttctccctcttatgcaggtggatctatagattcaactctacatgttggaacactatagtattatttgtaattaaagcatttggaaacaacctaaatgctcatggtaggggactattaataaaatacggtaaggctgagtgcagtggctcacgcctgtcatcccagtactttgggaggccaacgcaggaggatcacttgaggccaggagttcaagaccaacctgggcaacatagggcaacatagcaaggccccatctctacaaaaaattaaaaattagctgggcatggtggcacacgcctgtagtctcagctattaatatttggga

SEQ ID NO: 224252 - DNA, 566 bp, Homo sapiens
ctagagctggagcctcaaaataggagggataataaatatagggttttactttgtgcctgactttttgaaaatgggatggggggcaaaacctagtattgaagcaggtaagtgggttctttccgtgttacagcagatgagggtgatgaggagctcttggagtcctggaagagagagcagcctgtgctgacagagttaatgagaggacagatctaggagtaacagggtctgaggagaggagatggcctcccagaccatgagaactaacagttgtgataaatttaatcatagtctgtccaaaccagagagtcctcaagtgtggtatgagaatcctgggtgtggggcagtgagctcatttctgctcttgagaagtgtaggagatgcagcaaggttcctgctatcaggagacctgcaaagatggaaggaaacgttcctctaagttattacttgtctcacctcctccctcccccaaaggaaggggaaagatagacacctcggggatttgaattagaaatagccctttggagggtttttttgtttgtttgttgttgttattgttgttttccatt

SEQ ID NO: 224253 - DNA, 364 bp, Homo sapiens
cccaggtctgtccacatggattttaggccttccataacaagttactgctaaacagtcctaatagtcctattacccacagcgggtggggaaaccctaacaagaatgcagggctcttgtttgatgcccatgctcagctcttgggggccctgaacatgtctttggaactgctagtggggaacgttcccagaaatcgagcaaccaaaccacaagcaatgaaggcagggttccccctgggagctgtctttcaggacctagcagacaggacattttaaagtgcagaaagaaattcctttgaaactttcacatgccatctataaagtgcattctcaatactggatttaattttaactaagtaaatttatgt

SEQ ID NO: 224254 - DNA, 510 bp, Homo sapiens
cattttcacaatattgattcttcctatccatgagcatggaatatttttccatttgttttcgttatctctgatttctttgagcagtagtttgtagttctccttgaagaggttcttcacttcgttagctgtatttctaggtatttgattctttttgtggcaactgtgaatgggagttcattcatgatttggctcttggcttgcctattgttggtgtatagaaatgctaacaatttttgcacactgattttgtatcctgagactttgctgaagttgtatactaacttaagaagcttttggtctgagacaatggggttttctagatataggatcatgtcatctgcaaacaaagatagtttgacttgaaatggagcatttaagaaaataaaaaataaagtattcattaatgttagtacagttaccatggattttaaaaataaaagttgactcttacttcaaaccacacacaatacattttagataaaagaactaaatgtaaaacataaacaaacc

SEQ ID NO: 224255 - DNA, 492 bp, Homo sapiens
ctgaaagagtaggttaattaaaattagtgcattttctgaactggaaaaggaaataccgtggtgagctagtctatcagagtctggcagtgatttcagccaaagtaatcaaagcagatgggcattcagaaatgaccccaaaagactttatttttatggtcatatactgagtcacagagcttaccatattatctttattcaaaacattattatcacatgaatatttgtgcagactaaatataattgcataacttcttgagaattaggcaagttatctattatacctttctttcaactcatttgcctcacttatgaaataaagataataataatactcatctcctatgatttttttaaagattgaatcaaataatatataagatagaacattggcacagactaaagctttcaataaatgaaaactagtacgttttaaaatattagctgtgctttgacgtttttggtatagcccccattaaagacgtttacaattta

SEQ ID NO: 224256 - DNA, 399 bp, Homo sapiens
gccaagaaacttcttcaagctcttcattgccatcttctatcccccaactgactgaaaagcactggttaaaagaaaagcacattaattttttttcagcaaaaccaaatatctccttttctagtatgtctcatctttgtttcatatctctcaatagctttctcctttatcttgagtttctttccaactgtccaaactccaaagacttcaagtttcaaaaccacattcacttatattcagcaatagagcatcaatctacttgctttcttctaatgataggtttttcataatttattttattttattttattttttattttttgagatggagtctcactctgtcacccaggctggagtgcagtggtgccatctcggctcactgcaacatctgcctccccagtt

SEQ ID NO: 224257 - DNA, 325 bp, Homo sapiens
gcacgagctgctaagaggttgttaaaaaagaaatggctactttttccagaaataattgattttggtaataataactactactaataactacaattcataaagtgcttatactatacccgacattgagttgtgttccttcgtctacactctaacttaatattcacaataattcttcaaggagctattgttatacctattttagaaatcaggaaattgaaacttagagaattaagtaaccccaaatcaggagtcaataatgattaggcagatgggactgagaattcagatcttctctgtgccagggaacttcccagccataaagaaa

SEQ ID NO: 224258 - DNA, 408 bp, Homo sapiens
ggggaatttctcagcagaaaccttactggctaggagaaaaggggatgtatattacaagtacaaaaaaaaaaaataataaaaaaatgtaagccaaaaatactctacccagcaaagctatccttcacaaatgaaggagcctggcacagtggctcacatctgcaattccagagactcaaggctgaggcaggaggaccatttgatcccaggagttcaaggctgcagtgagctatgatcatgccactgtactccagcctgggtgacagagtgagactccattgctaaaaaaaaaaatagtaataataaaagggaaaaaagtatttcccagataagcaaaagactgtttgtttgtgtcttgtttgttgtggtcctataagaaatgtttaagggagtcctacattgggaagtgaa

SEQ ID NO: 224259 - DNA, 706 bp, Homo sapiens
aggttagggtctaaatgtgccagcacagtccctggcacaaaacaggcccccgagtacagtagccattattactaaataataaacacgatgatgaggataatgatttttgttcctcagcccttgcttttacttttctgactctaacactcaggactaaacttggtcaaagggttaaaacaaatagagaagggaaaagatttcatctatgagccaccaaggtcatgggtatttggccgaaacacttacctcttcaaggctttgcatctgggtctttcatccccttgcttttttgaacactgtataccctctgtgaatgtaaaaacatttgaagagtatcaagcactccacgggtagtggcagttgcaagaagtctggtccatttttctacctttcacactgtcagagcacgagaccttgggatttttataatccaaattgatactctctaggaaatctcttccactccagctccctgccctggaaagattcattttcttgtgggcatttctccagccctggtgggtaacggtgactgagggtgaattcctaaccttcccttgataaggttcaagtcttgctaatttgaatctctcctattttgctcccatccacctggtgctgtttgatttatctgtgcttgtttgtggattcactgatcactttcttattactcttccacctccatccatttcagtttgcggtgcct

SEQ ID NO: 224260 - DNA, 225 bp, Homo sapiens
tatgaagctggcccgggaatggggagttgtagggaagctggggggttttattttgtttttgttttagtaaatcaaaatattccctcctggaattgtcagagtctggaaaagagaatctttataaaatgtaaattacctcctggatgttaatttttagtagcagtgggtgatttttagtggcaacacaagtctgatacgatgtacctacatcgttttattttagag

SEQ ID NO: 224261 - DNA, 710 bp, Homo sapiens
actcctctgggggttgaaatgaggaacttctgaatcagggagctcatgctcaaccctggctgaatccttgagaggactcagggcaagcagaacatcaactcctccttcaaggggaacaaaccataggctgaagggaactttagagctgcactagcctggctttcttattttaccaaggcataagcacatccaatgggagaaaatgtcttcactcagtggcataaaacacttcctgatgcccaaagtccacctgggcaaagtggccaggtggatgaagttagtgtcttgaagcttcttgttggctctttcactggcccttcctatgccatcgcctctccccccaggatcagggatgtcatccctcaaccctgacatggctcatgcccaggtctgcctactcccacagtaaaatgctgtccaacctccctttcaaaattacctccgctggggaaaatgcttatcatatatttgtgcaaagttttagcaaggcagccccatggtatctagggaggtctgaaggatggttatctttgggggcgcagttatggatcattgctattttcttctctatacttgaagtattttcatgttttattttaaattttaacaataataatgcatttatttatatgcttctttttaggcctcttctcagcacactgttccaaccaaaattgatctaataaacgtatttattttaaagcagcaaa

SEQ ID NO: 224262 - DNA, 644 bp, Homo sapiens
cggtaagccaagatcgtaccacagcactctagcctgggcaacagagtgagactgcatcacccccaccccccaaaaaaataaatacacaaagtatacagtaacaacttttaacaaaataagattgaaaattagctttagaggctgggcacggtggttcatgcctgtaatcccagcactttgggaggctgaggtgggcggatcacctgaggttggaagttcgagactagcctgaccaacatagagaaacccagtctctactaaatatacagaaattagctgggcatggtggcacatggtaatcccagctactctggaggctgaggcaggagaatcgcttgaacccgggaagtggaggttgtggtgagccaagatcacaccattgcactccagcctgggcaacaagagctaaactccatctcaaaaaaaaaaaaaaaaagctttaaatatttgaagaagtttaaatgtttgttactttgctttatcttgagaagcctagttttaaccactgcttaaaactagtggtctccatccttttgtagttcataagtgtgatggttgagttttcacatgcatgtgtgagatgtgcctccctcaaaccttgttatgttggcacattacctgtctgacatggggaaaaaaaaaaa

SEQ ID NO: 224263 - DNA, 380 bp, Homo sapiens
aggtccccaaatttctgcttaaggaagaaagtctttataaggtgttgggcatatagtcccatgaatgaagggtcaggggggcctcatttggtgaattatatatttatatatggaatctcactccagcctgggcaacaagagctaaactccatctcaaaaaaaaaaaaaaaaagctttaaatatttgaagaagtttaaatgtttgttactttgctttatcttgagaagcctagttttaaccactgcttaaaactagtggtctccatccttttgtagttcataagtgtgatggttgagttttcacatgcatgtgtgagatgtgcctccctcaaaccttgttatgttggcacattacctgtctgacatggggaaaaaaaaaaa

SEQ ID NO: 224264 - DNA, 520 bp, Homo sapiens
  misc_feature (300)..(300): n is a, c, g, or t
gcaataacttatgcatacctgaagaatgaccctatggtctaagaagaatgtgtgttcagagctccaagctaaggaatctgggagtggccaacccagatatttcatttcttatctatgacgaacttttgaactgctcccacccccagcccatcctgtagaatgcaggccctacgaggcgatcaaagccctttgttttaggttaaatgaaggttgcctggtggaggttgctaggggaaaggtgttaagtaaaaatgttatataaactgcactccagcctgggcagcagagtaagactccgtntcaaaaaaaaaaaaaaagaaagaaagaaaagagtagaaggcccaagcttagtccaatattatagcttcagcatcagagtagagaatgattcagagcgtctgtccagtgtctgctgtagatccctcaaatccgtgtttggacgcttctggtaaggggtgtatggcagatgcacccgacagatgcacttggcagcagagtaagactccgtctcaaaaaaaaa

SEQ ID NO: 224265 - DNA, 453 bp, Homo sapiens
ccagaaatggagcagaactagctcaatggagcacataccgtccatgggattagttagtataatcattgctgaatgtagccttctctgttaaggtacagataattcctttcttaactctgtgcaagatacgctggtgagcatggttatcattcgacaatttgattgactctttgtagataaaaagaaatatgctccttctctctgagccaattctttctgagctgacctggcctttttaatgataaacctgttcgaggtttctgtttccagatattcactagaatttagggcaaagacacctactttggaagggggagactgtcacaacattcccattagataatgcacagtcatttcctaaaagtcttcaaaggaagaaagggatgcactaatgctgtgatcttttgaatttgtaagcagtaggatgcaaattgataattgacctacaggaaa

SEQ ID NO: 224266 - DNA, 602 bp, Homo sapiens
ctgataaaatcgagcaacccaaaatgtgagggctgggccattgatgtggccccatgagcagcagctgaagtgatagtcattgtagtctagtggaaccatcactgcactaggagtccagagatgtgtgttgtgggccactaactagggctttccctacccaacacccgcaccgtgctgacgacctccatgttggatagggaaacagttaagccctcttagctttcgtattctgtttctccaagtaaaagagcactagaagaaaataagatgggcagttgtgcatacggacattgattagggataggtgagagcaaggatgcatggtgggctggagtgaggctctccagaggtgctatagaacagccacgtgagttggctcttaggctcaggtccccagtattggcagttctgaatctgtttgcaaagcgatgcaagagaggtggtggagtaggaacaaattaaagcatgcctctgccttatatgtggcactgaggttgggcttgggtgtttttaggcaggcctaggttcagccttgaatctttaccctctgggggatcgtggtccacggtgctttattgcttatgcttcatttccacatccac

SEQ ID NO: 224267 - DNA, 308 bp, Homo sapiens
atatactagattaattcccctgttgccttttcagggacattgattcattcattacgttcctctggagtatcttcatcctcttaaaagattccacaaatccatgtttccctgtaataattctctttcttgaactttctagaaatgatatgcagtattccacttacatgctttgggtttttgttttgttttgtttttttggtcagacataatcttgcactgtcacccaggctggagtgcaggagtatagtggcatgatcttggctcactgcagcttccgcctcccgggttcaagtgattctcctgcctca

SEQ ID NO: 224268 - DNA, 436 bp, Homo sapiens
tcccaacagaatggaatatctcccttgacccagtgtgtttgattctttttggcaggacactgaaattctgaacaccgccgtactcacaggaaagacagttgccatgcctatcaaggtggtctctgtggaggagaacagtgccgtgatggacatctcagagtcggtggagtgcaagtccacagacgaggacgttatcaaagtaagtcattccacagccagctggatggaaccggtgggaacttcacttggacatcccgtttgctagggacatttagactgaaatacatgacgttcaactatacagaggcttatgtgcaacacacttccagctgatccactcaacgtgtccattgccatctctttgttttcacatcatgccaacctggttagggtttttggttcattcctgtctttcttcctttatttgacaattaaa

SEQ ID NO: 224269 - DNA, 152 bp, Homo sapiens
gtctttcttttctttcctctctcccttctttccttccttcctcccctccctccctccttttcttttctttcctttccttttcttttgttttcttttctctttcttcctttcttttctttactttccttctttctttcttttctttcctccct

SEQ ID NO: 224270 - DNA, 578 bp, Homo sapiens
tattataatacattattgtaaaacaaacaataaataaacagtcataaacctgccagtaatttcagcaaatgaaacgtggaacacgtcaaggccagaggatggaaaaggctccagttttgataaaaggaggcctgcttggcttggaatcctctctcctgctggttgggagatgcaaagatgtttccagagaggggctgatgaattgaggggaaagaaatgagcccagtatgagtcccctttcagggctgagcgtgtataaaaccaaacaacttggaaccgctccaagagaggggattaaagcaacatgttattctgagtgattgcttaatttattgagctgcggctggatctgtaatgaaatacagcccttgtaactgataacctcctgctgccattgaacttctacaattaaggaatattttctgagtttctctggaacggctctgaatttttagcctctgtggtagggtgcttctgaacatttgttttccaggcaattttttttgagtattaggctgatgttaataaataagcagcattttattgagaaaaaaaaaaatcggccctcgttgttctca

SEQ ID NO: 224271 - DNA, 368 bp, Homo sapiens
aaatgtcagctccaggcgggcacgcatctttgttgtgttctctgctgactatatcctcagcacctagaactgtgtctgtcacctaatagatgctcaataaacctgccagtaatttcagcaaatgaaacgtggaacacgtcaaggccagaggatggaaaaggctccagttttgataaaaggaggcctgcttggcttggaatcctctctcctgctggttgggagatgcaaagatgtttccagagaggggctgatgaattgaggggaaagaaatgagcccagtatgagtcccctttcagggctgagcgtgtataaaaccaaacaacttggaaccgctccaagagaggggattaaagcaacatgttattctg

SEQ ID NO: 224272 - DNA, 723 bp, Homo sapiens
ggctccaatcgaggcggaggctgcagggcccgcggggcgccccccgcccggcgcacgcctgcccggagcccgggaaggcgcagccctgggtgggggggcccgtgcacccccggaggcggcagcggcggtgagccctccccttcttcccgcctggcaccttccgccagccagggcagggatcgcggcagataaacctgccagtaatttcagcaaatgaaacgtggaacacgtcaaggccagaggatggaaaaggctccagttttgataaaaggaggcctgcttggcttggaatcctctctcctgctggttgggagatgcaaagatgtttccagagaggggctgatgaattgaggggaaagaaatgagcccagtatgagtcccctttcagggctgagcgtgtataaaaccaaacaacttggaaccgctccaagagaggggattaaagcaacatgttattctgagtgattgcttaatttattgagctgcggctggatctgtaatgaaatacagcccttgtaactgataacctcctgctgccattgaacttctacaattaaggaatattttctgagtttctctggaacggctctgaatttttagcctctgtggtagggtgcttctgaacatttgttttccaggcaattttttttgagtattaggctgatgttaataaataagcagcattttattgagaaaaaaaaaaatcggccctcgttgttctca

SEQ ID NO: 224273 - DNA, 684 bp, Homo sapiens
gacgtgcatgatgtgcggccggggaggcgaagaaactttttttccgacacgcaacccccccccctttccgcgcgcctggaaacgtggaacacgtcaaggccagaggatggaaaaggctccagttttgataaaaggaggcctgcttggcttggaatcctctctcctgctggttgggagatgcaaagatgtttccagagaggggctgatgaattgaggggaaagaaatgagcccagtatgagtcccctttcagggctgagcgtgtataaaaccaaacaacttggaaccgctccaagagaggggattaaagcaacatgttattctgagtgattgcttaatttattgagctgcggctggatctgtaatgaaatacagcccttgtaactgataacctcctgctgccattgaacttctacaattaaggaatattttctgagtttctctggaacggctctgaatttttagcctctgtggtagggtgcttctgaacatttgttttccaggcaattttttttgagtattaggctgatgttaataaataagcagcattttattgagtgttttgtgggaaccaggaactttatatacattgtttctaatcctgacactaatcctgtcaatatccagtgaaataacccctattattccctattttacagatgtgaagccacgagacgttaggtcat

SEQ ID NO: 224274 - DNA, 821 bp, Homo sapiens
ggctccaatcgaggcggaggctgcagggcccgcggggcgccccccgcccggcgcacgcctgcccggagcccgggaaggcgcagccctgggtgggggggcccgtgcacccccggaggcggcagcggcggtgagccctccccttcttcccgcctggcaccttccgccagccagggcagggatcgcggcagataaacctgccagtaatttcagcaaatgaaacgtggaacacgtcaaggccagaggatggaaaaggctccagttttgataaaaggaggcctgcttggcttggaatcctctctcctgctggttgggagatgcaaagatgtttccagagaggggctgatgaattgaggggaaagaaatgagcccagtatgagtcccctttcagggctgagcgtgtataaaaccaaacaacttggaaccgctccaagagaggggattaaagcaacatgttattctgagtgattgcttaatttattgagctgcggctggatctgtaatgaaatacagcccttgtaactgataacctcctgctgccattgaacttctacaattaaggaatattttctgagtttctctggaacggctctgaatttttagcctctgtggtagggtgcttctgaacatttgttttccaggcaattttttttgagtattaggctgatgttaataaataagcagcattttattgagtgttttgtgggaaccaggaactttatatacattgtttctaatcctgacactaatcctgtcaatatccagtgaaataacccctattattccctattttacagatgtgaagccacgagacgttaggtcat

SEQ ID NO: 224275 - DNA, 662 bp, Homo sapiens
ggctccaatcgaggcggaggctgcagggcccgcggggcgccccccgcccggcgcacgcctgcccggagcccgggaaggcgcagccctgggtgggggggcccgtgcacccccggaggcggcagcggcgataaacctgccagtaatttcagcaaatgaaacgtggaacacgtcaaggccagaggatggaaaaggctccagttttgataaaaggaggcctgcttggcttggaatcctctctcctgctggttgggagatgcaaagatgtttccagagaggggctgatgaattgaggggaaagaaatgagcccagtatgagtcccctttcagggctgagcgtgtataaaaccaaacaacttggaaccgctccaagagaggggattaaagcaacatgttattctgagtgattgcttaatttattgagctgcggctggatctgtaatgaaatacagcccttgtaactgataacctcctgctgccattgaacttctacaattaaggaatattttctgagtttctctggaacggctctgaatttttagcctctgtggtagggtgcttctgaacatttgttttccaggcaattttttttgagtattaggctgatgttaataaataagcagcattttattgagaaaaaaaaaaatcggccctcgttgttctca

SEQ ID NO: 224276 - DNA, 511 bp, Homo sapiens
catgtctctttttggggtgcctctatgataggtggtagaaatgaaaatggaattaaaagttttgtgaagctatagcactactttttcattgtgttcccccctgactttctgccttaggtgtttactttggtgagatatcctgggagaaattgaggtgaaaagaagcccgagttaggattagggaagagatgaagtagtcaataaaattcaaattcttgtattctgaaacgcaactattctttctccaacttggttttggacagaatgtcttagtgtagctgttaacaaagaaattgatgacaattaactcccatttctcagaatttcatcattctttgaaagtgtttatcatactcaatcttctaaaaatccttaaggcatactacagtgtagaggttggcaaactttttctatagaggtcctgatagtagcttgtttcgcttttgagggccatcgagtttctgtcacaactactcatctctgctgttgtaataaagactcacccatagac

SEQ ID NO: 224277 - DNA, 508 bp, Homo sapiens
tgctgcaggaattcttcctgtcctgggacctcaaactgagcagtggctgcttgctgcttagctcctgcttgctgagttcctacagagaaatggttcagagcataaatctcgctggaagggtaggaaagggggcttatcttgaagtcgaattttcatggaaaatgcactgttttttgcttacttgtatgttcactggggatggcttagggaagcctatagaagttcttttggaggggagcacctcctcttcccccaccaagtaccccttgaagctgacattgtcttcttgggcggggaagcaccaacagtcatagttactctaaggcataatttgaaatttgctcttcacaaatataaaaggccttaataactaggtcaaagcgtaacaatcattgctgtatgtctttgcatgacaaatgaacaaagatgcaaaaatttcaatagcacccatatatacaaaaactcattacaaaaatggagacttgtcatgtttggaacaagaattaaa

SEQ ID NO: 224278 - DNA, 653 bp, Homo sapiens
ccaagggctaggtcttcccttgtgaaatggagtggtacctgcctgctaaggaacagacccacctgcctgctgtggttgtattgccagaagtgttggattcacatcttggctgcgctttgtactgatggtgtaaccttgggcaaatagtctcccctctttgaacctctgtttactctggaaaatgcccaagtctgcagattttggatagaactaaatgaactagtagtccagcaacatgatacctgccccggggcaagctcagtaatgactgtctacctgctggcctgccttctttcaaaccatgaccctgcctgtcctcggccataccctgacccagatgtgttctttggagggtctgctgctttggagttgtcctggacggggaggatctcatggtgcatctggctctgatgtttgtcttctggggcttcacctcccctggtgggtgagcactgaagggtaccggaaagtgggttccatggagttttgtgcctgagcagctcagatgggggccaggtgctgtggctcacgcctgtaatcttactactttgggaggctgaggtgggaggatcacttgagcccaggagttcaagaccagcctgggcaacatagtgagacaccatattcacaaaaaataaaaaattagctaggga

SEQ ID NO: 224279 - DNA, 481 bp, Homo sapiens
tgcatcgggactgaaagcggagatgaatatggtaccgtttttagtcaacatctctaaatacggttcactttgggattgttctttctacatttttttttaaaaaaggaagaaagaaaaaagcacataagtaagcaagctcaaatatttgcgctctttgtccaaaaactgtttttcttcctctgtgggtcaggccaagtgccaatcaaagttgtttttcaagcctcttttccctgcagtagggctgctgcttttttttttcttcctattttatttgagagcgtgagagcaaagggattgcagatttgaggttaattgaacagttaaatatgccttaaattgtgtttattggatatgtttctcttgaaacagatttttattaaatgtgcatgttgagtatgtgcagttatttttttccataaactctaggatcaaattacagttgatacttgctcagctcattgtagggtagcttgtgagaaat

SEQ ID NO: 224280 - DNA, 427 bp, Homo sapiens
aagactgagaattccacgagaccacctgctggagagggtgggagagccatagtagctgtggagcagtacagccacactgggaaaagaatctggtattttcttaggaggttttgagtaaagtttgacctcagcattcccattcttacgggtggattacaagagaaatattcacacatgacaaccaggaaccaggcacaggaatgtcatccagtgccattcgcaagaacagaggactggggatcgttccaagtgtccgtgaacaaagaatgtgttatgacttgcggtgtagtcacaccatggaatattacacaggtgtccgactgagtggagtgcagctgctgagaagagggagagtcttgacatgaaagagcaagacctagaggacagcgcacagcccggggctctgggttatgaagcttgaatccaa

SEQ ID NO: 224281 - DNA, 489 bp, Homo sapiens
cccctaagaaacatttatgctcagtaagaacaacgtgcttgtagtgctgaaggagcctctagaaaatatctcttggcctgcctgtccttcagccagagttcagagtcctccccaccgaggacttccgggtccctccctgcagggggtgtgggctctcctcttgcaggtgagaagaccaaagcttagagaagccggacaacttcctcaaggccatagtgagtgggtgagaccaggactggggaccagaaaacccaggccttgctctgaggctcaagacaaatgcccacttaccaccccttcctggagtagtggatgcaggagtagaaggcagagcccagagggcctgatcagcacatggggttaatggggtggaggctgaggtcctggcagtgggggtcaccaggctgtgactgaatggtgggaacgaagaggaatcctgaatccttcagggtgtctggcctgcccgagcaggcgctgccctaataggag

SEQ ID NO: 224282 - DNA, 408 bp, Homo sapiens
taaatcatgaaagagtgttgaattttgtcaaatgctttcttctgcatcaactgagatgatcatggtttgcttttttctcattattttgttaatgttacgatcaattttcatatgttgaacgtcctttcattccagaaataaatcccatttggttatgatgtctatttagattttgaagactgtttttgatttttaaactttataagagctctctatagaatatgtgtgtgtgtgtgtgtgtgtgtataaggtaacaactttaaacatttggtacatttgataaaaatatttccctcattctcttcctcttttagtttggtacttttgtatattacagaaagttttaatttatattttttaacctgaccttttcccttactgcttttgttactatatagctgaaaatgg

SEQ ID NO: 224283 - DNA, 619 bp, Homo sapiens
tattgtgggactttgtcttgtaatcctgtgagccaattctccctaataaactcccttatatatgtagtcatatatcctactagttctgttcctctggagaaccatgactaatacaaaatccttgtcagttttgctagatgtttatcaattttatacattcttttagaagactttattttattttattttattttggatacaaggggtacatatgcagttttgttacctgggtatattgcatgatgctgaggtttggaatatggatagtcccataacccatttagtgagcatagtacccaatcagtagtttttcagcccacgtccccctccctctctcccctctctagtagtccccagagtctactgttgccatctttatgtctgtgagtaccccatgtttagctgccacttataagtgagaacatgcagtatttggtttcctgttcctgtgttaatttgcttaggataatggcctccagctgcatccatgttgctgcaaaagatataatctcattctttttatggctgcatagcattccatgtgtatatgtaccacattgtatttatccagtccactgttgatgggcacctcggttgatttcatgtctttgctattgtg

SEQ ID NO: 224284 - DNA, 311 bp, Homo sapiens
cgcaaggggtcgcaagggggtaggagatctctgagtggccaaatcaagctaggcttggcaacccaagtgcgtgctgctgggtttacttgctgccttagggcatgggcagctgtcctgcctgtggtcagctctggctaatcccggcctctatccactggagggcagtagcaagcccccagtgatgacgtcaaaatgtcaaaatgccgtgggggcaaaattacccccaagtggttctttgttgagagccactgcctgcttgagaatgtaagcccatgtgtcgccacattttacagctttttaagaaaaactag

SEQ ID NO: 224285 - DNA, 229 bp, Homo sapiens
cagccagattacaaaatagccctttttttgttaaccaacctgagaatttacatatattactttgaccactagagggagtctgcattgtcaggaatgccaagcccaagagaacatgaaacaggctgttttcgggtgctgatgacacatccattgtctgtccacaatatcatatgcgtacaaattgccatagtaatcacattaactgtcactgggttcattattttcctta

SEQ ID NO: 224286 - DNA, 579 bp, Homo sapiens
tttctcctttccaggtcttttcccctcaaatcaagctttcattccaaatgctgcaccagagtgtccccttcagaggtcgttgcattgctaagtcccatagcccctcccagttcttatcctacttggcctgttggaggcacccagcgcagcttcttgtttccttcttcactgacttcactttcttcactggctccaggctgctgcattctctcttttccttctacatgggtagtagaaggaaactaccaagtgggactgttgctgagccctgaagctcagtctttgagaccctctcctctccagctgcgtttcacttccgagtatggggattttatccagtctcatgggtagaaacctcagatgcattttgaatccgtctccatgctggcattgcccacctctcgtttccaatggagacctgtcttccgaactgtaggctcgtatgccacctatctgctcagcagctccacttggatgccaggtgagcatcttacacttggcatgaccaacacagagcgctgagctgtcccatgagatgtgaccctcccacaatcaaacccaactcaataaatggacacc

SEQ ID NO: 224287 - DNA, 561 bp, Homo sapiens
tcacacgcctgtccgcattgtcgtgcatcagagctgttactctacagagagtcagtacgcatgtggtacgtccataacctcctctccatcttttactctctactttgcctgtttgaagttgtctatcccaacttcttgtttccttcttcactgacttcactttcttcactggctccaggctgctgcattctctcttttccttctacatgggtagtagaaggaaactaccaagtgggactgttgctgagccctgaagctcagtctttgagaccctctcctctccagctgcgtttcacttccgagtatggggattttatccagtctcatgggtagaaacctcagatgcattttgaatccgtctccatgctggcattgcccacctctcgtttccaatggagacctgtcttccgaactgtaggctcgtatgccacctatctgctcagcagctccacttggatgccaggtgagcatcttacacttggcatgaccaacacagagcgctgagctgtcccatgagatgtgaccctcccacaatcaaacccaactcaataaatggacacc

SEQ ID NO: 224288 - DNA, 303 bp, Homo sapiens
gaggtgacaggatgaattcctgtgtgcagagggatctgagcccccgcctgtgaccaaaagtgtactcatctcaactggtacaagtctggtccttcagcttccaaaacaaacattgctcactcatgcagaaagattacaggaagacaccaggagaggggcatttggggagcaaagtacactgcctgcaaaaccaaagcccagacacacccaagagggtctgtctctaccctcagctcaccttcagcctgggtcacttcctatttctttcccattcatgataagaaccgcatctcactagttgca

SEQ ID NO: 224289 - DNA, 555 bp, Homo sapiens
agcatcatggccctctcattagggtgcaggcttatggaaatcagatgataagcagaattcccaacccgagtcctgtggttacttctctggtctcaatgcatacttgggatgtttttacctagcagagggcggagcgtatacattgatcccaggcctttggtaccatatgtaaggaagcgcaaagtagaaacctttgaaactcctcaccctactgaaacctttccaagatagtaagtcagaaacaatgctgcattccaggtgtaattgcagaggtatttcgccctcaaagacttataaagcagtggttaccgtttcatcccttcaattaacctgaatggctcctgctaaatcttggtggattcaagtaaatgatgatgccctgcacaaacttagccaagtcgtgtccccgatcacacagctgtgctaggtgtggtatctttactggaaccgataaatgcacctctggctcttgataatgcaattattgacttggtgaacattcttttcaattgccagtggtaaagaggattaaaagcagttcacatttatatggga

SEQ ID NO: 224290 - DNA, 473 bp, Homo sapiens
gctgacccttgaacaaaggtggtggttacaggtgccaatgccccacacagtcaaaaatctgcataacttttgcctctccagaaacttagctactaatagcctactgttgaccagaagccttactaataacatcagtagtggattaacacataaatagactagtatctatccctattttatgtatgcatgacatacctaacttcttaatttttttgatatttctaggctacacagttcatctgtgagtgttcgcaaattgttacaaacctccaaaattttaaaaaatatatgtattgaaaaaatctgcatataagtggactcacacagctcaaccccatgttgttcaaggattgactgtgctcacatataaatgcacctctacatgtgctcatacatattcacatgtgtaccccacatgcagacacatggagctgtttgtttttaattaaatcaatccatttgtttacattcat

SEQ ID NO: 224291 - DNA, 309 bp, Homo sapiens
gtcaaatacatgtatctctttttcttaattaggttttgttacttgaggatcttgaacttttttgtctctcacttgctacctttcagaataaatatttgttgttaactttacggattaatatttgttctgccttgttcactggatattgtgagactgaaatgagaaaaagatgctttgaaaagtaatgtcacagctgggtgttgtggcacacgcctgtaatcccagcagtttgggaggccaaggtaggaagattgcctgagcctaggagttagcgaccagcctggacaacatggggagatcccatctcta

SEQ ID NO: 224292 - DNA, 391 bp, Homo sapiens
  misc_feature (23)..(23): n is a, c, g, or t
agtttgtaaaggaaagaggtttnatttgactcagttcacatggctggggaggcctcaggaaacttaacaatcatggtagaaggtaaaggggaaacaaacacgtttttcataaggcagcaggagagagagagtgcatggggaagtgccacactttaaaaccattagctctcaattggcgaggcatggtggctcatgctgtaatcccagcactttgggaggccgagcaggtggatcacgaggtcaggagtttgagaccagcctggccaacatggtgaaacctgcccccactaaaaaaatacaaaaattaggcaggcatggtggcatgtgcctgtagtcccagcttctctgggaggctgaggcaggagaatcgcttgaacctaggaggcggagg

SEQ ID NO: 224293 - DNA, 756 bp, Homo sapiens
cagggttattgcaagtagcaaggagaaaatatatatttaccatttgccacaatccctggggaagtgcagtcaatacattggaaagggtcctcataagagtttgatgatcattctcagaaagctagccagagaaagtctaaatggtaaaggttccagctcattatcttcttcccttttctcaagttttctctccatctgacatgtgagctcagtatttaccattgccctttctacaaatttaaccaagtttatttaaaaacataatgaccttctatcccaatttacattttctttggtgtagaggacgcctttaccttgatgtgtggagacaagccgttgatttgtaagaaacaccaattatcagcttccacttgtgcttcacaatctgctgagtcgctttaacacttttgatgaaattgagcaaggccttgtgatctctcctgtgccagccgtgaagtgtccactgcacgcagcttggcagaactattttcagggccataggatgttatggctgtgtgggcagggagcattttattcgtctgtttgattcctatgtttttattagtggtgcaattgcaaaggtaatgctattgacactttttgtgtagccttgagagaagagtatgaattgttttagtagcagcacagcgtgtccctaaatataaatcatgctgtactgatagttactttagcagccactgatcagcaataaatgttaaaaattaacaagaagtttctttttttcgaaaccaccaa

SEQ ID NO: 224294 - DNA, 520 bp, Homo sapiens
cttgaacacatggtagaatgccctaggtgaatccctccagtcttccagtaccatccttgactcctctctctgatgacacatgaactttatgcttttgcacacttcaggcaacaccaaaagaaaggaaaagaacagcttagcttcttaatgtgtgtaagaaaccacagtgaaaaaaaatcaggtgtgttgttgaggctgctaaaagctttccttttttttctgtgccagttctcgctgcctcattggttgagatgggatgtcttttttgatgtcctctttagagagtgttatcctcacctttttgcatagtcctaccaaaagacacctcacatgcaaagtgtaacagaaaattacagtcatgactttagttttaaaaacaggacgtatattcatgaagaatgtttgctgttttcccagtgggttaatcatatgaatataaaacagactaaaaatatcaagttgtttttgcatttatttattgtagaaataaaatggattgctacctctgagcttctgagaa

SEQ ID NO: 224295 - DNA, 475 bp, Homo sapiens
aaaatatttattgaatgcagtctgccttttaatatctttatggaatgttttataatgaaatttgataaatgtttatataaaaatgttttcaattatcaaatagctgacttaggttgaataataagaggtattgttttacaacaaacaaaagtcacttgtttcttgtaggaggcaactaaatggatttttaatcaacatttaatagacatgaaaaaaacaaataatttatttgattaattgttaccgaatgtggaagttaaaacatattctgtcatctcatggtagagagctttggtaattatttagtctcaggaaagaaagtttgctaactcatagttgataatacaagcaaagctaagagagaagtttcacacatgtataactttaacagaagcaccatttgttccccaaaaggaaaacagctttattattgcttttctatcataaaaataataaaatatattgagatgtttaa

SEQ ID NO: 224296 - DNA, 459 bp, Homo sapiens
cagacgttacgatgaaactctctaggttttaggttctggttaaaaaagaaccttcacatttatgtatatacatatgtttttgtgtgcatgtatcattcaaaatcccattgcaatcacattttagaaatagcagtaccaaggctgggcacacctgtaatcccagcactttgggaggccaaggaaggcagatcgcttcagctcaggagctcaagaccagcctgggcaacatggcaaaaccttatctctaccagaaatacaaaaaagttagctgggagtggtggcacacgcctgtagtctcagcttactcagaaggctaaggtgggagaatcacttgagcctaggtggccagaggttgcagtgagccgagatcacgccactgcactccaacctgggtggcagagcgcaactccatctcaaaaaaaagaaaaacgccaggtgcggtggctcatgcctgtaatc

SEQ ID NO: 224297 - DNA, 457 bp, Homo sapiens
ccttttcagtgttgtgcttaaaatgcaaaaacatccttctcaggaaaaatttgtacatatttatgatttttttctttggaattaattcctacaagaggaatttctatgtcaaaggatatgcacaaatttaaagatttggaatactagatcaaacattatgctgggcgcagtggctcacatttataatcttactcagcactttgggaggttgaggtaggaggatcccttgaacccaggagttcaagaccagcctaggcaatatacagagaccccacctctaaaaaaattttttaaaaaattaactggatatgatgacatgcacctgtagtcctagctactcgggaggctgaggcaggaggatcacttgagcccaggaggtcaaggctgtagtgagtgacgattgcaccactgcacaccagcccaggcaacagaggaagaccctatctcaaaaaaaaaa

SEQ ID NO: 224298 - DNA, 467 bp, Homo sapiens
agagcaggggaggaagccctcaaggactccaacatctaagtgataaagtatacaacaaactttccaaaaacaagactaagaaggggccaccagagatgcaagcgaataacccaagagagagagaattgtcatggaaaccaaatgaagaaagaatctcaagagatggggagtggctaactgagtcaaattctacagagaagccatgtaaggtgagaaccaaacatcactggctctggtcacaaagaggttgtttgtggtatttgctgagcagtttagtggagctacagagacagagatgaagcctatttctaattgtttgaggaattaatgcaaagtgagaagtggagttatttattgtagatcgttatttcaaaaaatgtttctaggaaggtaaggggaaatataggtttctagctcaagaaaaatgcaaggtaaaattaaggtttttcttttataataggagaaac

SEQ ID NO: 224299 - DNA, 498 bp, Homo sapiens
ttaacctgtgataaatatatacctaacatagaatttgccattttaaccatttaaaaatgtacaattcagtggcattcattaaattcacaacatcctacaaccattaccactccttccaaaacctgttcatcactcggctgtagctattaagcattaaccattccccctctccagcgctacaaattggatttttatttatagtatgatacctatagagtaggttaatttgggggatgcacagtgtgtcccagctcacctgagggataggtacattccttctcactctggcagggattcttacctgattggggcaacgggtggcaggctgggcagggacaggtttctatatcagaatctctggattcaggggatttgagcacagctgtcttcatggttctaacctgatatgtgcactcccttgggggaagtagtctctcatctctatatactagtttaacagtcacggttctaacataacacatccccccactgtaatta

SEQ ID NO: 224300 - DNA, 468 bp, Homo sapiens
catttcatatcggcttagtcttcaagcatacttccctcattggggtgaaatggttgtattagtttcaggtccaacaaacatacaccacactgtccatgaggtgagaatgcacagatatatcagaattcccagcaaatgtcttgagcttctgacaaattgagccacccctgacccaatctctgaggttaggggaaggttatatgctgactgagaaagccctgggttacctgaactatgacaaggaggatgagtttaatgcaaaccacctgactattacacatacctccctgggggtcctttccaggaagcttaggctttagaagacaaaagcaataaaaaggatttgccatcaagtgatggatactttccattgccaactcttcctgaggcaaaaggaaaaaaagacctggcttctttttttgtcatggtgggtggagaataaataaaatagaaataactatctcaata

SEQ ID NO: 224301 - DNA, 106 bp, Homo sapiens
tgatgtttctgatttttaaaaaattgttagtgctacataaactgtaagtataataattacaactaaggttcatctgaccttaactcatggaaatagtctagattca

SEQ ID NO: 224302 - DNA, 390 bp, Homo sapiens
tgcctggcctcatttctacttcaaaagtatctggctatgttttgaggcaacagccagacccgtgaagctattcaattcatcaatacaggaatggctgaaagggggtgtgtgtgggactaagctgaatacagggtgaatataaagaggcctgattccagagtgggaacaggcaccccctggtggtagcatgccacaattgcgggcaaaattctcgggagaaaatgcagccaccttaattgtaaaatataattttcaaaccaccactggaggtttggaaaacatcatctcaaaactcaaactagattacataaagcaagaagcagggaagcagcaagagaaaggtagatgacagatcgacaggcagatggatgatagagactgggccaagga

SEQ ID NO: 224303 - DNA, 447 bp, Homo sapiens
gcactggcttaatggtggttttgtttgcatggcacctttaggtatgtggtctgagtttatgcaaaagtaatgacaaaagccgcagtgacttttgcacccacctaatataagtaaacaggaaataagttgagggcaaggactgtgtctcccaaacacgtttctttgataagcagcctttctttgccttgtataggcattgacccaaataagtgttcagtttgtgtgactgcccaacccattcactgcctccagtgtgtgcatccaagcccaaccttgtcaaatacaccgcctgttgcctgagctgggacggcctgccgactcttctccctgcccctcctggatacctacaatgcatcctccacctgaccaaccctgtgatattttatgaatgtaaatcagatcgagacttctctgctgaaaccttggaataaaacccagattcccaac

SEQ ID NO: 224304 - DNA, 745 bp, Homo sapiens
agtgcctcgagggcgccgttcgggcggggaggatcccgcgggtcccactgacccacgcggggtggggccaggggtggacgctcgcccgtacgcggtcgctactgatcatgcttgggccagggtccaatcgcaggcgccccacgcagggggagcgaggcccagggtcccccggagagcccatggagaagtaccaggttttgtaccagctgaatcctggggccttgggggtgaacctggtggtggaggaaatggaaaccaaagtcaagcatgtgataaagcaggtggaatgcatggatgaccattacgccagtcaggccctggaggagctgatgccactgctgaagctgcggcacgcccacatctctgtgtaccaggagctgttcatcacgtggaatggggagatctcttctctgtacctctgcctggtgatggagttcaatgagctcagcttccaggaggtcattgaggataagaggaaggcaaagaaaatcattgactctgagtggatgcagaatgtgctgggccaggtgctggacgcgctggaatacctgcaccatttggacatcatccacaggaatctcaaaccctccaacatcatcctcatcagcagtgaccactgcaaactgcaggacctgagttccaatgtgctaatgacagacaaagccaaatggaatattcgtgcggaggaagaacctttcgtaagtcctgggatggccctgaagcctcaattctccttcagcagaaa

SEQ ID NO: 224305 - DNA, 486 bp, Homo sapiens
agtgcctcgagggcgccgttcgggcggggaggatcccgcgggtcccactgacccacgcggggtggggccaggggtggacgctcgcccgtacgcggtcgctactgatcatgcttgggccagggtccaatcgcaggcgccccacgcagggggagcgaggcccagggtcccccggagagcccatggagaagtaccaggttttgtaccagctgaatcctggggccttgggggtgaacctggtggtggaggaaatggaaaccaaagtcaagcatgtgataaagcaggtggaatgcatggatgaccattacgccagtcaggccctggaggagcaatggggtctcaccattttgcccaggctagtctgaatttctgggctcaagcaatcgtcccacctcggcctccaaagtgctggggtacaggcatgtaccaccacacccataccagaactgtttaacaaaacaaatataaattacccttaattctaccatt

SEQ ID NO: 224306 - DNA, 1052 bp, Homo sapiens
aagttacatgtgtgaggaatttgaaatatgatccaaagactatgttctagagtcactggactcttaccaacaataagagttcaagttgtaaaaaatagtcactatgggccaggcacagtggttcatgcctgtaattctagcactttgggaggccaaggcaggtggatcacctgaggttaggagatcaagatcagcctggccaacatggtgaaagcccatctctattaaaaatacaaaaaaattagccgggtgtggcggcgggcacctgtaatcccagctacttgggaggctgaggcaggagaattgcctgaaccccggaggtggaggttgcagtgagtggagattgtgccattgcactccagcctgggtgacaagagtgaatctctgtctcaaaaaaaacaaaaaaagaaagaaagaaaaaaagaaaattataaaaatagtcactatgattttcaaagaacagtggataataggtgataacagttattttgttccttttttgaggtatttacataaagtgtacaagtcataagtatacagctggcaagcttttgcatatgcatgtacctgtgttactaccacccagatcaagatacagaaccttctcagcaccccaggaaactcacttttgctaccccaattaatatttcatccaaaagttaactactgtcacaacttgtaaaccagattagttttgtctaattttgaacttcatataaatggcattatacagtatatactcttttgtgttttgtttctttcactcaacattatgtctatgagagtcatcaaagttgcatgtagtgatagttggtttatttccattgctgagtaataatctattgtatgagtatactttaatttatccactcttctgttgataaacatttgggttgtctgcagttttgttgacttttatgaataatattgctatgaaccttcttgcatatgtctcttggtgggcataagccctcatttctgttggacatataatattcatgtatttagctttattagaaactgtcaaacaattttccaaaatgattgtacca

SEQ ID NO: 224307 - DNA, 159 bp, Homo sapiens
agttttaaacactccccaggcgattctaaactgcagccatgtttgggaatgaccaggtcttcatgttctgacatccagtgcctgttagtcaaaggcacctcagacccacagcatacttgctgtgtggcctggatggagggaccatattcaggggtcatc

SEQ ID NO: 224308 - DNA, 660 bp, Homo sapiens
cacagatccacgtccaagcagaagtcacagctgttcagaaaagaaaggcaaaaggaagaaagacatctctgtttgaaaagtgtaaaccaaaaacaaaactctgaggccctccagtcatctgaatggacttcctcctcagccagggctcttaaaatgtaacctgagaggtgggttcaggccatgacgggaagcgggggtcacacacgtctcattgtacccctcactaacagcagcacagactttgacaacaacattttgcaccctattctgtctgcagcctcctagctaaagcttcatctgcatgacaaaaccttgctctccacaccgttatcttaacccagacgttcctttctgctgcatctcaggtctttggacaaactcaacccattgtcaaccagaaaacctttaaatttacctgacacctggaagcctcccctccctgccagctttgcgttgtccacctttctggaccaagccactcaccaatgtacttctcaaatgtcttggattggtgtcttatggctccctaaagtgtataaatccaagctgtcccccgaccaccttggcacatgttctcaggacctccagagggctgtgtcacaggccatggtcactcatatctggctcagaataaatctcttcaaatattttctagcgttt

SEQ ID NO: 224309 - DNA, 365 bp, Homo sapiens
aatgaacattacagtcctcatggtcccaccgaggtccactttaaggccatgtgtgtatgatgcagcagtaacatgagtcccagtgtgtgagcgctcatctactcctgtggccttggctttgaactctgatatgcttgtgatttctaagaagcatatatgccatcctgagctttcaaataaattccagcctttacttctgcatctgtctgctcaacatttctgcctactggatatatgctggatatatccacatcaagtcaagaaattaatgttaaactcatttataaactgccagaaatttgcttctcattctgtgttctgcatttcagagaactgcattgtcattcgcaagattgccaaagtta

SEQ ID NO: 224310 - DNA, 495 bp, Homo sapiens
ccattgtgttgcagctagtgtggggagtgtggtggtgtgaaggggctgtgctggtgtgtggggttgtgtcgagagtgggatactgtgagtagggtgcgtgagatgtgtgtatgtggtggagggtatgtgtttggtggcgggatgtgtaagtggtgggatgtgaaatggggtgtgtgtatctctgtgtgtggtgggttgtggggtggaatgggggggtgcacggtatgtgtgtgtgtgtgtgtaggtgtgagagtatatgaaatacatgaaaagataaaaagttagatgctgctaaagggacagacatgtaggaattttacattagggttgttctgattttcattttcttgccttttaaaatttaatgataaacaagtctccagagatttttacagcctgggagaccactggtaagacaacaatataggtggtcctccagcaggatctaaatcagagccttcatagtggactgtcgggccaggtgcagctgtagac

SEQ ID NO: 224311 - DNA, 417 bp, Homo sapiens
tgtctgtgtgtaggggagtctgtagttcattgtttttttattactgatattgttaatttgtgtcttccctttttgtcagtcttgctagagatttgtaaattgtattggtcttttcaacaaacaagcttttgttttcaacatttttttctgttttcaatctcatggatttctgctttttattatttttgtgttgctttctttaggtttatttagttcttcaagtttcttaagatagatttgcaactgtttttctttgctgatataatagtatcagtttaagagcagggcttggtggcacatgcctgtaattccagctatttgggaggctgaggtggtagcatcacttgagcctaggagtttgaaactagattgcgcaacatgcaagacccacccccccccccatctcttaaaaaaact

SEQ ID NO: 224312 - DNA, 416 bp, Homo sapiens
ctttctcaatctacattttcttttaactagttcctgttctcttttgccaaaatttttgaaaaagtagtctagactgtcttcacttctacttatttagtccactccatccaaaattccattggctctgctcttgccaacattatcagcaaccttctattcatggaacacaatccttaattacatggtacctttgcgggagaacacttcattcattctcatctccttgacttccataacaccacattcctggttttcctcctctttggtcttcctccttcatccatccatgttgctcttcccaaggttttgcctattcatctagttactctacaaaccctttctaggttatcatatatatctccatggcttcaattatcaattaagtattaataactctggataatccagatttgttt

SEQ ID NO: 224313 - DNA, 461 bp, Homo sapiens
tttcccacattgtccacactcataagatctttttccagtgtgaattcactgatgattactgaaggtattacatttgctaaaggatttcccacattcactgcacacgtaacatccttctctagtgaaaagcttctggtggaacaagtgagtgagtagtgccgaaaggttttgtgggccagacacggtggctcatgcctgtaatcccagcaactttgggaggctgaggtgggcggatcacctgaggtcaggatttcaagagcagcctggccaacgtggtgaaaccccatctctactaaaaatgcaaaaattagccaggcctggtggcaggcgcctgtgatcccagccactcaggaggctgaggcaggagaatcgcttcaacccgggaggcggagtttgcagtgagctgaaatggtgccactgcactccagcctgggcaacagagtgagactctgtctccaaaa

SEQ ID NO: 224314 - DNA, 512 bp, Homo sapiens
cactcaggaggctgaggcaggagaatcgcttgaacgtgggaggtgcaggttgcagtgagctgagatcgtaccactgcactccagcctgggcgatagagcgagattctgcctcaaaaaaaaaaaaaaaaaaaagaaaaaaaaacttatttgagggcaggtttggggggcatgtctcccaaaatcttgggcttaacctgcacatctgtgttttcatggtgccagatttgagcctgtttccatgcattttgttttattccaccctttcagaggttcctcgtgaatatgaataaaatcttactttaatagatacacacattttatgaagtgccaatattaaatcaactttggaaaaaaaatcagccagagagtacattgtgtagacagcttaaacacaccgaataaaatgcttttaacatcatgaactgaagaggccatttaacttaatcattgagggctcactttattcaacagcaatgacctatttagaaccatgactcagacagcttcccttg

SEQ ID NO: 224315 - DNA, 388 bp, Homo sapiens
gggctaggcgtggtggcttacacttgtaatcccagcagtttgggagactgaggtgagtagactgcttgaggccaggagtttacgaaaagcctgtgcaaacacagcagggccctatttctacaaaaattttttaaaaaattagctgggtgtggtggtacaagcgtagagtcctagctacttgggaggctgaggtgggatgaatgcttcaacccaggagatccaggctgcagtgaggtatgatcacgcagctacactccagcctgggtgacagagaaaagtccctacccctattaaaaataaaaaagatgtccaagatatgcatgctaaaaactataaaacactgatgaaacaaataaaagaatatataaataaatgaatttcagggatt

SEQ ID NO: 224316 - DNA, 416 bp, Homo sapiens
ccagtaattcctcttttcaaacatgaaatcaaaatcgggatcttgaagagatatttgtacacccctgatcataataggattattcacaatagccaataaagggaaaccacctaaatgtccatcaatggattaatgaatacatatgatgaaatattattcaaccatttaaaaaattctgccatttgcaacaatgtgatgaaactggagaacattatggtaagtgaaatagttcagacacagaaaggcaaatactacatgataccacttccatgtgctttattttagtaccaacacaaaccaaaccatgcggtatctagaaactgcttgttggaaacttggcttctgggttaagacttctgctgagagcacacaatctgtacaatgagctctgaataaagaaataaatctcaaagtga

SEQ ID NO: 224317 - DNA, 330 bp, Homo sapiens
acttcccagccctctttctcgctgtcttttctgtgtagccagaaaagctgagtctgtctaccttctgtactttctctcactccccttgctgggatgcacttctctccttatttacatgggtaagcagttattattccaagactgttcaaagcttttttgaaacttttcttagcctccctgtctcccactagaactggccatttccttatgttccaatgtatcttgttgagatatctatcacagtatctctggtattgtattgcactgaaactttacatgtgtatttctttctactgggcaataagcccttttgcaaatgttctttgaata

SEQ ID NO: 224318 - DNA, 677 bp, Homo sapiens
  misc_feature (1)..(2): n is a, c, g, or t
  misc_feature (21)..(21): n is a, c, g, or t
  misc_feature (30)..(30): n is a, c, g, or t
nntttggatcgtgagcatctngtgcagaanctatgggcaacacctttatgggatgaacggtcatcatcaccatcgtcactgtcatcatcatcatcatcaccaccagtgatttcctgaatgccaaccaagcaccagtcatcaagcgtgagccacggtgcaaagatggaggcaggctctccattctaagggaacctctcaggccagtagggaaggcaagattcagacaccagggacaggcagcctgggatgacaggtggaacaaggaggagacacaagaacccccaccccaacccaggaacccacatcacaggccagacctgcatgatcgccaggcacccgactcgggttatgaaggtgtctctcctaagagagtggcagaggcaaactttagccttggcagtgcgcctcaagctgctcaggggagaagtcacggccaaagccctggagtgcatgggttctttagccatggttctcctgcagcttcctctgatattatgaagcgcctgccgccaccaggcttgttctgactcccttccatgatccacccttctgagtggggtttggcttctgtacagctctcctgtgggcactgagcccactagtcagagcaagagggctccagtctctggacagtcacagtgcttggtggcaaaacataaattgtcattcattcaaaa

SEQ ID NO: 224319 - DNA, 656 bp, Homo sapiens
actagctccaaccatctcagctccttcatgattgtttcgtcatcatcaccatcgtcactgtcatcatcatcatcatcaccaccagtgatttcctgaatgccaaccaagcaccagtcatcaagcgtgagccacggtgcaaagatggaggcaggctctccattctaagggaacctctcaggccagtagggaaggcaagattcagacaccagggacaggcagcctgggatgacaggtggaacaaggaggagacacaagaacccccaccccaacccaggaacccacatcacaggccagacctgcatgatcgccaggcacccgactcgggttatgaaggtgtctctcctaagagagtggcagaggcaaactttagccttggcagtgcgcctcaagctgctcaggggagaagtcacggccaaagccctggagtgcatgggttctttagccatggttctcctgcagcttcctctgatattatgaagcgcctgccgccaccaggcttgttctgactcccttccatgatccacccttctgagtggggtttggcttctgtacagctctcctgtgggcactgagcccactagtcagagcaagagggctccagtctctggacagtcacagtgcttggtggcaaaacataaattgtcattcattcaaaa

SEQ ID NO: 224320 - DNA, 447 bp, Homo sapiens
cggctctcccgcgtcgtcggccgcgggcgccagggtgacggcgccgtccctccagacgcggatctgcgcggccgagcgcacacggtggcggggctggcggcggcgggcggcggcgcgcagggaaccgcagcactggtagcacacggcccacgcctgctcctcgttgatgggctggttgtacagccgcaggatctcctccaggctcagcgcgtcccgggagcccccggccgcgccgccggctgccccgggctcccgcggcccctcgccgcccactgcctcagtccgcggctccccgccgcccgccgggccagccgcctgagccatcccgcgggtgggcgctgcgctcggcagtcgcgccgtgtgccggcgtctcctcagctccggagcatcgtcgtcgcgcgccgccgcctcaccatccccggaaccgccgccgcccaacgcggccgc

SEQ ID NO: 224321 - DNA, 566 bp, Homo sapiens
atgatctttcaattgttcagcaaaggataaagaaggcattcaagcgtggtttcaagaactgtcagcaataagaaaatgcaaggtactttgtagggccttcaagacctttctggaaaatagatttaattaaaaagtaaaatagacttttcaaagaaatcttaaaaatgttataaaacttcatgttaatatattaataggggtattgtcttcttatcctagatgagaaaaagtcatccatgaagctattatatttgattcatacaacagtggagcttataaatatttttctttaggtttgatttaagagtgagaattataatgcattgaagtatataacagtgttaaaaggcctactctttttgattcacagatggtgattcaatctcacccgtaaagtaggaacatctatagtagtcttccccctcctaaaaggagtccttttacccaaattaaagtttaaaatgatcagaaatatcagtgcatatgctgtttgttttaattaacatgttcatgtacactttgttcatccttagaacaatactaatactatgtagtcgggtataaga

SEQ ID NO: 224322 - DNA, 293 bp, Homo sapiens
gttcaccaaagtggaacataatgaagaaaggttatttaatgaaatcggcatctgccaacacaaactcatcttgagtaataggcattcctcactttggaatatatgatttaaggacaaggcatccctgcttgaaccccatggggtttgtctcttgatatttttccaggaataaaatgttctctgccttttaagtggcatatttgcagttggggctcatagtggccttcagcagttacaaagctggccttggccaagtggaatgaaaattcctcaggggcatgaggattgttctg

SEQ ID NO: 224323 - DNA, 791 bp, Homo sapiens
agccacctccacaaaaatgaaccacaaacatgcagtcgtatttattttaattcataaatacattaacatagcagattaggcaatttgttaggtaaattacaaatacattagaaatcatacaaagtgggcggggcagggtggctccattgcactccctctggaggacagagtgagattagatctcaaaaaaaaaaaagctgggcatggtggctgacgcctgtaaacccagcactttgggaggaaatttatagcactaaatgcctacattagaaaaaaagaaaggtctccaatcaatgagctcagctactagcttaagaaactaggaatagatgagcaaactaaccccaaaataagcaaagaaaataataaagataaaaacaaatcaataaaaaagaacacagaaaaattaaatcagccagtgcttgctatatggcaggcacagtacaagaataagtactgagtttacatatgcagtctcttgaggatcctccaagtaggttagatggacataaaatggaaaataaccagatcagaatactaatgaccaggaagaatgatcaaggtgccagcctgccttcaagagccagtgaggccattgtggatccttagggaaaggggaggtgaggatagtggttaagagatcaaggctctgccgggcgtggtggctgtaatcccagctacttgggaggctgaggtgggagaattgctggaacccgggaggtggaggttgcagcaagccaagatggctccattgcactccctcctggagacagagtgagattcgatctcaa

SEQ ID NO: 224324 - DNA, 101 bp, Homo sapiens
ggtgttttcagatcatgaggacaagctggatcctttcattagagaagcaattctgaaacagaatgagaattttaaaatgtgtatgtctttgagtttctttt

SEQ ID NO: 224325 - DNA, 443 bp, Homo sapiens
ggcactcaacacatagtgttaataaatgagagaccaaatgaatagctaagtcgaaaaacaatgaacatgacaacacagtttccaggtcttaaagcataaccgctgaatgtgaatttttaaggaagagagctgataatctgtatatttaacacgcagcttctgtgtgagtcttttcaggcaattttggggcatactgccttacccagcagttccaggctaattatcagaccaattatcagaatcacctggcatgttttatgactcatagatttttggaccctaccttggacttcctgaatcagggcccagatgcaggaatttcttttgcaagaacttctcaggtggttcaaaatatggggaccactacagcaggatatgttggactgaatttgctcacacatggaattaagggcagacgtgataggtaatcagcttgttctctt

SEQ ID NO: 224326 - DNA, 147 bp, Homo sapiens
gtcttgcttttttatccatgctgacagtctctgttttcaaattagcatatttaagtcactcacttttaaggtgattactgagatagttggattaatgtctaccatatttgtaactcttttctataagtctcccttctgtgtttcatt

SEQ ID NO: 224327 - DNA, 368 bp, Homo sapiens
agatccataaccttaaaatcatcttaacttagaagcacacagactaccaaaatcgaatctagaaaacaatagaaaatcagacctgtaggctgggtgtggtggctcacacctgtaatcccagcactttgggaggctgaggcgggcagatcacctgaggtcaggctgttctcaaactcctgagttcacacagtcttcccaaagtgcttggattacagacatgagctaccatgcccagccaaagacttagtatcagcgtgaccatttctgtaaaaaaggcagttggattacatctgtagatcaatttggggagcgctgccaccttaacactaagtaaataacttgtactatgtggtacaatgaaatattaa

SEQ ID NO: 224328 - DNA, 279 bp, Homo sapiens
tagttttcgtcacagaggtgctcacttcctgctattttttagttcattaccgccattctccccctactcccacctaactgtaagcttcatgagaggaggggccttgtttgttccctgccgggtagcatgccccatacctagagctgcatatcagggttcaataaatgtttatgaatggaaagaacaaatccaacaaaatggagacaaagttaagagctagagaaaagaccgggcgcagtggctcatgcctataatcccagcactttgggaggctgaact

SEQ ID NO: 224329 - DNA, 448 bp, Homo sapiens
tttactgactggcttactgataaggatgcataaacctattggtggtactcaatatgactgggagaaaacaatatatgaaacttgcaggtggcattttatatttggaaggatcaggcactaagagaaaatgctctttcaaccaggagaatggcgtgaacccgggaggcggaggtagcagtgagccacgattgcaccactgcagtccagcctgggcgaaagagcgagactctgtctcaaaaaaaaaaaaaaaaaaaaggaaaaagaaaaaaaaaaacctgtcaaccaagaatactatctcttgcaaacctgtgcttcaaaaactaaggagaagctgggcatggtggctcacatctgtgaccccagcactttgggaggctatggcagggggatcacttgaagccaggagttggaaaccagcctggataacagtgagatcccatcgctagcc

SEQ ID NO: 224330 - DNA, 575 bp, Homo sapiens
gaaaagtgtcatcattcttctaaaaataatttcaataccacagattagcagtttgtaatgttctgaaaaattgtttaagacaattttgatagcacagcagtaatcaatacgattctaagaaaggcacccctctcagttcaatccggcaaatgaataaatgcaaaacgcatataaaatactgtgttggaggctaaaggtaataacagttcaagagcatgtggcccttgtctttagagggtgaacagtgttttggtgaagcaaaccctacatgggaacttataagtcattcaataagtgctttattggatgtataaatgaaatattatgagaatacagaaagggagaaatatttgcttgaggaaattgaaaaaacttgatcaagtgtgacatttgaactctacatatatggagtttgaaaagttttcaacattatgtttcagcagagtgaacactataagctgagaagtatgatatgtttgggggtctgcagattaattggctgctatctctgatatatattgggttcataacaagatagtgtcaaagtgttgattgccccagactaagaaatagct

SEQ ID NO: 224331 - DNA, 381 bp, Homo sapiens
ccaagtaacatatcttaaagaaaaaaaaaggtaaaaggagaaataccagagaggacattttaggggcccacaaacactgtcaggaaggaagcaattttattatttgttttttatttatcttttgagacagggtctcgctctgtcgcccaggcaggagtgcagtgaggtaatctaggctcacggcagcctcgaactcctgggctcacgcaattatcccggcctcagcctcccaagtggctgggattacaggtgtaagccaccgtgcctggctgtatctttgtcaaagtatgtcatttatgtgtaaatgtgtctccttcatagcaccccagggagatggggtgaggaccttccccatcccttgtgattggtgtttgtctccct

SEQ ID NO: 224332 - DNA, 411 bp, Homo sapiens
ttatatcctttgtaaaaactttccctttcagaaaattttaataattgttcccaggaaatcctcttaaggatttcattttgtgaaaaatacttctggtttgctcagatgttataaaacctaaagattaagctgggcacggtggctcatgcctataatcccagcactttgggaggctgaggtggacggatgacctgaggtcaggagttcgagaccagcctggccaacatggtgaaaccccatctctactaataacacaaaaattagccgggcgtggtggcagacgcctgtaatcccagctactcgggaggctgaggcaggagaatcgcttgaaccccggaggcggaagttgcagtgagccgagatctcgccgttgcactccagcctgggagacaagagcaaaactctgtctca

SEQ ID NO: 224333 - DNA, 265 bp, Homo sapiens
tagtatattacaaaatctctgccttgtgcaggctttattgacctttatcatatggctgttttatttttaaaataactttccatgaaattataaaaatagtacattcaaatcccaaatattacaactgtatttctatatccactcctttctgtgaaagtaaccactgctaatactttagtttgtgttttttcaaacatttttcctatgtatgtataagagtgtatgtatatacatgtatctattaaacttacatagattatgtgat

SEQ ID NO: 224334 - DNA, 247 bp, Homo sapiens
taggcaataccattcaggacataggcatgggcaaagatttcatgacaaaaacatcaaaagcaattgcaacaaaagcaaaaatttacaaatgggacctaattaaactaaagagcttctgcacagcaaaataaactatcattagagtgatgatagtgtttggaatagtttcagaaggaatggtaccagatccttcagaaggaatgccagctggttatttgtacctctggtagaattcagctgtaaatcc

SEQ ID NO: 224335 - DNA, 297 bp, Homo sapiens
tagcagggtggcactcacagggtggtgctgggaaggcaggtcggccttgactgtccaagcagtcaacatgcagagccatcctagtctcctccctgggccctgcactgggaggcctggtcagatctttatctgtcactacatctggtgcttttaacttgaaccagctctatagatgttagtgcaggtccaaaagagacttagctgaaatgagttttaaaaggattatgaaatagtgcttagaagaacatgtgaagaagttgagcctatttagattgaaaagaaggctgaagaaggact

SEQ ID NO: 224336 - DNA, 479 bp, Homo sapiens
gaaaacagaaactgtgatgatgacagactttgtcttgtcattttgaattctgtatcaatcttgatttctgattacctatgtagtgttttttttgagacggagtcttgcactgtcatccaagctggagtgcagtggcacagtcttggctcactgcctccacctcctgggttcaagcgattctcctgcctcagcctcctgagtagctgggattacaggtgcctgccaccacacccagctaattttttgtaattttagtagagatggggtttcaccatgttggccaggctggtctcaaactcctgacctcaagtgatccacctgcctcggcctctcaaagtacagggattacaggcgtgagctcctgtgcctggcctgcctgtgtagttttgatcaccatttgtttcccgtctatggaacctctgactcctctgtctgctttgactgaggattctattctgggtgttctctcatgtctgaag

SEQ ID NO: 224337 - DNA, 875 bp, Homo sapiens
tgacttgtgtgccagtttattggagcagtatttctgtcagctacaatagaatatcagctgtgacatttggctgagtcaggctgtgaaccaggctgcgtttaacagaaaacttagttaacagtgactgttgtattttttgcataaaaatgaaaaagcttctttttagtgtgtatcagctctgatagggactcctatgtttttccatgtacccatcacctaatgcatttgtctgtattccaggccgaaaggaggaggggcaagggcagaaggtgcaggccagctgaggtatcccccagggagctccccccacccatcccccagctgacaactgctcctgttggccagagtctagccaaatgtcaccctccttataagtttggaatatgtagtttttagctgggcagtgttgtcctgaataaaattagggctctgttactaaggaataagtgagaatttgtgctaggtaagcagttagcagtctttcccatgtggctgacatgtttgtcagaatttaagttgtgtaattagagggaaagagaaaagtgccacttgtgtgcaaaacaaaacaggaaaagtgacactgtgcgcttcatgagacctgctatttgtcaaacctctgtttcaaaaaagcaatattgttaacagtcagtgagcagcttttgggatcttaaagcttaaacgttaaaaaaattatttaaatatttaaactctcaagttctattagagcagtggcaagccacatatctgcccaggtgagctctcccttctgtccaatagcatctgacattgccaaaaaggtaaccgcccatccccgctttttttctgagacagggttcactttgtagcccaggctggagtgcagtggtgtgatcgca

SEQ ID NO: 224338 - DNA, 819 bp, Homo sapiens
ttcaattcttctgttttttcattcattgctcaaaatagatcgtagtgagataagatagtctctggccttcttggtctttggcacaaggaagagggttccagagttgagagtaaggactttgcatcctttgccatagaatttgattaggggccataaaaaggaccattgtgttctagaatgtgaaggactaagcataccactttatagtgcaaggaataagtgaagaagtccttttataagaaaaactgcagtagagcaataacttgaaattacacttatttatatttacttttcattaaatgtaaattattttcttttaccacattgtactactagaaagagaatcaggagtttaggcattcagtcatagatattcgataccattgatttacttaagcacttctcatgtcaacaagacttaagcctgcagataattcctattttatcagtgttcgttatagcttccctgttggttttacttgtgagtcataagcctagtatggtgaatatctaggaaatttcacggtaacagggcttgtcttaggttttgagaacaggtgtaacttgacttctctctgctgtttgtcatcctacacttcccactacatctggtcctttttgtagggtgttgagaacaacatttttcttcatgcaggggaaagtggaagtgcatgttttctaagaaggacaaataggaatagaataaaagaaaaagtatattggggctgggcatagtggttcactatgtaatcccagcactttgggaggctgaggcgggtggatcatgaggtcaggagttcgagaccagcctggccaaga

SEQ ID NO: 224339 - DNA, 242 bp, Homo sapiens
gtgttttttctattttatctaagaaatccttgccaaaaccaaggtaactaagattttctcttacattttcttcaagaagttttataattttagctcttacatttaagtctgtgactcatttgtatatatacgaggtaagggtatagttcattttttacatatactatcaattgttccagcactgtttgttacaagatactctttccccattgaaatccctgggcatctttgtcaaaaaaaaa

SEQ ID NO: 224340 - DNA, 197 bp, Homo sapiens
gtgttttttctattttatctaagaaatccttgccaaaaccaaggtaactaagattttctcttacattttcttcaagaagttttataattttagctcttacatttaagtctgtgactcatttgtatatatacgagagatagtcattttacaatgactagcatgtcagcactgtgtacagataccttgcatgatctgac

SEQ ID NO: 224341 - DNA, 496 bp, Homo sapiens
gtgagagaccctgtcccaaaaaaaaaaaaattttaagtttttaggtatcagttgctgaactatttgttatacagtgtacaccaataacagtccaatagtatttaacaaaatgatataaaatagagccctcatagaccttaggagccataattcaactacgtttccagtgtgtgaacccccctctataatagtcacaaaaagtggttgtctagtctgtgcttaattacttccagactattcagtttgtcttagatcactccacctcttagatgattattattattatattattttatttatttttagaggcagagtttcgctgttgttacccaggctagagtgcaatagagccatgttggctcactgcaacctccgcctcctgagttcaagtgattctcctgcctcagcctcctgagtagctgggattacaggcatgtgccaccacgcctggctgattttgtatttttagtagagacaggtttctccatgttggtca

SEQ ID NO: 224342 - DNA, 918 bp, Homo sapiens
ttttttgagattaggtctcactctgttgaccaggctggagtgcagtggcacaatcttggctcactgcagcctcaacctcctgggctcaagtgatcctcttgcctcagcctcccaaagtgctgggattataggtgtgagtcactgcagttggcctactgattcttaaaatgtgagtcagctcacattacttctctgcccaaagaccttccaataattcctcgtttcattcagagtacaagttgaaaccctcataatggcatacaggtcctgcatgatctgctccccattacacctcagctctcatttcctactactctctctcccttacttcgttccaccacagggccctagtactgctcagagaacatgccagtcatgctcttgtcttagggcttctgccttggctgtgctctgcttgggacaactgtccccagataacatgctaactcccttctctccttcaagtctttgcccagatatctacttcaggagatcctaccttaaccacttgatttaaaagtgtaatctaccttgaaatgcctaaaaaaaacaagatgtaggttttggtagcagggtagggggtaagagtggcaagaaccaagtcttgccttgaaggtggcaagaagcagctcaagaagcaggcaaggccaggcgcggtggctcatgcctgcaatcccagaactttgggaggccgaggtgggtggatcattcgaggtcaggaatttgagaccagcctggccaacatggtaaaaccctgactctactaaaaatacaaaaattagccaggcatggtggtgggcgcctgtagtcccagctccttgggaggctgaggcaggagaatcgcttgaacccacgaggcagaggttgcagtgagccgagatcgcgccactgtactccagcctgggtgatagagcgaga

SEQ ID NO: 224343 - DNA, 329 bp, Homo sapiens
ttttttgagattaggtctcactctgttgaccaggctggagtgcagtggcacaatcttggctcactgcagcctcaacctcctgggctcaagtgatcctcttgcctcagcctcccaaagtgctgggattataggtgtgagtcactgcagttggcctactgattcttaaaatgtgagtcagctcacattacttctctgcccaaagaccttccaataattcctcgtttcattcagagtacaagttgaaaccctcataatggcatacaggtcctgcatgatctgctccccattacacctcagctctcatcttgggaggggatcctctaggtcag

SEQ ID NO: 224344 - DNA, 832 bp, Homo sapiens
gccccagaatccctattccttctcagaattcccacctgaggccaggtgggcccttcccggggccttcagcgggaattctgagaccttcaggcgctgcatggtctgtgtccttcccgagaaccacggccccagttacagttggcacagccacggccaccaagaccagccgggccccaacagtgattccagggtgctcctcctgagggaggtggcccagagccaggtgcccagcatggctgctgactgccaggaacagtggttgggagccgcagccccacctaacccagcatgcagaacagggaccactgagagctgatgacgaccaaaaacaaagaagaaagcggcaactgcttcagcaagtgggacgccctgattttatggcccaccacacagctgctggaaccaagctgatccagacataccgatgtggagcgagtcacagagtatttgcaggttaaagaaaacaagttaacacactgcaagatcattttctgaggggtcaccgcacgcactgagatgtgcgcaacacaaattgtgaatacacagagaatgttctggaaggacacgcccacaaggctgccagggaaattggtgcagagcagacgaggggtggagcaaagcctatgtggtggttttaaatcaaaagaaagaaagaacacctgcagtacagtgagcccaggatgccttccctgattacctgggccttgaacatagccccaccacattgaaatacacaaagtctttaaaggtgaattttccacacagcctacggggcggggccaggggccacaaggcaccccgtgcctcagggcacggtggtctccggatgctg

SEQ ID NO: 224345 - DNA, 408 bp, Homo sapiens
gctcactgcaacctccgcctcccaggttcagttgattctccttcctcagcctccctagtagctgggattacaggcatgtgccaccacacctggctaattttgtatttttagtagagatggggtttctccatgttggtcaggctggtctcgaactcccgacctcaggtgatccgcccgccttggcctcccaaagtgctaggattacaggcgtgagccaccgcgcccagcaacatggccctttaaaaagtaaaaaatattcttagcttgtattctgtacaaaaacaggctttgggccagatttgactaacctgtaatctagactaatactaacctaaatatcaactatggttatttctgtttttaaatttctttgtatagtttctgcattacttaagcttttaaaaacag

SEQ ID NO: 224346 - DNA, 424 bp, Homo sapiens
attaggatagacttgtacatcatatgttcagaagtgagatcagattcccctgtgtctttgtgtttgtttgagctagaactcaaccacatcaccacctgagagttgacagttgaaaatatttctaaacctccagaatcttctatcttctgccctgactttggtataccaaagataacagaactcttctttgatgactaaggacttctcaaggtctcaaatcatcttttctgataccaaatctcacgtgccttgtggctaaggttgtagaaggggcaagacattacttggaagaggcttttgcgaaactcctggaataggcgtgtccttttaacttcccgctttctgaagagggtaaaaccaaaaactgccagtaaacctagagaatcctatgaagtgaggtttatggttaatctgaatctaactg

SEQ ID NO: 224347 - DNA, 203 bp, Homo sapiens
gttaagaacatagtctctggaatgagactgcctagtgagaagcactatgattagcactgtgtgttatctgtcaccatcaccatcatcatcatccatcaccatcactatcaacaccatcatcattaacatcaccatcactatcaccaccattatcaccatcactgtcaccaccatcaccatcaccatcaccatcatcatcatca

SEQ ID NO: 224348 - DNA, 485 bp, Homo sapiens
tcaataaatactaaaaaaaaaaaaagagaaactcacagtcttaaaagaaatcgctctttgtaagggtgtctccctctctgtaccaggaagagaaagttgactctaaatcaccagagacccttatcaatggagaaggcagcaacttgttttgtgtgcttctccgggtctttttcccaaaactggccttcctcactcccttctttgtttttagctgaagatggtacttaaacctgaattctaagccactcctttgagaattactcattttcttgggcatctcacatgtatatgcaaagtatacatgttaatatagctccatttgtttttctcctgttaatcttttgagctgggcatggtggctcccgcctataatcccaacatcttgggaggccaaggcaagaggattgcttgaacccaggagctggagatcagcctgggcaacatgacaggagcccatctctacgaaataaaaaattaaaaaatta

SEQ ID NO: 224349 - DNA, 498 bp, Homo sapiens
tagccttaaatattaataacaatatttaattctaaattctgctccaagacgaggatttttataatcctaatatttatcctcaaattcaaaagtatattatacaccaaatataggcagctaggaaaaaggaccaatcagagaaaaagaaaatgaacaaaaactttcaaatatgattgttgaaattaaaaaattaactggaaatcctaaataataaaatgagtggggataaatatcaagtttgagagctcaaagataaagtcaaggaagagcaataaaagaagaaagtttgcatggacacaaagagggaacaatcgacacgggggcctatttagggtggagggtgggaggagggagaggatcagaaaaaataacaattggtccttaccaagcttagtgcctgggtgaccaaataattcatacaacaaacccccataacatgagttcacctatataacaaacctgcatgtgtacccctgaacctaaaataaaagtttaaca

SEQ ID NO: 224350 - DNA, 136 bp, Homo sapiens
cttgcttgagttcagaaaatgttaatttccttttccttaaaggaaaggtcatcgtttaaggtcatctagttaattcatgggaacaattcaggcctcatctaatcatatttttaataaaaatattaactttgtaatt

SEQ ID NO: 224351 - DNA, 449 bp, Homo sapiens
cataggtgtttgcagctggtggcatcctcacaccacagttccatgctactctaaccctcagtcccgtatgggcaggttctctggtctggtcacaaactgaccttttaagtcgtagcctccatccagttgttcaaacttccatagctcccctcacctgcagactgcagacagagggactgtcagctgtcctcatccagccaaacacctcagctccaccttctaggcacaggctccctaggacgtctggccttatcatgcccagccaagaccttggagtcttgattgacgtctgacaggttgcttaacatctcaggattgttgaggggatagaatgagagattagatccgcagaactctgcacatgtttagacacagactacactgaggctttgtggctttgggcaatccaccactctctaagcctcagtttccacatttgtaaaatggga

SEQ ID NO: 224352 - DNA, 460 bp, Homo sapiens
aaaatgctcaacttttctcaattttaagaggtatgaattaaagccatgatataccatttttcatttatcagaagaacaaaagtcaaagacactgatcatattatgataataagtgtatgtgtagataggcactgattatcatagataggactgaacctgaaaaccaatttttagagtaatttggcaattgtgacccacatgtataaggatgcttagtggagcactgttcttacagcaaaaatatcagaaataaccttaaaaatgttcactgatcaggcaattattaaatagagcctagtggagtcttcagtgtaatattatgtaaccattaagaacatgctatagactgggtgcggtggctcatgcctgtaatcccagcacggaaagccgaggtggtgggattgcttgagcccacaaattcgagaccagcctaggcaacatagtgagatccccatctcta

SEQ ID NO: 224353 - DNA, 483 bp, Homo sapiens
aaagagactgactgtcatgttgtgaaatatacacttggttttcatctccatttcctggcacacaactcctaaaatccttggaatctccaaagtgatgtctttttggatgctcatgattgacagaccagctggcagcttcaggatggttcccagggaagaccaggtagaatcacaaggttcagcaccaccccgcaacctccaggtaggggagaggggctgaaggttaagcagatcatcagcggccaatgattgaatcaatcatgccttcgtaatgaggcctccgtgaacactcagaaggatggggttccgggagcttctggatggatgagcatgtggaggctcctggagggtggagcgcctggggagcacatggaagctctgcgtccctcccccataccttgccctacacatctcttcccctgtatcctttgtaatatcctttataataaactagtaaattccatgagccccaggaacatgtgt

SEQ ID NO: 224354 - DNA, 752 bp, Homo sapiens
aatgactctctaatgatagagtttcagatactacaacaactatgtaaaagagataaaaatgccagcatagtataaacatcaaaaactgccagaggagtaagagtctgccctgacagtgtttcagctacaccccattgtcagaatgtggatcgtaccattcgaattcccatgtgtccacatgaatgtgagcattcttgataatctcttatgtttagataccacaatggggcaccctcagggattttcctctcccttaatcatttcatcagtttgagattctagtgtggttggggaccaagaattgtttggtatgttagagaagcacataacattttaattgtgcttggagacagcgagactgaatgagggagagtaattaagaaacataaataaactaggaactctgctttgcctcacatcatatcattatggctcagaatgaactgctgagctttactatgagtgaaagaagcagccaaggccactgattttggaacaagagtaaggactatatggaatatgtaaggtgaagaatagaggcaactacagtgttattgtaattattttttattgtacatttacttcgtttatcatagaaaaacacactaattatgtgcggggtatatggcatgtgctctggccttaatccatgaacatcattatatcattttttattatttatttattcatttatttttgagacagtgtctcactctgtcgcccagtctggagtgcagtggtgctatctcggc

SEQ ID NO: 224355 - DNA, 316 bp, Homo sapiens
tttggagagctaagcaaatgtagtcggcacagtgctagaatttgaagagcatgatttcatgagaacgaaatccagaactttaactacgacagtgctgaagcaataaatgacttcaaaatatgaagccaagattgccagggtattactggatttctagctttggcaaaagaaaagacacaggaaaataacaaaagtcttagatccgtgtttgaaaaatattcaagcctgttggatgtcttttttttttttaatcttattcattgtggtatattagaaatggcttaatgcttaataaaattgtgatttgtagaatgta

SEQ ID NO: 224356 - DNA, 318 bp, Homo sapiens
tagatagcaggtggagagacataggtagtaatgtatggtgaattttcaatcattaatctgtttctttgttggtcacaaactcaagaatatattgcacgtataattctactcaaattatctaaaaaatacattatggttaacagacacttttacaagtagtatttaatcatactgtgaggattcaacattttttaaagggtaagcattttttataaaggggtttttgcttatctacattaattctttctactcaaccaaataatttacatgtcaaaacttaaaattgtatcttagtgattctcaaaattctcaagccag

SEQ ID NO: 224357 - DNA, 347 bp, Homo sapiens
gccctgccctagtggaattctttgggttcagtttttcatgttaaactcctcttcacccctaccctactttgtaagctctttaaaaagaaacttcctcctagggcaagcttatttttaaaaatactccatatacaaaaagttatttccaagccagcagattttggatagatataataggctcttctaggagtgctttttattgtgtgaatcctactttaattaccaaatatccaggttgcgcattctagttttgcacacctttccctctcctcgcatgtcctggagctgtgtaaccttcgtgtgcactttcacattttctcaccaacttgccgaggccccaagcccag

SEQ ID NO: 224358 - DNA, 412 bp, Homo sapiens
ctcagagagtgtggtgaggaggctttttgaacagacctaggggacacagagaggacaggggaatgcagactgtgggctgcccacggcagcaggggccagtggggaggcaaagaatcctctctgaccaccctccattccctgcagcttcctcaggcctctaggaccccgtcttatctttgtcctccccccctcctttgctccccctcgtctcccattcttctcttcttggtcatctccccccacccccacccctatcgcactggaaacagttgggctgtggtggctgagaatggggagggcggggtgggggagagggaggcccgagctgtttataggaactggagcagctccatccatcagctctgtttggaactggagaccaagcataataaataccttggctcctccccag

SEQ ID NO: 224359 - DNA, 301 bp, Homo sapiens
gggtgaggaacggcgtctgcgaatctcattacacagggtcccacgcctccctctgctgttctccggctcccgtttcttggctgccgccagtgggagtcgcacgggggtcacctgcccccacttttaatcaggacggggaaaaatgcaccaaaggagtgccgcgggttacctgagcagacccgggagcccgtctcctgagtcctgggggaggatcatttatttgtctgcagatcggcaagcgggcaggtttgcagagtccctgggggctagtagttcttataaaggagaatgcaccaccaag

SEQ ID NO: 224360 - DNA, 289 bp, Homo sapiens
ctgttgtgttggctgcatcctaagactggatgggaaaccaggaatgaagaacatgggtttagccaagggtgtggtagaagctgtgtcctagcaaggactgtctcttctaaattgttttttttctgaggcaatatttttcttttgacacacctttggacctacctattatagcttcttcactctgggcatggaccttggccactctatccatcacctttgttgacagaacagcaccagcttcttctaacaagagcatggtattgctttctccttcctacctggctggggc

SEQ ID NO: 224361 - DNA, 335 bp, Homo sapiens
tttgtagaatacacaccaaaaagttcttttgattccaggagattgaattctctcatcattcacctctctgtggacagacaagctagacatctatttgtatttagtaggtgataatgaccccttggcaagtgttacatctagttaccatcccgtgtgagacactcaagtgagtggggtatggggagaagcatggaagcaggaccttcctagggagaagcaaatcacagctgtaaggagggtagagaccagaggttttccagcccatccccatccttctgaggtcattgtcctgtgtcttcaggcagcaactctcagatatttgctgtgttcttcat

SEQ ID NO: 224362 - DNA, 427 bp, Homo sapiens
gtcaatttgcatttattttttgttattctacatttaaaaagcaaaataacatcaaatcaccactctctggatatgttatgcatggtaaaggaaatgttctgatctcattattttattatacattttcatatatatgttagacttttcttgaatagccataatttattatctatgagtatattaaaagttttcactttgcgttcagtaaaccatcacaattttttaaaaaattatgaaaagctgtaggaatcaaaaagtgaaataaaataagtatttatttcccaattttcagaggtatgaaatgaaggaagttaaaaagccaaaatctatctcaacatttctcaggtgaaaactaactcagaaatatttgagttgtgttaattttcactaagactgttaagggaaactgattttcttgtcaggaagg

SEQ ID NO: 224363 - DNA, 422 bp, Homo sapiens
ctcataaatggattaaactacacatggatgaatggattaatgggttatcatgggagtggaactggtggcttcattagaagaggatgagagaccggagcaagcatgttagcatgctcggcaccccccgcccaccatgtgatgccctgcactgcactctttagagagttccccttcccctgagcagaaaggatctcaccagatgtggctcctccaccttgaacttctcagcctctagaactgtagaaaatgtatgaattacccagtttcaagtattctggtatacaccaacagaatacagactaacacaactgaacccaactttgggcacatttctcaacctcctagagacttatctgctacatgggaatgtcacaatgcttattacaaagggctactgtgatcattcaataagaaagcaaaaa

SEQ ID NO: 224364 - DNA, 505 bp, Homo sapiens
acatcgaattggggaaaaaaaggttgtcattatttttccaaacatcttttttaatgcactaccctcattcctcatgttttcttctctcctttggggacttcaattaaacatatattaagccacttgaagttgtcccacagatcacagataatttggcttaaatttttttaaatcctctttgcttttggtttcattttggatagtttatattgccatggtttcacaatgaataatcttttcttctttaatatctaatctgccattaatcccatgcagtgcagttctcattttatacgttctagctttcacctctagaacagtgatccagagtgttgttatatcttccgtgcctcaaattagcttttacaatatgtggaatacagttttgatattgtttaatgccactgtgcccgttctgcatcagttttaatagactaatttgtctccttatggctattttcccacttgtttgtgtgcctaatatttctgattggatttcaaaaat

SEQ ID NO: 224365 - DNA, 466 bp, Homo sapiens
tcgaaatgtgaggacttctccaggagagagtctgaggagtagcaccactggatcctggagttattttattttactttaaaaaagttgttttattattttatttcactatttttgttgcccaggctggagttcaatagcacaatcatagctcactgtagccttgacctcctgggctcaagcaattttccctccttagcctgtggagtagctgggaccacaggctcaagctcccacacccagctaaatatgtgtgtatcaggagtttgagaccagcctggcacgtaccaagaccccgttcctacaaaaaaaaaaaattagccgggcatggtggcgggcacctgtagtcccagctacttgggaggctgaggcaggagaatggcatgaacccgggaggtggaggttgcagtgagccgagatcgcgccactgcactccagcctgggcaacagagcgagactccgtctcaaa

SEQ ID NO: 224366 - DNA, 452 bp, Homo sapiens
atttttttcttcattcctgtatcccctagagtactgcctaattcagccaaagcacccaataaatgtttatgaatgaataaattaatccaaagttctattataaatcccttttctaattcacccataatcttctttaacttcagctaaaaagcatctagaaaagtttgtcataaaaatctcttccttggttcacaaaggccaaggcctctcccaccaagagaaggatcagtcgatccaattaggacctgtctttccctgtcagtgcagaatacatagtgaagctttctagctttcaagtggagatttgaggaatctgcttgcatttcgtgtcccctactatccctaggttttttctggcgttcagaggcagacttcctcccactcccaggttgggtgaagccaagatctacttcatattagtgcttttccttatttccggagcaaggagtaac

SEQ ID NO: 224367 - DNA, 504 bp, Homo sapiens
cagaaacttgtacacaaatgttcatagaagcactattcacaatagacaaaagaaagaaacacccaaatgtctattgccaaattactgaataaggaaaatgtggcatatcatactatggaatattattcagccataaaaaggaagaaagcactggattatgatacaaatggatgaatcttgaaaacattatgataagtgaaagaagccagacacacaaggccacacattatatgattctatttatagaaaatatccagaatgagcaaatccatggatactgaaagcagattggtagttgtcagactgcgggtaggagagaatgaggagtgactgcttaatgggtataggatttccttttggagtgataaaatgtttttgaaagcagattgtgattagggttgcacaacactgtgaatatactattgttgaatttatactttaaaatgggaaattttgttgtgtgtattttaccaaaataataaatgaaactttcaaagttcagct

SEQ ID NO: 224368 - DNA, 143 bp, Homo sapiens
tctaacaattatggctcttaattgagcacttactttttgacaggctctgtgcctggcactgtacaaggggaccccgggaaaaggttcctctttcttttgttctcttccactctcatactcatgtgtgtgtgtgtgtgtgtgtg

SEQ ID NO: 224369 - DNA, 122 bp, Homo sapiens
aattgtgtatacataaggtatatagcatgatgttttgatatacatagtgaaatggttactggagtccagcccattaatatagccatcatttcatatagttttacccttcttttgtgttagta

SEQ ID NO: 224370 - DNA, 527 bp, Homo sapiens
agcctgggcaactgagcgaggctccatctcaaaaaaagcagtttgaggccactaagtatggtactctccagggctttaacatattagtatccaaaggcagattataggagtgttcattaattctcctgtgtacctttggacaacttaaactccctgttcctccattgcctcatctttaaaattagaaactatactaaattgtttataaagggaatattctgagatcctatgttcctagtaaaaccctgagtcattaagaaaagttcaggccgggcgcggtgctcacacctataatcccagcacttcgggaggctgaagcgggtggatcacctgaggtcgggagtttgagaccagcctgaccaacatggagaaacccagtctctgctaaaaaatacaaaattagccaggcgtggtggcacatgcctataatcccagctacttgggacgctgaggcaggagaattgcttgaacccaggaggcagaggttgcggtgagctgagatcgtgccattgcactccagcctgggc

SEQ ID NO: 224371 - DNA, 477 bp, Homo sapiens
gaggactacggccagaatacactcaaattttcccaggctagtaatacaacaagcatctttaatttaaaacaatgcaagatctctttctgctttattcttgcagattcttcatgattacaacataaacctgcgcccccttaacctgccactctctacttcgctggtgttgaacccaccagcagttttctttcttttttgagacagagtctcgctctgtcgcccaggctggagtgcagtggtgtgatctcggctcactgcaacctctacctcctggctgggttcaagcaattctcttgcctcagcctcctgaacagctggaattacaggcgcgtgccaccatgctcggctaatttttgtatttttagtagagacagggtttcaccatattggccaggctggtctcgaactcctgacatcgagatccacctaccttggcctcccaaagtgctgggattacaggcatgagtcaccgcgccc

SEQ ID NO: 224372 - DNA, 559 bp, Homo sapiens
ggtgctccttacctgggaggtctcccggcttagtttcggcctcgttgggtcggaatctccaaagacagtgggtttcagccagaaacgcgaagacgaacgcctagccggcgcgggcagaaccgaggacacaatgagatttgtgggaccgggcgcccagaggctggcgcgggggagaccccacagctaaaatgctcggtacccccgggcagtcgtgggttagttagaaccgcagagcctttcccgacccctcggaagcgcagaagtatccgaaatctacccgtttcttgggtccagcaaaacttttaagccaggtaaaccggtggttctgtttgtgtaaaggtgaccaggcatgattcctgtgacactttgctggggcagccatttctcctgccattgccgcggctttccaagatgagtgtccaagagtggagtaagggtccggggcctgagcaggacaaagacacacgctgccgcgacctgcgggaccagaacgaactctcagtgacatcttgaaagacattaggggtatccagatatttaagatgtaatgaaatacagc

SEQ ID NO: 224373 - DNA, 1121 bp, Homo sapiens
gcggagcgggtgcctcgggggaggaatgtgtgactcagtagccagttctcaggtccagtgttagtgatcctcaaacatatgccaaattccgggaagggggatggatgttctactcccagaagctcgtttactgcctggcagctgaacatcatgatctgggaatattctctgtattttggtcaatcaggtggtctaaaccttaccggctccagaaaacatttgggtaattagagtggtcacggatgacttaactggaatctgccctttcatgtgggcacctcatcctccctgcccctatttcgctgctcccttttctcctctctcagcctccaaaggacatgacagtttgcccaagatctgacctggaccttggctgatgcgatctctcgagcagagccagcgcatctggggctggtgcgtcatggctctgataggtttactcacagagtcccagggaaaggcctgcgggaggcagagactcgctatgggagaaaagtgagtgtctgatgaactgccttgcctaattacctaaattttgttatggaggaattaaaaatgcaacttcagaagcctttgaaggtttatctcaggcacccagcttgcggtggtgaaagcattttgtttggccataggggagtggtgggcaaggcttatattagagcagaagtatgttaatgccagcctcgtgttcttgtgggggaaggtggtttgcagcctaagagtcacagggcctgtttggcaggctgtggtccaagtgtgtttgtcagtcctggggagtaaacacacaaatattaattcgtctcttctccctggaacatctttgcttctgcttgctctgttctctgagaaatcccctctagatggtaaatttaattcagtataaagagataacactgttagaccgggcgcagtggcccacacctgtaatcccagcactttgggaggccgacgtaggtggatcacctgaggtcaggagttcgagaccagcctgaccagcgtgatgaaaccatgtgtctactaaaaatacaaaattagctgggcgtggtggtacatgcctgtaatcccagctacttgggaggctgaggcaggagaatcacttgaacccggtaggcgggggttgc

SEQ ID NO: 224374 - DNA, 411 bp, Homo sapiens
ggctggtctcgaactcctgaattcaggcaatccacctgcctcagcctcccaaagtgctaggattacaggagtaatccctcatatgaaattttctaatgcttgtaagctcagttattggtatgggagacctgtagcagttacatcaatttataggaaaaatagtgaaggtatcttaaaaagataagaaatgaggtaatgcttttcttgtcactccaagtcttaaatttattgtgacatgtttgctgttctgcagatgtgatcatctgtgtggcacttcctgtcagatgcacttggatcattgttcttgattatcagttttgaaggagaatcgcttgaaccagggaattggaggttgcaatgagccaagattgcgccactgcactccagcctggcgacagggcgagactatct

SEQ ID NO: 224375 - DNA, 393 bp, Homo sapiens
catactgattattattagctgaaagcacttgagaaacagcagactgtacaggaagggctttccaacctcctcttttctacctaaaaacaggctagaaaatttcccatgataaaggtgccctccctctactagaaagagaaaaacatccttatcaccagagatagggaatcaatgccaaaatggatctgaacaaacttattggaataacccttgtcttccactacttatccccaatatagctcttagtaatttccccaagcccctttgtcttgtcatttcttcacaaatttatcatttctttgtctaaaacatatataaacttgtctgctatggtgacttcttcgggtctacatttgcttgtgaggactcccaggtacatgtaaaattgtaata

SEQ ID NO: 224376 - DNA, 479 bp, Homo sapiens
gcaatgcagttgagtgagttggctagcagttttattgattcattgactgattcctttttgctactattcatttacttattcagtgcctactctgcaccagggtcttaacatacattatttctcatccttacaataggcctacaaggtgttggtattgttaatcctttacccccacactgtaccccaccttcccccaccgtgagccccagcctttctcagtttcacagatgagaaaatagaaatgtcaactgactgccaagctcctgcagtttgtaaattgtataatcagatttcaaacccagtttcctgtagctccaaagccaattggcccataatgccttttccttgccagggttgggatttgtgtttgagacagtgagctggggggaattgagagtgctaaaaagaggttgaagtgacagctcatgattaagtagacagggaagagaggaagccaaagatgaaggctggtggatggg

SEQ ID NO: 224377 - DNA, 156 bp, Homo sapiens
aaagccccattcttttcctcccaatcaaaaaacaagtaactgccttggtttcatctgttagaaatacccctgtggggtctatctttctgaattcttttgattactataaatgcattatagatcacgggaatttttttttctttttttttttttttt

SEQ ID NO: 224378 - DNA, 333 bp, Homo sapiens
aaacctctaacatagaagaaggagataaaatgaacaaacaataaaaagcaacttaaaaatggacaccatataaagaaaggaaaacagtttaaaaaaaaaaaaaacccaaaaccctattcttaagctacagagaaagcctggccaacatggtgaaaccctatctctactaaaaatacgaagtattttagccaggcatggtggcacatacctgtagtcccagctgctcaggaggctgaggcaggagaatcacctgcacccgggaggctgaggctgcagtgttctgagatcacaccacagcactccagcctgggtgacagagtgagaccttgtctc

SEQ ID NO: 224379 - DNA, 878 bp, Homo sapiens
aaatgttatacaagtgcagagcacttggctgccatccccctctcagaccatcaacagaacttgaccttggccaagattttgcctcatcctctcggcatttcagcatagagttgcgtttcagccatggaatgcttaaccaaaagcacatgctgtagtggtggtttccaaagagtaagtttttgcaaaaagtccacataatgtttcctcataacagcagctttctctgaaccaccaacccaacaaacctctaagtggtgattttttggcttatttgtccacaaggactgtgattttttgttttgtttttagcaatactttattaaagtgcagtataagtaacatatgataaagtgcacacatctaagaatacaactcaatgaattttgacaaatgcatatatccatataaccaccaggggctggtgtttttaatattttgtgaagcacctattctaatgatgtacgttttgggattggaaggttgtgcattcttctagctgagaaaattactataaaacagtaaatccagatcaaaatgtgatgaagatccacctgccacagagaaagtattaatagaatataaggctagggtgtaggagaagtggcccaggaaagccatccatgcaaattttgtttccttcctacttgagagggttggggatgagaggtccgtccttccctggctcataagcccatgagttgtgtaaaacactgttcagtaaggcagaatataagtcctcttatatattgagtccagacagttttcccttttgtcacatctagtggatttggttattgcaaagcttcatgtttgtttttagtaagttaatttttaaaaataggtaaaatgtgcacatagtataaaatttttaaaaaaca

SEQ ID NO: 224380 - DNA, 415 bp, Homo sapiens
cccacaaatttcagtttcctcttttaaaaatccagacgagtgtcttatataagttaagacaaaaaacacatagaagagtgtctgatgcatagtaagcgctcaataaatactagccatcacaatagtaccatattgttattggttttttcatgcagattaactgaaataacattatctggcatattccaggctttcagtgattttctttttgttttgagatggagtcttgctctgttgcccaggctggagtgcagctgcgccatctcagctcaccgcaacctctgcctcctgggctcaagcgattctcctgcctcagcatcccaagtagctgggactacaggcgagcaccaccacgcctgactaattttttgtatttttagtagagatggggtctcaccatgttggccaggctggt

SEQ ID NO: 224381 - DNA, 495 bp, Homo sapiens
gagaccgagattccctcttgttcctcaggctggagtgcaatggcgcgatctcagctcactgcaacctctgcctcccgggttcaagcaattcttctgcctcagcctcccaagtaactgggattacaggcaagcaccacccgtgcctggctaatttttgtatttttagtagagagggagtttcacctgtgttggtcaggctggtcttgaactcctgagctcaaagtgatctgcccaccttggcctcccaaagtgctgggattacaggcatgagctactgtgcctggccctcagtgattattttcaagttattgattataggaggtataccagcatactctatgtgggcttctgcttttgtcagcaaaataacttttcatttagtaagtatcaaagggaaataaaaacttagcattttgtataatagtgtgttaatctgtagtgaatcaggtaaaaacaacaaatctgagttatgtagcactgtggggcctggaggct

SEQ ID NO: 224382 - DNA, 437 bp, Homo sapiens
tcatcctcaacaagaaatgtatgacctcaacaagaaatcagcctgggctggaagagaagttgtcagagaacctgaggaagcttgaggttattctcaacactttgtaaagtgttctataatttgggtatctaggtggggagtccccagaaggccctgcttgaggtggtatccaatgtgtactcctacaaagacatgaaaagatttatccccattctttcctgtaatgtgacaagacactggatgacagctaaattactgctgatcatatttttgagagtatggggagagcatttgagaaaaagctttgtgaaacctcttgatctgcagaacctctttatcatgttttaacctctcagcttaatagttatattttatgatacttcacaacaaagtccaatctttcagaattaccatattaaactcatacctctgtatat

SEQ ID NO: 224383 - DNA, 148 bp, Homo sapiens
tttcataaagattcaagaagatactgcatcaataaagtaacaataagatgccttccagttttaaaataggggcatagaggcaggctggctttactccctctcacagaaaaccaaaaccaaacatacagcaccaatatctacaccaaca

SEQ ID NO: 224384 - DNA, 407 bp, Homo sapiens
tttttttggagacagagtctcgctctgttgcccaggctggagcacagtggtgcgatctctgctcacggcaacctccacctcccagcagagattctcctgcttcagccttatgagtagctgaggcaggagaattgcatgaacctaggaggtggaggttgcagtgagctgagattgcgccattgcactccagccagggtgacagtgtgagactccatctcaaaaaaaaaaaaagaaattgagaaacagaaaggttaaattactagcgttgaagcatagaacttccagaagagtaaaatgggatttgaatactggactccagctgcaaagccctacatagtggcctccctctatcccattgttaactaagaagtactggtgcctccattctgcaggtaagtagaggctga

SEQ ID NO: 224385 - DNA, 488 bp, Homo sapiens
cttctacctgctctgttccagcttcactggcagccgattggatagtgcccacccacattgagggtaggtctttctgtcccagtccactgactaagatgtcaacctcctctggcagcacactcccagacacacccagaaacaatactttaccagccatctagtcatccttcaatccaatcaagttgacacctaatattaaccatcccaagtaatgttccacaaaggcccctctgagagcacaaaggtacagagcttgtcacgtgattgtctggcagaagaacgttccaaaccatgaaactgcaattgcaccagtccaagcgcagatctgagcttgcatgctgaaaagacagaataaagatgctccgtggttggctgtacagtacagcctagagtatggcagggagtcaagttggaaatgtaactggaagccaaatgtcttaagtatcttacagaccaggatcagctatttggatttcattctaattgca

SEQ ID NO: 224386 - DNA, 507 bp, Homo sapiens
aatcccaccctgggcctccagctccttctgaagttggaagcttagcttacaggcagtagtactgtcttgggattctctggggtggttgccaggagggaagaggcagggataagggcttgggtgtttcttttatttaaaaaaagtattttttaatttaaaattttggaaaacttattgactaggtaggaacggttcaaaactcagaaagtaccaagactatgaaatcttcctctggcagccatcctggtgtgggatcctattatttcatgcttggcctatattctactctctaatgttttgcatttcatgttatttgtggtaattttaaaacttttgaaagcagtttttgtatacaatctcacttcataattggtctactgtggttctgctaatccccttcagctgcctcatgatccacctgttgatttctcactttttaaaattagaacaagagttgcatccaaagctcacagtaaagaataaaataaaattatttggctcattata

SEQ ID NO: 224387 - DNA, 332 bp, Homo sapiens
gttatctcctaatcaaggaaaggctaattagctgattcatggcataaatctacagacatttactaattccttttatggaatcttcaaatatgtccaggccattctagtctccataaaatgtgactgtgttttaaagatgaaaatgtttattctaagaaggggtgtctggtttgttcagaactccgcaaactactgaaatgatgttttcaggaccaaaacagcatttggtgattatataaatcaggcatgaacatacccacacacatgcatgcacagtttacagctaagaggacatgtgaaaattcccctacagaaagcagagctacggaata

SEQ ID NO: 224388 - DNA, 2089 bp, Homo sapiens
  misc_feature (519)..(519): n is a, c, g, or t
  misc_feature (608)..(608): n is a, c, g, or t
  misc_feature (684)..(684): n is a, c, g, or t
  misc_feature (739)..(739): n is a, c, g, or t
  misc_feature (1162)..(1162): n is a, c, g, or t
taaaatctaggtgtgatgcagttcagaataaataaattcaaatgacataggttgccttgctttgttgtagttttcaaaaatggacacaacagagttcatatttgataatacaaatagcccttgtcggtggcatgatagctttatccatcatttatagtttatgacttgtggttattttaaaacattgaaagaattttgaaaaaagtcataaatgtctgtaacactagcacttttaaggcagataatagacatctaaaatcttcagggcatggctatggctttagaatcatctgaataagttgaaaatatttaagaaatataggtctgttcatccaaagaattaaataatttgcctttgtcacgatggaataaataaaatatcacaggttatttttgttgtggtagatgccttttaacaaaaggcaatccctggagactgttgtagaaaaggacaaagcaaaacgggtgttttggttttgctttattttgattgattgttgtttgttgtcattactttcnttgtacaatcacttttccatggtcaccctcttttctgctttatactaattgccctgttgaggtgtttccatgtcaaatgcagctcttgncggaactgaaaatggcagtgccaagggagctgtgcaagtataatcaaagctggaagatttcctccatccacccgcnaccccaaggcttaagcattcccttaggaaccaaagctgactctttgggaaagttntcacagccttattaggttacaaccctgaaggtgttttgttgttttgaccttaaaattttgcgaactgttttgtgaactgtgtgtgtgtgcacacacatgtgcaaaggagttgcttgcaccttgagagagtcaatttttctgcctaagtgaaaggtcaggaactgcagttaacccagagtaaaatattggttgggtgaagggctcacttctagtatagtcagaatgggctcaagatcttaggaggatgataggtgatgaactgcttaaggtaggtactgttgtgtttgtgctttgtctcatgtggacaaattaccttgttgcatatgtgagttatgtggacataaacatatacagcagttactccctgactggctggctttcttaaagtgatagtcagaatatagcctgtactgtcagatatgnaagatcaatataattgaatgaaaaagaaagctgaaggacaatccaagaataatataaacataagctattttaaaacattagagggagtgctttatgcaaaagagaaactgaatttattgtttcattctctcttctctcccttcacccctttcaagaaaacgcaaagccacaagtgagtggttgtatgtgtctgatggcttatgtaaacatagaagaagtcttcagatggctaaaataaacatgcgcgtgttaccaaaggatatgtttacacaaaccatttgctcagcctctgaaataatgaataaatgaagattttactaaaataattgggaggatttttgtgtttctgcggatgccataattgaatggcaccaaagagacttttatcagctattttccgtgttacatgtgttagcagttcctttctgtgggttgaatacttcattctgtagttactttacacatgtttttctaagaaattgtcgtttattactgcaattctagagagttgcttgatttctcaagagaaatttagcagccagtaaaggttatttggatctggttggtcaggagagggagggcaaaaaaaaaaaaaaaaaagaaaaaagaaagaaagaaaaaaaaagtgtgggggggtaatagctctcattttatccatgtaacttaatttgcataacactcacctcagccattttccttgctttgttcataacattttctttgtaaaatgtatgctctcaaaagaatgaatatttaaacaaaaaataactttcaataatgggttgcaaaccatatgtttgtattacatatatgtgtttgtgtgtgtatgcatctatatgtgtgtgtgtatgtagtgtgtgtgtatatctccacatatatgtggcatacgtatgataagggcagtatgtccttaggtaatataaagag

SEQ ID NO: 224389 - DNA, 408 bp, Homo sapiens
ttctactttcacaggaaaagaatccatgttattttatatatgatcccaaaatcagttccatttctaattttgttactagtattgtactctgtctttttactaggaagattatgtagtgaaacctcacaatttatattttcctacaatttcttttcatattgagagaccttataatgtatcactgacagcatagtgtagtggttaggagcctgaactttggagcctgatgaaatgagtttaatttcctacttcttctgctcatctgttaatttaaactttttgttaatgtaatttttgagagcgcctcactctgttgttgaaaggtttctgtgatacactatatataaatttcttagcctggggcctgactcatggtaagcattcagtaagttataatattggttatgt

SEQ ID NO: 224390 - DNA, 1319 bp, Homo sapiens
ctgctgggccttggaagtatttcagttcggaaccccaattctaaccttagcttctcaggccattaaatgaaatctcatttctatgatgcttcctgtcacatcactgtgctgctgagaacatgaagtctgtgggtgaattggtggacgggatccagaatcattacttggcagtggattatagtgtgatgactcatttccggtggtctccaggagacttggctgggagcttctcttggagtctagggttagccagaggctacatgttttaggcatcttaattcatattttatctaaaggcatataaatccttaaaaaaaatcatttgacttcatccttgctccctacatccagccagtaaccattgctttgttttacatcgcgtgcttcaggctttactacagcctacctggattttgcagtagcttcttaaactgcttaaactttggatattgccccagccaacacattctgccacagagatctctctgagttaaatgggattgtatcatgccccacacccaagcagatagaaactgtcaatagatacacttagaatgaatatgcatggaatcaaattacattcagaatctaccactataggtagtgaatacaacaggatagcagaggctgggaagggtaatgggggttggggggtgggaggataaaggggttgggtaatgggtgtaaaaatctatagaaggaatatgatctgttgtttggtagcacaatagggtaaatacagttaataatttattgtatatttcacaataaaggagtggatttggaatgttctcaacacaaatgataaatgtttgaggtgatggataccccaattaccctgatttgatcattatacgttgtatgtttgtatcaaaatatcatatgtaccccataaatatgtacaactattatgtatccataaaaattggaaataaactaccaccatctttcttcagcctattttcctatctcctctcgcaccatactaggcacacaatctctgtacctgtgctgtcttccaagccattgctcatgttttaagaaatatacttattgtttaatatatcctgtaccactgtaggatgactgtagttaacaataatgtgtagtttcaaatagctaatagctggaaggaagttgttgaatgtttccaacataaagaaatgataagtgtttgagatgatggatatgctaattaccctgatctgatcactacacattatatgtatggaaatatcattgtgtaccccatgaatatgggcaattattatttgttaattaaaaaaataaaaaaaagacccacccactgtttaaaaaaa

SEQ ID NO: 224391 - DNA, 403 bp, Homo sapiens
gcacgaggttttgcaatttgcagtttgatgattcttttaacttgtgttagtgaactcagagattaaactagttatgaaatctccggatacatgaagtgtatgtttgtttagtaataggctaaagtaaaatgactcaatttggtctagacttggtctctaagctggagttccaacgagtttaggatctcttctttctgtaaattcagagtttttatagtcaggaaaaacagaagacatattttattggttctagtagaaaactcttaaatagcatactcatagccatgttcaaatcctttgctgtcagaataaaccaatgttgtattagttttgctgtatttcatcattgtgttttatgatcttgtatctctacctggcgctatggaataaataaaatgcctta

SEQ ID NO: 224392 - DNA, 1521 bp, Homo sapiens
gagaaatcttggcatgaccagtgtgcacgtttccatcctgaagtgttttctcttcactagaaatgtgattttctataaattccccttgaatttatagtgtgatgccaaataaaattttctcaggatcttattaggttgaaccatatgtaattgccaagattttactattttaacttagaaaaaccatcgtttcatatgattcaccctaatagatacctccattattctctaaatgaaatagaagactttggagtatatgtttttaaagtaattttttaaaatatggtaatgtattaaacttatttttatagttatgaaattatgtgtaataatgctttatgttatacattaaatgtaaagacttgtgaatccatgtttgattgactttcatagtttcctgcattgaaataaaatcactatgaattctagtttatcagcatgatgttaaatgtcagtgccataccatgatgcagcaccatgacactaacgccatgaattcaaacagcacgttttacacctggaacttcatcagaccaatactttgcagttagagagaatttaatatctagaaaagcttgggaggttagtcaggacttagggagtatacataaatggttacttgttgtaatgagccctttattggtgaggttgcaatagcttccagctcttactgtgtcagatgaagcatctgtcattatcttaagcctgcagagttgaaaggttataggctctttcctaccctctcatcataatttttccaaagcaaagaggaacttggcttctggggttcgtgccttagtgagaaagaatcttttccaatagttccaatgggggaatttttggcttgctgattttatcaattgccttgacacctgacaaaccctaaatgaagtctatgtaggtgagtcatctctgttccacctgatttacagtattggaatttagacttgcaaaaacatcattctgcaaatatcttagataattacagaatcaggagcatttgagaactctagaggtctcagaaatcatcacataggggccatgcttcgtagatagggatgatagagaggagacctgcccaagttgaatttccatggccttcctcccttccttagttccatgataaagtatggacagtaaaccactacttgagctacctaaggtgaattaactctcagggaaccctcttccagttctttaccttgcacagtgaaagaatcaatggcacctagaaagttaaatccctttaggcccatacactagagacatgttttgtttgaacaatgtagtttaagtacttgaatgtcacactatataactgaggttagagaaaatgtttcttctagcccttacagggtgtgattcttaaacacaatgtccaaggtgtatacaaggatatgtattgtaacaactatgggtatgtatattttgcagagcgtagtttctatatcttgaaaaggaaaatattttcataaattgtttttataagtactaataaaataatatgaaagaaagctatat

SEQ ID NO: 224393 - DNA, 1011 bp, Homo sapiens
ggggaatggggagggatagcattacgagacatacctagtgtaaatgacgagttaatgggtgtagcacaccaacatggcacatgtatacatatgtaacaaacctgcaggttgtgcacatgtaccctagaacttaaagtataattaacaaaaaattaaaaaaataaataaatgcaagcggaatattgtcaaaaaaaagaaaaaaaagaaaaaaactggataaattaggcttcatcagaaacttaaaatttctcagctaacaaactgagagaaaaatatgtgaaaaatatgtgtttgatacaggactgttgtcacaagatatgtaaagaactacaaactggtaataaaagtcagcccctttgcctgcaaaaaaaaaaaaaaatgggcaaaggatttgaagagacacttctcagagtaagatacataaatggccaatcaatacattaaaaagtgctcaaccttatcagtcatcagagaaatacacacttaaactgttatcagaaaatatccactagaatggctaaaagtaaaaatgacaatgccaaatgttgatgaagctgtggagcaactggaactctaatacactgttggtggaagtataaaatggtacaacctgtttggaaaaaaagtctgtttctttaaaaaccaaacacatgcctaactctatgacccaacaatttcattcactgccatctacctaagaaaaacaaaagcatttgtccttccagacttgtacagtaatattcatagcaggtttattcataatacctcagaaactggtgacagtccagatactcaccaacatgagaatgcataaactgatatgttcaaggaagtctgttctttctttatggagaagtacttttaaatagttgaagacttatctttcatagcctcttctctttaatggtcaaacacctcaagttcatcccagcagttactacaagaaatgtttttcagtttcttcagacacctgccccctttcccattactctcctttagacatgctccact

SEQ ID NO: 224394 - DNA, 428 bp, Homo sapiens
aacaaaagctctctgagggcaggatttttttatggtgttcactgggccagggaccaggcgagccactcaaaactgcggggtgaacgagtgagtgactctccacccaggctgaagagcagcagcagagaacacccacatctggggcccagcaaccctctttaagcgcctgcaggagaaggggaatgtgcaggtcacttgagaggctcttttgagaaatggctgaatccaagatcggggcagaagaagtacaagacatgtctgaactatctttttgtgccacaaaagtaatgaaatgttcaaagaatcccgacaacatgtccaaaggacccaggagctcccactggccaaacctgggacaatctgagcaccaaaataaatcataagtgtaatggattcaaatctaataaataaaattattcataagtcca

SEQ ID NO: 224395 - DNA, 511 bp, Homo sapiens
taataggagacatggtggaggcttgccagcacactccctgacatcagagacctaagtcattatcacgaagcccattttgcagatgaagtagcagagattaaatgcaaagatgatatggagtggcgtaaagagtacttgaacaggagtcagatggccaaacctcaactctgcggctatcaacgggaccctgaagaagtcacttcacttctcagttctcatgttcctcaattataatatcaggctaatgggcttactttccagaataccagaggaagaggttgagaagttatcctgttggcagccagtgaaatgtaaaggttttcaaacttaggaatacaggaaaacctcatgtgttttgaggactactctggaaatagtgtggagagttaaattgagggactgagacaagtaagcagaccaatgccacataatatacaggaaggaggcccaagagcccgttctcagctgctggtgacgagggtaaaacagggcctcaccccagaatcagaag

SEQ ID NO: 224396 - DNA, 803 bp, Homo sapiens
tcagctctctgatttcttctcccttcgcccacagcacccacagttcaggggaaccccccaaatcctactccagcaccatgagtttggagacagactccataacccacctcagcccctcaagttcaggggcaacccctaccatccagccgagccccagctccacagattcaaggatgataccctcctccccacaaccagagacaatcacgcaccctagttctggctcccccagtgcagagctcaccccctcttcccattccaccctccccagttccgaatccctgaccccgcactggagccccacttcccacagccccggaacggagcccttgacctccactgaccagaccttggagccccctggcccagctccaggtgacactgggccccgtgagttacacaggaacccgagtgtggtggtggtcgtgtgtttgctggtgtctcttttgctcatcgggtctgtggtcatggctgtgagattctgtcaccggaatgagtccaagtttgagaacctggacgaggtgtccatggtaaggtagggctgggctgggggctcagccctggggccaaggcatggttgggggagctgctatcccaagcagggccaacctgggctgcagagccttttggtgtctgaatgcctccctgtgtgttccttcctcagggatccgtgaatgacagattgtcctttgcccaccacctccaggagtgagccctgaggagccaacagagatgggggcatggatggggctggggttcctggggaggagcagaacctgaggaaataaagcccctaccattca

SEQ ID NO: 224397 - DNA, 713 bp, Homo sapiens
tcagctctctgatttcttctcccttcgcccacagcacccacagttcaggggaaccccccaaatcctactccagcaccatgagtttggagacagactccataacccacctcagcccctcaagttcaggggcaacccctaccatccagccgagccccagctccacagattcaaggatgataccctcctccccacaaccagagacaatcacgcaccctagttctggctcccccagtgcagagctcaccccctcttcccattccaccctccccagttccgaatccctgaccccgcactggagccccacttcccacagccccggaacggagcccttgacctccactgaccagaccttggagccccctggcccagctccaggtgacactgggccccgtgagttacacaggaacccgagtgtggtggtggtcgtgtgtttgctggtgtctcttttgctcatcgggtctgtggtcatggctgtgagattctgtcaccggaatgagtccaagtttgagaacctggacgaggtgtccatgtagttctgggagttggtggattctggcttggcccctgtgagcccccttggtggtggtatcatccggagaggcttctcgggtaccccattgctgccatcgctgccgagccgccttgtgttgcctggagaggtcgagcccagtacccatgtggtgttcaccattgaggcttaagggacagagaaa

SEQ ID NO: 224398 - DNA, 669 bp, Homo sapiens
tcagctctctgatttcttctcccttcgcccacagcacccacagttcaggggaaccccccaaatcctactccagcaccatgagtttggagacagactccataacccacctcagcccctcaagttcaggggcaacccctaccatccagccgagccccagctccacagattcaaggatgataccctcctccccacaaccagagacaatcacgcaccctagttctggctcccccagtgcagagctcaccccctcttcccattccaccctccccagttccgaatccctgaccccgcactggagccccacttcccacagccccggaacggagcccttgacctccactgaccagaccttggagccccctggcccagctccaggtgacactgggccccgtgagttacacaggaacccgagtgtggtggtggtcgtgtgtttgctggtgtctcttttgctcatcgggtctgtggtcatggctgtgagattctgtcaccggaatgagtccaagtttgagaacctggacgaggtgtccatgggatccgtgaatgacagattgtcctttgcccaccacctccaggagtgagccctgaggagccaacagagatgggggcatggatggggctggggttcctggggaggagcagaacctgaggaaataaagcccctaccattca

SEQ ID NO: 224399 - DNA, 371 bp, Homo sapiens
agacagactccataacccacctcagcccctcaagttcaggggcaacccctaccatccagccgagccccagctccacagattcaaggatgataccctcctccccacaaccagagacaatcacgcaccctagttctggctcccccagtgcagagctcaccccctcttcccattccaccctccccagttccgaatccctgaccccgcactggagccccacttcccacagccccggaacggagcccttgacctccactgaccagaccttggagccccctggcccaggtgagtattaagagatttgggtgtttgtagggaggtggcgggtgtaacaggctgcagttttggaactgaccaccagggggaggtacagc

SEQ ID NO: 224400 - DNA, 234 bp, Homo sapiens
cagtaacagttctattactaccaacctaattaaacaaaggattataagagaatgctacgaacaattgtatgccaacaaactggataacctagatgaaatggataaaatcctagaaacacacaactcctcaaaagtgtatcatgaagaaaatcctggataatctggatagatctataactaataggagattgaaacaataaagaaaagaacaaagaaaagtctaggatcagatgg

SEQ ID NO: 224401 - DNA, 455 bp, Homo sapiens
gtgtctgagagtccaagggtcagatcctgggtgttaatctctgtacccacaactctcttcacaggtgatttatgcagtcctatcttcaaactccatctatatgctcctgactcccctatctgtatctctacccttaccccagaactctattcaaaaatccaacagcctagctgcatcttcatttggagccaggacatgtcattttcctgattatgacaagccaaagactctccgaacccttcctgtggtgtacagaacctcatgtgatctgacctctgcaaatctttctgacctcttttgataccacacctacccaggcaattggcctgttctctgtcccaaaaatacaccatcttttctcactgtaaggtccttgtacttgctgttccctctgcctgtaatgcttttcccttgatttctttgcatgactggttcctttttgttattcatagctc

SEQ ID NO: 224402 - DNA, 179 bp, Homo sapiens
actttcatcaaaggagtttagtaattacaagtggccacatgactttttagtggttcagtttaaataagcctaattagattacagagttctagtgttacattttaatttgcttttaaaattttttggtttggatttatcaaaatctccaaagcacacttctttaaaatccaagtcgacgc

SEQ ID NO: 224403 - DNA, 549 bp, Homo sapiens
caattttaagaacaggttatgccatctagctttacttctttggaaagggtattaatcttatttgctatgtccattattataaggaagtaaatccagagtttacagaatcacaaatcattcatcagaatgattgccactacccacagagcatatctttttaaacttctagacccgatagccataatcaagatgtctccagaaagctgttagcacaaagcacatatcctgaaaccatttgcctcagctctaatctgcaaataaaataagtaatagttggacaaatctgtcagtaagcatttctggttttgctttagtcttcagtttaaagagcataaagcaaagccagtgcatttgtttatgttataatagtggccatcatttagaactatgtattagacagctagcatacaattattgattcacaaattgacagctgagcgccatggttcatgcctgtgatcccagcactttgggaggctgaagtgggaggatcacttgagttcaggagttctagaccagcctgggcaagatggtgaaaccctgtctcta

SEQ ID NO: 224404 - DNA, 357 bp, Homo sapiens
gacttctatgtcagtgtttactattattattaaaaaattatattattgagagtttattttttgagtcctattgagatatggattgtcatcaaacttttatagtttttatttaaagcttttcactgatgatttaggtcttgctgagcaaatttacctagtattatctttaattatcccaagctatatcacacaactcatacaactcttccccacaggttgaggagtccttttgtttaaaattgtttcactgtaatgctttcttactattaatgtcagtatttctacctcagatgttaggtagaactgtgtttaacttggagtggcatttagttactcagatgttaggtagaactgtgt

SEQ ID NO: 224405 - DNA, 420 bp, Homo sapiens
gacaccaacagactcagtaagctgcccatcctcatactaggaaaacccttcaaagtgctgggattgcaggcatgagccactgcacctggctgaatgtcttgtttttgattaggcacttaagaaaggcctaggtactaaccataaaatatatttttataccttttgttgatactatatatatagaaaactgcacttatcataaccttagacaccttgaagaatgttcacaagcagaactaacccatgtgacccagcatccagatcaaaaacagcattatcagcccctctagaagccctcttgggccccttccattcactgtccttcttgtcaccagggtagctactatcctgacttttgatggcatagattagcattacctgttcttgtcattttataaataaaaccatactgtgtattct

SEQ ID NO: 224406 - DNA, 422 bp, Homo sapiens
aacatggaaatttttccaaaattgcaagaatacaacgcctataggttagacttacaatatgagaatggaagaatgtaaaaaaccacttcttctgaggcctttccatcccactgagggagatgctaaggggcaagtcagaagctcccaaggcccccagaacccatagtaacctttctagtctacagaagactctcttttctctctgtttcttgaaggcattttcccttgacctcccctttctgagacacctaatactgtcctatcaatgagtttgggtctgaagttgacaaaatcaaatgtgtttaagacccataaggaaaaataatgtttgaagtatctgtttaaaagacaaaatgcaaaaggctgtgggaaactagaaaatttatgatttgcttaaaggcaacctaatttttttattaaaa

SEQ ID NO: 224407 - DNA, 567 bp, Homo sapiens
cactgggagtatggtaagggctagatgagtgttagctgctgcaccgcaggccagacctgctcttggagtttggtcattgatgaaaggctgctgggagtctcagaccctatctgagaaaagaagaacacatcctggttcacctgagctcagaaggcatcacttctcaccatcacctcctcaaatctcagcgtgtgtcttacagagcctgagccagaattgtgggggagtggttgctgttttgttttaaagcatgcagataaaattccaattatgatgacacattcagatctctgacccccaaggaggagtcaggtcataggaaattcctccagccacctattgtcacctgcttttcatgacctgcatgagggggaaggccttagggctaggctcagagtggagagcctggatccacaggttgagccttcacgcctcaaagggcctgtgcctaggctgtctctgaagaaaacgagttgacctaaaatgaataaaaaatgggaagaaaatggagttaatttgtcagttccaaactcaaagacaaaataaattttaactgaattgcaaatg

SEQ ID NO: 224408 - DNA, 498 bp, Homo sapiens
gcggagtcctcaaaagtaaacagcttagtatcagtgatgttcaaaagaaacataaatgtccacagcagaagggcttgttcttggcagactctggtatgcaggagtagccatatcccacgtggctgttctatgccaccgaggccccttctttctcagcagcgcatggtgctgtaggctcactggtctctgcctttccactccaagagcacatatattcccccttgggccaaactatttttgactgccagtggtccacgaggctcaaactcttgtctgttacttgctacctaagaaaggcattttagaagcagaactcagtccttgaatatcagccccagagcataaattcagctcattttcacactttgtgtatcatgtatggttccttccatgctacctttggttaatatatatcttttgtcagttggatattgcactgcctttcctttggcatactctatttttttaaagcatgatacttctaaggaaatcagtgta

SEQ ID NO: 224409 - DNA, 2295 bp, Homo sapiens
agtcgctgtacatctcatggttgctaagaaacggagcttccacaaaccagatagaggttctccagcttttctttgattgtctctgctttagcgtctctaaatccggtcaccatgtcggaccccgaaggcgagaccttgcgaagcacctttccctcttatatggccgaaggcgagcggctctacctgtgcggggaattttctaaagccgcgcagagcttcagcaacgctctttaccttcaggatggagacaagaactgcctggttgctcgctcaaagtgcttcctgaagatgggagacttggagagatccctgaaggatgctgaggcttcgctccagagtgacccagctttctgtaaggggattttgcaaaaggctgagacactgtacaccatgggagactttgagtttgccttggtattctatcatcgaggctacaagctgaggcctgatcgggaattcagagttggcattcagaaagcccaggaagccatcaacaactcagtgggaagtccttcttccattaagctggagaacaaaggggacctctccttcttaagcaagcaggctgagaatataaaagcccagcagaagcctcagcccatgaaacacctcttacaccccaccaagggagagcccaagtggaaggcctcgctcaagagtgagaagactgtccgccagcttctgggggagctctacgtggacaaagagtatttggagaagctcctattggatgaagacctgatcaaaggcaccatgaagggcggcctgactgtggaggacctcatcatgacgggcatcaactacctggatactcacagcaacttctggaggcagcagaagccgatctacgccagggagcgggaccggaagctgatgcaagagaaatggctgcgggaccacaaacgccgtccctcacagacagcccattacatcctcaagagcctggaggacattgatatgttgctcacaagtggcagtgctgaagggagtcttcagaaagctgagaaagtgctgaagaaggtactggaatggaacaaggaagaggtacccaacaaggatgaactggttggaaacttgtatagctgcatagggaatgcccagattgagctggggcagatggaggcagccctgcagagccacagaaaggacctggagatcgccaaggaatatgaccttcctgatgcaaaatcgagagcccttgacaacattggcagagtttttgccagagttgggaaattccagcaagccattgacacgtgggaagaaaagatccctctggcaaaaaccaccctggagaagacctggctgttccacgagatcggccgctgctacttggagctggaccaggcctggcaggcccagaattatggcgagaagtcccagcagtgtgccgaggaggaaggggacattgagtggcaactgaatgccagtgttctggtggcccaggcacaagtgaagctgagagacttcgagtcagccgtgaacaattttgagaaggccctggagagagcaaagcttgtgcataacaacgaggcgcagcaggccatcatcagtgccttggacgatgccaacaagggtatcatcagagaactgaggaaaaccaactacgtggagaatctcaaagaaaaaagcgagggagaagcttcactgtatgaagatagaataataacaagagagaaggacatgaggagagtgagagatgagcccgagaaggtggtgaagcagtgggaccatagtgaggatgagaaagagacagatgaggacgatgaggcttttggggaagctctgcagagcccagcaagcggaaagcagagtgtggaagcaggaaaagccagaagcgatttgggagcagttgccaagggcctgtcaggagaattaggcacaagatcaggagaaacaggcaggaagctactagaagctggcagaagagagtcaagagaaatttataggaggccttcgggagaattagagcaaagactctcaggagaattcagcagacaggaaccagaagaactaaagaaactttcagaagtgggcagaagagagccagaagaactgggaaaaacacaatttggagaaataggagaaacgaaaaaaacaggaaatgagatggaaaaggaatatgaatgaagccatcggtagagatgaggatcaggaagctggtgttcagagggatcatgggattttattaaactggattttcaagcgatttgtctgttataggaaaaatgagggttttacttctgctgctttccatcactattttgccattaaataggtgtctttcactcttgc

SEQ ID NO: 224410 - DNA, 845 bp, Homo sapiens
agtcgctgtacatctcatggttgctaagaaacggagcttccacaaaccagatagaggttctccagcttttctttgattgtctctgctttagcgtctctaaatccggtcaccatgtcggaccccgaaggcgagaccttgcgaagcacctttccctcttatatggccgaaggcgagcggctctacctgtgcggggaattttctaaagccgcgcagagcttcagcaacgctctttaccttcaggatggagacaagaactgcctggttgctcgctcaaagtgcttcctgaagatgggagacttggagagatccctgaaggatgctgaggcttcgctccagagtgacccagctttctgtaaggggattttgcaaaaggctgagacactgtacaccatgggagactttgagtttgccttggtattctatcatcgaggctacaagctgaggcctgatcgggaattcagagttggcattcagaaagcccaggaagccatcaacaactcagtgggaagtccttcttccattaagctggagaacaaaggggacctctccttcttaagcaagcaggctgagaatataaaagcccagcagaagcctcagcccatgaaacacctcttacaccccaccaagggagagcccaagtggaaggcctcgctcaagagtgagaagactgtccgccagcttctgggggagctctacgtggacaaagagtatttggagaagctcctattggatgaagtgaccttcctgatgcaaaatcgagagcccttgacaacattggcagagtttttgccagagttgggaaattccagcaagccattgacacgtgggaagaaaagatcctctgg

SEQ ID NO: 224411 - DNA, 1815 bp, Homo sapiens
aacccaggacccttctgttccaccacatgtccttcttccattaagctggagaacaaaggggacctctccttcttaagcaagcaggctgagaatataaaagcccagcagaagcctcagcccatgaaacacctcttacaccccaccaagggagagcccaagtggaaggcctcgctcaagagtgagaagactgtccgccagcttctgggggagctctacgtggacaaagagtatttggagaagctcctattggatgaagacctgatcaaaggcaccatgaagggcggcctgactgtggaggacctcatcatgacgggcatcaactacctggatactcacagcaacttctggaggcagcagaagccgatctacgccagggagcgggaccggaagctgatgcaagagaaatggctgcgggaccacaaacgccgtccctcacagacagcccattacatcctcaagagcctggaggacattgatatgttgctcacaagtggcagtgctgaagggagtcttcagaaagctgagaaagtgctgaagaaggtactggaatggaacaaggaagaggtacccaacaaggatgaactggttggaaacttgtatagctgcatagggaatgcccagattgagctggggcagatggaggcagccctgcagagccacagaaaggacctggagatcgccaaggaatatgaccttcctgatgcaaaatcgagagcccttgacaacattggcagagtttttgccagagttgggaaattccagcaagccattgacacgtgggaagaaaagatccctctggcaaaaaccaccctggagaagacctggctgttccacgagatcggccgctgctacttggagctggaccaggcctggcaggcccagaattatggcgagaagtcccagcagtgtgccgaggaggaaggggacattgagtggcaactgaatgccagtgttctggtggcccaggcacaagtgaagctgagagacttcgagtcagccgtgaacaattttgagaaggccctggagagagcaaagcttgtgcataacaacgaggcgcagcaggccatcatcagtgccttggacgatgccaacaagggtatcatcagagaactgaggaaaaccaactacgtggagaatctcaaagaaaaaagcgagggagaagcttcactgtatgaagatagaataataacaagagagaaggacatgaggagagtgagagatgagcccgagaaggtggtgaagcagtgggaccatagtgaggatgagaaagagacagatgaggacgatgaggcttttggggaagctctgcagagcccagcaagcggaaagcagagtgtggaagcaggaaaagccagaagcgatttgggagcagttgccaagggcctgtcaggagaattaggcacaagatcaggagaaacaggcaggaagctactagaagctggcagaagagagtcaagagaaatttataggaggccttcgggagaattagagcaaagactctcaggagaattcagcagacaggaaccagaagaactaaagaaactttcagaagtgggcagaagagagccagaagaactgggaaaaacacaatttggagaaataggagaaacgaaaaaaacaggaaatgagatggaaaaggaatatgaatgaagccatcggtagagatgaggatcaggaagctggtgttcagagggatcatgggattttattaaactggattttcaagcgatttgtctgttataggaaaaatgagggttttacttctgctgctttccatcactattttgccattaaataggtgtctttcactcttgc

SEQ ID NO: 224412 - DNA, 1832 bp, Homo sapiens
gagccatccaccagctgccccttctggctagctcctcatatcttgccataaggggcccatagcatggaactccctgatagtggggctctggctgcctcctggcctggataaacccactcctgccactatgcgcactcacactcctctctgtttcaacaactccaagcagagcaagttcacagagggccctgcagcggccaccgggaggaaacaggaggcaaatcccttagaggcctgttctccttggcgcctcctcacaccccttccccacagacctgatcaaaggcaccatgaagggcggcctgactgtggaggacctcatcatgacgggcatcaactacctggatactcacagcaacttctggaggcagcagaagccgatctacgccagggagcgggaccggaagctgatgcaagagaaatggctgcgggaccacaaacgccgtccctcacagacagcccattacatcctcaagagcctggaggacattgatatgttgctcacaagtggcagtgctgaagggagtcttcagaaagctgagaaagtgctgaagaaggtactggaatggaacaaggaagaggtacccaacaaggatgaactggttggaaacttgtatagctgcatagggaatgcccagattgagctggggcagatggaggcagccctgcagagccacagaaaggacctggagatcgccaaggaatatgaccttcctgatgcaaaatcgagagcccttgacaacattggcagagtttttgccagagttgggaaattccagcaagccattgacacgtgggaagaaaagatccctctggcaaaaaccaccctggagaagacctggctgttccacgagatcggccgctgctacttggagctggaccaggcctggcaggcccagaattatggcgagaagtcccagcagtgtgccgaggaggaaggggacattgagtggcaactgaatgccagtgttctggtggcccaggcacaagtgaagctgagagacttcgagtcagccgtgaacaattttgagaaggccctggagagagcaaagcttgtgcataacaacgaggcgcagcaggccatcatcagtgccttggacgatgccaacaagggtatcatcagagaactgaggaaaaccaactacgtggagaatctcaaagaaaaaagcgagggagaagcttcactgtatgaagatagaataataacaagagagaaggacatgaggagagtgagagatgagcccgagaaggtggtgaagcagtgggaccatagtgaggatgagaaagagacagatgaggacgatgaggcttttggggaagctctgcagagcccagcaagcggaaagcagagtgtggaagcaggaaaagccagaagcgatttgggagcagttgccaagggcctgtcaggagaattaggcacaagatcaggagaaacaggcaggaagctactagaagctggcagaagagagtcaagagaaatttataggaggccttcgggagaattagagcaaagactctcaggagaattcagcagacaggaaccagaagaactaaagaaactttcagaagtgggcagaagagagccagaagaactgggaaaaacacaatttggagaaataggagaaacgaaaaaaacaggaaatgagatggaaaaggaatatgaatgaagccatcggtagagatgaggatcaggaagctggtgttcagagggatcatgggattttattaaactggattttcaagcgatttgtctgttataggaaaaatgagggttttacttctgctgctttccatcactattttgccattaaataggtgtctttcactcttgc

SEQ ID NO: 224413 - DNA, 850 bp, Homo sapiens
agtcgctgtacatctcatggttgctaagaaacggagcttccacaaaccagatagaggttctccagcttttctttgattgtctctgctttagcgtctctaaatccggtcaccatgtcggaccccgaaggcgagaccttgcgaagcacctttccctcttatatggccgaaggcgagcggctctacctgtgcggggaattttctaaagccgcgcagagcttcagcaacgctctttaccttcaggatggagacaagaactgcctggttgctcgctcaaagtgcttcctgaagatgggagacttggagagatccctgaaggatgctgaggcttcgctccagagtgacccagctttctgtaaggggattttgcaaaaggctgagacactgtacaccatgggagactttgagtttgccttggtattctatcatcgaggctacaagctgaggcctgatcgggaattcagagttggcattcagaaagcccaggaagccatcaacaactcagtgggaagtccttcttccattaagctggagaacaaaggggacctctccttcttaagcaagcaggctgagaatataaaagcccagcagaagcctcagcccatgaaacacctcttacaccccaccaagggagagcccaagtggaaggcctcgctcaagagtgagaagactgtccgccagcttctgggggagctctacgtggacaaagagtatttggagaagctcctattggatgaaggtttcggacactttgttggcacggggccttgggggaaaggaaatctgggtggatgcttcatgcatgagctgaaggcagaacctgtcatataatattagctgacgtgtacctgtg

SEQ ID NO: 224414 - DNA, 292 bp, Homo sapiens
ggtcttcacccttttctcttcctctttacattctacccattctttaaaggccttgtgaaggcctttaagtgacctcctcttttctattacctatgtgtctcatggccactccctcagctgtttcacagagctttatttatactcacttcctttaaagtatttattatagtctttctcttggtatagctgtctctcaactgtaaacttcttaagaacagggatattgtcttcttgggtttatatattctccatagcaactagcactgtctttaacattgttattgctcgataa

SEQ ID NO: 224415 - DNA, 369 bp, Homo sapiens
tggtttccagcaattctctgcctcagcctccccagcagctgggattacaggcacctgccaccgtgcctggctgatttttgtatttttagtagagatagggtttcaccatcttggccaggctggtcttgaacttgctgacctcgtgatccacccaccttagcctcccaaactgctaggattacagatttgagccaccacgcccagctttgatgactaaattttaagaaatgctttagcaattcttcatacacctttcacttatcttatagttacttaattcctctactcttatcatttgatattttcattttattgtgtatctctgtaaggccaaatcaatagattttgaacaatctcacacttaacctt

SEQ ID NO: 224416 - DNA, 721 bp, Homo sapiens
gaaaaaaggtttaattgactcacagttccgcatggctggagaggcctcaggaaacttacaatcatgacaggaggcaaagggggagcaagcaccttcttcacgtggtggcaggagagagagcaaagtggggcaagtgccacttttaaaccatcagatcttgtgaaaactcacataccattatgagaacagcgtgggggaaactgcccccatgatccagtcaccacccaccaggtccctccctccactcgtggggattacagttcgagatgagatttgggtggggatgcagagccaaaccctatcagcatggaagttctggcctcccaccagtgatcctcactcttctcccagctgcagggtgaagaagccagtcagcatggtccttctctaatgatattatatagttagaatacaagttaaaataatttctcttggccagatgcagtgactcacacctgtaaacccagtgatttgggaggccaaggtgggaggatcccttgaggccaggagtttcagactagcctgggtaacatagtgagaccccatctctacaaaaaatttaaaaattagccagatatggtggctcatgcctgtagtcccgggttctctggaggctgaggcaagaggatcacttgagcccaggagtttgaggatgcagtgagctgtgatcgcaccgctatactccagtctgtgtgacaaagcaagaccctgtctctttaac

SEQ ID NO: 224417 - DNA, 680 bp, Homo sapiens
ccccaggtcctccccagcacaccatggaggcccctaagggctgggccttggccaggcgactggggaggggctggtcccggaagaaaagctttgtggggccgtgggtgcgggggctttcggctcatcagaagccaccagcccttgagacaaaacctcccagacgctgtgggtcagacccacagagcctcagtcctacctggtcctgggagggcggagggcggtgtgggcctggtcccaggacggcggagggcagtgtgggccaggcgcggactcccccgggcgccctcatggtcttatctctgcccggccggcggaaggcggcgggaacctttgcctggtacaaccactactgctccacagcccaggaatttggcattgaataatttttaacttctgctctgagagaggagctggccttggatttagtgtccgtgcatgcaggaatgccggggctccattttcaagggacggcgagaaggacacgctcggttccgcactctcaggctcctgctcctcacaaggcaagcgcctccagggagctgcatttgggaaaatatccaccaagcactaaagaaacacaaccataaagaaccataaagcatccacgcggaaaagcttattcagatcaataaagctgcggcgggccgggcacagtggctcacacctgtcatcccagcact

SEQ ID NO: 224418 - DNA, 599 bp, Homo sapiens
agcagactcgtcctttaactgagtttcgctggggccggcttggggacccacctctcacgagagcactggcctgccggcatgccagagcccctgacaccacacaggagccgggtggggctgggcgtagcccgtggtatcggccccccagacctggccacctaggcccagggcagcacccggggaggacgggggtctgggtggccggtggcttcccgtggccgctgctcagccccactctgtccagccccctgggagtggctgtggagggcatcctgtgtgctggaggggcaagatggggagggctcttgtccagagacccaggggtgccgtttcagaaaacagagcatcatgtgctgggaccagacacagctcatcttttccaggggacggcgagaaggacacgctcggttccgcactctcaggctcctgctcctcacaaggcaagcgcctccagggagctgcatttgggaaaatatccaccaagcactaaagaaacacaaccataaagaaccataaagcatccacgcggaaaagcttattcagatcaataaagctgcggcgggccgggcacagtggctcacacctgtcatcccagcact

SEQ ID NO: 224419 - DNA, 625 bp, Homo sapiens
ttaaagtcattcagttatttcttaatagtacttagagagttgctcatgaattggaggataatgaaatatgagacatgccagagcaggagaaggaaattctaggggctatttggggtcttttgtggttccatatgaattttaggatttaaaaaaaaatttctgtgaagcatgtcattggtattgtgataaagattaattgcatctttagatccctttgggtagtatggacattttgacaatattcttctaatttgtgaatatgggatatcttttcatttcttgtatcttcaattaatttcatccatgttttatagttttcattgtagagttcttttacctctttggttatattcattcttaggtattttttatttgtagctattgaaaaaagattgctttcttgatttctttttcaggtaattcattactggtgtatagaaacacctctgagttttgtatgttgattttgtatcctgcaactttactgaatttgtttattaaactattagatgatagtttaatgataaatgtttaaggtggcagatatactaattaccctaatttgataattacacaatttataaaagtattgaatcatcatgttgtaccccatacatatatatag

SEQ ID NO: 224420 - DNA, 489 bp, Homo sapiens
agctttccctgagcacccaagtctggaccaggtaccccagagcccagagtcctctgttcctctcctggggagcacccctatgctgctctgcaacaacaggtggactcatctgtctccatcacactgtggccacaggatacaggtacagatacatcactgcagatacaggtcagaggtcagtgtgtctcattgctctgctgatagggagactcaccaggaacctgctcagccctcttgaacccttcccttggcttttccagaacactggcccccccaccccgggcctggaccacacccttcaggtctgtctccggtacgctgggagcctgcaggcagggtgccagctctatacctactggttctgtaatgcacttggcgcgcatgatttgatggaccctgtaagagccccttccctctaaaattgttttcctgtcattcgtccatgcctaaaattctccgataaagcccattaaataaaaactcagtatt

SEQ ID NO: 224421 - DNA, 444 bp, Homo sapiens
catggatggagctgagctctatatacactgtggtttttctatacaactatatccatgataaagtttaatttataaattaggcacagtaagagactaacaataaccactaagatagaacaggtatagcagcaaacagtaataaaagttatgtgaatatagttttggtctctctctctcaaaatatactatcatactatattcacctattttcagaatgcaggcaactgcagataactgaaaccacagaaagcaaaaccgcagataagggtggactactgtactaaatttaacagatcaggtagaaattgtcacacctggcaaaaggttgctacccattttttttttcttaccatacaatttcaagatagtagtaaaaaactttaatggtcagctctgcttcctcacttctgataacaattccctgcttccaatagtctgaagatt

SEQ ID NO: 224422 - DNA, 414 bp, Homo sapiens
cggccagctctcgggtccaggttgggggaacagagcccactgccagccccggctcatgccctccagacaggtccacaacacacgccgggcagcagagccaggcgcaagcagcatcgggcagtggcgatgctggggccttgtgatgcgccaggccctcgggtgcccccacaacatggatccctgagggtgccaggcacagagctcagagagcaagcccatggtgtgggaacccacgccccggagccccctgagctccccaggcccgttagccaccccgccctctgaggtcattttccagccggcccacacccactggaaagagagcccagaaccaggagggcgcccgccttgccaagccggaggggagccacgggggggcggaggaggcagtgggaacccgaccaggtggcaatt

SEQ ID NO: 224423 - DNA, 421 bp, Homo sapiens
acaggagtcccatgggaaccacttggcactcagatatggacaatctggaaatgcaggacagttaaggcctgtaagcttgccctgaccactgagggacaggagctcatagaaaaaatgcttgtctcatttttagcccagggtggccaattctgagatgcatgttaaaaggttcctcagaagctcccacaggatcaagtagcagatattcataatggttgccaatttgaaagggacccttgggttggctttctctccttccggggggtcattcttctgtcttatcacagtctattccttggtgtcacattcccaaataaactccctacctacctccaagttgtttgtacaggctttgctttcgggagagcccagactaagacaatgtggtaacgtaaaagactggtggcttgggagccagaca

SEQ ID NO: 224424 - DNA, 489 bp, Homo sapiens
aggtatctgctctgtagcatgtctagtgaacaggttaaagttaagtcttttctatttggatacatgtgatcattggctgtacatactgcacctggccccctgtggtcaggtcttaaagatgacactttgcactaaagtggcacatacggcaaggccaaaagagaaatttatatatcagaatgtcatactttagagggaaacatctatttttaaaattaatattttattaccaatttttaggaaagttatttgtatgagcagaaaagtttgccattttccttgtgttataaactagaaaatgcaattacctgacatatacattatggtttaagaaattaatttttagttagtcatatttactgaacacctatggggaaagactttacaaggtagttgacagtagtaacctttagggtaacattctgttattggagtggaggctggttatcagattaaagacagaaataaactaaaaataaaatatatata

SEQ ID NO: 224425 - DNA, 176 bp, Homo sapiens
acactggggattccaaaagtagatagggaaggaggcaagggttgaaaaactacctgtttggtaacctggtcactatttgggagatgggttcaatagaagcccaaatgcctcagcatcatgcagcatatccatgaaacgaacgaacttggcacatgtaccctctgaatctaaaatta

SEQ ID NO: 224426 - DNA, 361 bp, Homo sapiens
tgctgagattacaggcgtgagccaacgcgtccagcctctaagtgcttttcatataactcacccaatcctcatcctttgagttggatgacttgattgttaaaccaggaaaatttctaataagttggacttaagtagaagttttcgggaaggggagacaatggattttattgagccttctgagagagactggcaggtcgcctggggcgggttgtgccctcatgccctttctcttttttttttttaaattgagacagggtcttgctctgtcgcccaggctggagtacagtggcatggtctaggctcactgcaacctccacctcccgggttcaagcgattctcctgcttcagcctcccaagtagc

SEQ ID NO: 224427 - DNA, 857 bp, Homo sapiens
attatgccaatcaaaaactatttgctttaaaatataaaaggcaaaaacttcctattagcataatgaagtagaatttttaaactttgttataatcttaaattttctttagtgttgaagataggtcaacttaactatcatacatttttattcacataaagtaaactctgcctcaaatgtaataaacttaatatgagttatgtaaactttggtcaatagaggtatattttttagcatttccttttgaaaatttcagccttttgagggagtcttgcaactgaatgtcaagttacatttattacaataaaatggacacttaatataatctgtaatgcattaacataatatgggaacttttaaagtattcagtctctgtattattgagtcctatttccacatttggccaggattctcaatatgatttaggcccaagacgtgggaagaaagaagtaaagaactaaaggatcttttttcttcatttttttaattgaatatggggaaagatggaataagcttatctgtccagtaaaggccattatgtgtacatagggattattatttttcccccccttgggctgtactgatttcccagatgtaccacagcactcttagtagtgaagcacttgacttctagtgagtggattttttgtgtgtgtgttttatattgcagagtgaatacactctgtctgatactatgtgactttctgattatgtgatttttatgcattttatgtgttttgtaaactagctgtatttttggtccatgtctaggttgtagaattgaattgtgcattttggcatctgagcacagctgagttttctaaatcaatctctctccttgcacctagtttttgctttag

SEQ ID NO: 224428 - DNA, 863 bp, Homo sapiens
tccagcacaatgagcacggtgtcaaaaaccgctttattttccgcactctgctcaatattccatgccttcgaggctccaaatatactcaacatgaccagtgctatcaacaaattatgcagactaagttgctttttcgtaattataaatcaatcatgctcacagtaaaatatctgcaacttagaaaggtctactataagtaaggtaagattttttccataattaaatatgccaagaaataccactgaagtatatccttccagggcatcgatgacattttaatttgtctgaagaaaccaagtaggttctgatgcctaaggaggggacccagggagatgcctccacccatttccagcgcaggaagaacttgcaggcaggagcatggaggccccacctactgcgagagcaagcgagggagcatgcagttcacttaacactgttggcagttcttggaaacagcaagtttaagtgacatgatgtttaacaaatccatttttttcctaatcaacatcataacaaaacaacattattcaagaacctgatgtactttgttttgcttaaaaacgcagtttccaaagaacctctccacagcattaaggactcactaaacattctccaaaagttgatgccttcagcacaatgtgaaaagaacagccaaactaagcctatacattctgacaaagttacacacaaagttatcatcttggcaaggcttggaagcgtagcaaattaaaaattctataattggctgggcgcggtggctcatgcctgtaatcccaacactttgggaggccgaggtgggcagatcacccgaggtcaggagttggagaccagcctgaccaacatggcaaaaccccgtctctact

SEQ ID NO: 224429 - DNA, 617 bp, Homo sapiens
ttccagctttggcgcattcagtatgatgttggttgtggctttatcagatggctcttattattttgaggtatgctccttcaatacctagtttattgagaacttttaacatgaaggggtgttagattttattgaaagctttttctgccctttagattatcatgtggaacccagtgctctttgtcctgatattaatttgcctctgcaattgtttaccagtgctatagataatccaggtagatcagaggtgagaagagaaccctgtgagatgaagctgtctagtatagatggaaaggccttcctggaagaagtacagttatcatttgcctgctcttagttgtaggctgatctgcattcttttttaaaaatttttttgagacaaagtctcgctctgttgcccaggttggagtgcagtggtgtgatctcggctcactgcaacctctaccttctgggttccagtgattctcataccccagcctcccaagtagcttgaactacaggtgtgcaccaccatgcccggataatttttgtatttttagtagagatggggttttgccatgttacccaggctggtctcgaactcctggcctcaagcaatccacccacctcggcctcccaaa

SEQ ID NO: 224430 - DNA, 500 bp, Homo sapiens
tgggaaacagcacgaggcttactcagggaagaatattgaagtgcagcattaaaaatacccatttatgtgtgagggaagagttctgtaggagatgcaaagtataagacaatacaggaatacatgagatgctaaataacagttccaggaagccactgaggcccaaggcaggtcaaggtgaggtgccaagtagcactgatggacattgtgtgtagaattcagaggaaaaggtcattttcatgaggatgcttaggaaagactttgatagcagaggtaggatttggatcaggttttgtaggatggataggatttagatagaagtgcctatgaatattctgtgattggaaggatggtgccaagacgtggagtaagaacctgacagttggccgggtgtggtgactcacacctgtaatcccagcattttgggaggctgaggcgggtggatcacttgaggccaggagttcaagaccagcctggccaagacggtgaaaccctgtgtctac

SEQ ID NO: 224431 - DNA, 516 bp, Homo sapiens
ttcaattggctaatgaccttagaatagatttcctggaattggaattactaaatcaaaaaggttgtgccaatttatactttaaccatttacctaccagcattgactgtaagtattttttaactgtactgatttaattggttaaaatggatgtcattatttattttcctgctgatacacttttgaacataggcaaaactgaaatatattctcagtatttaacttcttgtcctccaaactttagcttttgatattttgttcttgttttgtgctaccatacatatcctcccctttatctgaaatgcccactgctttctggttttcaccccatcttctagttatattactaagatggttactgtgttactaatagaatgaagagaatgaaacagtgtctttgtcttaggaaaatgggagaattgaaagttttacacagggtcctatacctggtctacacagaaatgtcaaattattttatttttttcttcttgtccgctaaaattacaagatacaaggcca

SEQ ID NO: 224432 - DNA, 500 bp, Homo sapiens
catcaaaatgtgtattacattaaattgcccatttcaaagggctaatacaactttagaaaattttgaaagaatctactttggaatttgaaaggatagtgtttaagaatagtgaacattattaaaggaattttatatcaaacaataaatttccattgaaatatggccatattcttaaatttaatattctaagtatttggtctgtcacttctaaatacctatttttatgtcttgctttctgctatttggatatttttctgctcttttctaagtcttaaatttaaaggttcatttggagtaaaggattttatcttttagaaagtaattgagatttgagaaatattaggtagctgacagttaaaaataaatttgacttatttttttaaatccagatcaaatctcttacatgtgtagtcttgttgtactgtggcagctcttctctaggctcttgactgggtaatccatttcagttctttctgctagtcacctccatgagagtaaag

SEQ ID NO: 224433 - DNA, 463 bp, Homo sapiens
gctttttatcttaaaacatgacagggtaatcttttggtaagatcagaagaacaatgctttcccattttaaggggaatcatcccacaacatgcaatttaataactaatcagagctggttaaatgaagtgtttgataattaggcatcagaaattttcttttcctacttgaagcattatgattactgattttaagattaaattagtgttgcttttaagtggtttatttgaacaatctgagattctaaattcttttgaaggaccttgcattaaaatattatccatgcatccacttattcagtaattcactaattccacaaatactccactactaataggtgccagacaccatcctctgtgttgctgtaaataattatgataagtaaacataccctactctcataaagctaaaagtctaatgagacagacatcatacaataaataataaataaatctcgattaatgca

SEQ ID NO: 224434 - DNA, 379 bp, Homo sapiens
tctcccacttcccatgtgtcctctgcaccacatgcatcaacttcctagcccagctgaacaagagccagactttctagatttgaatcctgactctactacttcctagttatgtggtcttgggcaagttccatcagtttcctcatctataaaatgggaattgtagtagtttgtatacttcatagggatgtgtggcatgttgtaagtgcttatgaattatctgggcttgatttcccagctctttaaagagaatattacttgcaaggttgttgtgagacttgaccctccataaatagcagttatcatgattccatttgataatactttctatgatctaatcacaactttatgaaatagggaaagcatccctattttgttaaaa

SEQ ID NO: 224435 - DNA, 440 bp, Homo sapiens
ggattaaagacttaaatgtaaaatctcgaactataaaaccctagaagaaaatctaggcaataccatacataggcacgggcaaagatttcatgacaaaaacgtcaaaagcagttgcaacaaaagcaaaaattgacaaatgggatctaattaaactaaagagcttttgcacagcaaaagatgttttctttaaaacaaatgatgctcaaattatttgtatatgtaaatgggtgcccagttttttgtgggttggtttgtttgttattgttattcttgagacaaggtcttactctgtctcccaggctggagtgcagtgatgcgatctcggttcactacagcctctgcctcccgggttcaagagattctcctgccttagcctccctagtaggtgggattacagatgggtacccagttttattttgattaataaaagcaatcttatt

SEQ ID NO: 224436 - DNA, 466 bp, Homo sapiens
caggtgcctttcatcccagctctttgggaggctgagggagggagaattgcttgaagttgggaggcagaggttacagtgagccgagatcttgccactgtattcagcctgggcaacagagtgagattccatcaaaaaaaaaaaggtctacaaagtctgaattatgtgcttatattgctatgcagttacaagagaaaggctgtgtagtactgaaattggcttttttttttaagcctctcccttgacttccatcctgacctcaggtgatccacccacctctgcctcccaaagtgctaggattacaggagtgagccaccgcacctggcctatcatatacttcttaaatgtatagaacttaactgttgtgttcattgacagcaattttgtatctcaggtcattcttcctgaaatatcctttgtaacaacctatgtttttatgatattgtgaattaaaactgcaatttttctt

SEQ ID NO: 224437 - DNA, 447 bp, Homo sapiens
ctgggtggggaaagcgacagtaggaaggaactttgggaagatgatgccgccgtttggcgcccggctctgctagtctctgcttgtctcccagaccccatggacagagttctttgagtctctacacctggcagtttacgttgaggctcctccacctccaccacccccctcccaaatcctttccagttcctttccaccgttgtcatagttttgttccacgggactcttcttcagggagaaaacccacctccagaacactggagttctagcctctcaccgtctctcacacatccccaaacggccatctcaggcaacaagagataccacaaatgatgttgattcttttttttggttgggggggggggggcggtttggagacagctgtgttttataaatgaaaggattatgagtctgtaatggaagtctgtttaaatacacgttgatttctaa

SEQ ID NO: 224438 - DNA, 106 bp, Homo sapiens
aattggctcagcccacccgcttctggccccagcccaacatgtgtacagcattttcacttttcttagcaggaaaaacaaagtgagataactctctgttcaggtggtg

SEQ ID NO: 224439 - DNA, 386 bp, Homo sapiens
aagtgcggcctcaacccgcgctcctgccgggagggtctccagtcaccgagtaaccccggccctgccccgcgccgccgccgggactccgccccgcaagcaagtggggtctcctttgtcccgcgcgccctggccgcgtcccgcccttcggcgtagcccatgggaggcgccctgagggcagggcccttctgattccccacctggcctcgagtgaggacgcgctcaacaacatctcgagtaaagcgggggaactcgcttcaacgcgcagacagcacagctctcgcccagcccggtctcgggtcagccgtctctccctggacctcagggacactagccctggaaggccgccggtcgggaggggactccctccccgtctgaggggcggccgc

SEQ ID NO: 224440 - DNA, 600 bp, Homo sapiens
  misc_feature (7)..(7): n is a, c, g, or t
  misc_feature (9)..(9): n is a, c, g, or t
  misc_feature (11)..(11): n is a, c, g, or t
ccaattngncntccccgggaattcggcctttatggccgggggacatatttttaacatatatccatgagtcaacactaatatttaatatttgagatttgaaaaattatttctagggtaagaaattctgtcacaatataatatctctatattgtgcttttttaagagataaatttttgatgaatttaatgttaattaaattttatctcagcctatcaccatcagaccaaaagacaatacagtatttttctaacaaggaaaagaaaatacatatatatatatttatatatacaaatatatacgtatttatatatacaaatttgtatatatgtaatgtatgtgtgtgtgtatacatataatttctccttttttttttttgtaagaattgagacagggtgtcactatgttgtgtgggctggtctcaaaacacctgcctcaagtgatcctcccaccttggcctcccaaagtgctaggatttacaatgagccactgtgccagcttccaacaagaaaaatattaaatgtattggtttttcacagtgaaacttaattcagtttagttgaaccatatatgtgtgtgtatggcatatataagatgaaaaaa

SEQ ID NO: 224441 - DNA, 433 bp, Homo sapiens
cagatagggtttcaccatgttagcgaggatggtctcgagctcctgaccttgtgatccacctgcctcgtcctcccaaagtgctgggactacaggtgtgagccactgcacctggcctaccatctgtacttaattggaaacctattggtctttatattttttagatagctctttaaaatccatgatggagttctcatcaactgggcacggtaatacaggagaagtgattcacacagggacgttgcaaatacatgaaagtcatcacactggagatttttgcttcccagaaatcaagaaagatattcatcactttgagtttcagtggcaagaaatttaaagaaatggccatgaagcacccatgacagaaaccaaagagttgacaggtagtacagactgacgtgatcaaagacatgctggaaacaagcctattaaagat

SEQ ID NO: 224442 - DNA, 498 bp, Homo sapiens
aatttgcataaaattggtcatcttgatagcttaaggtatactgagcaaaatgttaactccttgggtagcatgtgtgactgtatgattgtcaagatgaaagttaatctaagcacatttggtttactgataatcatttctagaaatgagctgtagtatcatgtcagaatgtcagaaacatgtctgacaatttaccttttcatactagaaatggtggatgacatgtttcaaatcctggcagctgtgctgtatcaaatcctccctatgtgaatatcatgcttggtacttagatagtttaggagcagtactgtggcttgtgatttgttgtataattctgaaagaaaatatattaattttgtgcactttatattggctcttgctttattgtagcctttatccattaatctgctactgatggataatttctcaatcatttggtcctttttgtaatggctatgtggagttggcaattctttttattaaatattgcatgactgtata

SEQ ID NO: 224443 - DNA, 737 bp, Homo sapiens
atgagtattagccaggcagctgggatgcaagagccagggtacgtgtctcacagagctgcacagagccgggccgttccagaaacgccgagcacctcgcaaggcgattagtagcatgggaaacctagccaagccgttttcccaaggacaagttctcagtcacagtattcctcaggccttggtctttgctttgtgacatatggaacgttctcacaattgaactcaagtagatggcaacatttatcacgtccacagaggtttaaaaaaaactgcatataccgatcaaccttgggatggctcataacaaatcatcaggttggcaaacatttggctccgcagacattccctgtttccctgtcttcagccacgtgagctcgcagtcatgacctgggcgctttagagccacagtgaatgctttcagtttccccagccatcctgaagagcagaggctgcgcacacgcaagagggaatcttacagttttccttgagctccaagactcacgccactgcgttaagcatttgaggccagcattcctaaggctgtttatgcatttcatgctgattagtaattcctggaatccagctacttcacacaaggtgattaatggtgtgggaatgatggccctggggtgccaacagcttgttttccctgcttggattaactgatttgaaaagaagttactttttcattcagggatgtgacctaattatcatttagtaaacaactaagtaaaaaaaaa

SEQ ID NO: 224444 - DNA, 128 bp, Homo sapiens
aaaatgaacatctctcgctacacagaagtaacaaatatgatagtcagttttgtatttagaaatgtaatggtagcagggatgttttcataattttcagagattatgcattcttcatgaatacttttgta

SEQ ID NO: 224445 - DNA, 559 bp, Homo sapiens
tcgccgtttgcttcagtttttgggaggttcgtggggttggggtgtagtaatcctggctttgcagggaaggaagcccgccctgaagggcaagtatatctgctaaagattgcacatctagtcaggaagcaggacacaagctagacactcctaactcggaacccagagagggaagcctctctcggaagcctgagagggatgccctgaagtcgtctttcagccttctgtctagttccagactcatgggaaagctttcatatcctgttcaccaatctccccagtccctcaaaagagccagacttgtagacctctgctggcatctctctccaaggcctggataaatccccagagacagacagcttagagctgcttcccagcagagctgaggaggggaggtagagctgaggagtgggaacaggaaaaagtatccccgaaagtaaggatgaagttgtcatttggctcaggggagggcctgccttgacaagaagagtcactttgagcccacctaactctgcctcacctccaaatattccctgtacagcagccttaagagaaaccaggc

SEQ ID NO: 224446 - DNA, 418 bp, Homo sapiens
agatattgataataaaatagtctcttccttttctcttcccttacctgtcttcaactcttctggaacctcctctctgtcctttatctgttatgccctggtgatccagagccatcttaattttaaaattctccatcatattttttattatattgaattaacaattcattctagggtcatccagatacatcatttaccaggagaagcagttagcttgcctcttgagatatttggccgtttcattattgtgtcacatggttgaaaacctttctttttggatgttgtatatgaccattagtgcttttcagtcttttctgttcttacagttcatatttttacctttctttttgcaaacaaagatggagagaagagtaaattaaatactcttctgaatatgttaatacttagtttaataaaaaac

SEQ ID NO: 224447 - DNA, 647 bp, Homo sapiens
gggtccattcagaagtcttctattatcctttaaaaatacaaacctgatcatgtcacttctcagctaggtcctgttttacctaagacatagctagccaagaacccctggaggactctgtgattgggcctaaacaggaatgtggtgtctctgtctcatgagggcatgtgttattcaaggtccttcagaagattcactgggaagactgcattcacagctgaacattattaatcccactttgagatgaccagtctcactgtggcctctctctccccagatgggaacatggtatacccccaaaaatgaacatcggggtatcagaacaaatatcgccttttggccaaattctgaggagatttgcaaaataggaaattgctttttatagtgaattcacttctcacaggactagttcctggttttactctttgaggaaactctttatttttctctccaaccaaaaatatcccagtatcatacctatcttcatttatgtgataccaccaaatacagcatctaaaacaatgcttaaccaaaataagtactcatgtattgattaatcaattattgcttttcaagttctgcttggttgaaccttaaattctattccctagacattttttaaaatccctaatgattctttatctttactg

SEQ ID NO: 224448 - DNA, 694 bp, Homo sapiens
tcagagatggggtctcactatgttgcccaggttggtcttgaactcctagtcccaagaccctatacttatttcacttagtataattataatgtacatttctttattagattggattgttctcatagtttccttggaaaatgtctcttacatttaaattggatgcatcttatgatctgtaaaaagctcttatataattaggacagttggccctttgtaatgtgttacatatatatgttttcaatttagattttatggatttttatagtttcatgttttcaattaaaaaattgtattgtacacatttaaggtatataatatagatagtaaaatgattaatatggtgaagcatatgaacacatctattatcttgcatagttattcccccctttttggtgggggcaagagaagctacaatctactcatttagcaaaaatcccaaatataatgcactataattaactgtaggcctcatgttgtatattaggtctctagacttgctcatcctccctatctgctactttgtatccttgaacctacatctctccacttgctagcccctagttcatccttgataaccactgtttcattctccatatatatatttgacttttggtttttaaagattccacatataagtgatatcaagcaatatttttcttcctgtcgggcttatttcacttagtataatgtcctt

SEQ ID NO: 224449 - DNA, 327 bp, Homo sapiens
tggacccattggttgtttatcaatgtgttgttcaatatctacatatgtgtgaagttcccaaatttcctactgttattgattttgactttcagtgatttaaatccttttaaatgttttttttttttttttttttttttgagatggtgtttctttcttgttgcccaggctggaagtgagactccatctcaaaaaaaaaaagaaaaagaaagaaaaaaataaaagtccagtcttgcctttttttgtttgttttttttaatggcttgggttttgagcatatttaggctcctttttcactccaagctcctggtgtccctaggcacagttcct

SEQ ID NO: 224450 - DNA, 407 bp, Homo sapiens
gtttccgtgaggatggtgacgactccgaactatagcagcatactctacctacccctgatcagtttatggaagaaaaggaaaccaaacaaaatctagatttattacaagaagtccatgatggagacagctcaggaatggaagagactcaagcccaaagatcagaagaacctctgtcctggaagtcggttctctttccaatggaacagcctctgcaaagtgtaccacacgatgagttaatatatctcacttttagaaagaaagatactgatatgccactgatgtggtttggatgtgcgtccctccacccccacccacagtcccatgctagaagtgtcactcatattcagctttgaatcagtggggaacccatacaggaagatcataataaatatggaaaattctgataa

SEQ ID NO: 224451 - DNA, 475 bp, Homo sapiens
gggtgttgtagggaaccggaagatgagggcagagaagggattgaagctgcctgattgcgtgaccttcccaggatcccgatccctcactggttccaacaccagattccatgttcctcctctcccctaagttttttctccggagtcagatgcatttccctaaaataatttattttaaccaggatcttcttttacgaatgtcctatttgcacagactcaagcccaaagatcagaagaacctctgtcctggaagtcggttctctttccaatggaacagcctctgcaaagtgtaccacacgatgagttaatatatctcacttttagaaagaaagatactgatatgccactgatgtggtttggatgtgcgtccctccacccccacccacagtcccatgctagaagtgtcactcatattcagctttgaatcagtggggaacccatacaggaagatcataataaatatggaaaattctgataa

SEQ ID NO: 224452 - DNA, 460 bp, Homo sapiens
gactgtcacagaccagacttaatggggctgacagctgtgggtgtgggctttcgtctgtcttttggtttgctttcatttggaggtgctttcattcctagggtgagggttgtgggttttctttagatatttttattagaatgtttccattatggaagatgatgaatactaacttaagactaatttgtatgttttaggcagtatccatttggaaaaagactaagaatgactcctgtcaatgaaaagaacacttaaggctctgtttctactctctcagcctgtacattgcctttttggcctttatcttggctcaatcttgtctgttcagcataggggatttgatttactagcttccgggaagtggagagaagagtggtaactgtttattaatattttgttcatctatgagtacgttaatttgattttttggtatgtagatagatattttataaaagcatgacat

SEQ ID NO: 224453 - DNA, 255 bp, Homo sapiens
gaagatagatccgaggaatcatccagaatgtattatagagtgataaacagatggaagataggagataaacagatgggagatatcaagagaggtaaaaaaaaattatggaagctctaatgaaatggtccaacagaagtttaacaggaatttaaaaaaaaaagtaagaatagagagaatcagggacaggcaatattggaagagataatgactgaaaattctaatagttgaaagacacaagtcctttggttaaaaaaa

SEQ ID NO: 224454 - DNA, 321 bp, Homo sapiens
ttgacttttccacggccctcaacattccaatatactgcatacaaaatggacttacttattgtctgtctgcttgcaaaaatgtaagccccataagagtaccaatctttgattttcttcactgacatatcttaagcacctggaacagtgcctgacacagaacaggccctcagtattcatttacaaaaggaacaatctatactataaaaagatatatgtttataaatcaacattacatgaggatggtcaccataaatattgccaattacaattttcatctgtctgaattccccaatattgaataaaattgcttttatcagataa

SEQ ID NO: 224455 - DNA, 892 bp, Homo sapiens
gcatgctttcctcttgaggaattagggagggagaagcaaaaactcaagcagggcaagatttttgtaggattttaagtgagggaagttggctgtgaatggtttattaaaaagatccaggaagtgagataagtcacagtccactctgggcaactacttccttatctgtaaggagaatagtaattttcacctaccacactgtgagaattaatttgtgacttcagagttatctgagttacttggaagcaaagtgtgagacctagcacatgggaacatagaattttccagtgcagagctggttaatcaagaatagcaagaagcacaattagtaaggaaatatgactttcattggagaactgctaaagaggctagagattttaaaaggtattgaaacccgctatttatattaaagattaaaaaataaatatggctattagaaaatgtgtatgattggtcattttgtcagggagtagagaaaactggaatgtaatactcaaagtagccaccagatcactgaagagatgaaaataatttgttttgttttcatgcagttcagtagtatgtgaggtttttatttgggaggatttggtgtcacgatgatgtcttgtgaaaaagcagggctgattgatgtctagtgtgcattctgaagtgctaagggtctcctagcccaaaactaatgcaagcaccaatgttccagtgggactgtgggaagaatgccagatgtgggagctaaaaggacactgtcttggaatcctaaataatgagagagtgagcagcaagttgaaagcagcgacgagacaggggaagggcacctgaatataattggggctgattgggtgcgatttcagtcaagcagcataaatgaagatcagaatggagaaaagacatgaatgga

SEQ ID NO: 224456 - DNA, 489 bp, Homo sapiens
ctttcctttcattttagactacctaatttaagaaaagaatatttgtgtaagttaaaaaaatcctccagtaagctttggactctatccaagggttcagcacacaaacgtctttggagaacaagaggtttggttcacatcataaaagaaaagggatagagattaaagtgttgtgaaaggcgtcgaagcaacaagcaagagagaaagaaacacagaaaggctgagaaaatacccatccatttcttttcagccaggggagatcagtaaaaacctcctgtctccaaaaagcatggacatttttattaaacagcaataggacctggaattagctggaggctgggtacagttgcaggttgctttatacaagtatcacattcctgaagaagtgtgtagactgacgttctgtaaaccagatccaattttaattgccatttaaatggaagtcagtgaaaaactcttttagtaaagcaaatgatcatcaccaatcttttt

SEQ ID NO: 224457 - DNA, 331 bp, Homo sapiens
ctataggtcatcaagtactttattttattttttggccttctggcaagaagttgagggtttaactatgcctttctgctttgtaattacacaactgtgctcacatctgggtcaagcaatgagaggacggacagagaaaaaaagcaatggggttggtcccaccttctggaaacccctacttcaccaactagaaagaaactttcagagttttggttcctgtggggctctttctaccagtcattgccaacatcaccaccaccaccatgaccatggaacttcttggaaactgtggggccagacaatgaagagatgagagaaagagaaaaaaacaaaa

SEQ ID NO: 224458 - DNA, 714 bp, Homo sapiens
ccattttgggataaattatccattggtgttgtataaaggtatcgaggcagcacaaagggtttcaagtagtaggatatggagagactgtttaaattaaggggtacccaacaccccaggaatgcagtgggattttttttccatttttccccttccggcaacttatttgatcaccttcttttgttagacccatttttaggatgtggaaagaaaatgggtcaggcatgtgggtgtctggatacaaagtgtggctggatgaaccaaggcctcctttgctctaaaccccatctctgaatattttctttatttttgtcaagctaaagatgcagattatcagataagcagcacacccgggctcagctcactaattgactgaacaagacgtggtcacagtttatacaccattccataatggattttcatgtttgtgaatcctaactggctgtggaaatgaaaagcaaatgtctcataatcacaaatatcttctgggtttttttttttttctaagcccaaagattaaatcaactttaccccccatttgccagcaagttcacggttatagaaggaagataaatgatcgggtgatggacatatccgctgtgctactgtttagcaaattcttgtaagtgattgctagatatagcgcatttctcacttaggtgttacatgaataattggtatattaaagaaagtgtgaaataaacaggtataacgctt

SEQ ID NO: 224459 - DNA, 361 bp, Homo sapiens
gccacctcattcagaggggttcttaagggttaaatgaagcaatagttagcagggaggcttccacataagttctctggaagttatttgatcatacaaaggatcattcccttggttgtgtgggacattttgaaaagcatatggattaggggtagaagagacctcagaaggtgtctggatcattccaccctattttacagatgaggaaactgaggctcacagaagtcacatgactgccgcaaggacactcttggatagtaaaaatccaagcatggcctgccccagatctaactgttttggatttccacacatatgtattgcatatatttgtaagttgccttaaatcctctttgaaccaagatca

SEQ ID NO: 224460 - DNA, 399 bp, Homo sapiens
gaagaagaaaagaaagacaaaccctaacagacaggcttcacagcggattagacacaattgaagaggagactgggaagccagaccatgaggcagtggaaaatatccagacagaagaacagagagaaaaacctaaaccctaaaataaaatccaacgatttaaaagatggaagacgtgttggaaacaactagcagcagcgaagtgtttgtggcatcctggaaagagggccaggaagcgtagccatccctgagccagataagagcagagagaacagcgtagacaagtcacaggagaactgctgggaaccacaggccaggggaaatatccctaaggcattcaaagaaaagaaatgccattttataaggagcagtaaaataatggaatccaggagagaatggacc

SEQ ID NO: 224461 - DNA, 551 bp, Homo sapiens
cttcaattctttgtgtcctcagcatttatgcgattagggacagacagtcaacttactgttgtaaagttacttggaatggttcccctctctgtggcatgctccaaactagaatcaggatttactgattatacctccttcattttcctgaaatttttagagattgctttttaattttaactttgttttataattatgtaaactatttacatggttccaaagtcaaatctacagaacaaaatgtattcagagtttatcttctgaccggttccctccaccctatttcctgcttctcttctgctgtaatcaaatttccccttttatccttccatttaagcaatataaacaaatgataaatgatagcatgctatttcacactttcctggacccttctattttgcttaaaatattggctgtcactccatagaaccatatagtatgttttccattgtaatgcttcattatgacagcataccattgtttattcgaccagtcactcctgattgacatttgggttgtttctagccctttgctattaaaaatattgcagcaat

SEQ ID NO: 224462 - DNA, 558 bp, Homo sapiens
cagtgtgtctgactctccttgtttttaatgattttgacagttttgaggtgtacggactaggtgttctgtaaaatgtccctccatttggaattgtatgatgcttgcttatgactagacttggattatgggcaggaactgacttgtaaagtttttttaattttaatgaaaaattttaaattgatacttggttcagttatcagacaacctttaaccctgtttggaacaacttggatatgtggatctactctttaactataaatgttagaaaatataattgcagatcaattttagcattcaaattgagatgtgccataagtgaaaaatacacaatggatttcaaagacttcatacaaaatgaaggatataactgatctcattaataattttttttattgactacatgttgaaatgtatcttggatatattgaattaaatcgtacatattattcaaattgattttaccgggcttctgggctagtaggaagtgtgaaataagtgtggctcacagatttttattggataacactgccctagataataacaatacattaattgaga

SEQ ID NO: 224463 - DNA, 458 bp, Homo sapiens
atatacagacacagaaacaaagacacacaaacacatgcacacacagagaaagaatgtcaaagggtattgaaggtatttctggtcattgttttactctttattctttccccattttcttaactctctatgttgaacatacattagaacagatatttacttcataatcagaaagaatgctgtacgtcatcactacttctggaaggatccccaaaggcttagctgttatctttccacttcccactggctgggtgcaagagtgtggtacttctggcagcctcagtcagttctgcagtacttctttggttttaagcttagtctaggcaaagccaaaaatcttgaattaaggaagcaaatgctttgtgtttcagattagattaaaagaactaaatatattaactatacctgctgatttaaaggccgtggttaggaggcacagtaggatgaggctaccatgcaga

SEQ ID NO: 224464 - DNA, 1095 bp, Homo sapiens
gactgttcaaacttacattaatctttgcagacatcttatacatttacttttcatattttattttgtaattaaaacctgttttgctttatgttgttattagcgattttatagtctatttagggagataactaactaagttttatagtctatctagggaaataactagctatctagataaacctagttatctccctaaatagattgtaagctcctagtggacatggacttgggagatttttatttgtgtgtttttgttagtagtatctggtataatatcttacacaaacttgattcccaaaaatacttactgaattaatgagtgaaaaagacagctttactttctacacttgactcttgctgtatgtaattttgatatatacttcctgtttatttagttggtctcagggtaaataaaagggtaactaatgtattattaaccttcagaaccctgaagaagggtttttagttctttcaccctgtttcactttctgcttcttccctagggatcatcttcttcctttgaaataatccagatattttaattgtttattaatgtagaaggcagttcctgtcttaaatttcactgatgtccagaacattaaaatgaagggccaaaaaatggcaagtttaggaaggacgagaagaaaatgtcttaccccagcttcatccaatacctcattactagaaggataagtccatgaacagtgcccagggagataatttgtcccatagagctctcacatttagagcattcttttaaactatctcagcaatgcagtttataaccataatccacttactacacacagaaacagctttattatatgtaatctctgttttaatgggactctaccaccattactaaataaggtaaaaaagtgagataatcagttaaaatcctagctgaggattagtactgcttgggttcggctttaacaattctgttaatgtacttcaatatttctacatgatgcctaattggtattgttctgcagagtttatgacaatttatacttttgatgttgctagaaaaaattgtgttgccatttcttcttcttaaaaaatacgtaagtggcacggtggctcatgcctgta

SEQ ID NO: 224465 - DNA, 1016 bp, Homo sapiens
gcggccgcccagccccacactacagcatgctgccagtgaggacaacctgtccagcagcacgggcgaggccccgtcccgggcagtcggacatcatggggacggccccaggccctggctgcgtggccagaagaaaagcctgggcaagaaaagggaggagtcgctggaggcaaagagaaggaagcggaggtcccgatccttcgaggtcaccgggcaagggctctcccaccccaagacacacctcctggggccccatcaggcggagcgcatctcggaccacaggatgccagtgtgcaggcacccagcccctggtatccggcatctgggaaaggtcacgctacctttggccaaagtcaaactccctccaagccagaacacgggcccgggggactcctcacccctggctgttccccccaacccaggtggtggttctcgacgggctacccgtgggccccgcctgccccacggcacaagcacccatggcaaagatggatgctcccggcataactgaggggccctgcctggaactggctctctcacctcccaagactgaatggggtctagcagggcatgggaggtggaggctgggcagatggagatgaccaggaagtaagctcaggatctcagcaggccagggctcctgagacccaggaactggggtctctgcccaaccctcccatgctttcagtgccactggggaaaagaggtgaggccaggggacatggccaggacggctgggctccctggcttcccagccctggacagaatgctgttgccaaaacctgcacagccctgaggccagcctcggccttggtaacgggggaaagcagctgacagtgagacggggctcctggcccacgtgtggggcacgggcatcctggatggttggggaggcgccgacaggcacttcacgtattacaattggggatgtgggtgagggagggaatctggttttgttacttggcagtggttttttctcacccttcctttttaacaataaaatcccatttgggtcttga

SEQ ID NO: 224466 - DNA, 642 bp, Homo sapiens
gaaatgttaggttcaccgaaatgtacttcccctctgtctggtgatttgaagaagactgtgactcagctgcctttgtttctctgtagtaactccaaacaggtggcttttgaactttatctagctatcctaagtaggacttggtaggagggttgttcttataacatctattctgtcttaggagaaagaactcccctctactcttcacttggttaaaatctgttcatcttcaatcacatcattcccacttgtcttcaaagcatttatctcagtttgtaagcttgcattatgcattaaattatgagcttactcagaacaaggaatgggcttcttttgtacaacacaaaatcccaagtatctacttcaggaatatttgaaggaattatatccatcaaagacaaaaaaaaaaaaaaggaatgaaaaagtgaaaaacactgctgctgatagcttataatgcgcaaaatatgaacttccctttcttgtgggaagattatacatgcttgttcattgatcatatgcttgactgtgggacttgctttagttaaagaaatataaatgggggagattaaattttactagaagaacagccatcattgggttcctctgtattctcccctttacctctggcaaaagaatagcctgcaa

SEQ ID NO: 224467 - DNA, 456 bp, Homo sapiens
gatgctgtaacatttatagaagtattataggatttgtgaaactacgatcaaataaagtgaaaagatctcaaaaacttgtttatatggggaaacttaaggagaaggagtcctttggtgagattagcgtccttcttcaagttcctttcacgtgcacaatcattaccaaaaaagaagttgagatggcaatcattgaagataaggacctatttgtggcctagatctagaaacaacctcagtgaacattaattaagaaagtattgactaaataatggaataattgcattctggaatactatcaaactaccagcaatgaatttggtctattgtgactacatatcctggattccccaggaaagtcccactttcgaattgcctttcaaacacagtttttattagcagtctttcttggtttggatactaaaataaatatagttatcattgcttgatttaaaaaaa

SEQ ID NO: 224468 - DNA, 314 bp, Homo sapiens
gtaaggggggtaagggatccctgaggggtaagggatcctagggcaatctactgcaggtggccaaatggcagcctggaaggccaatttaacaatgtatccaaagcctcatgcttccattcagcagttccagctttagttctctataataaggggaaaggcagggatatgcatatatgtatgcatttggctataaggatattcatcttcccaaaggcaaacctgaaaacaacctagatacatccggccaccggggaccaattatgtaaattctcttctatgtacacaggtgattattctgcaagcatttagtcatt

SEQ ID NO: 224469 - DNA, 434 bp, Homo sapiens
gactcagcctttggctttccatagtggtgacataagagaagcagctacgtgtgtgtttattccagatgccaagtgaagcctagaacaggagttgcatcttgcaggtcccctcagtggatgggccgggccccgagggtgagggctgccacagttgactgcccagccaggctgtgggacggctgctcttgtactctccatgctctgactcaagggaacctgtgttcctggtctcgtgccatctacctggagctgcagtgaacacacatctcgaatttttcatcccatggggttgcatggctgcggctcacgtgtctcatgggccaggcatcagtcacaggccacagcaagggctctagttgacggtcaggtgagctctcttctcagtggttgtcaaactctcatgggaaaattatttaattaaattggttacttta

SEQ ID NO: 224470 - DNA, 425 bp, Homo sapiens
gactcagcctttggctttccatagtggtgacataagagaagcagctacgtgtgtgtttattccagatgccaagtgaagcctagaacaggagttgcatcttgcaggtcccctcagtggatgggccgggccccgagggtgagggctgccacagttgactgcccagccaggctgtgggacggctgctcttgtactctccatgctctgactcaagggaacctgtgttcctggtctcgtgccatctacctggagctgcagtgaacacacatctcgaatttttcatcccatggggttgcatggctgcggctcacgtgtctcatgggccaggcatcagtcacaggccacagcaagggctctagttgacggtcaggtgtgagcgccagtttgaagggcatccaacccgcggctatccatgtggaatcgcttga

SEQ ID NO: 224471 - DNA, 488 bp, Homo sapiens
aaaaggaggaaaattcaggaagataaaatagctgaatgaattatccccgctccagaacgcagaggaaaaatgaaatggccagacccagatgttaaaaatgtgttccttgctctttcctgccctagcaagggctgttccatgtttaggggatgaatgccgctgagagtattagcaaaaatacatgtgtcattgagtctgaggaagataactgagacatacaggtatttctcataatgcatgtgggcatccatagacatattcttaaatggcttaaggacttggaaactacctctaggaaacctgaaacttgaatgttggtccactagggagaagaaatgttccattagccttccaactaaagaaatacactatcaagaagaacattagctgtgtgtcctataagcttgggagaataacttacttttattttaatacatatgttacttttatggtcagtattttggtaaaatatatgctctattatggca

SEQ ID NO: 224472 - DNA, 505 bp, Homo sapiens
gcaattgatgtcttttttgaatttcttataaaaaaaagtggggtggggtgggatccatgtgcagaacgtgcaggtttgttacatagttatacctgtgccttggtggtttgccgcacctattgacccatcctcccaagttccctcccctcaccctctacccccgaactggccctggtgtatgttgctcccctctctgtgtccatgtgttctcaatgttcaactcctacttatgagtgagaatatgaggtgtttggttttctagaactatcatctttcatagttaaggtcttctttctgcctcctcacatagcaaaatggggcaagagaataagtctcttcataaggccactaatcccattcatgagagtggaatcctcatggcttaatatcttccctagggccttacctcttaacactattacattgggtattaggtttcaacatatgaatttttggtcaatgtcagtattcagaccatagcatcaaacatatccacttcaatctc

SEQ ID NO: 224473 - DNA, 431 bp, Homo sapiens
caaaactaaatgtagtcttaccatatgatccagcgattgcgttccttgatatttactcaaatgggttgaaaacttatgtctacacaaaactctgcacataaatgtttatagtagctttattcctaattgccaaaatgtagaaacaatcaagatgtcctttagtaggtgaatggataaattgtagtgcgtccagacgatggagtttagtgccaaaaaagggctatgaaaagccttttcaagccatgaaaagatatggtggaatcatatgtgcatattactgagttttaaaataagccagtctgaaaaggctgcatatcccagctactcagaggctgaggtgggaggatggctttagcctgggaggcagaggttgcagtgagctgagattgcacagcaccccagcctggacaacagagcgagtccctgtctca

SEQ ID NO: 224474 - DNA, 866 bp, Homo sapiens
tcacacctgagaacatccagctcctctcaacagcccaacccacaccagcctcagacaccaccatgaccggctcctgctgcggctccaccttgtcctccctgagctacgggggaggctgctgccagccctgctgctgccgcgacccctgctgctgccgccccgtgacctgccagaccaccgtgtgccgccccgtgacctgcgtgccccgctgcacgcgccccatctgcgagccctgccgccgcccggtgtgctgcgacccctgctccctgcaggaaggctgctgccgccccatcacctgctgcccctcgtcgtgcacggctgtggtgtgcaggccctgctgctgggccaccacctgctgccagcctgtgtctgtgcagtccccctgctgccggcctccctgcggccagccgaccccttgcagcaccacctgcaggacctcctcctgctgagaccccacctctcctctcaacgcacgaaacattcccaggtgcacagaagcttgtgcagactcttctaccccttctggatcagatgagagactccacctttgcagcctagctgatcctcaagcacgaattcaacaataacatcctatctatttccccacataattatgcagctaatcctggccctctctgacaatcttgagaaaaattccagctttcatcattcgaattcctggcttgaaaaaaaaaacgagtaaataaaaatcaaagctcctcttgaatagaactctgtcccactgactcatcacccttttttctactgtttcaaggttctcagatgagatttttttcttccaggataatactatttgtatgctgtatttttgcactgtaaaaaaaaataaaattatatttctgggg

SEQ ID NO: 224475 - DNA, 778 bp, Homo sapiens
cataaaatgagatgaaatgagatgtaatgatggaatgagatgagatgaaatgagatgaaatagatgagataaaatgatatgaaatgagatgaatgatgagatgatgagatgaatgatgaaatgatgagatgagatgatgaaatgaaatggtgagatgaaatgatgagatgaaatgaaatagtgaaatgaaattgaaataaaatcgaaatgagatgaaatgatgagatgatgaaataaaatgatgaaatgatgagatgtgatgagatgaaatgatgagatgagatgagatgacatgaaataatgaaatgaaattgaaatgagataagatacgagatgagatgaaatgatgagatgaaatgatgaaatgatgagataagatgaaaagggttgagatgatgagatgaaatgagatgaaaagatgaaatgatgagatgaaatgaaatgatgagatgaaatgaggtgaaatgaaattagatgaaatgtaatgagatgaaatgaaatgacataatgaaatgaaataatgaaatgagatgaaataaaataatgaaatgatgaaataatgaaatgaaaatgaaatggaaatgatgagatgagaagaaatgatgagactgaaatgactgaaatgatgagatgagataaaatgagatgaaagatgagatgaaataagatgagatgaaatgacataatgaatgaaatgatgaaatggaataatgaaatggaaatgatgagctgagatgcaatgagttgaaatgagatgaaatgatgaaatgaaatgatg

SEQ ID NO: 224476 - DNA, 628 bp, Homo sapiens
gcagtggttcagcctgtaatcccagcactttagaaggtcgaggtgggcggatcacttgaggtcaggagttcaaagaccagcttggccaacatggtgaaaccctgtctcaactaaaaatacaaaaatgagccaggtgtggtggcaggcgtctgtaatcccagctactcaggaggctgaggcagcagaatcgcttgaacccaggaggtggaggttgcagtgagccgagattgtgccactgtgctccaacctgggtgacaagagtgaaactccgtctcaaaacaaacaaacaaacaaacaacaacaacaaccaaaaatctctaggactttggctctgagcactacccaatacgtaggaatagccacagaaggccatggggaaatgaaatctgctgagatgtcgtgggcagaacaagccttgtcttaatgaggtgcatcctggctggcagaagatggtggcttggccaaagtctccaagcaggtcagcaacacagcagggagtgcagcccagggcacctcaaaccctgcgtgccttctgtcaactgcctcaggattcaccgggggactcaagcatccatttcctggtcacctcatttatgccaggaattgggagaggttgccaaaggacaaa

SEQ ID NO: 224477 - DNA, 434 bp, Homo sapiens
atcatatgcatggaagaatctcactttagtaaatctcacatttatttattgtggatatacttagatatcatacacatacatagcaaagtaattgtaaagatataaaataacattgttgtagtttaggaagatgtaaaatcataatcgttttgtttatattgttttcttttccttttttttgagatagggtctcactttgtcacccagactggagtgcagtggcacaaacaaagctcactgtagcctcgacctgagactcagtcagtcctcttgcctcagcctctcaagtagctgagaatacaggagcacaccaccatgaccagctaatttttgtattttttgtagagatggggttttgccatgttgcccaggctggtcgcaaacttctgagctcagcactttgggctgccaaagtgctgggattataggtgtgg

SEQ ID NO: 224478 - DNA, 1417 bp, Homo sapiens
gggaatgtacgtgtaataggctctgctttgtatacaggagataataccacatcatcggttatctccaaactccagtcttctctcaactgcccagttgtatgttgtcatcaatcactttttcaaggctgggtagagacaagtttctcctcgtaactttgacctctcccactctccaaatgtaatctggacctcattgctttcaaggtcagcttccccatagctcaggtatcctttgctctcctgtatcttcatttactattagtgaagagatctctgtcctggaggttattctaaactttctttgtaactattgttatagacaatggtttccaaaccagtggtttctatgtagcttttctagttccttgctatcttctcaccactggcttgaggtagtgatttggactttgctcattagagagcattatcagagatgtggagtccatcagaagaccagcttgcagtgtgtatagcatatagatgccaatattagaattctttaaattatatttaacattttcatgcttcttaatttaacttcacatgttgggaagtagattcagaaagataggagaaatacccagactctaccacttccgtgagctactagttaggcatgggcaggattaagttttatgtgtattatcttcccactaccaagaatgggttatgtttcacagaataccagttcagtttgattggcaaaaagatgccaaaccaaatttatatgtagtctataatctaagggcattcttgaaactattgcccacatcccattttttttttcatgtttacttacaaaacagagataaacattagatgtctaaaggagttagtaatgaaaagcctatccttaaaaaataaacctgttgaaatgggctttaaagacatcgaaataatcacttgtcatgcattgactgtaaatgcagatagagaaatatgtctttgaagctccacttacacaaaaataaaacttgtatatcatgctccctcaaagaatgtgcgatagattattttaagaccatgataatagagtaaaaaggaaagaaagccagaaattacaattttggatgctaaaaagtaactttctagttaaccctaaagtcctgtcagattgtgaagaaatgttccaggatacacttggattagttatgcagtatttcttatcaatgtctagcccttgtgtattgttctgaaaactaaagtttaaatctttatgctgttgcttgctagatatcctgttctttggtagaaaattcccatagtctgtactcaagaagtgcctaaaaatggatttgtgttgattttaagcccatctaataaattatatgtattttctatggtatcgtatggcttgtcttaactgatgacacagcctagaggatttctgtcacaatttgtgctttatttgaataca

SEQ ID NO: 224479 - DNA, 470 bp, Homo sapiens
gcgaataatgtcatgtttgcacgttggttttttaaaaagcctccttagagtcagtaaaggataggttttattaaagcttttcactttgcttagctgcctgataataatgccttacttttatacagcactttagaataactatatctatattacttaatataactctcacgaaagctctgtacaataggttctaacattcacaaagaaagtggggtcatttgcctttaagtccccatcacaggaattcgaattaaactcacttcttttaactcagactctgcgatctgccatcgagccccacatttttccctttgaatgcatagtccaatcctacccatttatgagaatatttattgggagaaaaaaggatactttttttcctttatacagattcagatgatgtcagacactgctgatggctgcagcctcaaagatattcctctccgtaagatcagtccaaagcctctctg

SEQ ID NO: 224480 - DNA, 389 bp, Homo sapiens
atgatcgagctatacataccaatatatgagctgctggaaccagttctgcttccagacaaggagtgatttgctggcatggacgtgtccatgtgaagggtggtgatcacatggcctagatatatgctatccatcagtccagcctcaaagccctggtgtcctattaccagaagtatatggatgagttttccaaggaggagatcaaagacaaagatcaaagacatcctcatacagtacgaccagatcctgctggtggctgacctccaccaccactaatccaaaaaattaagagacgctggtacccatgcttgctaccagaaatcctaccaataagcccatcatgagaattggggtttacttgtataataaacaatgtttgagagatttttaaa

SEQ ID NO: 224481 - DNA, 547 bp, Homo sapiens
acagattagaaaacgagcttgattctgtttttcttctcatgtaaggaagtggaatgtgtgagtgtgtaggtggggaggtgggggctgtcactgatttctgaaattgactgaatgaaaattatcacatcattttgatgtgttaaataccctaaatcattctccatgatcagatagtctctcaaaatttaagatgtcctatggtttcttttagatttctaaggcttaggaccatgatttttcttaatgaggcaaaatgttcaatgtgcagagcatctccaaaactcccctttctgaaggtttttcagacatctgacaggtaacccctggctaacccagctatctactggacacaggcagcaaagccacatcaaatcaatgaatgccagacacacttggatacaccttctaatgtatataaaaattgtagatgatgttttttatgaatagtttttactttaatagtttctatttaatggaattttcattttaatccctctctgaatgcacatgcattgatactagttaaaagaaaaagaaagaaggaaag

SEQ ID NO: 224482 - DNA, 396 bp, Homo sapiens
cggctaggctgggccccaggatgcagcctgcctttccagccctcactggtttagacaccaggcccttccaaaactcttccaaggccactgcttagccccaacagcaaatccctaccttaagccccaagtcccagactgcttgcctgtcctctgctgaggccatcagcctgtcctcatctgggacacctctccccacctgccagagccagagcagagtgcatgaatagtcactaaccagatggatggatgggtgaatgagtgatacagtaaccgtatgaatgaatgaatggaattagtggatagatgatacaataatcatatgaacatgtaattcaataactcaatctactaaccatgtgaataagtgaattatcaaataaatataatgaaaaatat

SEQ ID NO: 224483 - DNA, 426 bp, Homo sapiens
taattccagatcattaagtgctttcatttctgtcctaaatatttcaagctaatggaggggctgagtccctttagaaactccctaaatatcccaaaaagactttgactcaggagacaaggcgactcaggttttacatatcacagctaaaaccatcattcttagcaaactatcgcaaggacaaaaaaccaaacaccacatgttctcactcataggtgggaattgaacaatgagaacacatggacacaggaaggggaacgtcacatactggggcctgttgtggggtggggggagggggaagggatagcattaggagatatacctaatgttaaatgatgagttaatgagtgcagcacaccaacctggcacatgcatacatatgtaacaaacctgcacattgtgcacatctaccctaaaacttaaagtatt

SEQ ID NO: 224484 - DNA, 316 bp, Homo sapiens
tcaggtagaatgatttattctactttattctctttcaaaattgtttttagctatttcagttcccttgcctttctatataaattttagaactatcttgtctgtgtcggccaggcacggtggctcacacctgtaatcccagcactttgggaagctgagacgggcggatcacaaggtcaggagattgagaccatcctggctaacacagtgaaaccctgtctctactaaaaatacaaaaaaattagccgggcttggtggcgggcgcctgtagtcccagctactcgggaggctgaggcaagagaatggcgtgaacccggga

SEQ ID NO: 224485 - DNA, 442 bp, Homo sapiens
ttcaaagtaatgtttaaaagtgccttttatattttttcataccacattgtagggaaggccagggtcattttttaacacttaactatgctcaatacctcctcaccactataaagtaaggtcgaatgttggttaaagcaaagctgtctggaatcaccctgtcaaaagtactgatttataaccttgctactcacatttcttactgtggtgccctccctcttgttggctcctgcatctttgaagtacagggaaaatgaactaatatggcagctccaatatgcagctaatcctgccaatgatgtctcccctggaagtgtttgagagaagaatttcttttcccagtatggatttatgtaaacatttgttccattcacgagtagcacattaatgcctaattctggaaaaaatacaaagaaaaaaccttttctgcctgtctagacagagt

SEQ ID NO: 224486 - DNA, 382 bp, Homo sapiens
tgagccaccgcacccagccagtattatcattcttttttttaaaaaaagggccttggtttttcctatctgaatacttttgaacaccgtattttttgttggtaaagagacacacttgtatttaaagttggataaaattagataagtcaaagtcctacagcccagagatggcagtgtactaggtgactgatgaaactacttgttgaggctgctggagcaaggggcaactaactattttgcaataaaattaaaaatgacacattataatccttaaaggaattcattttcttttttcctggtctttctctttgatcatgttatggttacttaggctgtataaatggagtatctctactaaaagtgaaaatgcctattatactactat

SEQ ID NO: 224487 - DNA, 390 bp, Homo sapiens
ttttccttaataaaaaaaggagagaaagattatcattttatttttgagttggtagaatagcatgaatcccaggatgtaaatgttgatcattttaacttttaaatgatctaaatgcctttaagtaattttttgtcatagttttatttatttgtctaggcaccgtggctcacagttgtaatcccaacactctggaggctgaggcaggtagattgcttgaatcaatcaattaacacttggtgcatttgataagaattggctgaccagggagttgggtgtgtctgaagaacaaagcgaggcttacaaaaggatgttccttcaggaggaagcagcactaaaagcactttgagtcaaaatgagtgggaaaccatttcaataaacacattttggata

SEQ ID NO: 224488 - DNA, 336 bp, Homo sapiens
aacatgaaaaatgacagggaaggacgtgttacattgctgcagatttaacaataacataactatatagacacaaaataaaaacgactttctcaggcccacaaactgacacatgaaaataattcattccaattgggattaagtgacaagcaggttttgcatctgtcctgacacatttccccaaattcttcattataggactagcaccactactactctctgtgatggcttatctatctactaagagagtgtgattaagaatattacaggtttgagtgagtgtatgttcggggcaatttgaatctatgctcctggaataataaaaattaaagaaagaca

SEQ ID NO: 224489 - DNA, 515 bp, Homo sapiens
gaacccaggagtgaatggagccttttagaagctccaagtaacaaaacaattatggtgtaccacctcatatgtaattcaaaataaagactattccaaatcatataaaaagaataaggaactctaacaaaattctgatttttcacatgatgatgactatagaggtctttttaaagaaatggcaaatgttaaatttaagacattttttccctctgtttcccttgctttactgaatgatgcaccaagttgtcaactgccaactccccaagaagccaccagaataatctgttgatcaagtgcggctgagtttgttgaacctcctgcaatgagggagagcatcaccttgacagagttctaggattatcccagaaagggaagacagaagcagaaatacatagggtgtagggtgatctttttttttttttcttttttttgagacagagtctggctctgtcacccaggatggagtgcagtggtgcaatctaggctcattgcaacctccacctcccctcaagcca

SEQ ID NO: 224490 - DNA, 507 bp, Homo sapiens
gaatcacaaggttaaaagagtatagttaatgctttgaatgttacacctttgctagaaaacaaactaccccaaaatttagtggcgctgaacaacaaacatatatcttagtctgtggttgagctcagtggttgttccagtctgggctaggccaggccaggtggttgtagctgggctagcgcatgtgtccacaatcagtgataggtcagctgaggcctagctgatctagattggcctcatctgggatgttccccctggcagtgtcctcttatcgtctagcaggccagcctgggcttgttcatatggtgatcacggaattctgagcatgcgagcagaagtgcgcaaggcctttcgagatccaggcttggaactcagacagtgccacttctgaattgcattggccaaagcaagtcacagaaccaaacccagattcaagggtttgagaaatagactccacctctcgatgggagggcttacaaggtctcattgcaaatggatggggagataccg

SEQ ID NO: 224491 - DNA, 338 bp, Homo sapiens
atgaactaatattaatatgttattaaactccatccttttttgggattttgttagtttttccctagtatctcttttctgatctaagatttcatctgggatatcacatacagccctttttttaaaaaatttttaattaattaattaattaattttttgtatttttagtagagaccccatttctagtaaaaataaaaaaaaaaatcagcccagcatggtagtggatgctggtagtccccagctactaggtaggctgagaaaggaagatctcttgaatctggaaagtcaaggctgcagtgagccgtgatcatgttactgcactccagactgggcaatagtct

SEQ ID NO: 224492 - DNA, 448 bp, Homo sapiens
ctgaaccagcggggatgagctacatgatgctgtttctcagcactgggtctgagacagctccctcagtcaggctccctcattgaatgggggccatttgaaggcagaggataagatgtatttatctctgtactccttagcactttggacacagcaggaactacatagtttgctgaatcaaactgaggaataacgtcttggtcaaaccagtgagagatggaaataaaacagtgaaaaattcacagaaaagactagaatcattatcaatcaatatttttaaagtacaagccatggtgctaaagctatgaggtatactaaagatgtaagacaggcaagtcctcttaaaacacccatattcaggaagaagaggaaaactgtcatattaagggatctgtattataggaatggcccagataagggtagtgagttttaagggctaaaaggttaaaaa

SEQ ID NO: 224493 - DNA, 1009 bp, Homo sapiens
tttttttgagacagagtattgctctgtcacccaggctggagtgcaatggcgtgatcttggctcactgcaacctctgcctcccaggttcaagcaattctcctgcctcagcctcccgagtagctgggattacaggcatgcaccaccgcgcccggctaattttgcatttttagtagagatggggtttctccatgttgaggcggtctcgaactcctaacctcaggcgatccacccgcctcggcctcccaaagtgctgggattacaggtgtgagccaccgcacctggcccattttactattatctggaggactttctttaatatttcttttagtactttgaaaaaaatctttattttgcctttccatttttatttttaaagtgtttttgccagctatagaattctagattgaggaccttgcccccttgcaactatctgccagcttgcattgtttttgatatgtacattgttgtcattcttttttttgtatgtaaaatgtccttttttttttgggcggtctttaagtttttttttaatcattgcttttaatctgttcagttatgatacgttctcctgtagttctctttatctttctcgtgcttgaggtttgttcagcttcttgaaattttggtcttatagtttccatcaaatttgggaaacttgctattactcaatttttttttttaccctcttctccccttttgtcgtcgtcttcaaggactccaattacatgtatattaggccccttaaagttgtcccagagttcactgatgttctgttctttctttttttttctttttttttgtgggaggtcttatactgtattgctccattttgcatggtttgtattgctgtgtctttaggttcactaatctgttgttctgcgatgtctaatctgctgttagacatttaatacatatttttatgttagacatgttatcaataaaaatttgatagtgcttatatatttattaattaaacagatatttattaacttcttactatgttcctggc

SEQ ID NO: 224494 - DNA, 996 bp, Homo sapiens
ccttgctatcgcccacgttgtatgcgcaactgtcgtgacttggacatccctgcgctctgcctcccaggttcaagcaatttctcctgcctcatacctcccgagtaattgggattacaggtcatgcaccagcgcgcccggctaattttgcatttttagtagagatggggtttctccatgttgaggctggtctcgaactcctaacctcaggcgatccacccgcctcggcctcccaaagtgctgggattacaggtgtgagccaccgcacctggcccattttactattatctggaggactttctttaatatttcttttagtactttgaaaaaaatctttattttgcctttccatttttatttttaaagtgtttttgccagctatagaattctagattgaggaccttgcccccttgcaactatctgccagcttgcattgtttttgatatgtacattgttgtcattcttttttttgtatgtaaaatgtccttttttttttgggcggtctttaagtttttttttaatcattgcttttaatctgttcagttatgatacgttctcctgtagttctctttatctttctcgtgcttgaggtttgttcagcttcttgaaattttggtcttatagtttccatcaaatttgggaaacttgctattactcaatttttttttttaccctcttctccccttttgtcgtcgtcttcaaggactccaattacatgtatattaggccccttaaagttgtcccagagttcactgatgttctgttctttctttttttttctttttttttgtgggaggtcttatactgtattgctccattttgcatggtttgtattgctgtgtctttaggttcactaatctgttgttctgcgatgtctaatctgctgttagacatttaatacatatttttatgttagacatgttatcaataaaaatttgatagtgcttatatatttattaattaaacagatatttattaacttcttactatgttcctggc

SEQ ID NO: 224495 - DNA, 210 bp, Homo sapiens
tacagatgaagctttgctcgcatgctcacttgcctgctgctcacctcctgctatgttgcccagttcctaacagggtccatggcccaggggttggggactcctgctttagagtggttgatattcaaactctccaaaccagtaatgaagtttgactcatatttagtatccaatcaccaggttttgaattttttgcctgccaaaagttttttt

SEQ ID NO: 224496 - DNA, 497 bp, Homo sapiens
cgaggatgaaaattccacctgctcgtcaaaactcagccagagctcagcctccctccaatgagaaaatgtcccctgtgctacaagctgaagccacaaagaccagtgtcaacggaggagaccctagtgcccacaaataaagcccagcactgtacatccacgtaaagtcctgtgaagtcagaagtaagggagaaattaaggatttagtagggtcccacaaagtctttggaaccagatctgattgtttcctttagttaaattcactcaaacatgcaagcatttgtataaacatcaatgtttttttcagtgattctgtgggattcctaaaatgtgcatctctttagtctaagatgaaacactggttataggatgaaaaaaattaaacatgcattcttcagctctcagacctcaaccacaaactgaagtcccagaaagagtcattaaatcacaatgtgtacttaaaataacaaatttgaaataaaaaatgttccaagacatta

SEQ ID NO: 224497 - DNA, 316 bp, Homo sapiens
tcttttgttttgggtattaagagactaaagtctttttgttgtgcctatgattcttacacaaagccatctaaatagatataaagtagaattatgtcacatgataaatctgaattggatatttttggcatccgaatgctctcaggaatgaaaatgtttcatcaagtgattggaatcctatagatgtgaagtgtgtgtgtgtgtgtgtgtgtgtgtgtgtgtgtgtgtgtgtaatatggattgtaactgattactttggagaatttcaaacattaaaaagtaagaagaaaactaaagaacttccaggacccatcacaaa

SEQ ID NO: 224498 - DNA, 683 bp, Homo sapiens
ggatagtctggaagacatggctttgttggaagacgtggacttgctggaagacacggatttcctggaagacccggattttttggaagctatagatttaagggaagacaaggattttctggaagacatggatagtctggaagacctggaggccattggaagatgtggattttctggaagacatggcttttttggaagacgtagattttcaggaagacccaaattatccggaagacttggattgttgggaagacgtggattttctggaagatgtgagtttgagtttgtgtttgggatcagtggcttacagatataggagcccgctgaatggccatagcagtctgtaccagtgatggtgtggtggtcccatgggttctggagccagactgtgtggggttcaactctagttcccaatttactagatgaatgatgtatgttgggcaagttactcagcttctctttgccctagtttcttcatctctaaaatgggaacaacaataacagtcctcacaattacttcttagaattttttcgaggactaaatgagataatacatacaagcttctaatagagtggctggcatattttaaaaatgtcaatagatgtccttattaaacctttggggctgcagctggaagccaataatgagaccagccatgttagcaaactgattttttttctgtgta

SEQ ID NO: 224499 - DNA, 220 bp, Homo sapiens
ggcaggctcctcttgtctgccataggtcatggctccaatctcacccctccgggaggcctccatcatcccctcacggtgcccagatcttgccttttgtagcacttcagaattactgtatttcaccaactctcaaccccataccttttcatgctctagcatatctgaaatcacgcacctaacgaggaaagagacatctgggtcagtgaaattcggttcatgc

SEQ ID NO: 224500 - DNA, 674 bp, Homo sapiens
gttgagtgatggtcacagagaacatataacttcaaaacctaaagtattgggctgggtatggtggctcatactgcaatccaagcactttcggaggattgtctgagtcccagaggttgaggctgatcatgccactgcactccagcctgggtgaaacagcaagaccctgtctcagaaaaaaacaaaacccaaaacctgaagaacttattatctgtctagccctttacagaaaaaaatttactgatctttattccagtgtatgaagatggaagtcttatcagatgatgatctctgtttttgaaaatacatttagaaccagtataatacaaatttccagcctcgccaacatggtgaaacctggtctctattaaaaatacaaattagttggatgtggtgggatacacctgtaatcccagctacctaggaggctgccacacaacaattgcttgaacccaggaggcagagattacagtgagccatgattatgccattgcactccaatctgggcaacagagggagactccacccatctcccccccaaaaaataaaaataaaaaggaaccaatataatacaaattaaatgcctagaatgtcctgtgaatgaaacttagtggaacagtagtctccccagtattgatctaattttacatccaactgttttagtattaattactcct

SEQ ID NO: 224501 - DNA, 680 bp, Homo sapiens
gtgtgggggtgtacagggcagaatatatatgatacataaatcatatctccaaatctttaatgagtacaactttcacttattcatgttccatcagataagattaaaattttccattaaaaaatttatttcattgaattgtttaaccaatattcattttatgttcaaaggccagtatagctttcacaaagcgacagaagcctgtagcccatatatagatagcatttaatccatatgtgagaattcaggagcattccaggaggcatcccagatttctcccaaatgtgatctggcatgttcaatttacatactcataaaaattcactcatcctcggaaaatgtaaaacacacttaagtatgatgaccagatagatgaatgcttattgttttttttttacatgaaaaataaaagagcacatgatttttaaatgtccagaactctcattacttgggctttggtgtttattttgatgaaagaatcaatattaatagtgtattgggcattagcaagggaaaaaaggtcatgaggattgcagctcagaagctgatatctctgaaatcagagaaaaggcgtttaaggtgatcaagatttccttttctccaaaacccctcaggaaagtgaggtccaaaaaaacctcaggaagttagataacttcctgatcctcagtttctctcctgcaaaa

SEQ ID NO: 224502 - DNA, 1093 bp, Homo sapiens
ggcactatgggaagagggccaaggagggagggaaaggtgaagaatgcaaaggcaagaagagaccagtcctctgcatcccccactagaagagaaagattttctccttctttgggtcctacattctgtccttcaccctgccccagccctgtacctacagttcaagcacaggtggctcctgagcctgacagttctgccacattatgctctttacagactctcctggaaacctcagtacagagagaatgatttttcttggaaatttagttgcaagttccaggcatgtgatttaaaacattcacattgggaatgtcactgctttagaggcagagactgcccaatgagtctgacaggttcacttgtattagatggagttaactcaattactacacaaagccactcagagaattgactaagttacagctcttctctgctgccgggaataccatgctcagccccagccacaaaatagagtggcatgaatgctggaagacatgctggggggtggaggggcgtcccaggatctatcaccctgttttgcagagagaaatgcttaaagttgggggtggcgggtgagagaagtgactgcatcaaaggccaggggtcatgtggtgtggacttggccagagcccaggtccccagtatctcagtctacctgcctggtccacatcctcctaacaacacttcctgatgtggcttctgcaggatcctggccctgagatgttcctgggagagaaagcttgtggggttgggcaatgctgtctattctagaccccttgtaggtgacactcccagtgacatccttgtatcctaggctctgggaagccctgcaattaaaacaacaaatgggttggattttgtttaatccactgtcctgcaagctcatttgaccaaagaagccctttgtttcaaggcccccctgtcacaagctcctgcacatgctctgggaaatgttgtgagacaagccctgtgagctcagggtggagcgtgagagctgggatctagtttaggccatggcactggccagcgccaggcagatgctcatctttgtggggctcatttctgtacctttcctgcctgcctgcccctcaggaat

SEQ ID NO: 224503 - DNA, 971 bp, Homo sapiens
ggcactatgggaagagggccaaggagggagggaaaggtgaagaatgcaaaggcaagaagagaccagtcctctgcatcccccactagaagagaaagattttctccttctttgggtcctacattctgtccttcaccctgccccagccctgtacctacagttcaagcacaggtggctcctgagcctgacagttctgccacattatgctctttacagactctcctggaaacctcagtacagagagaatgatttttcttggaaatttagttgcaagttccaggcatgtgatttaaaacattcacattgggaatgtcactgctttagaggcagagactgcccaatgagtctgacaggttcacttgtattagatggagttaactcaattactacacaaagccactcagagaattgactaagttacagctcttctctgctgccgggaataccatgctcagccccagccacaaaatagagtggcatgaatgctggaagacatgctggggggtggaggggcgtcccaggatctatcaccctgttttgcagagagaaatgcttaaagttgggggtggcgggtgagagaagtgactgcatcaaaggccaggggtcatgtggtgtggacttggccagagcccaggtccccagtatctcagtctacctgcctggtccacatcctcctaacaacacttcctgatgtggcttctgcaggatcctggccctgagatgttcctgggagagaaagcttgtggggttgggcaatgctgtctattctagaccccttgtaggtgacactcccagtgacatccttgtatcctaggctctgggaagccctgcaattaaaacaacaaatgggttggattttgtttaatccactgtcctgcaagctcatttgaccaaagaagccctttgtttcaaggccccacagagagatcgtcgaggctctctctgtggggccactgagggaattgaggttggat

SEQ ID NO: 224504 - DNA, 407 bp, Homo sapiens
tacaggcgcccgccaccatgcccggctaattttttgtatttttagtagagacggggtttcaccatgttagctaggatggtctcgatctcctgacctcgtgatccgcctgcctcggcctcccaaagtgctgggattacaggtgtgagccaccgtgcccggccaacatatatttcttaataagattatttggcttctcagctaagaggagattagaagtggttttcttctaaaaaccatgtcggaaattgaggcaggtactagggaggcaagtacattgtagaaagagaccagaaaactaaaaattacgctctttaaaagaaatttctgtattggaatatttaatagtagatttttcttaatggatgattgagaccaggccgatttttttttaatcacaatatggcttg

SEQ ID NO: 224505 - DNA, 717 bp, Homo sapiens
taggctggtctctgtccgtcctctgagctcaagctaagccatcatatcccagtgacctgcacatatacatccagatggcctgaagttactgaagatccacagaagtgaaaatagccttaactgatgacattgcaccattgtgatatgttactgccccaccctaactgatcaatgtactttgtaatcctcccacccttaagaaggttctttttaattctccccacccttgagaatgtactttgtgagatccacccctgcccgcaaaacattgctccaaactccaccacctatccccaaacctgtaagaactaatgataatccaccaccctttgctgactccttttttggactcagcccgcctgcactcaggtgaaataaacagccatgttgctcatacaaagcccgtttggtggcctcttcacacggacacgtgagacagtctccaactcctggcctcaactgatccactctcattggcctcccaaggtgctgggattataggcatgagccaccgcacctggctcagtaagtacattttttattatcaaaaacagagtagtgtatgattggcgtattctgtgtagaatgtattttattgatgtcttctatttttataatttttaatgaatgctttttagttttgggcagattcagttgactaaagcacctcatttcccagatacatgaaataaaatacttggtttcttttccaatttc

SEQ ID NO: 224506 - DNA, 177 bp, Homo sapiens
gtagaaaaaaggtctcacttagttgctcaggctggtctcaaactcctgggctcaagtgatcctcctgcgtcagcctcccaaagtgctaggattacaggcgtgagccacagcacccagcccaacactttattttcttgccaatactctcgattcccttgcccccttctttgtcatcac

SEQ ID NO: 224507 - DNA, 464 bp, Homo sapiens
cgtcacctctgctgtctgttagcagagtggaggagaaaatacacagcacaaacaacgtgaaaaaatagttactctattcattaaaagctgtaacttccagattggacttgagaagcaattaagcaacagaggaacctcatctactatctgtattcaggcatgctcatgagaacacgctgctccagctggacttagaggaacccggtgcatcacaggcattcctgacagagtctcgtggtcctgctggtccactcagtggtactcagtcctcctcattctcggggataggttccaagacccccaggggatgcctgaaactgcggatggtaccgaaccctacatatattatgtttttttcctatacatacatacctatgataaagcttaatttacaaattagatagagtaagagattaacaacaattacagcaatatactgaaataaaagttatgtgaatgtggtc

SEQ ID NO: 224508 - DNA, 485 bp, Homo sapiens
agatgagccaattgagcaggagacaatgtaagcagctgtgggggtgtcgagtactccctcctgcctgtgggagctgcaccgtggagtctagcttgtcaccctccggaggcagagcccctcctccctgcctcctcttggtctagatggacagccatggcagcggaggctgcagagctgagcaggcccagctgcagcctcccagcctttggaaccctgcttctccatcttggccacacataggatcacctgaggagctcaaagtctacagcccaaggttggtgagatgggaaccacccagcacagcgggatctccttggaacctaaatccagtgatggaatcttattgtccacagtcttttgtggtatgtgctaccaccgaagatcctctcctaacctatcatgtgttcaatacgtctcagctcctagacttgctgaagccgacggaataaaagaacctctcaacactggggccaatactgacatga

SEQ ID NO: 224509 - DNA, 431 bp, Homo sapiens
gagacaaattccaaagtaggaataggaaacgactaccagtttagttaaggtatgactagcactgtttgcatcctttgctccacttctcctaactctcatttgacccttagcatcaagctcaaattattttttcaagggctctctgtatgaaaatgaatggttatgtctcccaagagaaggaaggcacaatttaccaaacagcaaacactctattcctatttattcatccattcattatttatgaattgccctatatacatcgggaactgggctgcatgatgatggaagaggtgtgtgctattttcagagaatgaatgtcatatcagcatttcagggccagtatgctgtttcttccagaccctgtggaaatatccaagtctatgtctaaacttgtatactgttacaagtaaattcaataaaaataataagac

SEQ ID NO: 224510 - DNA, 542 bp, Homo sapiens
gatcacttgagcccaggagttcaagaccagcctggacaacacagtgagactctgtttctttaaaaaagaaagaaaaagagtatggaggatgtgtcttcaggcaggcagatacacaactgaaaactttctagaaaggccttgaggaatgaattgttcttcgacagaagatgggaaagaggtcattctcaatagaagaaaaaaaatgaccaaaagtgaagaagaaagcaagcatggggcatactcaggaaagatcaagacctctgagagaaccagtaaatgggttacatagatgtaatggtgtggcaggaggctacacagaaggaagggcaaaaccacctttaaatgttggattgaagagaatctgcatttactttgttccacaatgagtcttattaaagctttaatcagtagatatgaagaagacaaaaggggagccaaggagatcacaccaggtagaggcttattataagtgtcttgtgttcacaaagcatttgaggtctctgatggcaagaaattttgcaatgaaaatggcaaaggcagaa

SEQ ID NO: 224511 - DNA, 586 bp, Homo sapiens
tcttccacgaaaccagtccctggtgccaaaaaggttggggactgctgtcatacattagctaatgagctctttgggaactgaattttaaattttttaaattttagttaacttaaggctaagtggccacatgtggctagtgactatactattagggcagattggaacattccaattaaaagtcagagattgtcaggctagataaaaggaaaaaatcaacatccatcttaaatacagagacatggataggttaaaagtaaaaggctagagtaaaacactactatacgaatacttatcctaggaaagttggcttatgcctgtaatcctagcaactcaggaggctgaggcaggaggatcagttgaacccaggagtttgaaaccagccagggcaacataatgagaacccccatttctaaaagaaaaataaaaaaattatctgggcgtagtggcgtgtgcctgtagtcccagctgtgagagagactgaggtgggaagatcatttcagccttgaagtttgaggctgcagtgagctatgattgcaccactgcagttcagcctgggcaacagagtaataccacatctctaaaaata

SEQ ID NO: 224512 - DNA, 675 bp, Homo sapiens
gctattaatacatgccacaacctagatgaatctcaaaataattatgctgaatgaaaaaagcagaagaaatatttgaagtaataatgactcagagtttcccccaaatgaacgtcagataacaaaccacagatccaggagaacactaacaggaaaaatatcccccaaaatatatcaaggcatatcatatttaaattgcagaaaatcaaagataaatacaactctgaaagtagccagaggaaaaaactttacccacacaggggctaagataataattatgtctgactacgcctcaggagccatgaaagcaagaaaagagtccggagaaatatttaaagcattgacagaaaaaaaaataccaccaacctagaattctggtaccctgggaattgcctcaaaagtaaagaataaatactttctcagacaaacaaaaattgagagaatttgtcagctgaacttctctctcagaagaaaaatgttatagtcagaaactcagatctacataaaaaaggaagagcatcaaagaaggagtaagttaaataaaaacattttatttgaattgatctaacagacaatagtttgttcaaaataatggcagcaatataatgacaaatgctcacatatatgtgctcatgtatgcttatatgtaagtgtaaggaatgacagcagtgatacaag

SEQ ID NO: 224513 - DNA, 422 bp, Homo sapiens
tagatgtcatgtggctcctgatatgatcacagcatagccaaaatctaattcccaaaaaatcaagcaaaccaaaattgagggacattctacaaataaacaaaaaactgttctgtattctccaaattttaaaggccataaaagacaaagaaagactgagggaccattccagattaaaaaagatgaaagaagacaactatatgtaacatgattttggtattagattcctgacttggaggagaaaaaaggcattttttacttaaaatagtttttatcaatgttaatttcctgattttgaaaaatatccttatttttaagaaatacaccatgtagtacttagcaatgggacatcatgtctgtaaacttattctcaaccatttcaaaaaaaagagacaaacacaatagtaaagcaaatgtggtaaaat

SEQ ID NO: 224514 - DNA, 489 bp, Homo sapiens
cactagagttttattgtttttttcagttgtcctttgctttatttgtcattttctattgaaagccttaggatagttagggttgcaggtggctaaactatcttataaggcctcccctatctaatttctggagagaatgactgcaaagaaaatggagaaagagtgtgtgtgtgtgtgtgtgtgtgtttactggttaaaaaaatcaatttgcaaagaccccattattcagtgaacgaggggaaaaggcataccaagctaatctaaacacagcttccagaatctgagtggttttatttacctaggatgggaacagacaactttctgaaaggctaatcagaattaatgaatagaaaaattaagaaatagaattaattcttggaaaacaggaaaggaaaaattgtaatcaggcatcaagtttgttcaatttaaataagctgaaatctattagaattaagaaaaaactaccttaaggctaaccttccccttaagatt

SEQ ID NO: 224515 - DNA, 541 bp, Homo sapiens
agaaatgaaataatgaaatacacaccaaaaaaaaacccagaaatgaaaaggatatccctgagctttgtattaaattcttaagtgtcataagctatttcataagatattgggttaaggcctcaaatgtaagccacacactgtttctgacagcccttcacatgccgtgctcatttctacacatgccaaagagctccctttcaccagccattttacccaatagggaaatcagtgtcaacctgcaaggcagaggggcaaacaggcttggggccctgcgtgttatgtccagacactgctccttctcctacagaatgtagagcactactttgggaggattaaaagagaaagtactaggcctctctcctgctctctccccacatttaagagactgcactgtcaacaggcacgtgtgtgtgtgtgcgcattcttgggctcaggaatctgatgcagggatctagaacaagctgccatagctattagcagactactgcccacgactgcctctggagcaccttcactctgaggccaccacttttacacacat

SEQ ID NO: 224516 - DNA, 593 bp, Homo sapiens
ttctggaaagcatagttttcatcacatctccatatggttttctaggccacctacctctatcatcttggccatcaagtacaaaattagcatgctgaagaattttgagtattttgcctgcatctcattacaattaaacttctctgacttcagctaagttaatcttccccacatcccaaaagtttctttttgtgtgagggttttggggaggacagcattttcaaatatctatatgtaaattcctttataaaggaaaccccaagattcaaaagctgtctgtggttatcattttctcagttacagtttgataaattcttagaatttcaaggtgtgagagctgtggtcagcatgtcttcaagtatattggggtattttaccccctcagttagctgagaaagtatcaaccaagggaagaaagctatacaacaccaaaaaatgaatatgatgagtatagaaggagatttacggagactttaaacacataatcgtatacacactgttctgtaacacttgtctcttctgtcttttcctagaaatgtttgcttttgaaaacctgaaagttgtttgaacttttattatccattgttcgaagctag

SEQ ID NO: 224517 - DNA, 477 bp, Homo sapiens
agtcgcccgtcctcttccctatcaaccattttgaggatcataacatttatcatgagctttattatgggagactcttcttcgtgtttaaaaataaacgctggcttacggaactatatttggtatatggaagtcgtttgcatgtaaatgtgcttaaaggacaactgctttatttaagatgcagagtgagccccagctagagcgtgcctgggatgggggaggggacaggacccaggggtctgcctggctctggacagatgagtgtagcccacagtcctgttgaatctgttgtccttttccctggggacagttgcagaacaggataactcgtacttaaaaattcatagaaaatgtttcttattataacgtcataattgttatgactcagaaaagtagaattgcctttccactatgcctgtctgccctcacttttgttgcctaccgagtccccagcagcagctgcagaatcattaaaaaaga

SEQ ID NO: 224518 - DNA, 457 bp, Homo sapiens
aaacaaaaacaacagaaaacaaaaaaacccccacaaaacttaatattcaaagtaatgtagacattcagagaaaagttgtaacttgttgcttgaatgaagcagagtaggtaggacaattctgataattgactaaaataatataaggatatcatagtgttctgttagagatttaacttgtttctgctctggtgagaggtagcaattcaatgtggagacgtgcgcatcatgtctggccaacaccattgaacttgggaatgacactctccagggacatctcttagaaggttcttagagaaatgggacatgggttgttttactggttattaatggataagatacttgaatgctgggctgataattctgcttccccacctcctctactccagatttatttcccaccattccctgctctcctttttctcctagtgatggaccccaataaactgtgttatgtaga

SEQ ID NO: 224519 - DNA, 479 bp, Homo sapiens
caaaaaattacaatgaatatttttacatatgtctagtgcatacatgtgaaaatttagaagtgtgaggtgtgtgcacgtgtgggatcattgggtgggacgattatgtgcatattcagtaatacatgtgtcaaaaagctcttcaaagtgcttgtgccaatttaaacttcccaaagaactatctgagagtaccactgttctacatcttcaataatacttaataatttttaaatgttaccaaatgttaaatttttaaattcacatgagtattaattatgtatcttaatatgtatttccttaagtattcataaagttgagaacgttttcatgctattagccagtggttttcttcttttgtaaagtgtttattcatacccttcactcatatacacatggtattgtttgctttttggtgttattctatagatgttatttgtaagttctgaatactaattctatagctattaaatatctaacatata

SEQ ID NO: 224520 - DNA, 345 bp, Homo sapiens
gataaacttagtttacaaagtgcctttatgttcattattttttttaattcttagaataaccatgggaagtgtgtgtcatgcttaatataaagtaaaatatgtattatgtacataattgagggtaagttatacattatcattagaactctgtctcttccatttctctctatatgttggctttattctctgaaatgatcttcccccagcagcagtggtcatggctaccggtagctctggaacaacatcctcaaagtttccctccctcaacactagtttgagaaattctaaggcaggactttggtcctgttacatcaaaatttcatccccctgttaatcattatgtgt

SEQ ID NO: 224521 - DNA, 570 bp, Homo sapiens
atactaatcgagaattggccagtggtatactggtagatgtttaaagatcaaccctcggggagaaaacatggccctgatttgtagcatttgctggcttctgtgatgttaatacttccatcttggctgattaaatttgaagtgaaggggataaatgcaggatggccagagatgtggttactgaaatgatcagcatgtccagagacatatggtgaaatcaggagagtttgtgtagataggacagtgtttggcttagttcagggttggtgtcccataaagggaatctagtcgtggtataatccctgatccccactggtgcagtgttaaactttggctcacgtgccagtctccacattcagagccctaggacttgccacataaccagtggtgactagggtgattgggatggtggttggggaggtaaagtagagagattagcacttccttggtgctgcttccatgcattaattcattagcctagcagtaaaacctggcacctatccttctcccagaactctctcctgggctgcttttcttccatatcttcagcacctgggggcctggggatgtcct

SEQ ID NO: 224522 - DNA, 434 bp, Homo sapiens
acacacacacacacacacacacattgtgcaggccctggaccttgcctctgtctccttcctgagagatggccagcaacacagtttctcaactatttcgtctggatcaggaaaaaaaaaaaaaaagattcttggaaggtggaagagaaccatgggaaacttatttctcccctgtccccatctagacaacaattacatgggcagaatctgtcagatgtactactttggaactctagagtctattgaagaaggcctgcaacttccagggaaaggcttggacagtaaattgctgttaattttggacaatttcagcttttatctcaatagctatgcatcccctactcattagcctcatggctgggatccatgcacatgtttgtgaagcagcttgcatgtagcttatgggagccatgtggggaataaatactatgtctttc

SEQ ID NO: 224523 - DNA, 230 bp, Homo sapiens
gaaggcagagggctacaggagcctagaaagcaagggaagaggagagaaaagaaggggtcaaggagtatgcatccctatggggaagatcagtgatctgtagctggccagttactcaaacctgtgccacacgggttttatggtatccatcatcaggactccagctgaggaatcaaatcaaggaaggggaataagtaatagtgttgagaacttagaacagcctgagcattaat

SEQ ID NO: 224524 - DNA, 769 bp, Homo sapiens
agcggggttgcacaagtgccttgtgggaaatgtgactgcctgaaatagtggctaataatggcttgtttccaaccgaagcccatttgcctttcatggttaacattctccaggcccaggcagggaaacagaagtcccggaagctcaggctgctgctgcctgtgatggaaatggtctctatggtgactccccgcaggaaacctgcctgggtgatgtcttcctgaggaccatagcctgtccgcttggggccattatctggacaattgggagccgaataccacccaaaaatagccagacaccagaatataagtattttgtattacagtctcactaaatttgggaaagtaggagaagggtaagagtgcaggctttgcaggcagctggacctaggctctgccagctactaatggtgtggccttgagcaactgaagttcgaggagcctgtttccctggctacaattcagggatgattggggttgcattccataaatgcaatattttgaatatcagatgtcaaatgcctgaaaataccaccaaatcaaccctcggataaggcagccaggtttcctgctaccatgggacttgattaagattgggaagagccatgacctaggagtttgggatgggaagacatggcaaggcaagagtttttgaagagtcttggtgaaaagacagtcattagatgctattaaaaagttgtacaatctgctgtttgtgtaaatgttatttgcaaagtccccgaaatgaacaataaaattatgttcagctttta

SEQ ID NO: 224525 - DNA, 862 bp, Homo sapiens
agcggggttgcacaagtgccttgtgggaaatgtgactgcctgaaatagtggctaataatggcttgtttccaaccgaagcccatttgcctttcatggttaacattctccaggcccaggcagggaaacagaagtcccggaagctcaggctgctgctgcctgtgatggaaatggtctctatggtgactccccgcaggaaacctgcctgggtgatgtcttcctgaggaccatagcctgtccgcttggggccattatctggacaattgggagccgaataccacccaaaaatagccagacaccagaatataagtattttgtattacagtctcactaaatttgggaaagtaggagaagggtaagagtgcaggctttgcaggcagctggacctaggctctgccagctactaatggtgtggccttgagcaactgaagttcgaggagcctgtttccctggctacaattcagggatgattggggttgcattccataaatgcaatattttgaatatcagatgtcaaatgcctgaaaataccaccaaatcaaccctcggataaggcagccaggtttcctgctaccatggtaagggagaagaccctttacagagtcttagaatcatctcagaaaaccaaatgcaaatgggatatgtctgagttttgagcatctttcctgcagggacttgattaagattgggaagagccatgacctaggagtttgggatgggaagacatggcaaggcaagagtttttgaagagtcttggtgaaaagacagtcattagatgctattaaaaagttgtacaatctgctgtttgtgtaaatgttatttgcaaagtccccgaaatgaacaataaaattatgttcagctttta

SEQ ID NO: 224526 - DNA, 370 bp, Homo sapiens
tctactcctgtttcctcctctgtcagatggtgtgactgcagggcctacctacagggctgttgcacagatgaatgaaagtatatgaaacccttggagcagtgcctggcccagagggagcaccacagggatgtgtcagatctctcatcaaagggatcaggaattcgagacctgggtaatatggtgaaatcccgtctctacaaaaaatacaaaaattagctgggcgtggcagtgcacacttgtagtatcagctattagggaggctgaggtgggaggatggcttgggccagggaggcggagattgcagtgagccgagattgtgccactgcactccagcctgggtgacagagcagcaagacgctgtttcaaaaaa

SEQ ID NO: 224527 - DNA, 545 bp, Homo sapiens
gggactgggggccaacctgatgcaaagagaggcataaaggtggtgagcctgagagttgaggtctcacgaagtaaaatgtgagtgggacttcaccctctcagtgggcaaccacactttcccatcctgagatgaggctgccaagagagcacactgctaacactgcctgaggagagcacgcctcctgtctccttcaccctctgcttctgagaccctcctgttactgttatcatcgttccctagcctggctctgcctttctcagcagcccacattccatggatgggagcaggggggcagggacccaaaggagggaaatggctgtgggtggtgtgaaggccccccagccctcaggaaggtggggcaagagaccactgagcacaagggatcttgcccacctcctctttgactctgtggattatccatccatctgctcactgtgaagatggagaggcagtgccctaaggctgtatattagcttttccatattttttcaacattgaaaaaataatttttaaaaactgtgatttttttaaaaaatcatttggct

SEQ ID NO: 224528 - DNA, 520 bp, Homo sapiens
gtcggcgaccccgcgcagcgctgcctgcagaccctggagaaggcggaggcctgcgtctccgggtgctttcctacctctgggctccccgagaccctttctgaggccggaccctagttagtccgctgggctggggatgagggctaggggctgggaatatcagtgattgggaggacttaagtttttagttaatttgaccttgttgggcggccaagtccttaattataacttatatttgagtacaaaattatactcgggattcaaggctgtaagttaaaattaagtatgaaaatactggaattgtaaagatggaaagtagattcttttattaccagtttaaaaaaaaaaaaaaagcatttcccaatccccttctccaaaggaaatccatctgatgccatttctgtaaatgcactgatgaaaaccgtaacactgtcagctctgatcttgtagtccctaaggaattataggttctatctgtggttctctgacattttattaaacaagtgaaagtattcaaggaagc

SEQ ID NO: 224529 - DNA, 224 bp, Homo sapiens
cagtatctggaattgatatggatctttgtgtttaagacagggaactgaagcctggctgtaccatacatactttaaacatttatgcttatgtaactgctaatcgaattttgaaaaactatataacttttcacactttttacaaggatgtttaggtttaatgagttgaaaagatatacattctagaatattgtaaatatgacattttaaataaaaattgttacacc

SEQ ID NO: 224530 - DNA, 205 bp, Homo sapiens
cagaaagtacctagttaggagggaaagtagacacagacgttcaaacctatgaaatgagacagcgatatggggttctgacagaggtacggggagcatgctccaggactacagatgagggagtaacattgggatgacctggggaaggaaatgctggaactgggtttctgaaaggagatttttttttttttttttttttttttttttt

SEQ ID NO: 224531 - DNA, 189 bp, Homo sapiens
ccacccctccacagcaccctcacagggtgccctatattcatattggcacaaaagccccataaccagtggggcctgtgagcatcctgtgggcaggggttttgtcttttgcatttgtgcattccacacagttagcatcagagctggtacatagtaagtgctcaataaacattggttgaataaatgaactac

SEQ ID NO: 224532 - DNA, 279 bp, Homo sapiens
tattcttggtgttggattagttaattactatcaaagtaattactttcaatggcaaaaacatcaattacgtttgcaccaacctatagttacactgcgaaaagtgactatggtatatcatgatggggtattctagagttcaggaaatctgtttcctcatctggagtctcattgcatatggttgtttaatattatatgtaaatattcataaaaatgtgcatttatgtttttgcaccacttttttgtaaaggttagacttcattaaaggaattaccagattat

SEQ ID NO: 224533 - DNA, 563 bp, Homo sapiens
gctagccattggccaggccaccaggggtccccatgataatgcacagctagttgcttgagcatggttatggtgattcgtgcccccaacagccttccatgaccatatgtgattattaatgtgctagaatagtttatcttggtgtcttgcacacatcatgatttgtaatgtatatatttaataattataaaagaaagcagttatttgctttctttaacatacattatcttcaaattcctaacttagtgatgatgcaatcattcttttcacatgtgtatgtttttttgtgtcttggggaagctttgaaatacttgctgatttatggagagtgaaaagtgaaccagactttctcagaacatttagaaaaactcagacactcaaaagctaaaatcaaacagtatttgaaatgatttatacaattgcagccataactttttcccacttaagccaaagtacgtctaaacaatcctttcatactgctaagtcctttaaatggaagcaatagatgtctataaatcaaatgatagtttacatttatttcataaccactttttctaacccatttt

SEQ ID NO: 224534 - DNA, 318 bp, Homo sapiens
cacacacacacacacacacacacacacacagagccaatgtcaatttccttgttttgatactgcaccaatgtcaatttcctggttttgatactgcactaaagttatgtaaaaagtaaccattagagccaggtggtggtgagcacctatagtcctagctacatggaaggcggaggcaggaggaggggaggatcgctttagtccaggaattcgagaccagcctgagagaacctgtctcaaaaaacagagtgaagggtacatgggacctctttgtactatttttgcaatgtcctgtgaatctacaattatttcaaaagaaaa

SEQ ID NO: 224535 - DNA, 365 bp, Homo sapiens
gatggacgtgtttgggttccccccagtgagctctaatatgttcataaagagaaaaagcactacttttaaaaatgcgaagtggccgggcatggtggctcactcctgtaatcctagcacattgggaggccgaggtgggtggatcacatgaggccaggagttcgagaccaacctggctaacatggcaaaaccccatctttattaataatacaaaacttagctgggcgcggtgacacgtgtctgtaattgtagctactcaggagggtgagacacgagaatcgcttgaacccaggaagtggaggggccgagatcgcaccactacactcaagcctgagcgacagagtgaaactgtgtctccaaaaaaaaaa

SEQ ID NO: 224536 - DNA, 500 bp, Homo sapiens
atggggagttactatttaacaggtgcaagagtttcagttttgcaagatgaaaaaaagatctggagatggatggtggtgatagttgcttcgtttatctgtaaatagtatgtgactctccgaaatggtgattgagaatacaacttttttttttgagatggagtcttgctctgttgcccaggctggagtgcagtggtgcgatctcagctcaccacaagctccgcctcccgggttcaagcgattctcccatctcagtctcctgagtagccaggcacacgccacaacacccgctaattttttttttttttttttttttttttgtatttttagtagaaatggggtttctccatgttggccagggtgatctcgaactcctgacctcaggtgatccacccaccttggcctcccaaagtgctgggattacaggcctgagccactgccctgaccagctttttctattcttaacagagcatctcctaggttctagatcgcgagcggccgct

SEQ ID NO: 224537 - DNA, 444 bp, Homo sapiens
tgtttgtttccagggctccgctggaggtaagtaggtggtggcgtggatgacgtgcgccacagtggaccagccagtgggtctcaccgtggtgagttatgtcccattccgacatgtgcagagctgaggacatgagttttgagccttgaattaccctgggcttttagcccctgctttgccaaatgctgcctctcaataaaggttttcggtttgaaggtaaaggaaaattgaattttctgtgttgaaagtagcaggtggttctgtcagccatggcctcaggggcgtttagggggaatatggaagtttgtcctagtacgttgagcaagatagcgcagagttcgttcatttgggtttttatttaatatgatttgcatattttactctaagatttccatctctgtcggctgtgggaggacagcagccgagcaagttggatgtaaacagagg

SEQ ID NO: 224538 - DNA, 410 bp, Homo sapiens
gcaccatcctccccattttaggcactgttctctaattggcctgccttcctttctggtgaatccctattggctctcttggggctcttgcattctcaggtctgtggttacattgttgcttttcttttctttctcctgcctagatcctggcattgctacttgtatttttctttctgatactgccatactaactcaatgttatgttgaaaataatgtttttcttaatttataaagtaagttattttgtttcagtctaatttttttggagtcacatagttcaaaggattctacataagcattgtgctcaccatacggaccattaatttattcagcaggtcattaaccatgcagatcattaatttattcagcagatattcctccctactttgtgccaggccttgtatcagaggctg

SEQ ID NO: 224539 - DNA, 228 bp, Homo sapiens
tattgatgtatacctgctttccatacacacacataaactcttctatgtgttttataataacgaatttaataatctttgaagatatttttactgcatcctcaattcactgcactaattcatgcaattataaactgcaggaaggaggaaatacccccatcttgcgataaataaagcaaaatccttggcagaaccatgcccgcctgtccgcgccccgaccagccctcccgg

SEQ ID NO: 224540 - DNA, 630 bp, Homo sapiens
tcactgctgagaggggaggtgctctggggttaaaaggactgaattacccaagctttgtcacacaggggttgtgaaacaatcatgtatcttttcttttaaatccttagttttcacacctatacctcatatttttttttgaagatggcatccaacaaaataggtacttaaactatttagcagcatgcttggctgcattcggttcataaatactcattcctctgtttttcaaaagtctcataattcaagtactttgcccaaagtcctcaaactcagcagctgtgctgcttccctttcctccaactttcgcaaatttcatctgttctatggcatctactatcgaacatcagaaagaagaggcagaacttaacagttaggaaacagacttcctctactgtaatatgaaagtcctcttctagatttttagcactccttacaagctttggcctttgtaaaaggatgttatgtaaaacaaacaaacaaacaaacaaaaacaaaaaaaactgtgctttgcctttggaacctacttccctggacatacgctctgagtacagaaagaagaggctttagcaaccagaaaattaggaatagcatgtatgaaattagacatggaaccttgcaactttgagacag

SEQ ID NO: 224541 - DNA, 523 bp, Homo sapiens
gtaatcccagctacttgggaggctgaggcaggagaatcacttgaacctgggaggcggagattgtggtgagccgagatcgcgccattgcactccagcctgggcaacagaatgaaactgtctcaaaaaacaaaacaaaacaaaacaaaaaagagaagaaaggtagaaaaagaaaaaacaaaacagaaatgtcgttacaccctaacttgagagtgttttctttttctttttcttttttttgagacagagtctcactctgtcgcctgggctagagtgcaatggcaatggtgtgatctcagctcactgcaatctctgcctcctaggttcaagcgatcctcccgcctcagcctcccaagtattgggattacaggtgcctgccaccatgcccagctaatttttgtatttttagtagaaacggggtttcgccatattggccaggctggtcttaaactcctgacctcaggtgatccacccgcctcagcctcccaaagtgttgggattacaggcgtgagccaccgcgcctggc

SEQ ID NO: 224542 - DNA, 583 bp, Homo sapiens
aataaaacatatcaaagaggacaaggcagagcctactagaaatgttttgcctttattcaagttactgataaattcattggaactgggctgggtttcctagagattactcttctggtggtctcttagtgattggtcattcctcttcgtgactggtcattcctcttgtttgcttaactacagaccaacctttaaaatgcccatttataggaggaggttataaaaagcactttgtaaaatgcttcattgttttaagaaaactttcagcctttttccattaaaaaaaaagtaaccatatcaaagatggaaatcaaaccgttgtttttaagacggggaaatttctagtgcctaaatatctgtaagctgtgagtttctgtaatccgttttagatttgtttcttggactatagattgtgagtttaaagacatttaaaatttttgattgccctcaccttccttggggcacattttatttattaggatttttattatatcttttcaagttgaaaacccttctaacagaagggggagtcatgataacatttggatgaggtctgtcattttacgtggtctgcaggcttaacttg

SEQ ID NO: 224543 - DNA, 573 bp, Homo sapiens
accggttgccttttggcattgaggagaatgggggcacaccgttcctcaccgcagcttcaggaaggcatcaccaccagcaccagcatcagcatcagcaccagcaccactcaaactacagcctctcactgaccctggagaacaaagaggggcctctgaggtccccaaactccagcagcaagtcccttacaaaactgagtccaggaacacctgccttgttcagtgaagccgctgcccatctaaagaagctggaactggaaactgtgaaggctgctggaccctggcctcctctgcacatcaacataaacaaggctgaagaaaagaaagtctcggagaaaactcttcagactccacttttgccttcccctgttgcggatcatgtgaagtgtaacattctgaaagcccagttggaaaatgcttcccgagtgaacatccagggtggaaaggaggaatcaccgtttgtaaatatcaataagaaatccagtcttcaggacgctagtgtaagaagtcctattcctattcgtgtggaaactgcccagccagctgtggaaaagccggaaatcaagcctccccgag

SEQ ID NO: 224544 - DNA, 423 bp, Homo sapiens
taagcctgctcttttctgaatgacttacccactttttgaaattgtgccatgcagcttttcgtgctgccttccctgtcctcagctgctgctcaggtgccaaccttccatcctcaggctggtgctcgcgccctggggacatgcactgtcctttgtacagctcttcgttcatctcacaaagtgcccaggacattgtaggtgctgagtaaataatgggatgattgaggaaataaatatgtagaagttccttctgcagataaattttggggttattcacataaacaaatattacttgaataattagcattttcttagcctattgggtattctttatcttcatgtggaagtgggtccagtttttgtgtaagccagaagcttatgtaagttttgagaacctctttaaaaaaaagaaaatataaagttggt

SEQ ID NO: 224545 - DNA, 360 bp, Homo sapiens
ctctgctcatatattgtctcagaactctgcccattccctttaggcagagtgtatgaggccaggaattgtctatttgtgttctgaatacctactagatgtgtcagaaacatagtcaggatgtgccattaactttgatattgaggaagtcatcctacttaagggagagagaccagtgaatattctgtggcattctgaagtatttacaaagtcctgggggaaacagatgagtggaaaagttattcaggttcttagcaaggtgtttggttattaaagctgtctcaaagggttttagaagttaaaaaggtgggtaaaggcattctactgtgcgagagtggaatgtgtataaagcatggaaatatt

SEQ ID NO: 224546 - DNA, 289 bp, Homo sapiens
tgggagttgcttatgaacctctctttttactgaactatctcctccgtgcagaatttctcagcacctttctacctgccatgatgattccttccaggcgcatcacacggttctccatggaaactttcactttctatgattgaccaagcctgtcgtccctgggactgtaactgccagtcagccacgcagcattgccccaacaagcaggcgttctagctaagagaaccgaaacaggtaccaggcaaaccacatgccatcccatccccaaaataaataaacagtgaaaaaccca

SEQ ID NO: 224547 - DNA, 663 bp, Homo sapiens
gagttttgccatgttggccagactggtctcaaactcctggcctcaagtgatctgcctgcctaggcctcccaaagtgctgggatttacagaatgtgagtcactgtgcccaccctcaattttttgacattgcttttgtagggaagtcctttttctgaagatgcatctatggtgttggttgagtagggcactttgattttgatttcgggtgcatgcagtagtatattatttcttccactgtaaatagcttcagtggtaactgtgatttccctagtggcatagagtatggttattagtggaggctgtgggaaagttgctggggactagaatgccagatgggccagtcttcagtccctagtggtggcagtggtgggctgggcatgcctgtccttgggtctttgggcagcttacactggcaccagtgtcagtgaatccagacagactgattcttgggcctccacggggctcgctcagatgctggtaatggcagctgtggtctgggcacccaggcaggttctcaggccccttggcagctgatgtgatgtgggtgatggcagtagcagtggtggagcaacccaaatgttcatgctagtgttggtggtagctacaacaggttagacgggccagtctcttggcctgctggtggtatgtgcaggtggttgccag

SEQ ID NO: 224548 - DNA, 2511 bp, Homo sapiens
  misc_feature (29)..(29): n is a, c, g, or t
  misc_feature (659)..(659): n is a, c, g, or t
  misc_feature (765)..(765): n is a, c, g, or t
  misc_feature (1967)..(1967): n is a, c, g, or t
  misc_feature (2005)..(2006): n is a, c, g, or t
  misc_feature (2078)..(2078): n is a, c, g, or t
gctacacttagtgactctgagggacatgnaaccctccccgcatgctgctgctgctgctgcacctacaatcctgccacccccaatgagatctgcccacccctcttggccgccttccccaggctcaggttttcctcactctttccctgggttccacgcgcccgcgtagcccgaactccgaccctgaggctccgcgtcccggcccccatcgcaggggcgcctctaggaaccagaatcccgcagatgactacacagacaagatcgtgcccccaagttcggcgagccgggcgcccaccgcgcccccagcccacgcccccggagttcctgcgccacccacagcggccctgagcttcaatctgcactttcaaaacttcccagttgcctccagagccctgcagttgaagatcttgtctagcacatggttttgctgttttcctcaccccgaactccctccttggagggccatcgttctctgtctcagattccaccctccttatcacacaactagagcttcggaggaacgtgatggggctcccaactaaggagggaaagaccatcatagctcagggatgaggctccgagatcctcagataacattaattgtcctctgtcttctcttgacttggcacatccttgcttggagcagggcaggagcagctganagggaggtggcacctggaggtctcagtcatttcacttctctgagcctcagttttcccatatgcaaagtgaagaggtacactccctcagggttttgcatcttcttantggcagaaacctagtcaaacaaaatattatgtaaatgttcagtataggcggggcgaggtggctcaaacctgtaattccagcacttttagaggcccaggaggctcttgaggtcaggagttcgagaccagcctgaccaacatggcaaaaacctgtctctactaaataatacaaaaattagctgggcatggtgacacacacctgtaattccaactactcggtaggaggctgaggcaggagaatcgcttgaacacaggagggaggcggaggttgcagtgagctgagattgcaccactgcactccatcctaggtgacagagtgagactctctctcaaaaaaaaaacaagtttataaaggaatgtatattgttctgattgacattgaaatagggtcaactacccccggtcaccagagcagcagtaacacctcaggggccacactttggaggcactgcccagaaagatttctgggtctttaaaagtcccttccagtcctgggaaattctatgtgaaaatgatggtccctgcttgctataatccctacaggtgacttattatctaagccatttaacacaggattgaatactatgcgactgtgtgccaagcaagaagcagtgttgtatgggacaccctagctgtgtataaggtatctggtaataacacaggaggccacagtgatagactgtgataacggaagtaattccatatccagtttaagtgtcttttctagggagtataaatcgttatctccattccaatatggactgaaaggtatcgacttttatccatgtgccaaaaattagattggctggttcctctcttctactccataccaggtcaggtatcataataaggactcagagtggtccaagctgcccaaatatctgtgtcttccactctgacctgtctgggaaccccaaatttatatccaactgcttacttgacaactgcagttggtagcctatcaggcgtctcaaatttgacctagccaaagcagaagtcctcattttccccgtaaatctcctccccagttttccctgtctgaatcaatggcataagcagctacaccattgctcaaatcagaaccttatgagtcctactgaaaccagccaaagagtcctatagacagttgtttttgtttttgtttttgtttttgtttttgagacagagtttggctcttattgccctcactggagtgcagtggcncgatctcggctcactgcgacctccacctcctgagttcnngtgattctcctgccgcagcctcccaagtagctggaattacaggcacgccaccatgcccagctaagttttgtntttttagtagatacagggtttcatcatgttggccaggctggtcttgaactcccaacttcaggtgacctgcctgcctcagcctcccaaagtgctgggattatagaagttgacccttttgcagttaaagctggaaacttacttgttttatccgagttccttcctcaggaaaggaccttcaggcctctcacaaaaagtatcaaagaactgaagccataaaaagtatcaaaagaactgaaaccagatcactgcactagatgctgggcccctcagtcaccatgattgcttccttgcccctcccatgttcctgttttcttacatattgttacatttctttcctgctatataaacccttggttttggtcagtcaaggagatggatttgagactgcactcccatctccttggctgcagcacctgattaaagccttcttcct

SEQ ID NO: 224549 - DNA, 2787 bp, Homo sapiens
  misc_feature (29)..(29): n is a, c, g, or t
  misc_feature (659)..(659): n is a, c, g, or t
  misc_feature (765)..(765): n is a, c, g, or t
  misc_feature (1967)..(1967): n is a, c, g, or t
  misc_feature (2005)..(2006): n is a, c, g, or t
  misc_feature (2078)..(2078): n is a, c, g, or t
gctacacttagtgactctgagggacatgnaaccctccccgcatgctgctgctgctgctgcacctacaatcctgccacccccaatgagatctgcccacccctcttggccgccttccccaggctcaggttttcctcactctttccctgggttccacgcgcccgcgtagcccgaactccgaccctgaggctccgcgtcccggcccccatcgcaggggcgcctctaggaaccagaatcccgcagatgactacacagacaagatcgtgcccccaagttcggcgagccgggcgcccaccgcgcccccagcccacgcccccggagttcctgcgccacccacagcggccctgagcttcaatctgcactttcaaaacttcccagttgcctccagagccctgcagttgaagatcttgtctagcacatggttttgctgttttcctcaccccgaactccctccttggagggccatcgttctctgtctcagattccaccctccttatcacacaactagagcttcggaggaacgtgatggggctcccaactaaggagggaaagaccatcatagctcagggatgaggctccgagatcctcagataacattaattgtcctctgtcttctcttgacttggcacatccttgcttggagcagggcaggagcagctganagggaggtggcacctggaggtctcagtcatttcacttctctgagcctcagttttcccatatgcaaagtgaagaggtacactccctcagggttttgcatcttcttantggcagaaacctagtcaaacaaaatattatgtaaatgttcagtataggcggggcgaggtggctcaaacctgtaattccagcacttttagaggcccaggaggctcttgaggtcaggagttcgagaccagcctgaccaacatggcaaaaacctgtctctactaaataatacaaaaattagctgggcatggtgacacacacctgtaattccaactactcggtaggaggctgaggcaggagaatcgcttgaacacaggagggaggcggaggttgcagtgagctgagattgcaccactgcactccatcctaggtgacagagtgagactctctctcaaaaaaaaaacaagtttataaaggaatgtatattgttctgattgacattgaaatagggtcaactacccccggtcaccagagcagcagtaacacctcaggggccacactttggaggcactgcccagaaagatttctgggtctttaaaagtcccttccagtcctgggaaattctatgtgaaaatgatggtccctgcttgctataatccctacaggtgacttattatctaagccatttaacacaggattgaatactatgcgactgtgtgccaagcaagaagcagtgttgtatgggacaccctagctgtgtataaggtatctggtaataacacaggaggccacagtgatagactgtgataacggaagtaattccatatccagtttaagtgtcttttctagggagtataaatcgttatctccattccaatatggactgaaaggtatcgacttttatccatgtgccaaaaattagattggctggttcctctcttctactccataccaggtcaggtatcataataaggactcagagtggtccaagctgcccaaatatctgtgtcttccactctgacctgtctgggaaccccaaatttatatccaactgcttacttgacaactgcagttggtagcctatcaggcgtctcaaatttgacctagccaaagcagaagtcctcattttccccgtaaatctcctccccagttttccctgtctgaatcaatggcataagcagctacaccattgctcaaatcagaaccttatgagtcctactgaaaccagccaaagagtcctatagacagttgtttttgtttttgtttttgtttttgtttttgagacagagtttggctcttattgccctcactggagtgcagtggcncgatctcggctcactgcgacctccacctcctgagttcnngtgattctcctgccgcagcctcccaagtagctggaattacaggcacgccaccatgcccagctaagttttgtntttttagtagatacagggtttcatcatgttggccaggctggtcttgaactcccaacttcaggtgacctgcctgcctcagcctcccaaagtgctgggattatagaagttgacccttttgcagttaaagctggaaacttacttgttttatccgagttccttcctcaggaaaggaccttcaggcctctcacaaaaagtatcaaagaactgaagccataaaaagtatcaaaagaactgaaaccagatcactgcactagatgctgggcccctcagtcaccatgattgcttccttgcccctcccatgttcctgttttcttacatattgttacatttctttcctgctatataaacccttggttttggtcagtcaaggagatggatttgagactgcactcccatctccttggctgcagcacctgattaaagccttcttccttggcaatacttgtcatctcagtgattggctttctgtgcaccgagcagcaggacctagaccaaacccctggtgtttcggtaacaatacttgattcctcccatatacagtccatcagcaaaatagcctcaaaagtgtatccaccatccgactacttttttccatgtacactactgcaacattgtcttatatctggactgttgcaatagcagtgaaccagaagggagcttaactggtcctctgaattcattcttgccttaaataaatcttccatatagt

SEQ ID NO: 224550 - DNA, 525 bp, Homo sapiens
aaccattgcaaccaccttgtgagtttagattattcctattgtacagatgaggacattgaggctcaggaagattcagtagagaagtggtggcaaagacaataaaacaaagggtataatgaaggactaaatagtatcatttatgtaataaatattatgtgagtctattcaggagaaatttatgtgggctggcatcattcaggaaccttcaaggaacagagaaacctgagtcaggctgtgagaaaaggttagactttgttgatttgtggaggtggagaggagaattccaaatagaggaaaatgctctggcaaagtcatagagttgggttacagattaaagtatcagagacaccagcataggaaacagagcaagagcatgtctctacaaaaaaaaaaaataaaataaaattggctgagagtagtggcgcgcccttatattcctagctacttgggaggctgaggtgggaggatcacttgagcctaggagttcaagattacaatgagctctgaagagtgagaacccgtctc

SEQ ID NO: 224551 - DNA, 365 bp, Homo sapiens
ccagaaaatactgttggctttctttatttttaaggctagaaaggtataaactgtgtttatagaaaaatacttatattaagccgggctcggtggctcacgcctgtaatcccagcactttgggaggccgaggtgggcggatcttgaggtcaggagatcgagaccatcctggctaacacggtgaaaccccatctctactaaaaatacaaaaaattagccaggcgtggtggcgggcgcctgtaatcccagctcctcgggaggctgaggcaggagaatggcatgaacccgggaggcagagctggaaatgagccgagatcacaccactgcactctagcctgggcgacagagcgagactctgtctcaaaaaa

SEQ ID NO: 224552 - DNA, 386 bp, Homo sapiens
caaaattcacatatagtgatcttaagtatacaatttgatgtctgtgtgtaacagccatccttatcaagacacagaacattctcatcacctcagaaagttccctcatgtcccttcctatttgatcttcacctccctctaataggtaaccacagttctgatttttatcttcaagattacgttcgcctgttcctgaatttcacataaatggctttttttgcaccacaaatgagtccaagattcattcatattgttgtgtttaatgatcatttgttttttaaatttgtactccattgtaagaacaatataagtaattttctgttggtgaacatttaaaatgttctagtttggagctattatgaataaagctatagtgaacattcacgtat

SEQ ID NO: 224553 - DNA, 377 bp, Homo sapiens
gattaggaatttgccactccagccttcagtgagaccaaaggtctgtcaatgtagctagcctttgattgttcattccagagttgaataatcctttcatctgccactagagccccgaacccagcagccctacacctcctaaatcataaaatcatttcacctggcacctttaaaggtagaaaatggtgagtgatcactgtcacataaaggagatttaccactgaagattaaacttgtatctgaaacatctaacacttcctcccagagatggacatggatgacatttctgcagccttcatgaaatgagttggctttattttttgtgctatattagcatgagtcattgtggtttgggggtaagcataaatgagcttggttgt

SEQ ID NO: 224554 - DNA, 291 bp, Homo sapiens
ctgggttcaagtgattcttctgtctcagtctcctgagtagctgggattacaggcgcctgccaccacacccagctaatttttgtatttttagtagagacggagtttcgccatgttagccaggctggtctcgaactcctgacctcaggtgatccacccaccttggcctcctaaagtgtgggattacaggcgtgagccaccacaaccagcccgtacctcctcactcttaatgtctgtatagtattctattatttgggtatgtagcaacttacttagccagaccctccttttaaa

SEQ ID NO: 224555 - DNA, 167 bp, Homo sapiens
cattctgctattctaataagtatgtagtgatatctcattgtggttttaatttatgtttttctaaccttttttatatttaaatttttcatataaatgttcatgttggtctattagcatatcttctacatttaattctttaaattcattccaagaaacaactataggtg

SEQ ID NO: 224556 - DNA, 475 bp, Homo sapiens
tgaaaccccgcctccactaaaaatacaaaaattagccaggcatggtggtgggtgcctgtaatcccagctactcaggaggctgtgccaggagaatcgctcgaacctaggaggtggaggttgcagtgagccgagattgcgccgttggactctagcctgggcaacagagcaagactcgtctcaagaaaaaaaaaagagagagaaaacgatacgtgtcctggtgacgactcctgcaccttccctgctagcctgccttgctctgccctgcctcctccctcctcctgctgtggcctctggagctcctctctcctggctcacccagggacgtcacccttgcctcttctctctgcgactcccaggcaaaggactttccgctcacaagcaaacatgtgctggcaggtctcttcctgtgatccctccaccctctatagctactgccccgatccctctgcttcctccagcttctcgtcaattcgcc

SEQ ID NO: 224557 - DNA, 429 bp, Homo sapiens
atggctttgaagttcagaacatgagaaagagctaatggtagggactgacttgaaagcctttgcattctaagaatgatgattaggtttctaatgtattattaaataatgtccagcccacaaaaaagatgaagtctgcaaaggtatacacaataactctgtgccttgctatggtcctatctgatctcaaacaagaagctctttgggttgtgttgctggtggttggatgtgttctgagccatagctaggcttatgcacataacaaagtctgattcccaggaatctttttaggaaacacctcccagattaagtaatatttacctacttgtcctctttgaacagtgctcctactgattctttaccctaatgaagttcatgtcccaacccacacccttttcctaaaacaattaagcttttagtggtgacatgatg

SEQ ID NO: 224558 - DNA, 503 bp, Homo sapiens
acaataaaacaaaaacccacatgatttagaaatgtttttgacaaaatccaatcctcattcatgataaaaactctcaacaaactagaaagaaaagaaatttctttagcttgattgataaagggtatcttcaaaaaactcaaagctaacatcatctataatggtgaaaaacagagtgctttgcttctgaggttgagaataggaaaaggatattcattcttactatttttatttaacattgtcattgagattatagccattgcaataaggtaagaaaacgaaaggtatctggatgggaaatgaagtaaaactcattacttgcagatgacatgactatttatgtagagaatcagaagtctacaaaaaagcaaatagattaactgagttttacaaagttgtaggatacaagatcggtatgcaaaaacagttatatttctgtataccagcaatgaacattctacaaataaaattaagaaaattttattcttatgaatattctacaaata

SEQ ID NO: 224559 - DNA, 375 bp, Homo sapiens
gggcaacaggcagaaccaaagagtcaagtttgaagaaactataggacttttacttggagctgacacagagcgtatggagcgaagtgtgaactcaaggaaggcaccatggcacatgcctattgtcccagcaagttgggagtctgagacaggaggatcacttgagtccaggggtttgaggctgcagtgagttatgatcatgcctgtaaacagccactgcactccaacctgggaaccgtagtgagaccctatctcaaaaaagaaaaaagtctgaacttaagtctaatctacctcttttggactgtgtgatctcatgttactttactacattaagcctcagtttcatcatctgtaaaacagcagtacttccctgatgga

SEQ ID NO: 224560 - DNA, 294 bp, Homo sapiens
gcccttctgtttctttttacagagtcaatttctacccatttgtcaacccactcaagaactactttgcctataaatcttagattataaactccatgagtacaggaccttgagttttctttttttttttttttttcaactcagagtcttgctctatcacccaggctagagtgcagtggcatgatctcagcttactgcagcctctgcctcctgagttcaagcgattctcctgcctcagcctcccaagtagctgggattacaggtgcctgccaccacaccgaactaatttttgtattt

SEQ ID NO: 224561 - DNA, 502 bp, Homo sapiens
cggccgccggtcctccgggacgcggaccgccaggacttgaacgcaactcccaattgcagaaaattggcaacgtctctgaagagcccttgcttttgcctggacccccagcatcatggtttcccatttcatggggtctctcagtgtcctgtgtttccttctgctgcttggattccagttcgtctgcccacagccctccactcaacacaggaaggtcccgcagcggatggcggcggagggcgcccccgaggacgacggcggcggcggcgccccgggagtgtggggcgcctggggcccctggtcggcctgctcgcgtagctgcagcggcggcgtgatggagcagacgcggccctgcctgccccgctcctaccgcctgcgcggcggccagcggcctggcgcccctgcgcgcgccttcgcggaccacgtggtgtcggcggtgcgcacgtcggtgccactgcaccggagccgcgacgagacgccagcgctggccggtacggacgccagc

SEQ ID NO: 224562 - DNA, 597 bp, Homo sapiens
tgcagggagagagaactgaggatgagggggctaccatccccatatatggctggtttgtgctgtgcaccaacaagaacctgctttgaatttccatgccaatttgcaacccccatactgttccaagcaaggacttgaacgcaactcccaattgcagaaaattggcaacgtctctgaagagcccttgcttttgcctggacccccagcatcatggtttcccatttcatggggtctctcagtgtcctgtgtttccttctgctgcttggattccagttcgtctgcccacagccctccactcaacacaggaaggtcccgcagcggatggcggcggagggcgcccccgaggacgacggcggcggcggcgccccgggagtgtggggcgcctggggcccctggtcggcctgctcgcgtagctgcagcggcggcgtgatggagcagacgcggccctgcctgccccgctcctaccgcctgcgcggcggccagcggcctggcgcccctgcgcgcgccttcgcggaccacgtggtgtcggcggtgcgcacgtcggtgccactgcaccggagccgcgacgagacgccagcgctggccggtacggacgccagc

SEQ ID NO: 224563 - DNA, 342 bp, Homo sapiens
ttcccccaagactcatgcagcatggaagccctgccctgggaaccagtgaacctggtaagaacttagcagagacaaccataaaattgtcccaagaaatacctccataagtcaagacacatgcaggaccccacagaatataagctccaccaaagatgatctcacagacaacaatgacaaaacaaatagtcttacaccagttctagtggtagttcttacataacagccttttattttattttgttttatttatttatttatttatttttgagacagagtttcgctcttgttgcccaggctggagtgcaatggcgtgatcacggttcactgcaacctccgcctccc

SEQ ID NO: 224564 - DNA, 317 bp, Homo sapiens
gacgacattctgagcctcccttacagtgaggtattgtcctgtgactaagctctagctaacaggatttgcatggaagtactgcattcaacttctggattgcacacttcaagggacagggagagttctccctgttgtttctgccttgctggctgaaacgcatccatggtggtgagacacctgggactccacaattaagggcagtacctcgtggagtgtgagaagcaatacacaagaagcctgggactctgaacactttgtggaacaaagccactacagcagctcagactttttcaagaagaaataaacttccattttta

SEQ ID NO: 224565 - DNA, 462 bp, Homo sapiens
tgacacaaagtcagtattaccaacacagacctgaactgaaaagagctatactgtagaagaaggacgctggacaggtcctgtggtcctagggagaggaatgtaagccactgctaaagcaagcccagcagggaggaagtcagaggaataattatcaaaaacctctttcttctgtcaccctcctttctccttctggtaccttccactggccaaactcagccataaatcaaagagcaagggatcattcagtctcttggagcagagtcaagtagagaaatgtggtaatgaatctggaagggcaaagagagaatatccaacatagaaacaatgggtccactgtatttcacaacaaaaaaagttactggcaacttttgtcagaccaattttagtggagtggtgggggcagaaaataaattgcaatgagaggagagaaggtagagctgttcttaaatttattaaaaaaaa

SEQ ID NO: 224566 - DNA, 349 bp, Homo sapiens
gttgagcctgggaggttgaggctgcagtgagctgtgatcgtgtcactgcactcctgcctgggcgacagagcaagacactgtgtcaaaaaaaaaattaatttgaacaatgcttgctaatgttttgaagtacattatctgtacattgtggaatggttaaatctagctaattaccaaatacattatctcacatagttatcatttttgtggtgagaatacttaatagctactgagtatttttcaagaatacagtatgttgttaactaatcaccatgctatacagtagtgctcttaaacttgttcctcctgactgtaattacgtatcctttgtctaacatcttcccaatcccca

SEQ ID NO: 224567 - DNA, 192 bp, Homo sapiens
cccccacccccacccccacggggccccgatttgttttttcctagggtggttaacatgagtttcacttgaaatcagagttacacctgggattatgacttggaattctttcttgttattacttttttttctttttcaagtaggttggctaattatatttacttgtggaaatgtggggactctatgctttttttg

SEQ ID NO: 224568 - DNA, 668 bp, Homo sapiens
actgagacaaaaaaccaggactatattcgtacatggaactgggatgtaacatcctacccatgacttaatttataagcattgtttattctctttggagcaaatgaaatgcttttccaagggacagctgcaaaggccaaggatttgaaaagaagaaaattatgataaacccctcttaatgcaggaaagattagatagcttgctaccagaaatcaagaaatatttataataatcacattcaaccctagactttcctctaagaatctaaacagaaaactttaatcctccagaatgtaaactgatgccatggctatatatggtcacagaaatcctaaggggaagaaaaagaaaagaagagggggagaaaaaataaacacccagttgctgtgtctcttaaattggtgtatgtgtgttctaccacagagatctgttaaccttggcaaaatttacaagtaagaagcattaatcaactttacacaagtacacgtgacactttcctttttaagtggaagccacaaactcctctccctttgggaaatctcactgtcatgctgaggatttttcttcatagataatactaccatggcaaacatcaaaaacaactggattccatattctgtgggcttgaccgccccatgaaggcaagcaatattaacttttcttgtggttga

SEQ ID NO: 224569 - DNA, 782 bp, Homo sapiens
actgagacaaaaaaccaggactatattcgtacatggaactgggatgtaacatcctacccatgacttaatttataagcattgtttattctctttggagcaaatgaaatgcttttccaagggacagctgcaaaggccaaggatttgaaaagaagaaaattatgataaacccctcttaatgcaggaaagattagatagcttgctaccagaaatcaagaaatatttataataatcacattcaaccctagactttcctctaagaatctaaacagaaaactttaatcctccagaatgtaaactgatgccatggctatatatggtcacagaaatcctaaggggaagaaaaagaaaagaagagggggagaaaaaataaacacccagttgctgtgtctcttaaattggtgtatgtgtgttctaccacagagatctgttaaccttggcaaaatttacaagtaagaagcattaatcaactttacacaagtacacgtgacactttcctttttaagtggaagccacaaactcctctccctttgggaaatctcactgtcatgctgaggatttttcttcatagataatactaccatggcaaacatcaaaaacaactggattccatattctgtgggcttgaccgccccatgaaggtcctctgccagggtcaatctcagcagaaacatgactcttcaaaaatagatcatcacagttgtgattaaatctcccatgttcaaaatttacagcctataattcaatgccgatatgaataatgacttaaataaaaagttacagtc

SEQ ID NO: 224570 - DNA, 565 bp, Homo sapiens
tccctcctccccaccccccattaatcatgagtcccttgaaggaacagattggggatccccacagtgtccagcatagaatgtcatgtatacaataggcatttaatatgtgtgtcttatacaaattaaacagtatggtagaagctcgtaatcttagtcttgctcagtcctaaggatctttcccttttcagtgtatggcagtgagggagatggtaagagggagactggcctaaagaggtttcacttcctttggcactagtataggcttaggaggtttgggtgttctccctaaatcagtgttctacagcccagaaacaaggtttctgaagttggcacttcagcgccataccatgtacgtttaggcagtgatgtgaatcagatgtggccagcaatgatggaaatgtcacaaagtggagagacagggaagtgagggtgggaatgtagtaacattaaataagagctaatgagtagaatgaactagagcaggaccaagactacagcttgggtacaatgggctgagcagtctatgtcaggaccctaaggctgggagtgccaggccctgagtgat

SEQ ID NO: 224571 - DNA, 1096 bp, Homo sapiens
gcatcttaactatgtctttttaagtctacataatggcactgacattgataaccttggtaaagacgtgattgcaaaattgttataacatttgtgtgatcagcaaggcacctgttattgagcaatgtggagaaacggtcagttgctgccatacactttccatatttttggaatacttaatacataaatcattattaggagaatgtgtgagaggatatttgtacttttgaaagtcaacataattcagtaaagaggtggtttctttgtcaatttatttggaatttatatcacctatcatttcattgtctgctttatataaataattatacccagagaacaaagtaaccaattaaccagagtcatgccagtgagtccaagccaacttggaagaacagtgctataatattgccatctcattggatcttgaccctgtgggaatctagttaacttccgtgaggaatagtccatactcatttccttttcatattatcatgtattgcttcccccattattataattgactgatttgcatagcacagtagtggctgaaatatcagaagatattctccctttgttgatgaaagtacgtattgcataaccttgtatcttttttcttttaaaatgtttgttgtgaaataatacaaaagtatattgtgtatgtatggtttaaaaaataacatgatcacacgtactcagccttcagcttaagaactagaacattctcagctgcctagaatcccccatttgttctccctccatagattatatgaggtaaacattcttctggattttttgttaataatttcccatgtttttatttgtgactctaccatctatgtatgtattcctagtaatatattgtttaaatttgtttttgaacttttatgtaaatggaatcatgctgtatgtattcttctgtgacctcttttttctgacattgtttttgagattcccatccatgtttatgcatgtaactgtatttcatgttttcacagctatatggtattcgattgtatgactatttcacaatttatttatccattcttctatttatggagatttggattgttttcagcattttgcaattacaaacaatgct

SEQ ID NO: 224572 - DNA, 511 bp, Homo sapiens
gtctgctttataccagaacatactaatttggaaacagtggttttcctgaatctgccttagtccactctgatatgaatagtcagcgtacagagtgtggaaaatgcaataaaaatgtgttcagactctcctgagaagaaataggctgtgatacagtttgggaggaaaagactatgttattgtttcaccagaagaaactaggttatcaaagaaatgaaagggaaatacaaaatttaaaaatatatgtatatttacgtaaaatttttatgtgacaaaaggctttcaaaaagcctcactgaaaggaaacaatgaaacctaaagaaatgatccattatgtagttctaataaaggttaaaccttttaaagtttgtcaggtccatacagtacgatctaaaaattgaggaactaccattctgaattagtttgaattatagaataagttgttgattttgttattcattactttcagatatttaatgtaatttaattaaatgctaataaagcattttgaagt

SEQ ID NO: 224573 - DNA, 581 bp, Homo sapiens
gcacgagcagagacggggtttcactctatcccccaggttggagtgcagtggcaggatcatggctcactacagccttgaccccttgacctcctgggctcaagttatcatcctgccttggcctccggaatagctgaaaccacaggtgcgagccatcatgcctggctattaaaaaaagaaaaaaattataaagacagagtctcattatgttgcccaggctgggcttcaactccttagctcaagcaatccgccagcctcagcctcccaaagtactgggattacaggcaggcgtgaaccaccatgcctgggcaacaaatatttcagcacaggtattaaaagcaaatatggtgaaatggtaacagctgtcaaacgtgggtagtgagtaaatccttcatcatcattcttctctccaatttggaaaagttttcataataaaaagtggtgaggtcgggagaaaggacagatggttagaggaagcacagttctactcaccattttcccaagactgaacttgacggagaggtggggacccgctgaggttgagaggaaagcttcagggaccagaggtttatgggagcaaagat

SEQ ID NO: 224574 - DNA, 236 bp, Homo sapiens
caagtagctgggattacaggtgtgagtcaccgtgcctggcctatgttattaatttttaaaaattcatttaaatatttaaaacttctgagttttaatctctaatatggtaaatattgatttgtaaaacttacataaaagattttcaggacctctggtttttaagatcacaaatgaatcctgaaaccaaaaagtttgagaactactgggcagactggatgtttccttgcctctgataa

SEQ ID NO: 224575 - DNA, 549 bp, Homo sapiens
tgccttgatgtactgcttatggataccatatgcttttatatatccattgtccagaatgggtcaccaggtatatttacattggtaggaacaaaaactcttctgcattatgtagatgttaacctaaccagtaaccagattaactatttaaggtggccaggctttgaaagattggaacaagcaggtgttggggtagtgccagaattgtcaaaaaacaaaaaacaaaaacaaaaaaaaaacagttaagggctagttgaggcaagatccactttgaaagggataccaatgtagaggaacagcatggagaacagagaggtgaatggtggggcagtataagaatacttgctttgtcaattaggatggcagctaagtctattgcatataagcatggaggaatgcctgatgctacttaacatgagaaaggtactgtgggacatatctaggttgacatgagaaatatgttatgggacaaaaagattgtcctaagatacccacaacaatcccatcattttcacagtaatataggtcaaaaagattgtccaagttgggtag

SEQ ID NO: 224576 - DNA, 389 bp, Homo sapiens
tgaaaacaagctggaggattaaagcaaaactatgctgttccccagagacccttatgtcttcaactgctctccatatatcttcttcccaacttcaacgtggggaagtgtataatcttacagcgaagatcatgttccagaccagcagcatcagcatcacccaagaacgtactacaaatgaagaatctccggcctgctgaatcagaaagtgcagcttcgatgagccccccgctgatttacttggggaagagaacttcttatctatctcgactgaacatggcattaaatctgttttcagaattacctgtcctagatttttctccatccttgttttctctggctatactcaaaacagaatcttcctcatcacttgtagcctgaatggaatttga

SEQ ID NO: 224577 - DNA, 311 bp, Homo sapiens
gagacaagatctcactctgttgcccaggctggagtgcagtggcacgatcctctagcctcgatctgctggactcaacgatcctctccacctcagcctctcaagtagctgggaccacaggcatgcgctactgtgctgggctgattttttaattttttagagatgttatcccactatgttgcttaagttggtcttgaattcctggactcaagtgttcctactgcctcagcctcccaaagtgttggaattacagatgtaagccaccgtgcccagctctgatttacgtgtatttctgtccccttctgtggtttttc

SEQ ID NO: 224578 - DNA, 1160 bp, Homo sapiens
tgatgactcactcctgtaatcccagcactttgggaggccgaggtgggcgaatcacttgaggtcaggagtttgacaccagcctgatgaacatggcaaaaccctgtctctactaaaaatacaaaattagcctggcatggtggtgcatgcctatgatcccagctactcgggaggctgaggcaggagaatcacttgaacctgggaggcggaggttgcagcgagctgagatggtgccactgcacgccagcctgggtgacagagcgagactccatctcagaaagaaaaaaaaaaaacaatttatttctatatcaattaccaagcttcagatctaaagggctttactgatacacatttttctattcaaggttcagtagaaagtgggacgtgactgaacacaggacacaggaatatacaatactttggaacttaggaacaagaaggatgactgaagctctattaactttcaagcaagagcaaatgtgattataattcagggtggttggagcagtgtgtggaaagatgctcagtgttccaaaacacaaaaatgggaaaagtaagggccaattccatttaacattcagcctaatacattttcaaaaactaattctgtgcttagaaactgccaactttcaaatggagatagctgaaacagcaaaaatattctttaacagtgatggttataatggaaatgctgacagatcattaaccacagcagtcctttagagaaaaaactgctgtaacgaaatcctgcagctaaaatttaatgaataccctaatcacatatttgctaatgcctctgaaatgtctaaatcggtcaaattaataaaaatcagtgctatctattaagtctgactattgagcctagggcctagccctctgactaccagctgttgtgaactacaggttgattttttaaatgcagggcatgtattctgattcttccatagtgaacagtaatggttctgttaacaggttcaaggtctactcttcttagagtgcttcttatgtgacaagcactgtagatataaaagttaagtccacgccttcaaggaacatgcctagtagggcagggaagcacacaaataagaacataagacaggagccttaccatacttgagtagagctggataccaggaaattggtgatgtgagaatgggcaaggg

SEQ ID NO: 224579 - DNA, 665 bp, Homo sapiens
tccctctccaatctgccagctgcagctgttcctgtcactcggcctagggccacaccctcaggagaaaaccgtgaggaggttataaagggctccccagcaggagctgccgcccgtgcctctgcactggggacctctgaccttccatatcactacagagatgtgtggctattccggtcgtccaccactcattccacgtagatggaggcttgcgatgcccagagtgctggggggagacttggggctcttttggttacaagtggcaggaacccaaaacagggctttcctggaagaagtctagactcattcactcaagggaaggaagagtggaacgtccagccctcaggaaggttaggcagagtagaagcacctgaacctatggcctaggcactcaactcagctgggacattgtctccctccaactctcacctctctgtgaggcttcattttctcctcctgcagactggcttcctccacacggtgggaagcaagactgccttgagctttccagcctctcacatcccggcatctatgccagagagggactctccaaagagaaggatccagagaaagccactgatgggccaacttgggtgaaatgatgctgttatagccatttgcaattctctccgtactcaccattgccccctaaccccaattttattcag

SEQ ID NO: 224580 - DNA, 668 bp, Homo sapiens
agtgaaaaaatggtatgttcagggtaactaagcagcagagtagaatcactggactacccgtatcagctgttagacacagcagcagtggcaggctttcagtctccacctgcaatgtggtgtcatgccagggctcagaagtcttgtcataccccattgtttgctgcactgcctcacttggacttggttagacttctagctttaaaaaatgatatcttgtctttaattggtttttgttgattcttttggccagttcccaagttttgaactgagaaggaaggctgggtttgttgtgcgtgtagacttttgacacaagtttgttctatgcaactctatcctttaagctctgtgtctacttttcttggttagtttacacttcgaaagcagtaatcgcttctctgagcaacatggcagactgaactggtgtagaggcccaccctatgccaaacacttggaaatgctgactaaatataatgacatagtttatgtatggcaaagcttgaaatcacaaagaaggctattaacatgtcacttgcctggtaaaagcatgagggaaaaaaggataaggagtttttaaaaattgaatacttatcctcatttctaaagatggctctttttttttttttttaaggaaaaggtggacaacatatatctgatatgggggaagaaag

SEQ ID NO: 224581 - DNA, 488 bp, Homo sapiens
agatttgtctcaatgagtactgcctaaaatttgtttccagagaaaattttagcaacttttacattttaccattaatacacttaaaggggataactgcagagtagaatggattactttgaaagaagtccctataactggaggttttgcacacttcccaggcattttgtggaagggtcacaagtattagttcacagttggaatagaaagtgatttgcatgaatggaaaggagctgtgggaattataatctttatgttgtttttatatatttgtactattttgtgcctgggtatgttaagcatgtcattgtgacattttccttgaagattatgtttggtctaggcaaattcctgattattaaaaaactatattaggataataatcacttgtagtttacaagctattatccccagtctcttaatcccttattttggcagtacatatttgattaagagatagctaagtattatgttcctaattgcttaagtag

SEQ ID NO: 224582 - DNA, 470 bp, Homo sapiens
cagagaaaaaatgcacttaaataactcactgaaacaaatggatgtagcagatgtgtacagaacattctgtccaagatctgcagaataaacattcttgtaatcagtacatgcaacattctacaagatagaacatataataggtcacaaaacaagtctcaatgaatttttaaaacagtgaaatcatatcaagtatcttctcagaccacaggagaataaaactaaaaatgaactctcaaagaaacccttacaactgaacaaatacatagaaattaagaaatctgctcctgagtaatatctgggttaacaatggcataagatgaaaatttaaaaattaccttaattaaatggtaacaagttattgaaaccttaagaatacagcaaaagcagtggtaagaggaaagtttatagtgactactgcctacgtgaaaaagccggaaagagcacaagttgtcaacctaatgttgacacga

SEQ ID NO: 224583 - DNA, 2106 bp, Homo sapiens
cttacctcagcaaccctggcacctccaacccgacacatgctactgctgctgctactgctgccacccctgctctgtgggagagtgggggctaaggaacagaaggattacctgctgacaatgcagaagtccgtgacggtgcaggagggcctgtgtgtctctgtgctttgctccttctcctacccccaaaatggctggactgcctccgatccagttcatggctactggttccgggcaggggaccatgtaagccggaacattccagtggccacaaacaacccagctcgagcagtgcaggaggagactcgggaccgattccacctccttggggacccacagaacaaggattgtaccctgagcatcagagacaccagagagagtgatgcagggacatacgtcttttgtgtagagagaggaaatatgaaatggaattataaatatgaccagctctctgtgaatgtgacagcgtcccaggacctactgtcaagatacaggctggaggtgccagagtcggtgactgtgcaggagggtctgtgtgtctctgtgccctgcagtgtcctttacccccattacaactggactgcctctagccctgtttatggatcctggttcaaggaaggggccgatataccatgggatattccagtggccacaaacaccccaagtggaaaagtgcaagaggatacccacggtcgattcctcctccttggggacccacagaccaacaactgctccctgagcatcagagatgccaggaagggggattcagggaagtactacttccaggtggagagaggaagcaggaaatggaactacatatatgacaagctctctgtgcatgtgacagccctgactcacatgcccaccttctccatcccggggaccctggagtctggccaccccaggaacctgacctgctctgtgccctgggcctgtgaacaggggacgccccccacgatcacctggatgggggcctccgtgtcctccctggaccccactatcactcgctcctcgatgctcagcctcatcccacagccccaggaccatggcaccagcctcacctgtcaggtgaccttgcctggggccggcgtgaccatgaccagggctgtccgactcaacatatcctatcctcctcagaacttgaccatgactgtcttccaaggagatggcacagcatccacaaccttgaggaatggctcggccctttcagtcctggagggccagtccctgcaccttgtctgtgctgtcgacagcaatccccctgccaggctgagctggacctgggggagcctgaccctgagcccctcacagtcctcgaaccttggggtgctggagctgcctcgagtgcatgtgaaggatgaaggggaattcacctgccgagctcagaaccctctaggctcccagcacatttccctgagcctctccctgcaaaacgagtacacaggcaaaatgaggcctatatcaggagtgacgctaggggcattcgggggagctggagccacagccctggtcttcctgtacttctgcatcatcttcgttgtagtgaggtcctgcaggaagaaatcggcaaggccagcagtgggcgtgggggatacaggcatggaggacgcaaacgctgtcaggggctcagcctctcagggacccctgattgaatccccggcagatgacagccccccacaccatgctccgccagccctggccaccccctccccagaggaaggagagatccagtatgcatccctcagcttccacaaagcgaggcctcagtacccacaggaacaggaggccatcggctatgagtactccgagatcaacatccccaagtgagaaactgcagagactcaggcctgtttgagggctcacgacccctgcagcaaagaagcccgagactgattcctttagaattaacagccctccatgctgtgcaacaggacatcagaacttattcctcttgtcaaactgaaaatgcgtgcctgatgaccaaactctccctttctccatccaatcggtccacactccccgcccccggcctctggtacccaccattctcttctctacttctctgaggtcgactattttaggttccaaatatagtgagatcgtagagtg

SEQ ID NO: 224584 - DNA, 332 bp, Homo sapiens
tagttctggaggccagaagtccaaggtcagggtgtcagcaggcaggttccatctggggctgtgggaggatctgcttcaggcctctctccttggcttgtaggtagctgtggtctccctgggtcttcacctcatcttccctgtgtaagggtctgtgcccagatttcctcattttataaggacaacaatcatatgggtgctaggggctcggatttcaacatatgaattttggggttggatacagtcagcccccaacccttgttatcaatcgttcagtgagccatgattgcaccactgcactccagcttgggcaatagaacgagattacatcacta

SEQ ID NO: 224585 - DNA, 198 bp, Homo sapiens
ataaaatgaatggaaattaaattgttatggtcacacaacgtcataatgcgttacaggcaaagctgttgaccacttagaggtagtattcattgagaaacattcttagactgtcagattgcttgatttagtgtaaagtaatttttttttttttgagacaagggtgtttcactcttgtttcccgtgctggagtgcagtggc

SEQ ID NO: 224586 - DNA, 475 bp, Homo sapiens
gagggttcttgaactagctctacataggaaactgccaacaataacttcctgtggcatttgttaagttgtgattctgcccctcactgcttgacttagtcctcttgacaagggccaggaggagaaaacaggtctcaaagaacagtgtacatcaaagcctggctttccagcaatgcctgaccctgccaaagaaggcagggaagcccccacagagcctcttagaaacctcaactccctcagcctcttgtcccagagcatcactggcaggtatagaccaagcatatccacatccacacgtacgtcttttttgcttttattcattttagtttataacaactatttatttaggacgtggttctgtgagctgttaaattgttctattgtcagatcatagctgtatacatttgtggggtgtcaaaacgatgttttaacatatacatacaatcagtgtgattaaatcaagctaattaacacatcc

SEQ ID NO: 224587 - DNA, 685 bp, Homo sapiens
aattaaatttttgtctctgagtcatttagtaattaagttagtcatggtacccccttctcttagatactttaattggcgatactctgggggtattgcaacaacaaaactgatgatcagaattagtttaacaacataaatattcttaatgaggatatcttctgaattatcataataaagtagtgtttatgtttttctgttacataaaaaaatcgaggactttctttggtaagttatacttcataccagttttagtcatttagcacattagagagtaccagtgagctatacattatgtagactatagatatgttaaaaagtacattctattcatgataaaactaataaactaggaatagaaggaaacttgctccatctgataacatctatgaaaaaacccggagctaatacatagttaatggcaaaatattggatgctttctgcctaatattaggagcaacataagggtgtcctctgctgccacttttttttaacattgtactagagtttctagccagagcaattaggcaggaaaagaagtaaaaggcatcagagtgataaggaagaagtatagctatctctatttgcagatatttatagaaacatcctaagaaatttgctaaaaatctattagagttaataaatgagttcagcaaagttgaactcattttatgtaggctcaatgtat

SEQ ID NO: 224588 - DNA, 329 bp, Homo sapiens
acatctctatagatacataaaatattttttaaaaatccaacatttagtcatgataaaaatttttgaacaaacctaggtatagttgagatccttctacctgataaagtgcatttacaaaaaaatcatctggcaacatacttaatggtatgaggaagcaagcaaggatgtctgctatcactgctactgtttaacatcatactgcaggtgctagccagtgcagtaggcacagaaatcaatgcatgcagattggaaagggtattattcctgtaatatttttactgtacacagataacatgcttatctacgtagaaaaatccaaagaaaataca

SEQ ID NO: 224589 - DNA, 452 bp, Homo sapiens
tggggtgaggagggggaggggacgcgggagagggggcctaacctacctcagggctggggaggtgcacccaccgggaccggacctctgaccctgaagcaaacttgccctcccatcccctcttcggtggaccacccagtgaggtcagctctgcaggggccacagggtggtcttaccccagccgttcgcctaatggtgtgagaactcactgtagtcacaaagcggggtctctactttcagcttgaggagcacataaagggctgctagagtgggcacctctcccctgggctgcgggagctgaccgtggggcccgatcccagagggttgcggtcctcccaccccagcctgtccttcagccctgctgccactgccttgtccatgcagggcaccagggccctccgaccctcacccaatcctggaggctgctggactaagcagctggagacactcccctt

SEQ ID NO: 224590 - DNA, 476 bp, Homo sapiens
acagagaaggtacagaataaaaggaaatgcaaatacaatttttagctaaggaagctatagttcatgtgacttcactccttaagctgaaaaccaaaccacccaccctcttagacatcagggaactatagaatttgctgctactactgctgctgctgctacaagcctgcaaggggtgtgcaaaagagagtagataagggctccaacagaacccctgccatggtctatggtccttcctgccacgtcctacaggagcccaggagctctggctatgcctgtcaacccggccatgcaggtgactgaaacaacagcctgccatgatgtaagtggtcctggctaaaaggggctggagagagggctttagagaagcatgttgggttcaaaagcctagagtgctgaacaagtcacagcaaacaaataaaaccctaaaacccaggaccaactgaagggggatctatcccccagccaccactccaaaa

SEQ ID NO: 224591 - DNA, 438 bp, Homo sapiens
tctccagctcaagtgatcctcccacctcagcctcctgattagccaccatgcttggctaatttttaaattttttgtagagacagggtcgcactatgttgcttaggctggtcttaactcctgggttcaaacagtcctcccaccttagcctcccaaagtgttgggattacaggggtgagtcaccatacctggctctcattaaaattttatgctactttttctgattttgcagtgaggctaaatattttttgcattcagtctgaagattcatctaaattacattagttttcagtagttatgcatagtatcacgatgatgttgatctccgtagcactcccctcctttgagatttgcagtataattttaagacatatataagaataattgagtgtggtaaactcaccatgtcaaatgcaataaatcattttccaatcctgttca

SEQ ID NO: 224592 - DNA, 528 bp, Homo sapiens
tgtggttctgcccctcaccttcccaaaaagaatcatttactaataattgtcctcattgggcctattcattcccccattatcttctcccctatgaagggggcatttatgtctcaaccatctggcctctctttgagttcagattttgtatgactctcatgcatacatgtgcatgtaataaatttgttatgcttttctcttgttgacctgttttttattatagggatgtaggccataacactttatgatggggaggaaagggatcaccccctttctgccctacatcagtttacaatctgtttggcagagatagaatcctcagaaagcaagatagaagcatagaagatgaagtaaccagacgccaccctgcctcctccagtgaatgcagctacaaaaactgaaaagggctgggctcaatggctcctgcctgtaatcccatcactttgggaggctgaggcacaaggattgcttgaggccaggagtttgacaccagcctgggcaacatagggagaccccacaactacaaaacaa

SEQ ID NO: 224593 - DNA, 394 bp, Homo sapiens
gtacttatctcaagttggaagcaccaggctccagtatttccttcaagctagaaccacagaaatgactcttaataagatgaggtatcttctataggagggcattgcggagctggactgagagggggaagactgcccagcaagaagcccctgtgcccataaacccagttccatgtacaaccaaatggaaagttttccttgcttcatgcagtctctcacatgctaaagagattgctttggttggaactgaagttgtagagagtttaattttgtaaatgctcagaaatcatgttataaagttaaaacattttttaaaacgtaaaggttaaccacaaatagcatagaaataaaatgtcaaattttatgagaaatataattttgtaaaaaggaattttga

SEQ ID NO: 224594 - DNA, 184 bp, Homo sapiens
gggcatgctcacagcctcgggggtctgtctggcatctgccaaactgctttaggtaaaaagccaattgtaacaactccaaaacgtctcaccaccattagaagcaaattgagaattaaaatttagaaaggccacttgaggaaagttgtattatcttatttcagtttagtgtggagtttttatatgg

SEQ ID NO: 224595 - DNA, 692 bp, Homo sapiens
actggtcataccctgtggggaatatctccttccttattctgagaagatcactcaaagaaatggttctgcctataaagttgttgactgagtacttataatcatgaaaagctggaaactacattttcaacagaaaatagttaaatatattttgatagaatattaacaatctatcaaaaaaggataaatgtgaaaattttgtagcagcacagaaacaaaatctgaaataatctcatggcaagtcaataaagcagaacccaaggttttgtattaactgattgtgaaaatatgtatgctggcttgggtaaaatccagcagggaggttggaaaaataaaaaatgttcaatctacgtggtaagaactgttgctaactttttccttttatatttcttttaaatttgcttcaacagtatatttttctgactgttcaagatctgagcaccagccagcactgtggctcaaatctgtaatcccagcactttgggagaccaaggcaagaggactgcttgaggccaggagtttgagagcctgggcaacatagtgaaatcccatctctacaaaaacatgtaaaagttagccaggtaggctgggcacagtggctcacacctgtaatcccagcactgtgggaggccaaggtgggcagataacttaaagtcaggaattcgagaccagcctggccaacatggtgaaacccc

SEQ ID NO: 224596 - DNA, 4868 bp, Homo sapiens
  misc_feature (2296)..(2296): n is a, c, g, or t
  misc_feature (2299)..(2299): n is a, c, g, or t
  misc_feature (2321)..(2321): n is a, c, g, or t
  misc_feature (2325)..(2325): n is a, c, g, or t
  misc_feature (2776)..(2776): n is a, c, g, or t
  misc_feature (2781)..(2781): n is a, c, g, or t
  misc_feature (2786)..(2786): n is a, c, g, or t
  misc_feature (2793)..(2793): n is a, c, g, or t
  misc_feature (2825)..(2825): n is a, c, g, or t
gctgccgcggggagggcgccatcttggccccgcggagcgtgactgtctcggctggaagcgtgggaggccggaggatcagtgactggctgtcgtggacatgctcgctacacctcccggggcttcgcttcgtttactattaactgtcgttactcctctgtatctcgtcagcaggggctgcctgcggtgttagaattacacgcccctgccacctgggcacggagcccagtctcccggcccctcagtcagtccttgggtgtagctggagcatttaagaaaaatgaaatataggaactcagtgcatggtttcctgggcctttttattgaatatcatttctaacatgtacacagtataacccaggcttagtggattccgggacagaaaatgttgggagctgggatagtcaagtaaacaagaagaaatggtaaagagatgccaagtgggagaggaaactacggatgcagagagaggatctgggataaagagaacaaagatgcgtggtcgactttatggaaactcgtttctttttaataagtgaggtacatggtagaagactttgacatgttgattatgtgactgggaccaaggacaacaactcgagaattgattaaaactacagttattccttggttgccccaaggatgatcctggtacaatatggctatttccttttcactggtaatccttatttactcttgaaagggtaaaaatccgtgtcttgtacatatttggagtttcacaataccttcacatagtaatctatgtgagaattattttaaacattttggagaccaaaaaggggaaagagaaagagacggaaaattactaattacactaattgtattttacccccaagaacgccattaccagcggttaacattagttccaggagtccaaacatagttttcaagataaaaccccttacactataatcattagaaaccaaaaattataataattcaccaacatccagcatactcatttaggaagggttgaagaatctgtgtaaatagagttgtttgataacagttataaaaatatccctttacccatcttcaccctccatcccgaattcaaaactagtaacagttgggataaaggtatagaaaagaatcagttttgcaagtgtagagaatggagaaagcaagaaaccgctctcatgttttcattctgaaaagatatcactaaattctctacaacccctcaattggtgttagggtatatggtcagtagaatcaagaaataacccaatcagctgagatcaccatgattctcagacttgaggaaggattgcctctcaaaaatgaagggctaaagacaggaatagagtggcacaattcttaatagttgtgtgctgtatgagttttttttaaggatgagtcaaaagatcttaagatttgtgatgtaaaagattggacacgatttaaatatgtattaaatgtctgtagtagtgttttttataattgtctggtcatctaccagtgcacaacaaaccataacaaatttcgtggcttagagcataactccagaagtgtagctcagcgttgctgcctgggtctgggatctgaaggcttgttcactctatgtctggcagttgatgttggctgttgactgggaactcagctggaacatctatatgtggcctctccatgtggctgtttggcttccccacagcctggcagctatgctccaaaagtgagcatcccaagagagacaagagtcccaagaggacaaggcagaagctgcactgacgtttttttttctctctttctttttaggttagccaagtgaagcagtgggagtggagaaggaacaaagaaatctgtaaagtagttgtgatcaattagttgtaaacaccactgcactcagactcagaccagcttgcattgatttttatgacctaatctcagaggttgtacagcgtcacttccactgtactctacttgttgaagcagctacaaaaacaccacatttaagtaaaggggacactaattgggaggagtgttagtcacattataagaagagcatgtggaatgagagattaagtagagatattattgcagtcatttaaggaaaatataatctcccataatattaatatctgttttccttttgtaaaaaaaaaatgtaccatttcaggctgagcatgttggctcatgcctgtaatcataacattttgggaggctgaggccagtggatcacctgaggtcaggaattcgagaccagcctggccaacatggcgaaacctcgtctctgttaaaaatacaaaaattagccgggtgtggtggcagtcacctntantcccagctactcggaaggctgnggcnggagaatcgcttgaacccaggggcggaggttgcagggagctggtaccaccactgcactccagcctggatgacagagtgaaactctgtctcaaaaaaacaaaacaaaacaaaaactaaaatgtaccatttcagattttttttctgaaattaaacctgaaaaggtcaaaaaacacataaattacagtccctttcaattacttaccaggtacaggtattgtttaagtctatagaagttcagactatagtagttcaaaataccttatacagggcagcttataaaaagcagaagtttatttctcatagttctgaagactgggaagtccgggttcaaggttctggcagattcagtgcctgtcgagggactgctttttggttcacagatagtgtcttctagctgtctcctcatgtggtagaagggtgccttttttattagtacccctagttttatttnttttnttttnttttttngagacaggggttttactatgttgcccaggctngcctcaaactcctgggcttgagcgatcctcccacctcagcctcccaagtagttgggactacaggcacatgttaaaacacctggttcctattagtggttattttataaaggcactaatctcatctgtggcaccagagccctcatgacctaattacctcccaaagatcccatcccctaataccatcatattggtgatgaggtttcaatacatgaatttggggggctggggacacaaacattcagaccacagtagttgttacattgatatgagctggtaagtgttaacacctggcagcaatcagatacccagccataggtgaaggcaggtgattagaattaccagccaacacatttatgtgctagctaatttttattcaaaactttctgaagctacattcaaagcagttaatgggaaatggagtaaaaaaataggcaacctctcactctagataatgctgttaaaagtaatttttcctcccagtcctctcctgtaatgaatagtataagaaggtatcctcccaacgtagaggcaccttgtgtttccaaagttttaattagttgtcatgataattttatgtgtcaacttgactgggttaagggatgcccaaataggtagtaaaacattatttctgggtgtatctgtgaaggtgtttctggataaaattaacatttgaatgggtagactgagtagagcagactgtcctcccccatgtgggtggcccttatccaaatggttgaaggctaaaatagaacaaaaaagctgagtagaggggattccctctgcctgactaccttcgaactggggcggtggctgtttcctgcctttggacttgaactgaaacatcagctcttcctgagtcttgagcctcctggcttttgaactgaaacaacagtaatggctctcctggttctcaggcatttggactttgactagaactacaccatcagttctcctgggtctccagcttgccaatctccagtttgccaactgcggatcttgggacttgtcagcctccataactccatgaaccaattttttgtaataaatctctttctatatgtctatttattctgttggttctgtttctctggagaaccctaatgccatacataatttttaaaaaaaaaaaaactctttccttctctgtttttctcttatacttttgtgagtgtagtgataggccaaatcacataagtgctaataaatacttttccaacaagtacttaaccttgtttaggtgataatcacttgtcttacctttgtgttcagaagaattcccaattccaactttcttaggtatttattgaaaagcaggaggagggttcggtggagggaagaagagatggaataggatttaggatcattgcaaagaccgaggtagttggggaacataaaggttttatgttgcctttcttcttcctccttatcattgaaggtctcctcctccctcctgctccccatcacacaccctcacatgcccccatgtggcctcttactaaacagggagagaagagaagagctggagaaatggaagtattttgtattggtaagcccaagcagcagcatgctgagaaaagaggagtttttatggcccctggctacccatctggaataaacagttctatttccaaatggctatttctatgccaatgtaaaaagacatagataatgcagattattgtgtagacattactaatattcaacaatatctcgttttcctcttcttccaggcatactgaagactatatttctcagctgcctttgcaggtgggcagggtcatgtgactattatgactaataaaatgtgagcaaaagtgacgagtcacttgtgggctgaggcagtgaaaagttgtttgtgattctcaaatctctcttctgttctgccattgcaattgtggaaggagctttatgttgaaacggaagagccaaaagattgaagtagtctatgtctcagtcaccatatgggagggcaaatgccctggagaaccacccagacacacaacaagtttgtatgaataagaaataaaactttgttgtataagt

SEQ ID NO: 224597 - DNA, 3629 bp, Homo sapiens
  misc_feature (1057)..(1057): n is a, c, g, or t
  misc_feature (1060)..(1060): n is a, c, g, or t
  misc_feature (1082)..(1082): n is a, c, g, or t
  misc_feature (1086)..(1086): n is a, c, g, or t
  misc_feature (1537)..(1537): n is a, c, g, or t
  misc_feature (1542)..(1542): n is a, c, g, or t
  misc_feature (1547)..(1547): n is a, c, g, or t
  misc_feature (1554)..(1554): n is a, c, g, or t
  misc_feature (1586)..(1586): n is a, c, g, or t
gctgccgcggggagggcgccatcttggccccgcggagcgtgactgtctcggctggaagcgtgggaggccggaggatcagtgactggctgtcgtggacatgctcgctacacctcccggggcttcgcttcgtttactattaactgtcgttactcctctgtatctcgtcagcaggggctgcctgcggtgttagaattacacgcccctgccacctgggcacggagcccagtctcccggcccctcagtcagtccttgggtgtagctggagcatttaagaaaaatgaaatataggaactcagtgcatggtttcctgggcctttttattgaatatcatttctaacatgtacacagtataacccaggcttagtggattccgggacagaaaatgttgggagctgggatagtcaagtaaacaagaagaaatggtaaagagatgccaagtgggagaggaaactacggatgcagagagaggatctgggataaagagaacaaagatgcgtggtcgactttatggaaactcgtttctttttaataagtgaggttagccaagtgaagcagtgggagtggagaaggaacaaagaaatctgtaaagtagttgtgatcaattagttgtaaacaccactgcactcagactcagaccagcttgcattgatttttatgacctaatctcagaggttgtacagcgtcacttccactgtactctacttgttgaagcagctacaaaaacaccacatttaagtaaaggggacactaattgggaggagtgttagtcacattataagaagagcatgtggaatgagagattaagtagagatattattgcagtcatttaaggaaaatataatctcccataatattaatatctgttttccttttgtaaaaaaaaaatgtaccatttcaggctgagcatgttggctcatgcctgtaatcataacattttgggaggctgaggccagtggatcacctgaggtcaggaattcgagaccagcctggccaacatggcgaaacctcgtctctgttaaaaatacaaaaattagccgggtgtggtggcagtcacctntantcccagctactcggaaggctgnggcnggagaatcgcttgaacccaggggcggaggttgcagggagctggtaccaccactgcactccagcctggatgacagagtgaaactctgtctcaaaaaaacaaaacaaaacaaaaactaaaatgtaccatttcagattttttttctgaaattaaacctgaaaaggtcaaaaaacacataaattacagtccctttcaattacttaccaggtacaggtattgtttaagtctatagaagttcagactatagtagttcaaaataccttatacagggcagcttataaaaagcagaagtttatttctcatagttctgaagactgggaagtccgggttcaaggttctggcagattcagtgcctgtcgagggactgctttttggttcacagatagtgtcttctagctgtctcctcatgtggtagaagggtgccttttttattagtacccctagttttatttnttttnttttnttttttngagacaggggttttactatgttgcccaggctngcctcaaactcctgggcttgagcgatcctcccacctcagcctcccaagtagttgggactacaggcacatgttaaaacacctggttcctattagtggttattttataaaggcactaatctcatctgtggcaccagagccctcatgacctaattacctcccaaagatcccatcccctaataccatcatattggtgatgaggtttcaatacatgaatttggggggctggggacacaaacattcagaccacagtagttgttacattgatatgagctggtaagtgttaacacctggcagcaatcagatacccagccataggtgaaggcaggtgattagaattaccagccaacacatttatgtgctagctaatttttattcaaaactttctgaagctacattcaaagcagttaatgggaaatggagtaaaaaaataggcaacctctcactctagataatgctgttaaaagtaatttttcctcccagtcctctcctgtaatgaatagtataagaaggtatcctcccaacgtagaggcaccttgtgtttccaaagttttaattagttgtcatgataattttatgtgtcaacttgactgggttaagggatgcccaaataggtagtaaaacattatttctgggtgtatctgtgaaggtgtttctggataaaattaacatttgaatgggtagactgagtagagcagactgtcctcccccatgtgggtggcccttatccaaatggttgaaggctaaaatagaacaaaaaagctgagtagaggggattccctctgcctgactaccttcgaactggggcggtggctgtttcctgcctttggacttgaactgaaacatcagctcttcctgagtcttgagcctcctggcttttgaactgaaacaacagtaatggctctcctggttctcaggcatttggactttgactagaactacaccatcagttctcctgggtctccagcttgccaatctccagtttgccaactgcggatcttgggacttgtcagcctccataactccatgaaccaattttttgtaataaatctctttctatatgtctatttattctgttggttctgtttctctggagaaccctaatgccatacataatttttaaaaaaaaaaaaactctttccttctctgtttttctcttatacttttgtgagtgtagtgataggccaaatcacataagtgctaataaatacttttccaacaagtacttaaccttgtttaggtgataatcacttgtcttacctttgtgttcagaagaattcccaattccaactttcttaggtatttattgaaaagcaggaggagggttcggtggagggaagaagagatggaataggatttaggatcattgcaaagaccgaggtagttggggaacataaaggttttatgttgcctttcttcttcctccttatcattgaaggtctcctcctccctcctgctccccatcacacaccctcacatgcccccatgtggcctcttactaaacagggagagaagagaagagctggagaaatggaagtattttgtattggtaagcccaagcagcagcatgctgagaaaagaggagtttttatggcccctggctacccatctggaataaacagttctatttccaaatggctatttctatgccaatgtaaaaagacatagataatgcagattattgtgtagacattactaatattcaacaatatctcgttttcctcttcttccaggcatactgaagactatatttctcagctgcctttgcaggtgggcagggtcatgtgactattatgactaataaaatgtgagcaaaagtgacgagtcacttgtgggctgaggcagtgaaaagttgtttgtgattctcaaatctctcttctgttctgccattgcaattgtggaaggagctttatgttgaaacggaagagccaaaagattgaagtagtctatgtctcagtcaccatatgggagggcaaatgccctggagaaccacccagacacacaacaagtttgtatgaataagaaataaaactttgttgtataagt

SEQ ID NO: 224598 - DNA, 330 bp, Homo sapiens
atcggtttatttcaaaggatgttttattttattttctcctcagacatactttatcatcccttaaagtcagtagctcaaaggaaactttaaaagctataaataggccgggcacggtggctcacgcctgtaatcccagcactttgggaggtcgaggaggcagcagtcgcagccggcctgcagagtgagatgcagtgccagagggcttcaggaggaggtggcattgtgattgatgtctgaagagtgtctccatgataatggagtcagtgcaaagtcccaaagactgggaaggagcaagaggaaaggatagctcatatccagctgccccactcc

SEQ ID NO: 224599 - DNA, 522 bp, Homo sapiens
actttgtgaacatactaaaaagccactctgtcatactctataacgtggtgaattttgtggtaaatgaattatacctcaattttaaaaagttatattcagggtaacacaacagaataaggaacatctacaacatatcattaacaatccctggatacaatcccaaataactaggcatactagtaaaccagaaaaagtgacctttactcagaagacaagcaatagctgttgagcctcagagcataccagatggtaaatgaccaaaaaaaggattttaaaactgcagttataactatgcccaaagagctaaaggggaagacaaagtttataataaataaccaaatagaaaatctcaatagaaaacaatatttaaaaaaaaacaaaaacaataacaaaaaatggaaatatgagaccaacttatataataaaaaattcactggatgtgtttagtgacggattgaggtgacagaagagtcaatgaacttgaagttcatagaatagaaaatattcaaccttaaatacacg

SEQ ID NO: 224600 - DNA, 1305 bp, Homo sapiens
gtagagagataggtgatgcaggagggaaagctggattggaaaagggagagttttgtagacgggctacgctcattgtgcctttgaaagagcagagccggcagcctctagtcatcatttggatatacaggactagagcatgaatctgatgtagagctacagaatgaagagcaacagcagctgtttaaataccaagaaagtgtgtagaatgaaattggacaagccaagcatggtggtttcatgcctttagtcctagctacttcggaggctgaggtgggggaattacttgagctcagcagtttgagttcagcctgggccagatggtgagaccctgtatcttaagaaaagaaaaaataagaccaggtgcagtatctcatgcctgtaatcccagcactttgggaggccaagttgagaggactgctcgagtgtaggacttcaagaccagactgggcaataaagtgagacccatttctaccaaaaaaaaatcaagaaattagctggacatggtggcacatgcctgtggcctcagttacatggcatggcaggctgaggcaggaagatcacttgagcccaggaggtggaggctgcagtgacccatattcatgccactgcactccagcctgggcaacagagtgagaccctctctcaaaaacagataaagtggacagaaaataggtcagtaaggactaatcatttaagggacaagcccccagaagagtggctactagagtgggaggaggaaaagcagaaggagaaagagttgaagataggcgaggctgtggtcccagtgctgaattctgccaagcagtgacttgattcatgaacactcactggatgctgactctgtttctcttctgagtgctggggtagaggagaggagaggtggagcacagttcttgcttttatgagcttatgttctaggaagttcaagtattttttcaggtagtatgaaatagcaggaagaggaagcaggctaaagggacacagagtgattgggggctattttaagtagaatgataaggaagagcctgtctagagagctatttgaacagtgacctgactgaagggacaacagaaagcagtgctgacattacaggtagcaggatgactgccaagacagaaacgcatttcatatgtgtttgaggaacaaacagcaaggtgaccagcatggggagagtgaagaatgagggaaaccttgaatgagaataaagcaattccatcttggatgctaatctgccatattctgattaatcccagttccaacaattcatctacgatttctattttatctttttaaaaaaattattt

SEQ ID NO: 224601 - DNA, 365 bp, Homo sapiens
ccactcttcagaactgtcagaaatatatatgtgtatgaataatatatatatatacatatatacacacacatatataatataaacatataaattaaatataagttacctgttctaacagatacattttctaaaatggtgaccaaaatgaaatgaaaaagtatttatatttgtatagtaataaaagagaagtaaaaattttaaattataaattgatgtttattaaatatatattattagtcaacattctatctaaactctgtagtctaaaaagagtaggtaataaaaatgatgcagctttttaaataaggccagatgatcgctgaatgtcttctaatattccactgaaggattgcttcaaaaattca

SEQ ID NO: 224602 - DNA, 412 bp, Homo sapiens
cttgcccctgaagcaacatcaaatactttcatgttattcttgggggcgttttaattcttccgatcctctgaattcgtgtttttgtacatctctttccaacctgggcctacacactaacagaaatagttttttacatcgaaggacaatgcttagtgttttattcagtctcaactcttttctttcttttttctcgttgtgtttcaaaatgtttattttttctgtcttgtgatagttttggaggaaaaatattgaaataattcaaatcaggctcttaactctgctttattaaatttatagtcatagtagcctgtgagtatgcttcgggggaggaaaaaagaatgctggggtctttattcttcaagttctctaagtttgatattttgaataaacacccagaggtgtctctgccttt

SEQ ID NO: 224603 - DNA, 533 bp, Homo sapiens
caagcaagtagaatgatcagctacaggtatgaaaaggttgtaaccagaggtagctacaagtcaggtgtgtaaaagaagaaggctttactatctgttatttcaaagtactgaaacctatagatcccaaaacaaatcatcactttcattgcttatcaggcagcctcttatgagaagctgcttctaaccctgttttctcctggtgaccttggtacgttttgccatgagtgattcctgggccagtagttcacactgagtgtctttccaggtgccttacttgagagcctcgccttccgtcttgcacagccacccacagacacattgctgctcactggcaggactggtcctgtcgctccctgtgccatccccagtccttctttaaagggaaaattaaattctctctccctcataccacagtaatagaataggtctcagaatatatctttagttagtgcatatatgtgtaggcgtgttttcttttgttaatttcagagatttttttcccattagtaatatcagtcatgttttcatgaaaa

SEQ ID NO: 224604 - DNA, 460 bp, Homo sapiens
aaaacaagaataatatggcttttgtttttggctagaaggtcagagtttcttcctttttttttttttaaatgctggcctattttatacaggctcttgaatgattattttcttttctcctaggcaatctggattaattgatacagtaaaaggtctggaagtcctaaaatgttaggtcaattcctaactccgacacaaagaagctaaacaacctgcaagagaatatgtaaaaaaaccaaccacaattttcctatctgcaaaataaaggaggggtgccactgggcaacattttaaaaaccttgtgttccttatgctaattattcaccctttggcattccagatcatgcctcttgacatcagtagcttgattgccaatgggatgatgctactggtttcacttttaaatatgggtttcaaaagtttcagttttcatagtcttcagagaaacagaatattgaatgtg

SEQ ID NO: 224605 - DNA, 413 bp, Homo sapiens
caaaacatgactagcatattttgagcattcatgtagacctgttaaatgaacacatggaataatctcaaatgcctgctaagtattttatctcaatttcatcttgttatattaaaacctgtggtcagctgtggtggctcacgcctgtaatcccagctatctgggaggccaaggcgagaggatcaagaggttaggagattgagactatcctgactaacacggtgaaaccccgtctttactaaaaatacacacacaaaaaaatttagctgggcatggtggcaggcgcctgtagtgccagctactcaggagactgaggccggagaatgacatgaacccgggaggtagaggtgcagtgagctgagctcatgccactgcactgcagcctgggcaaccatgcgagactctgcctcaaaaac

SEQ ID NO: 224606 - DNA, 364 bp, Homo sapiens
gctgtgtattacaggcgtgagggcacgcccggcctgtggatgttttgatctgtgttctgttgtgtacagtgtaagccatttgtaggctgatttctttcctagttcttcctcttagtgaaaagtaaagcagtttagatcatgttgaatgataaactgaaatttagaaatgcaaacatagaatacaatgtcagaatatcaccaggtgccattttggttgatattttataaatagggagatatttttctgtttactctccatagggattttgacactttccacccacccctttttccttttgtcaccttggtatattctgccagaaaactgacatcagaatgtcattgcttctgatcgattttattt

SEQ ID NO: 224607 - DNA, 429 bp, Homo sapiens
gtaggaggggcaagctgtttcaaatgtccttcccctacaagtggtcgtatcaagtgaacatgagagaacattgactgtaagaagttcttgcattattacaaaaaaaaaaaaaggattgattatgaagtgcaacaggtgcttaattatatgaaacaacagcacactgagatctgcatctatcaaacacatcttccatggtcagccaatcctgtgtgcacatattaactttgtttgtaaattcacacttgagaccacttaatttgaagtgtgactgagttctgtttgggaggggaaaacagaagagaagattaatacagcttcagttttacccaaatattcaatatcttcatcattttgctgtggacgtggaagaaaaaggggatgttcattaccagaacgaaccatctggtaatcaggacagggactgca

SEQ ID NO: 224608 - DNA, 338 bp, Homo sapiens
catcactttctattattgtacactaccttttttctctacactacttctcaatccttatgatttattattactgtttttgttattgttttacttgtttatgcatgcttgtttcccctgggcacatgcctggcatgttttaggcaccagtacaagtgtgttgaatagatagatggatgaatctctaatgttttccaactatagcaccctaattgagactggaaagattctgtcaagaataattcttgggtcttgatttcaccaaacagtagtattgacacagatacttataaccctctggaaacagaataggacaaaataataaaatatttttttctgct

SEQ ID NO: 224609 - DNA, 586 bp, Homo sapiens
aggctggacttacccagaccaacaggggcaatatgtcctttgttccacccaaacacccctttctccctgggcttataaagcactggaattttgcactgaattctttcgggggatggagattctgggaacctcggactttataagatgctcttcccaacgacaacattgcttacctctttatttggattctcttgtgtaaatcacccatgagcctttaaagattggtatgttattgtttccattttacacattggggaacaaattgaggccccaagaggtaaagttgatttctaaaggtcatacaattactaagtggtgagccaggatttgaacctgtatattctggctccagagcctatgagcttacctttatgctatactgcctcatagtttattatcactctgtctaccatggtagccactagccacatgtggctatttagatttaagttgattaaaatagatgggcatggtggctcacgcctataatcccacctctttgggaggctgaggcgggcggatggcttgaggtcaggagttcgagaccagcctgggcaacataatgaagccccatctctacaaaaaa

SEQ ID NO: 224610 - DNA, 121 bp, Homo sapiens
gggggtgtgtgtgttttagacggtgtgtatgtgtgttagggtgtgtgtgttagggtgagtgcatgtgtgtgagatgggtgtgtgtgttttagggagtgtgtgttttttagacagggttgag

SEQ ID NO: 224611 - DNA, 3393 bp, Homo sapiens
  misc_feature (2)..(4): n is a, c, g, or t
  misc_feature (6)..(6): n is a, c, g, or t
  misc_feature (9)..(9): n is a, c, g, or t
  misc_feature (12)..(12): n is a, c, g, or t
  misc_feature (14)..(17): n is a, c, g, or t
  misc_feature (1132)..(1134): n is a, c, g, or t
  misc_feature (1138)..(1138): n is a, c, g, or t
  misc_feature (1140)..(1142): n is a, c, g, or t
  misc_feature (1144)..(1144): n is a, c, g, or t
  misc_feature (1148)..(1149): n is a, c, g, or t
  misc_feature (1151)..(1153): n is a, c, g, or t
  misc_feature (1155)..(1157): n is a, c, g, or t
  misc_feature (1160)..(1162): n is a, c, g, or t
  misc_feature (1165)..(1165): n is a, c, g, or t
  misc_feature (1167)..(1167): n is a, c, g, or t
  misc_feature (1169)..(1169): n is a, c, g, or t
  misc_feature (1171)..(1171): n is a, c, g, or t
gnnngnttnggnannnnaactaggaatgaactttcacttttactgtttaaaagtaaaaatatctttggaagctgaggaatggctgctgggagaagtcgattttaacccaaatgtgatctttctgtcttctccatagacttcacatctccctctgggacagtaatgaggagagagtgtttggccatcgcaggtgtaggaggtggaggcagattctgcgtgggtggcttctgtcaacagacgctggactgtgcagggcagctgcagtggttctggctggttgctgtggtcagtgggagtcgtggcatgttcctgggggcagtcacatctctgaacatttcctttatgacagttagtgcagttttaaaaaaggaaaaatcttcaatgttaaccttttttctgtctcttatttctaccctttaagattatctttatgacttctaaggatattttaagctcacagtcacacttggaagcagtgcccttgtaaggctctgcctagtgtggctgtattagaaaggtcattcctggttcttacatgtgcttctcctttccacgtctcccactggcgtgctgactttccaaggggaacgtgaagctgtccgcagtccttgcccttgccctttcttttggagactgtgtgaatgagcagcagccactttaatgtgaggcagccatataaacaatgaactttcacttgctgccaggaggtcataaactcaaggtcaccaaatgaattctagcttcagctcttggtttagtaatgtaccaagtttggtattactttttgtttgttttaatcaggtttctgccctcatcttctatttgggaaattaaaactggtctgttggcatggctggtgactgagcggcaggcacattcttagtctctgactttctgcagccatctttgagtgcatataagtgttgggtaacagtctactgaatgtgctacaagtgtgcggagttgtgttcatctttaacttgttttttttaaaaaacactctcttggtaaattgggatctcctgttgaaaactgtatttgtttggcagttgagtttatgcctggagcccctagagcacatttaactggttggtggtcagttgtaccatactgaaaaaaaaaaaaaaaaaannntagnannntnatannannnannnagnnnacncntntncgtcactaagggacactcctacactcttaatcttaccatcatgaatgtttccctgcaagattcaggcacctatgcctgcagagccaggaatgtatacacaggggaagaaatcctccagaagaaagaaattacaatcagaggtgagcactgcaacaaaaaggctgttttctctcggatctccaaatttaaaagcacaaggaatgattgtaccacacaaagtaatgtaaaacattaaaggactcattaaaaagtaacagttgtctcatatcatcttgatttattgtcactgttgctaactttcaggctcggaggagatgctcctcccaaaatgagttcggagatgatagcagtaataatgagacccccgggccccagctctgggccccccattcaggccgagggggctgctccggggggccgacttggtgcacgtttggatttggaggatccctgcactgccttctctgtgtttgttgctcttgctgttttctcctgcctgataaacaacaacttgggatgatcctttccttccattttgatgccaacctctttttatttttaagtgttgaagctgcacaaactgaataatttaaacaaatgctggtttctgccaaagatggacacgaataagttaattttccagctcagaatgagtacagttgaatttgagactctgtcggacttctgcctggttttatttgggactatttcatctgctcttgatttgtaaatagcacttggatagcaagttataatgcttatttatttgaaaatgcttttttttttttacgttaagcacatttatcttgaactggagcttctaaaatgggccccaggggtgcaagatgttggtgtaattcagagatagtaaaggtttatcgcagtgtgaattataagagtccatccaaatcaacgtcccctccctcctctcatgcgatccaggtaattatgcagttagtgccacagtagactagcctagcaaagggtttgctccttgctgtctctgactgcaccacacagctattgatggcagctgaaagaaagtggatcatgccttaattttaaatattcctgtcctctggttattattttaaggaacttcatcatgttaaaatgacagcattcaaagatgtaccacaatcaatttatcaaggaaataaaggctattgtaaccagagatttaatgcattcttctaaatgtaaatttaaaatttgccctttaaaaaagtccactttccccatatgcaaatgttaataggatttttatggggattaagaagcggcaaaactacagaagcagaattcaaagtaatttaaaaaatacacaccagttttaaatcaagagaagttgtaatctcttgttttaagcttgcgtttgagggaaaatgactttttcaccaatttaatatgcattgttctgttgtttttatttatgattgatcattatatgtgacttgcataaactatttaaaaaaaaaaactataatgaccaaaatagccatggctgagaaacacagtggctgggcagttcaataggaggtgacaatatgacaacttctcaagcttgggaactcaccagactgtttcctcctttaggtaacagattctgtcccacggctaaacttgtctttcacgtgggaattgcttttgtcaaacgtgaaagagtaaacaatagcatttccccagaatgccagttttatggagccccaaatgctctgaaaacaattagtaacctggaagttgtcagcccaaaggaaagaaaaatcaattgtatcttgaaattttacctatggctctttggcctggcttctttgttcattataagttagtgtgttccttcaggaaacaatgccttaataccatagaacatgggggccttaatagttgctaacattaaaaaagcaaacagaatgattgagggatccttatgaaaacaaaatggtgaattggacatgcagaacctaccatttccttcccctgtttgcaatttttgtggggaggggaggatgttagtatttacaaaagatgattttaagaacttccaagagatgagtttaagaattccatagagtattagttgttcactgtgtaattaatccttccggagagtcttttttttttttttttaaagaaacttttgggtgggttttgttttttattagttaccctaggggtatgttaccctggggtatgaagggaggtgaagataacggaggggggag

SEQ ID NO: 224612 - DNA, 1320 bp, Homo sapiens
ttgaatcaaacttttaaaacagagatacagaaaactcttcatgaaaagatttttttgtcttcctttctttgtatgtttgatatacagataactgttaacagtattctgatttccattattcacatttctgtagtgacaaggatcaagtatctgcaggcatttctttgtcccgggaaaagcagattttttcaaggaaatgatgtgttgatatataatagaacatacataaatacttttgctagctgtgcagttagttagaaagtgttgatgttttgacattgggtggctgttggtcactgcagatggaattgctgaaagaaatttacataacctgttaagagaccaatcattgttgcactagattaggtactcaagttagtttacagaattttgattatttttggttggcttggtatgagattggctttcgattatatgcttcaattgggtctaatgactcttccctgtcattgtaaatggaatcagtggagataggtcaatgacaaggttgattatagaccagggcttacagaagctaatcatctgcagtcttcatttacatacatgcttctgctgttggcttccagccaaggctggtgtagtatagtacatgaattttggagtcattattgatcatatatttccaacaagtgtgatgaggtggagttggcttaagttgaaatgtttagtggaaaacattggttcgttaaaagtagcagtggatctacagctcttttttgagaatgaattgctattatgtttgctgtctacactgaggtgtggcatgaagcctttctctcgtctcctttataccttggtggatctgtgtttccggacacttttccttttgaaagttgagatcccgttcagaggctgacagacttgtccctagaagaaagggggcataaatatgccaaatgcaaaaccacaatgatttctttgattacagggaccttggggccagcttgcggtaagaacttgcctttagaagatcctttggttcccatcagtgtctccctctcctcaaagggatggcagcccagtggacagtgggcacatgaccctgacaatttccgggaaacgaggactcccaacgggaggtaagactgcgtcttgatccagacggtccggcccaagacagactgttgcaaccattccctcatcatgcgccctgaaatcccttgcccttccaatccacagcccttatagattggcaccatttgtacggatcggacggtaaccttgggactggcataggtttgtttgttcgtcattggcctatacgcaaggccccaaaatgggggtaacggggggaatcaa

SEQ ID NO: 224613 - DNA, 4073 bp, Homo sapiens
  misc_feature (1812)..(1814): n is a, c, g, or t
  misc_feature (1818)..(1818): n is a, c, g, or t
  misc_feature (1820)..(1822): n is a, c, g, or t
  misc_feature (1824)..(1824): n is a, c, g, or t
  misc_feature (1828)..(1829): n is a, c, g, or t
  misc_feature (1831)..(1833): n is a, c, g, or t
  misc_feature (1835)..(1837): n is a, c, g, or t
  misc_feature (1840)..(1842): n is a, c, g, or t
  misc_feature (1845)..(1845): n is a, c, g, or t
  misc_feature (1847)..(1847): n is a, c, g, or t
  misc_feature (1849)..(1849): n is a, c, g, or t
  misc_feature (1851)..(1851): n is a, c, g, or t
ttgaatcaaacttttaaaacagagatacagaaaactcttcatgaaaagatttttttgtcttcctttctttgtatgtttgatatacagataactgttaacagtattctgatttccattattcacatttctgtagtgacaaggatcaagtatctgcaggcatttctttgtcccgggaaaagcagattttttcaaggaaatgatgtgttgatatataatagaacatacataaatacttttgctagctgtgcagttagttagaaagtgttgatgttttgacattgggtggctgttggtcactgcagatggaattgctgaaagaaatttacataacctgttaagagaccaatcattgttgcactagattaggtactcaagttagtttacagaattttgattatttttggttggcttggtatgagattggctttcgattatatgcttcaattgggtctaatgactcttccctgtcattgtaaatggaatcagtggagataggtcaatgacaaggttgattatagaccagggcttacagaagctaatcatctgcagtcttcatttacatacatgcttctgctgttggcttccagccaaggctggtgtagtatagtacatgaattttggagtcattattgatcatatatttccaacaagtgtgatgaggtggagttggcttaagttgaaatgtttagtggaaaacattggttcgttaaaagtagcagtggatctacagctcttttttgagaatgaattgctattatgtttgctgtctacactgaggtgtggcatgaagcctttctctcgtctcctttataccttggtggatctgtgtttccggacacttttccttttgaaagttgagatcccgttcagaggctgacagacttgtccctagaagaaagggtggcttctgtcaacagacgctggactgtgcagggcagctgcagtggttctggctggttgctgtggtcagtgggagtcgtggcatgttcctgggggcagtcacatctctgaacatttcctttatgacagttagtgcagttttaaaaaaggaaaaatcttcaatgttaaccttttttctgtctcttatttctaccctttaagattatctttatgacttctaaggatattttaagctcacagtcacacttggaagcagtgcccttgtaaggctctgcctagtgtggctgtattagaaaggtcattcctggttcttacatgtgcttctcctttccacgtctcccactggcgtgctgactttccaaggggaacgtgaagctgtccgcagtccttgcccttgccctttcttttggagactgtgtgaatgagcagcagccactttaatgtgaggcagccatataaacaatgaactttcacttgctgccaggaggtcataaactcaaggtcaccaaatgaattctagcttcagctcttggtttagtaatgtaccaagtttggtattactttttgtttgttttaatcaggtttctgccctcatcttctatttgggaaattaaaactggtctgttggcatggctggtgactgagcggcaggcacattcttagtctctgactttctgcagccatctttgagtgcatataagtgttgggtaacagtctactgaatgtgctacaagtgtgcggagttgtgttcatctttaacttgttttttttaaaaaacactctcttggtaaattgggatctcctgttgaaaactgtatttgtttggcagttgagtttatgcctggagcccctagagcacatttaactggttggtggtcagttgtaccatactgaaaaaaaaaaaaaaaaaannntagnannntnatannannnannnagnnnacncntntncgtcactaagggacactcctacactcttaatcttaccatcatgaatgtttccctgcaagattcaggcacctatgcctgcagagccaggaatgtatacacaggggaagaaatcctccagaagaaagaaattacaatcagaggtgagcactgcaacaaaaaggctgttttctctcggatctccaaatttaaaagcacaaggaatgattgtaccacacaaagtaatgtaaaacattaaaggactcattaaaaagtaacagttgtctcatatcatcttgatttattgtcactgttgctaactttcaggctcggaggagatgctcctcccaaaatgagttcggagatgatagcagtaataatgagacccccgggccccagctctgggccccccattcaggccgagggggctgctccggggggccgacttggtgcacgtttggatttggaggatccctgcactgccttctctgtgtttgttgctcttgctgttttctcctgcctgataaacaacaacttgggatgatcctttccttccattttgatgccaacctctttttatttttaagtgttgaagctgcacaaactgaataatttaaacaaatgctggtttctgccaaagatggacacgaataagttaattttccagctcagaatgagtacagttgaatttgagactctgtcggacttctgcctggttttatttgggactatttcatctgctcttgatttgtaaatagcacttggatagcaagttataatgcttatttatttgaaaatgcttttttttttttacgttaagcacatttatcttgaactggagcttctaaaatgggccccaggggtgcaagatgttggtgtaattcagagatagtaaaggtttatcgcagtgtgaattataagagtccatccaaatcaacgtcccctccctcctctcatgcgatccaggtaattatgcagttagtgccacagtagactagcctagcaaagggtttgctccttgctgtctctgactgcaccacacagctattgatggcagctgaaagaaagtggatcatgccttaattttaaatattcctgtcctctggttattattttaaggaacttcatcatgttaaaatgacagcattcaaagatgtaccacaatcaatttatcaaggaaataaaggctattgtaaccagagatttaatgcattcttctaaatgtaaatttaaaatttgccctttaaaaaagtccactttccccatatgcaaatgttaataggatttttatggggattaagaagcggcaaaactacagaagcagaattcaaagtaatttaaaaaatacacaccagttttaaatcaagagaagttgtaatctcttgttttaagcttgcgtttgagggaaaatgactttttcaccaatttaatatgcattgttctgttgtttttatttatgattgatcattatatgtgacttgcataaactatttaaaaaaaaaaactataatgaccaaaatagccatggctgagaaacacagtggctgggcagttcaataggaggtgacaatatgacaacttctcaagcttgggaactcaccagactgtttcctcctttaggtaacagattctgtcccacggctaaacttgtctttcacgtgggaattgcttttgtcaaacgtgaaagagtaaacaatagcatttccccagaatgccagttttatggagccccaaatgctctgaaaacaattagtaacctggaagttgtcagcccaaaggaaagaaaaatcaattgtatcttgaaattttacctatggctctttggcctggcttctttgttcattataagttagtgtgttccttcaggaaacaatgccttaataccatagaacatgggggccttaatagttgctaacattaaaaaagcaaacagaatgattgagggatccttatgaaaacaaaatggtgaattggacatgcagaacctaccatttccttcccctgtttgcaatttttgtggggaggggaggatgttagtatttacaaaagatgattttaagaacttccaagagatgagtttaagaattccatagagtattagttgttcactgtgtaattaatccttccggagagtcttttttttttttttttaaagaaacttttgggtgggttttgttttttattagttaccctaggggtatgttaccctggggtatgaagggaggtgaagataacggaggggggag

SEQ ID NO: 224614 - DNA, 2973 bp, Homo sapiens
  misc_feature (124)..(124): n is a, c, g, or t
  misc_feature (318)..(318): n is a, c, g, or t
  misc_feature (712)..(714): n is a, c, g, or t
  misc_feature (718)..(718): n is a, c, g, or t
  misc_feature (720)..(722): n is a, c, g, or t
  misc_feature (724)..(724): n is a, c, g, or t
  misc_feature (728)..(729): n is a, c, g, or t
  misc_feature (731)..(733): n is a, c, g, or t
  misc_feature (735)..(737): n is a, c, g, or t
  misc_feature (740)..(742): n is a, c, g, or t
  misc_feature (745)..(745): n is a, c, g, or t
  misc_feature (747)..(747): n is a, c, g, or t
  misc_feature (749)..(749): n is a, c, g, or t
  misc_feature (751)..(751): n is a, c, g, or t
ttttctttggaagactgtgtgaatgagcagcagccactttaatgtaggggggggggggccgacaaaaaaaagagggtcccccccccccaaaaaaattttttaaaaaattttttaaaaaaaaaangggacccccccccaaaaaattttggggaaaaaaaaacccttttttttttttcccccaacccctttttttgggggcccttcgggggccccacccaaaaggggggaaaagggggttttccaatttaaaaaaaaccctttcccaaaaaaagggggttctcctaccccccccaaaaaaaaaaatttgaaaattctctnagcttcagctcttggtttagtaatgtaccaagtttggtattactttttgtttgttttaatcaggtttctgccctcatcttctatttgggaaattaaaactggtctgttggcatggctggtgactgagcggcaggcacattcttagtctctgactttctgcagccatctttgagtgcatataagtgttgggtaacagtctactgaatgtgctacaagtgtgcggagttgtgttcatctttaacttgttttttttaaaaaacactctcttggtaaattgggatctcctgttgaaaactgtatttgtttggcagttgagtttatgcctggagcccctagagcacatttaactggttggtggtcagttgtaccatactgaaaaaaaaaaaaaaaaaannntagnannntnatannannnannnagnnnacncntntncgtcactaagggacactcctacactcttaatcttaccatcatgaatgtttccctgcaagattcaggcacctatgcctgcagagccaggaatgtatacacaggggaagaaatcctccagaagaaagaaattacaatcagaggtgagcactgcaacaaaaaggctgttttctctcggatctccaaatttaaaagcacaaggaatgattgtaccacacaaagtaatgtaaaacattaaaggactcattaaaaagtaacagttgtctcatatcatcttgatttattgtcactgttgctaactttcaggctcggaggagatgctcctcccaaaatgagttcggagatgatagcagtaataatgagacccccgggccccagctctgggccccccattcaggccgagggggctgctccggggggccgacttggtgcacgtttggatttggaggatccctgcactgccttctctgtgtttgttgctcttgctgttttctcctgcctgataaacaacaacttgggatgatcctttccttccattttgatgccaacctctttttatttttaagtgttgaagctgcacaaactgaataatttaaacaaatgctggtttctgccaaagatggacacgaataagttaattttccagctcagaatgagtacagttgaatttgagactctgtcggacttctgcctggttttatttgggactatttcatctgctcttgatttgtaaatagcacttggatagcaagttataatgcttatttatttgaaaatgcttttttttttttacgttaagcacatttatcttgaactggagcttctaaaatgggccccaggggtgcaagatgttggtgtaattcagagatagtaaaggtttatcgcagtgtgaattataagagtccatccaaatcaacgtcccctccctcctctcatgcgatccaggtaattatgcagttagtgccacagtagactagcctagcaaagggtttgctccttgctgtctctgactgcaccacacagctattgatggcagctgaaagaaagtggatcatgccttaattttaaatattcctgtcctctggttattattttaaggaacttcatcatgttaaaatgacagcattcaaagatgtaccacaatcaatttatcaaggaaataaaggctattgtaaccagagatttaatgcattcttctaaatgtaaatttaaaatttgccctttaaaaaagtccactttccccatatgcaaatgttaataggatttttatggggattaagaagcggcaaaactacagaagcagaattcaaagtaatttaaaaaatacacaccagttttaaatcaagagaagttgtaatctcttgttttaagcttgcgtttgagggaaaatgactttttcaccaatttaatatgcattgttctgttgtttttatttatgattgatcattatatgtgacttgcataaactatttaaaaaaaaaaactataatgaccaaaatagccatggctgagaaacacagtggctgggcagttcaataggaggtgacaatatgacaacttctcaagcttgggaactcaccagactgtttcctcctttaggtaacagattctgtcccacggctaaacttgtctttcacgtgggaattgcttttgtcaaacgtgaaagagtaaacaatagcatttccccagaatgccagttttatggagccccaaatgctctgaaaacaattagtaacctggaagttgtcagcccaaaggaaagaaaaatcaattgtatcttgaaattttacctatggctctttggcctggcttctttgttcattataagttagtgtgttccttcaggaaacaatgccttaataccatagaacatgggggccttaatagttgctaacattaaaaaagcaaacagaatgattgagggatccttatgaaaacaaaatggtgaattggacatgcagaacctaccatttccttcccctgtttgcaatttttgtggggaggggaggatgttagtatttacaaaagatgattttaagaacttccaagagatgagtttaagaattccatagagtattagttgttcactgtgtaattaatccttccggagagtcttttttttttttttttaaagaaacttttgggtgggttttgttttttattagttaccctaggggtatgttaccctggggtatgaagggaggtgaagataacggaggggggag

SEQ ID NO: 224615 - DNA, 407 bp, Homo sapiens
acttaattgaaccctcataaaaattaatgtgtagtgctttctaggtatggaataaacttctattatttttaaaaactgctttggaatacccacacatatttctcttaaaatagtgaagatggtcaaatttgactgtaattttaccaaggaatttattatattaaagccacctggtcataatctcagaaatctgatacagttattaaaaaatttgagtacatgaaaattaggaaccagagaagtttttattcaaagacttctaacacagaatggcaaaaacataaatggagatgggcactatacattagaaacagagtaatgtaggtggcatttatccatgcaatcagtggatcttatcggtatcaactaaattctaggtgatctgctatagccggggatataatgat

SEQ ID NO: 224616 - DNA, 480 bp, Homo sapiens
agatagcagtaattagtgaacctaatgattgtgcttctctttgtagttctaccagtttagctacctttgttagcacacaccttgtacccacctgacaagaggaagatggggaatggggaattggaaaggaagagggagcaacctcactgaatatggtatgccaagcagtgaacatatgtcgcgtcatcacactctgacaataacccacaaaggagaccaatatcccattataacagaagcagaaaagaaacaacccttatgttactttaccaataggaaccttctctagatttgaccccaaatgatattattccaaagcctatgcttttgaaaacttaagaaatgtacagatttattttgagaaaaacaaccttccataattcttgagcatactccatgaatctcctagattctgtggagccaagttggtaaaataccacattagaagtgaagtgctaccagttggaggagcaaaatagc

SEQ ID NO: 224617 - DNA, 365 bp, Homo sapiens
gcagtgagccgagatagcgccactgcactccagccttgggggcagaggcagactccgtctcaaaaaaaagaaaaacaaacaaacaaaaaaaagaaatggtaccaattatggaagtctgcagatgtaactattttttgcttataaacacaggtgtttttggtgtttttaacatctcaaaatgttgaagacagttcaatgtgtactttatcacgcagtactataacattatatgactgtatagtaggctaggtgcttacagaactatgtcctatggtaattgctcaaatgttcatttaattgaatcaaattatttcagattgtgtttctccagttacaaataagtgtctgcagaagttccaatgatt

SEQ ID NO: 224618 - DNA, 531 bp, Homo sapiens
caggcgaggtgctatggctaagggattaatcttttgtgtcccaactatgttgctctgacggttccacttgcactactggtttttacttcatcgttaatctctgctctggccgataacagcctgcatgaaaacatcaccagttttcaagtttttctcaggatgaacagtacatagaaaagtgagcctgaatgctgagatcctgagaccgtgctgcggcgcctgggaattcatagagcagcttttaaggggccaccacttctcgcatcgtgtgccatgcaagtaaacctaccctatcctgagacccttgcctggggtgactggaagagctgcttctgtagaatcctgggccagaccatctatctggacgaataggagaaaagcctagttgttgtctcctgcaagatgtattcagttgtaatttcgcctttgttccttaatctgttagtatggtatattacatcgattaatatttcatattaaatcagtcatgaattcccattatgagccccacttgctcatgattgaagatat

SEQ ID NO: 224619 - DNA, 275 bp, Homo sapiens
agagatgaaaagaaatacctcctgcctcagccatgaagccttcactgtagaaacaacacatgtgctgactgtcccctggaacggcctctctcttcaggccaacacagtccactttggttctgccaacctgctgaccaaccccaacagatggaaggaaggaagagaaagccgaggtgcagatgacatggcttatgcaatatttttattgtgccagtattcaaatgtattacattgatttgttctgactgacaataatgtggatgctttgatatcag

SEQ ID NO: 224620 - DNA, 415 bp, Homo sapiens
tgccttaacatccaggatttaatttatcttgctttattcatttaaaatgttatgtaaggaccttgccaatgtttaagtagatcaactattgtcatcagttgggctagtttctatttgtgttattcctatcatgcgttcctttataattctctacaaaagaccattcttttaaaaatagacatataagattatttttagcaacagtaggaatgacaaatgagtttcacctattgtgcaaacttcaatcaattgatagtagttgccaagtgcacagtattgaggagaattctgaggcttcttcaaagcttactagaaaagatagccatgattttttaatgacacctattacaattggatgtgtgtatgtgtgtgtgtgtgtgtgtgtgtgtaagatagaagttatgtactttccatt

SEQ ID NO: 224621 - DNA, 520 bp, Homo sapiens
ctgtctagtttgtgttcaaattattattattattaaagacagggtctccctatgttgcccaggatggtctcaaactcctgggctcaagggatcgccctgcctcagcctccagagtagctggtattacaggtgtgaaccactgagctcagcataaaatggttattttttaagtatatatagccaggcataattaaattaaatatagtttaaaagtgagtttaatgttatttttttcctcctcttcctgggatcataaaatgattaatgttaaaattagtgttctgctactgactggaacatacatgtttattatttccctctaatgtgaacacttgctggtagtatagaatatagtcatcttcaattccgacagttgacataaggcaattttataagtgattaatcacatactattgtgcatgtaggagggttttggcttagagttattttggtgtactttttggatgttacgatttttattttataagtaaactcatgtttgttacctgtaatgttttac

SEQ ID NO: 224622 - DNA, 107 bp, Homo sapiens
acattgagattaacatctctctctccacctgtcactaaccagaaatactattgccttggttaagttttgggagggagggaaaactttcctatgtgtcttataaggga

SEQ ID NO: 224623 - DNA, 280 bp, Homo sapiens
ttagtcattctatttcagtaaatattgaatttataagagacttaaaaggcccattggccttattgagtttcatttatcaaatgtcatattctcaacatgttgcacctgtaatttatctgttgggggagcataatttatgaagtattctgctttataagtaaatgactcttaaccaattgatgtcagtaaaagatgtatttgcatgacttcctccctgatagggttcacttttaagtaatgtagttcaattattgttgaaataaaaaagtttcttcctttt

SEQ ID NO: 224624 - DNA, 557 bp, Homo sapiens
acattgaattttttcagaaaacacctcatactcttgcttgggaacataacccttgcttccaggaggctgaggatctcaccattctgtgtatggatttggggctttcagctacaagttgaaaaccaattctccattgtgtccgttgctctctttatttcaagtactgagggaaaaaattttttgccttctctctgggagaggactacagttgcatgcctattctctaggtattgactttcaaccagtactctgttcctcttttaccccagcattttgttgtgctttttaagatatcctggactcttagtctgacttactacctctataaatgaaaattgcttgaattttcagagcctctttacccttatctgtagaatgtccaccttaggaattgaaagaattatttatgtaaaaatattttatggctggatgtggtggttcacacctataatccaagcactttgggaggctgaggcaggcagatcacttgaggtcaggagtttgagaccagcctggccaacatggcaaagcccgactctaccaaaaatacagaagtt

SEQ ID NO: 224625 - DNA, 322 bp, Homo sapiens
ttgggacacagttggctggtacaagaaaggtttttgttttgtttaagtctaggaataaaagtactatataacaataatcccctggtagatcaagctaggactttgaaaaggcacatggtggaattcaacatcaatttttcataaaaattatctttcaacaaatgaaaggtcattctttgataatagaagtgtgatagtacatgaggctgacccaagaaggtatcaattttaagatgcagcagatttttaaaaagatcatcttgctttgaaagaatgagaaaagaaaagcttttctaaacttctaagagttagagaaaacata

SEQ ID NO: 224626 - DNA, 722 bp, Homo sapiens
cctttccttcggagtgtgtagctcagtggtgtttaaaaaaaattacccaagattatttgcatatagaattcttatacctttcataagcttggaagcagcatgcataagcctggtaaatgcttatcaacctgtagcacatttagttatccatctgtaagctattgaacaaaggctggagtctcaatctgtatgcatcagtttatatttcctgaccaaaatctgattgcaatggtatttgaatactttcttcgtaattgggaccgtgaaagttggagtgtgtgctatgggtgttgtatccgttagacattttcttttctagctgaaatcatagctttgcatttgacacctagctttattgttgcagttgagacgcaagtttgaaataagtctaacattttattcttaagttgatttttttgttgttctgaatttttgtctgtagcttggtttcgcagagtcatcaattcctttttatctgtaattacacatttgtttttatttcaaagtaattataaggtgttatattgcatataatcagaaaactaaatggaaataatgcttttcagtaagcccggcccctttgaccgatacagaaaacttgaattaaactttgactacgtaggtattaattggcttcattacaattattgctgtaaaaatgaacagtgactagctctggaaagatttaagcgtcagtaattgttggtctcctgccttaaagt

SEQ ID NO: 224627 - DNA, 543 bp, Homo sapiens
gcgtcctggagtcgtctcggttcgcccttttgcgtgccttccaccgccgcgagctcggaatgtctggccccgggtgcttcagggtccgagaacctgcagaagttcacacttaaatcctacacgagagtcgtatttatgatgcagaactcggtgcagaacccgatggagtgcccaaggcgcttgagccgttcctagaaggggaaggagagccgcgggcggcagcggggcaggggacggaattgggaagcttgggagcaggaagaaggccagagctacttagggtacattccacttttgcttggcgccgggtaggaaccctgctagaaaggaagtaacgtgtgtttgtctcgtttgctgttgttttacaaacagggaaaatgaggttgaaaagggtgaatgaattccttaaggtcaagaaaaaggatcggtattcaaacctgcctatctggaagataagcttagactgccctacaggaggcactgtggcttatccccttggggctttaaagatgtgaggaccttagagatccattagtctaacct

SEQ ID NO: 224628 - DNA, 756 bp, Homo sapiens
gcatcttattgccccttttttctcttacccgggaagaaattattcttctggcgcatgccatcctctctgtgaataattttctttcttttctttcatctatttatttaaaatagtgattggggtctcactatattgcccaggctggtctcgaacttctgggctcaagccatcctcccaccttgacctcacaaagtgctaggattacagacgtgagccaccgtgctcaccctctgaataaattcactgggagttactatcctagtgataatgattggagttttcaaggtagattagatatacaagagaagaggatggaagaagagaagaggatagaagaggagtaaagaatgggatagtactgagaaactagttcagaaaaaaatggtaaactctcacagaaatacaagtgggtgagtttgcaatagcaacaggggtaacaagttgaggaaaataactgagaaaaaaccttagtgattatcttaggagacttttgagttgatgtttttagggaataaagtagggctgaaacagtatttcaagggcttttggaaatatgtggaggtagtggcaccttttaaccttgacagtaaaaggaactagatagaatataggcagtggaaaagataagtgaatggatgaggaagtctgttggaagaagccactggaagcaacttgaactgtacttggaagagatcattaaaggattatgggccaagaagaaatatgtgggaataaaactaattgacaagtacagtt

SEQ ID NO: 224629 - DNA, 772 bp, Homo sapiens
ggcctcaggaaacttacagtcacggtggaaggcaagacagaagcaggcaccttttttcacaaggtggcaggagagagaagtgagtgcacagaaaaaaaaacctcctacttttaaaaccatcagatctcctaagaattcactcactatcatgaggatagcatgaagtaaacttcttcgacacatggcgattacaggtccctctgtcgatgtgtggggataataatttgagatgaggtttgggtggggacacagagccaaaccatattattctgctcctggcacctcccaaatctcatgtcttttatatatatttcaaaaccaatcatgctttcccaacagtcccccaaagtcttaactgattccagcataactcaaaactccaagtccaaagtcttatttgagacaagtcccttctgcctatcagcctataaaattaaaaaaaaagttagttacatccacaatggggacctcatgaccctgaccagtgccctattctactgtggctcaactgatatccaagatgcaagacaaagtcctttttactctttcctctaatctcctctagcagaaggaagcggtcttttttggagctgcaagctgtgctgcctggggttgggggagtggtaatgcaagtactcctttagctgtcctggctggtgtctcagtaggttttatggccactcacctcagtacactgactctgagtacagtactattgtgtctgcagtagtgtatgacatggaaaataaatctccattctccaagactcttc

SEQ ID NO: 224630 - DNA, 241 bp, Homo sapiens
tagctgggactacaggggtacaccaccatgctcagctgccttttcttggttttagttttttgtagagacaaggtcttgctgtgttgcccaggctggtctcatttgaaactgccaggctcaagcaatcctcctgcctcggcctcacaaagtgctgggaccacaggcatgagctaccgtgttcttttcttttttcattcttatgggcactgagtaatatagtctgatgttcaggaaaggatat

SEQ ID NO: 224631 - DNA, 225 bp, Homo sapiens
ttggttcaacccagtcaacatttaatgagcatctaatatctgccaggcactagggattcaacagcaggaaagttttcaagaagcttgtgatctagaacagatgtcctgagctcctgtgaaattgaaattgggggttatttgtatataggggtgagtggcagagaagggtgggagaaatggcttttttgtcaacttcacaaaggaggcttttgacactcccccgcc

SEQ ID NO: 224632 - DNA, 617 bp, Homo sapiens
ccttgccagattcagttccagccattccagccaggcgcaaggctggcaggaagggagcggggccccagcgccttcccgcgcaggcctccaggaaatgaacttttcagagcagaactgggctcaggccagaggtcatcaggggagatgggagaagacaagggcctgggggcttttggctccgtagacttagccgctctcatcgttccccccttcctcgatcatctcccatctcacagccgagcgcccgggcacccaaccgaggggctagaatcgggacaaagcagcaggcaaggcctggaaaggccagccgcggggagaggaggccaggggaggggctctgctgccggcgcgcggcctttccccggggcctctactctccaggggtcccctcgagctgggggccctcgctggaaatagaaagcaaagcgtggagacgaagggatgggtgtgtgtatctatatatctgcagctccccacaaacgcgcgcaccccggggagccagcacagaaagccggcctgggtgtcgagggtgccggtgcccggggtcagatccagggtgccggtgcccggggtcagatccggggcgccctccgcggaggggcgcgcaccgcggccgc

SEQ ID NO: 224633 - DNA, 462 bp, Homo sapiens
cccattttaatgaattgtaatctccaagagtttaaatttctcactaggccaaatgaaaacatcccttcttacaaagaaatagaatagaaggaaaactaacctacattatcggattcatttaattctctctcccccttaaataaaacccatgtttcattttagcaattttagcaattttcaagatacatatctgccaagctaatgccatatttccaggtatcatgatcaaactccttatttttaactggaaaatggactgaaaatgccccagcatggttatcactagttttcctgtccagctaagctagcctgtgggtaagaaccaggaccaggagctgaattcttataccagccttaacaatagagaagaaaaaatctgggggaatgctctgagcaattcatcatcaccaaaaaaacctctcatataactgaccccttgtcatcaggtcaacttacacattt

SEQ ID NO: 224634 - DNA, 428 bp, Homo sapiens
gttaagtagtttttagggtcacaagttcataagggatagcaccaggttcaaacccatgcattctgaccctaattatttaactcttttatagtgcttatagcttaacacactatattacactgcctctataagtgtctctagaaaaagaaggtaaaggaaggaaacttgggagtggccaaaaagtgatgcaagtctttttctacatataaaataatgtttaggcttcattgcaagtatatacttgaactttacaataaggtttccttctctcggcatccttatgaagaaagtaaattgtgtggtttaatttaaatatacaatattcatctcttgaacagccatcagttatgagtgggtctgtttgaatgaaggagtccagtagagaaggtggtggttgagtctccagcagcagcagacaggataatgtt

SEQ ID NO: 224635 - DNA, 275 bp, Homo sapiens
caaactgtatgatgaggattattttctccagaatgcttagaacagcctagtctgaggttgctcactgtagggcacaactacttgtttcgggtgagcaagataacaaacggatcaattcagctagagaaacacagtataatgcaggagaaaacatttacctctcacttctttgaaattattaaatgtgcatgcaccagttccagctgagaaaatcagaactggacaatgccagaataaaagtttaaagtttctgtcatccaaactgatcactgcag

SEQ ID NO: 224636 - DNA, 442 bp, Homo sapiens
caggccaggggttgaagtaggctcatcagtcaaatacccactgacatccccatcccttaattgcagatacattcaagccctctgggaggcagacacaaaccatctgcactccagcagaaacgcacgagcagaaataggtacctgttagttgctaaagccaggccagtgagacatagagctgagacaggcaatgggagccctggattaggggaagagaagaggagagaggtccataccgctgcacagtgaggacaagctgatttcctgaggcatcgatgaggctcatggcactggcatgggagaggttggtgcaagagaccccattgattgccaagagctggtccctctctcggagtcctgctctgccagcctggctccgtcttcgaatctgagatgttgaaggagacactgtaggtaagagggggctccaaagggaatagaa

SEQ ID NO: 224637 - DNA, 331 bp, Homo sapiens
ttatcagcacagggaacattctgtaagatagaccatatgatagaccacaaaacaagtttcaataaatttttaaaaattggaattacatcaagtactctctcagaccacagtggaataaaactataaactgatttctaaaggaaccctcaaaactacacaaatacatggaaattaaataacctattccttaatgatcatcaaaaagtctgaaagagcacatatagacaatctaaggtcacttctcatggaactagagaaacaagaacaaaccaaacccaaacccagcagaagaaataacaaaggtaagagcagaactaaatgaaattgaaac

SEQ ID NO: 224638 - DNA, 367 bp, Homo sapiens
gggttttctgctcaggatgtctaaaggctgaaatcagggtgtcacctggactgagttctcatctggaggccgtggggaaaaattcactttcaagctcactcttcttggcagaattcagttccttgtggctgcaggactgaggtccctgcttcctagctggctttcagctggtgctgctctttgctgctggagcctgccatgttcctcacactgcattccatcttcaagccagtaatggtgcgtcacatttttcttgggcttctatctctgacttccgttctgtgaccagctggagacaacacttgtttttttaatctgtaaagtgagactatttgattaggtcaggtttggtatttttttccgcaaa

SEQ ID NO: 224639 - DNA, 451 bp, Homo sapiens
ccttttaaaatattttattttattttatttaaagttccagggtacctgtgcaggatgtgcaggtttgttacataggtaaacatgtgccatggtggtttgctgcacttatcaacccatcacctaggtattaagtccagcatgcattagctattttttgaataggatacaacttttatctgaaaagcgtatttcaaactttggaaactaaagcaaacattatatatgaccattaaaatatacatatacatatcatgataggtaaacattatatatgacaattctatgctatacataaatacataaagtctatgtgtataataaataccccatttgtcatagaaagacatactgtgtggtttagctacgattggaaaggtacagttctctaaatcaccatatgcacgttcttttagcaagttagggcctatttctatatagtaatgtgatgatt

SEQ ID NO: 224640 - DNA, 436 bp, Homo sapiens
cattattttgtctatgacaagacccaagactgattcctggagagttcctagaaggctgaacagagaagcatccagcaaaggagaaggaggggccagtgagagaggaggaaaaccaggagtacatggtgccacagaagccaaagatagccagttttaagaaccagggagtgatctgctgctgatggccagtgctgctggacggtcaagcaaaagctgacaaaggagcttggatttggccataaggagatcttgagtgacttggcacaagtggtctcatttgagtggtctaaatggaggctgagaagtggctcaaggctctctcctcacaaagtggttaccagctgcgccaagtttacatgcatggatggtcttcagtgcctgggattgtaaaaaggacataaagcttcttgccgtgtgtgtatttcagttccctaaa

SEQ ID NO: 224641 - DNA, 438 bp, Homo sapiens
taaatggtgcttaaatagcccattctttgcaagtcatccatgttgttcctttggcatttaactttgctcaaattgttgaagaatggtggcttgttgcatggtttttgtatttgtgtctagtgcacattttaacatggtagatgagatgcattgtgtagctagttttctggaaaagtcaatcttttaggaattatttttcaaatcttcaataaattttttctttaaattttaaataaataaatgagtcaaaagtcattgaggaaccaatatgacatgtgaaaggataacataagattagaaaaattcagaaatgactcacgcctataatcccagcactttggaaggccaaggcaggcgggtcacctgaggtcaggagttcgagaccagccttgccaacatggtgaaaccccgtctctactaaaaatacaaaaatttgct

SEQ ID NO: 224642 - DNA, 267 bp, Homo sapiens
ttgggaatctgtggtgtcaccaaaggggaagggaagggagattccacaacatttgaagatagtggtgaggaaagaaaaagttgtttctggattatacactagagtccagcccattcactaaaccaattcccccagttgtaactcggacggagatagagctggacgggtgtgaaactgctctttgtcagaaaggcagaaagacagacatggaggaagggaggtgaatattcaggaaagagcaggcaggaggcaaaaagaccaagcacc

SEQ ID NO: 224643 - DNA, 347 bp, Homo sapiens
agccacctgtatccctggttaatgagcattggccacctggcagaaccccactaccacgaagatacagtttcacttttaccgtttgtcacatccaattaaaggttttggcattcttgcctacttaaaaaacattctgtaaacattagaaatagtttttatatttatttatttatttattttcttcttttagacacaggatctctatcttccaggttggagtgcagtggcaccatcacaacttactgcagccctgaactctgcaactcaggtggtccttccgtctcagcctcgggagtagctggaattataggcacatgccaccaacacccagctcatttaaaaaattt

SEQ ID NO: 224644 - DNA, 521 bp, Homo sapiens
cacagtctgtgtcttggtgtcctgtcacagtgtagaatgtagccttgtaacctcgtcttgtctcatctctcatgctcttttaattgggatgcacagttaacaaaccctaaattgcaggatctgacctagggggcctttcaaaagttttatgtgttaaatgccaggattatgttgaaggtttatgttttctaaaataatttttgaagagtgtgggtgatgggtaaaagcagttgggttgttttgttttgttttttactaaaattttaattgtacctttttatcattgccttctgagatatctttctgtggtttgctgtcattgactaattatggcaatggcaatctagttatcttctcatcctaaagactgaaccacagtatcacctgagagaatacttttatatttcctgtttttctctaatgtggagactttctccaaggacttttcagagagatgtagaattgggtgaattggttggtctttctgcagcgcataacagactagccatctccatagcccg

SEQ ID NO: 224645 - DNA, 208 bp, Homo sapiens
tctgccggcgggctctggggaaccgctgggtcggcgcgcccggggctggcggagcaattcctgaggcgcccaagctcacccccaacgctaactccgcctattcagtcccggcggctccccctctcccccctcccaatcctcctcccggctcctgcccgcccctttcgccctggtggtaggaaacactcctgaatctaactcgacgtgt

SEQ ID NO: 224646 - DNA, 372 bp, Homo sapiens
gacattttatattactggagaaaaagtgaatgttttaaaatataatttcaaattagaaagaatttcttaagctgaaacaaaggcctgatgccaaaggaaaaatttttactgatcctttgcgtctgtcaagcaaagccatacagaataatgtactataagtagttaaaaacggcaagagactaggaaaaaacttgcatgtgaaaaagcaatagtttttttttgttttttgttttgttttgagatagagtctcgctctgttgcccaggttgaaggacagtagcgctactttggctcactgcaacctccgcctcctaggttcaagcgattctcctgcctcagcctcctgagtagctggaactacacccggctaat

SEQ ID NO: 224647 - DNA, 429 bp, Homo sapiens
gccctcttcgcgctgaagctgcggagggtctttttcttcagcccccaaatcctctgctctgtggcttaagattcccaggcttaaacccataactgctagggtcatcactcctcaaacttctccctcacttgttttgctgatgacggacacaggggcctcacagactcagaagcatctggagtcatttcgaaggacagaactgtggcaatatcctctttcccccttctaatctctgagaacagtgtctgtatatggcacgggggtccctagtgtcatataaaaggactcggagatgtcctcatgggctgtaacggcccccggtgctattcagggatctctgttctttaaagaaatatcatttccccttatttctctacctttgtgccctcacctcgccctgaattgtttcttaaactgggctttttggga

SEQ ID NO: 224648 - DNA, 659 bp, Homo sapiens
gtcatttcttaaatatatcaaggatattttggaaatctgaatagaagagtacgcgcaccaaggcttagaggcagaagcatgacctttaaagtgaggccagctgggatttgaacatcttctctttctgtcaccttcaattccgtagctttctcctgccgtctataaaatgggaatgatacctacctcacatggttgtcatgtaaactgagtcagtgaaaggctgttagccctgttcttggcagccatgatgatgtttatgaaaaagaaaagatgttggagtctaaagagcagtttgaagaaatatccactttaaactgatgaaagaaatatcaataggagcctgacaattatgattgccagagagtgtttcccaagaaaaggaggattgttaatgaagaaaaacggggtgggttcattggctcacacttgtaatcccagcaccttgagaggctgagatgggcggatcacttgagaccaggagttccggaccagcctgagcaacatagcgagaccctggctctacaaaaataaaataattaatcaggcatgatggggcacacttgtattcctagtaactcaggaggctgaggcaggaggctagcaccctgggagtttgaggctgcactctagcctgggtgacagcgtgagatcctgtctca

SEQ ID NO: 224649 - DNA, 624 bp, Homo sapiens
gtcattagtgataaagatctagagttgttgttagatcgaagtgatcttattgatcaaatgaatgcttcaggaccaattaaagagaagatggggatattcaagatattagaaaattctgaagattccagtcctgaatgtttgttttaaagtggagctcaagaatagcttttaaaagttcttatttacatctagtgatttccctgtattgggtttgaaatactgattgtccacttcaccttttttattatatcagttgacatgtaactagtaccatgcgtacttaaatagatggtaattttctgagccttaccaagaacaaagaagtatccatattaagtttagattttcagttaatttttgagactgagtagtattcttggatacaggctgatgtgtacttaaccacttccagatttatacagtcttcctgtggaagtttagtaaatgtctttttccctcctttcttctagtaatgcagttcatgggctttaggtacttcagttatgaagtaggcttttcatggggagagattgggattatgctctctgttgtttaagaaactgtttgattttagagtctatttctatgagatagtttaccaaataaatgttccttataagataa

SEQ ID NO: 224650 - DNA, 491 bp, Homo sapiens
tctagatggaatataattaattatgcattgctttgtgatagatcttatattgtttcaaattgttatttatttcttgcattgttgtttaacttgtcatctactttctttccccttctcaactaaattataaattccttgaggcagggaccaggttttaaattcatctccttaagcatggtatgcgatgaataagcattttattctgcagaaatattctaatatttcctcattttaaaattttactagtagtgtgatccagagctaatgttacagttaacatttgatgaatacttgactaattttaaggaattaccatatttttccattttaggacctcagaatttaagatataagtatatataatgaaatcctttaaacattatcttccgtctattgggtgtaatcagtagaaagcgattagaaaatttttttaaatctgtttttagaggcagtaatgttcttttttctttcttttttcctgtgacgggttt

SEQ ID NO: 224651 - DNA, 248 bp, Homo sapiens
ctgtgtgtgtgtgtgagagtgtgtgtgagagagagtgtgtgtgtgcacatgtgtatgtgtgcatgcacgtgctggcccagagtgtgtcattctaacagaacctgcccggtgatggcctctgctttctggtctgctcgtcttggaggccccacttgtgtcacataggtactgagacacctgcattaacccttctgacggagtcataagaacccctgacattgaattagaatctttctctcgtctacatc

SEQ ID NO: 224652 - DNA, 146 bp, Homo sapiens
caagtacctcaaaccacagtgacatcactgccacctgtgacatcactacacgccacagtggaaaaagactgtgggtcccagagaggtgggtcctgagcatcagagccccagccccgcagtcagctactcagcagaggtgatcaagg

SEQ ID NO: 224653 - DNA, 495 bp, Homo sapiens
cgtgctctgcagaagatgcctgccaggagtcctattctccacccagccaggcctcatggccatctacacactgacccaactcttcactgctggacttctacccaggtgtttcatagaatgcccccttctttcagaaagggaactgtcctgggccaggtcaaattaagccagtcaggtccttcctgctcaggggcccccaatttatctgggagccccactttacaggttcagcctactctagacatagtccccccctgtaggcctagcctcagaggcttcctgaggacacggccaataaggccagtggccctgacctggctttctgcctgccaagtaaagagcttttccaggcagtaactctccctccgagcagcctgggtgacagagcgagactccgagaaagaaagaaaggaagaaagaaaagaaagaaggcactccgtgctctgcagaagatgcctgccaggagtcctattctccacccagccaggcctcatg

SEQ ID NO: 224654 - DNA, 420 bp, Homo sapiens
ccagtaatgatgcagaatttttaaaagcttatctttctctattcaggaagaatttaatttggtggcatgttaagatattaaaattaataattaaaagaagataattataatagaccactttttaaaatgctctaaaatatttttgtgattttgtactcccataccttactttgcttgttcttaacttggatcagagcgcttgtgtggacaacttatcattttcttctctcttggctaccttatttggctctctgtgatttttaagcataccaaaattgtaataatctgacgtatatgagcaatgaagaatttttttttttgagatagggtgtcactctgtcacccaggctggaggtttcggtgagccgagatcaccccattgcactccagcctggacaacaagaacaaaattccatctca

SEQ ID NO: 224655 - DNA, 400 bp, Homo sapiens
tgtacttctatattcccaccttctctccaaccaagactcttcaccttggcacactgcatcaagaagacacccgggcagctggaaaaacaagcaagcagatgagcccacacactgaacctagatggtcatctggaaggcaggcagggcctaccttagtccttctggtactcgaaatccaagagccatagccctgagactggggagcagaggcttgagtgccttgctcacaaggattagtgaggatgcggtcagaaagctcggaggtacgggggctcacacctgtgatcccagcactttgggaggtgagggtgagatgactgctgaacccaggagttcgagaccagcctgggcaatgcagtgagaccccgtctctacaacaattagctgggtgtggtagtgt

SEQ ID NO: 224656 - DNA, 453 bp, Homo sapiens
cagtgagatgctgggtctccatgaagccaggattaagcagaaatagtggagatgttttgccctgaaggcagttccaagcctaattgtcacacagcaagaagcactgctcttaggatgactgggaacctccctttcaaagttccccatcctcctaccctttagaaaactttggagatacagcaaggcaaaacggaacaatgttagccttttgatttgcctctggggacagctcttgccagggcaaattttggtgaagtggacatggccattctcaaagagaactaaactcattacattgttttgtgtgtaattaaggcaaagcttcttattcataaattgggcactgtttgtgaagcataatgttaattaagtgctttttgttccctgagaaccttatctttgttctgtaagaataagaataatttacttctttctagaagagcaaactgtaaa

SEQ ID NO: 224657 - DNA, 536 bp, Homo sapiens
gggagtgtaagccagtaggggggtgctcctgagaaagggaatgaggctgtgccttgaaagactgattagatagaggaggaagtgaagcatcagaggctgcccaacagaggcaggagctggggctggggtgggcaaggagaaaatcacgccatcctcctgtgtggacagtagagtttcatctgctgagggcagaggccatgttttatccatctctgtccccttctatgtccctttttctcctcccttccccattccctggcatcatattgggacttgttaagggctgaattgtgtcccatcccaaattcgtatggtgccaccccaactccagtaccttggaatgtgaccgtatttggagaaagggtctctgaagaggtaattaaggtaaaatgaggtcatatgggtggcctctaattcaatatgactggtgtccttataaaaggagattaagagcacaccaacatggcacacgtatacatatgtaacaaacctgcacattgtgcacatgtaccctagaacttaaagtataataaaag

SEQ ID NO: 224658 - DNA, 483 bp, Homo sapiens
gggagtgtaagccagtaggggggtgctcctgagaaagggaatgaggctgtgccttgaaagactgattagatagaggaggaagtgaagcatcagaggctgcccaacagaggcaggagctggggctggggtgggcaaggagaagccatgttttatccatctctgtccccttctatgtccctttttctcctcccttccccattccctggcatcatattgggacttgttaagggctgaattgtgtcccatcccaaattcgtatggtgccaccccaactccagtaccttggaatgtgaccgtatttggagaaagggtctctgaagaggtaattaaggtaaaatgaggtcatatgggtggcctctaattcaatatgactggtgtccttataaaaggagattaagagcacaccaacatggcacacgtatacatatgtaacaaacctgcacattgtgcacatgtaccctagaacttaaagtataataaaag

SEQ ID NO: 224659 - DNA, 762 bp, Homo sapiens
cggccacccccgggcggcttgtagccggtgcgcggggtggctggggctacgtgcagagctgtcgcggagccggaacagcagcggtgaagcccctcggctcggccgagaccgccgtgcccattgctcgcctcggttgccgccgctttagccgcagccgctgctgccgccgccgggggagaggcagcctattgtctttctccgcggcgaaggtgaggagctgtctcggctcggcccgcgggggagccccgggagccgcacgaatgggacaacagaagaagtgacttcaaaagaagacgaagaggaagagatggatgaagatatagaagacttagatcactatgagatgaaagaagagcctattagtgagaagaagttggaggatgaaggaactgaaaaagaaaattgggcaatattagagaaaattaggaagactgaaaggcaaggccatttaaatgtgttgaccctgatagtcctttgcacagtgatctttagatcttaaaaagaagcgataggagacattttgcttatctttcaagtgttcctgacagcatctcagaggatggtgtcctctggcttactctctgggaaatgctgctctgttggaaatccggagttctgagtgatccccatgcgttttctgctgcagagcaggacatgctgaagtgattccttcgtgagcagatgttagaggtctccctttgacagcttgttacaaagttgatcacgaatatactattacggtgagtggaagtcccaggttgg

SEQ ID NO: 224660 - DNA, 894 bp, Homo sapiens
cggccacccccgggcggcttgtagccggtgcgcggggtggctggggctacgtgcagagctgtcgcggagccggaacagcagcggtgaagcccctcggctcggccgagaccgccgtgcccattgctcgcctcggttgccgccgctttagccgcagccgctgctgccgccgccgggggagaggcagcctattgtctttctccgcggcgaaggtgaggagctgtctcggctcggcccgcgggggagccccgggagccgcacggagatggaggaggacatctggacagtgagcaggaggcgcttcggcccatgccgaacatcccaggggacctggagagccgggaggccatggtggcatttttcaactccgctggagccaatgcccaggaggaacaaagggtgtgctgccagcccctggctcacccagtggcctcgtcccagaaaaagccagaggtagcggccccagccccagagagtgggggtgagtctgtgtttggggagacccaccgggccctgcagggggccatggagaagctgcagcgactttatggaaggagaaggtggacctgaaggagcgggtagagaaactagagcttcaattcatccacctctcaggacagacagacaccatagggagaaagtacatcagccagggggcagtgtcagagacgcagcactgggagaggaggacatcgtcaggctggcccaggaccaggaggagatgaaggtgaacctgcaggagctgcggggcaggtgttgcagcttgtgggagaccacaaggaggggcatggcaaattctgaccattgcccagaaccctgctgatgagcccactctaggagccccaatagcccaggagcttgggtgtgctgacgagcagggtggtgagtagagccctc

SEQ ID NO: 224661 - DNA, 755 bp, Homo sapiens
cggccacccccgggcggcttgtagccggtgcgcggggtggctggggctacgtgcagagctgtcgcggagccggaacagcagcggtgaagcccctcggctcggccgagaccgccgtgcccattgctcgcctcggttgccgccgctttagccgcagccgctgctgccgccgccgggggagaggcagcctattgtctttctccgcggcgaaggtggcatttttcaactccgctggagccaatgcccaggaggaacaaagggtgtgctgccagcccctggctcacccagtggcctcgtcccagaaaaagccagaggtagcggccccagccccagagagtgggggtgagtctgtgtttggggagacccaccgggccctgcagggggccatggagaagctgcagcgactttatggaaggagaaggtggacctgaaggagcgggtagagaaactagagcttcaattcatccacctctcaggacagacagacaccatagggagaaagtacatcagccagggggcagtgtcagagacgcagcactgggagaggaggacatcgtcaggctggcccaggaccaggaggagatgaaggtgaacctgcaggagctgcggggcaggtgttgcagcttgtgggagaccacaaggaggggcatggcaaattctgaccattgcccagaaccctgctgatgagcccactctaggagccccaatagcccaggagcttgggtgtgctgacgagcagggtggtgagtagagccctc

SEQ ID NO: 224662 - DNA, 2180 bp, Homo sapiens
  misc_feature (1532)..(1532): n is a, c, g, or t
cctcaatgtgcctgaataaatgcttgttcagacactggatgtgaagtccgattctccactggatacccaaactgcaggaggtaggtggttcccatctggacccgagttgcctaccagaccattgtcagaaacacagctggacgtgagttaaagtggtgaaaaaacagattttattcagtaactactgaaagtagggaaggagctgagcttattccgatttcggcagaggtgatttgggtgttttaaagaaagaatgagggagacgggaataaaggagctccgaagtgtcggggaagtgaaaaagtgcaaaggggagcttccggatagcgaagcacgtggaggttcctggagggtgtcctcccagagaggacgtggaaccttcccgctcccaccgcgcacttgccctgtgtatctcttccctttggctgttcatctacatacgtggtagtttcctttatagtaaactaataaacggaaatttgcagcagctgtgaaaaacttcaattttctgaatccacttttgatttttagtggcgattgcttaaatgcctcagttttaagtatcataacgaaaggaaagcatacgattcctatattaatgaatcggaagtaccttttgcagtttttgttttgctttttcagacaaggtcttattctgtcatccaggctggagtgcattggtgggaacacagctcgctgcctactcagcctcctgggctcaagcgatcctcccgcctcagcctctcaagtggctaggaccacaggcacccacgcactacaccgcctaactaatgttttgttttatattatattattttattttatagagacagaggtctcaccatgtcgaccaggctagttttgaactcctggcctcaagcaatcctcctcccacctcagcctcccaaagtgctaaaatgataggtgtgagccactgcacccggtgattttgcagtttttggaaaccacaagtttgatttcggtgtgaatattttggaagaatctatgaaacaaatgcacttcatctgatttctcagtaatgttgatgatagatttacttctgaacctcttggacgtgtgtatgttagaagttctccacccaattgatacggaattaaatagctgtgaaattactgtaagaagaaccgaagcaacgttggaaatttggtaactaatgccacgttggaagctattcatgccaatgtagcattgcttcatacaggtacttccagatctaattgaatacatccagtgggaaatttcgctttgcgtgattttttggctatccttctcataatggaccccagttttagttgtcagagtaacacaggcacagctgcttgaaggtcttgaaaatgaggttaacaaatattcagcttttggtgggagtttttctcaagttgttggaatagaatttggactcaattcagatgcggaactgggacactgaatgatagataacagatactgtgaaagttcaaggaccatacgaaaaaaatttaccttcttgctgctataaacaatatattgcncatgggaaagatagttacgttatgcctgatagttgttcttgaatgtttgacacagaaactgtacaagtaccttccacagtcatcatgaatcacttttaatcgataaaaattttgtagggaaggaagcagtgtctttcaggccattgaatgaatttgattactactacgaacaaatcatcattattaacagccttcgaggaagaatcagataagccatcagcagtaattgcagtacctggcatagaagggtgaatttgccatatttctcagcacatgaaagaacatttgtaccaacttagagccggaggggaacaaggtttaagaacttttcccgttattagtggtaatgcatctgaaaattttgattctgattgaaatactatatgggtaatatataatcaatgcccaactgaatggagaaaacctacactttttgcattgttaagcacagtaatataattttggctctttggcattgttctagaattaattttaattctagggatattgctctaaatgtgcttcttatcacttttgactcttcagtgtgttatccaggaaacaatatatatacacttgtgaactgttgtttgtgatttaagcatatatattgaataatgtttccagattaaatgacttccaagctcc

SEQ ID NO: 224663 - DNA, 551 bp, Homo sapiens
tctcaacctcaccactattcgcatttggggctacattttggttgctgtggagtctgtcctgtgcactgtagaatgtttagcagcgtctctggcctttacccgctgcatgtcaggggcacccccggccctgacaattacgaaaaaaaccctggccctgacaggaaacacaagttcccagacattgtcagatgttacctgggggacaaaagtcacctccggttgagagccagtgctctagaggaacagctttgatgtttgatcacttgttcatttactcagtgaacatttagagcacacccgtgacatgccatgtctgcatttatggagaaacagtcgcagggcattttcagtgacatccctcagtgtcctacgtgtaaaactctagtcctgagaaaaaccgctgcttttgaggaacgggtataggagatgcttcttagtgttttcttttttgccttgagtgccaggaatctctgctagttttaaaaaatacccttgatacatgttttcttttagtttaatacatgtcaactgtgaaaagtacagataaggca

SEQ ID NO: 224664 - DNA, 400 bp, Homo sapiens
aaggatcacttgagtccaggagttcaacaccagcctgggcaacataacaagagcctgcctccacaacaacaacaaaaaaaaaaaatggaaaagaaggaaaaaacccatcaagttgcccctaccttgcatatggctaggttgtgaagcaacacagccgcgaaacttctttgcaaagcacaagtgctagagccccttctctctgctatcgacctctgctccctctccaagcagctttcagggtgaaaagccttggatgacacatggggaagccaccacagctgcaggctgcttgcaaggctgaggacagcacagctctctagctgggcacttccctccacacccaggagtcagtcagtcagccagccagctgctctctgaccccctcaccacggggtcttct

SEQ ID NO: 224665 - DNA, 717 bp, Homo sapiens
gataaacatgagtgggaaaatgttgagatttcttttacataaagaatcttttaaaaccttactttaccataatccttttataatagatgttttattttattacaacaaccaaaatgtcattaaaacagtttattagtttagaataagaattattgtatcaataatagactatttagatgtcaaactgtaggaaaaatatgttatcaaaaatagagtagcagtttaagctactatttttttctgtaaaaccaaatttgtcagaaaatgcttctacagaaaaatttgaagtttgcaacattaccaaaaaaaaaactatattttctcaaaatatttttatttttgatgccttttaataagaaaccaaattatatagactttgtatgagaaagcattctttaatatatgtttttttgtttgtttttaaaaacggagtcttgatcttgtcacccaggctggagtgcaatggcgcaatttcggctcactgcaacctccgcctcctggattcaagtgattctcctgcctcagcctggccaacatggtgaaacccccgtctctaactacaaaaattagttgggcgtggtggtgcatacctgtaatcccagctactagggaggctgaggcacaataattgcttaaacctaggaggcagaggttgcagtaagtcgagatcacagcactgcactccaagcctgggcaactgagtgagactctgtctcc

SEQ ID NO: 224666 - DNA, 315 bp, Homo sapiens
ataagtttactggtgaattctaccaaatatttaaggaagatatgccaatttacaatagaagccaagggagtatttttcaggtctttttataagcaacattaccctattactaaaagcaaaaagacattatacaaaccagaaaactacagatcaatatctctcatgaacatagacacaaaaataattaacaaaatattagcaaatgaaacccaataatgtataaaaataattacacaccacagctgtgagatttgtttcaagtggcaaggatagttcagcattcaaaaatcaattaatgtaatctatcacatcaac

SEQ ID NO: 224667 - DNA, 859 bp, Homo sapiens
tcattctggatgcctgagaacttgtaatccaatgagtagaaagtttggtaccccatttatggctgtcaacctgccagttctcaggagtttgtataagcctaaatctgaaaggatctcatcccattaggacccttgtctccttttctgttgcctttgcccactggctatggcaacaggggtctttctttctccttggctatctttggatatgggggctccgtcttctgtgccaccttagggaatgccttttgcaggcatggctaagtcattaaaaagcctacagtttcagtaacattttgagtgagcactctctgaagctgcgttggaatctcaggcttctttgtctggaagataactcttgggctacaagtttcttatcctagctttggttttgaggcctctctgttctcctcttgggttggaagttattcctggctttttgtttcaaggggtctctgtgatcttgatcttgctgctttcatgggaacttctcagttcactgaattctcccttctcaaacctctgctgactatgtgttccaccaatatggaactaattctacttcttttcctgtttgcatgactttactaagaattatttacaactttaatggctcctttgagaaaatttttatcttccaaattgcctccttttagacctttcctttcccagttgagtctctcaactccctataatcactgaaacttcaggcaccccactccatgccttggaggctctcaatgtgctcaagaatctgcaaaagcaaacacctggggctgaagaataaaatagaaaaaaaattatttctcagcctccataagattctatgtcaaaaaaaagaaaatctttaaaatctcca

SEQ ID NO: 224668 - DNA, 440 bp, Homo sapiens
aacatggccaacgtgaactctgacctctgggtcctgaggctttccaaaggcatactacatccagtcttaaacctagactagggaaagcactagatccaagacataaatgtccaatggcaaaggctgttgtacacaaggaacaggctgctgtacactacctaggatgctgctgtttgcagcccttgcacaccaggtcccatgtggcttaattgattgtagaaattattttatatattaagtttttggggattcgtatcttttattcaggatagctaaatgcaatttatattagaccatatacagtaagttgtaaattatagaagttgtgcttatcaaaatcatattcagtgggcaatatggcctttaatataatgaagtttattgataaaaattaaaataaaataatgtggttttgtagtgctcttgtatgttaactaaaa

SEQ ID NO: 224669 - DNA, 381 bp, Homo sapiens
atgaaatatttgcttgagtatttgcttgaatgtgaaatattttgaacattttctgtggattctgtggattatagagattccataaagaaaatacttaatagatgaagcatttcatctgagctcagttatacttaaattatcattttcttaggatcctgacagaagattaaactaggaattattaaaaaacaaaacaaaacaaaacaaaaaactaccttaaagaatctatttctgctaccatgtatcttggctttatcacttaatagctgtgtgatcctttgcctagttgcttaactttcctatgtgttttttcatctataaaatggtgacaataatgttgcctacctcacagcattgttataaggattaagtaagtaatta

SEQ ID NO: 224670 - DNA, 281 bp, Homo sapiens
tgcaccacaggggggcagcggcagggggtaccagaggtaggtctccttgctggtcagcccccaaatcttcttagttctgtaaaatatgctgcttgaagcaaaagccttgtgtacagcacttagcttcatgcagcctctgtgaatcacaggttacacagagcatttccccacccttctgggaatgtggaaccaacccctgtgttgttattgttgttttaaccattctcaggatcctatcttgctcttaaatcttaaaatcaggcagatgaagagctttatcc

SEQ ID NO: 224671 - DNA, 513 bp, Homo sapiens
ggagatacaggagtatttgtgtacagccaaaaattatatcatcttttgacacatgctattgttgtataaataaatttatacaacaattacttatatagtgtatacataaaaactgtattgtttttattctgtcttattactttactactagttaaattttacctcagtttgagagggtgttctcagcttggtattgaatgtaccacctgtagagttcaagaccagcctgggcaacatatggagacctttcgtccctacaaaaaaataaaaaattagccaagcatggtggtgtgtgcttgtagtcccagctactctggagactgagatgggaggattgcttgagcctttgagattgaggccgcactgagccatgttcacaccactgctctccagcctgggtgacagagtaagaccctgtcaaaaaaacaaaacaaaaaacacctgtagcaatcattctagaggcattgctcgatgtcacagatatgaaatatccagttgggccggcaaagcaga

SEQ ID NO: 224672 - DNA, 163 bp, Homo sapiens
ggggggttcctagcctggagaagccccagggagagctggggaatgggtggtgcctctaaagtagtgtcgggggctggttgtgttctggggccctggggatagggcagggccttgggcagagttatgcctggcatatagagaactcttagagtcagctgtgagc

SEQ ID NO: 224673 - DNA, 424 bp, Homo sapiens
caataaaccatgcttttatgatttataacaacacatactatagtatttccatattaaaagactagagtgattttacaaaggaaactcttggtagacagtacttaattactacatatgatatgtatttcatatgcataattctgacatatttataaatcatgttacatgatatattcagaaactctttataagtgataactgtattttcttttcttttttttctttttttttttttttgagatggagtcttgctctgttgccaggctggagtgcagtggtgtgatctcagctcactgcaacctcggcctcccaggctcaagcgattctcctgcctcagcctccccagtaactgggattacaggcacacgccaccatgcccagctaatttttgtatttttagtagagacagggtttcaccatgttg

SEQ ID NO: 224674 - DNA, 95 bp, Homo sapiens
atcttgatgctacactaagcttagatttcagtgaatgtgagtctcagccactagctcagagccacctcccaaagaccaaatcatgtagggacaat

SEQ ID NO: 224675 - DNA, 458 bp, Homo sapiens
attcctggggcattatgagggttcccatgggggccaaagaagagaagatttaatatggtgatgtgttgtcataaaacatttgattgtttttgctcggattctttgaagatttagtctattatcgataagagaaacactaaagaactcttggttgtgtatttggccgctctcatttcggcaagtgtttaaatgtgtcattagacaaaaggtgctctgcaacagttggctctgactggagaccaaatttctctcaaatcaatccataaaccacttctgtcagagacgctctctgcacgcaccaatctggccagctcacaagccagaaattagatgtataactggatttcctctgagtcagccaatgctttgggttacatttaagcacaatctttctatgttatagcaagttccaaaggttgcagttctttttccttttctttccttccttcctttttttt

SEQ ID NO: 224676 - DNA, 364 bp, Homo sapiens
agatacagttctgtcctcatcttgacttttgtgtgggtcagagtgagttactaattttagaagtgttctcgtgaagacatctgactactcagcacacacaatcttaaggtctttgctgtaagaagctcaaccatcctttagcctccctggccagggaccctggcctctgcttttgtgtttcaagaattcttggttctggccctgtccttgattccctaatttccacagtttgacagcaccgaatgttgtgttaagcttcttgctaccatgtaaaaatttcctgacacctcttgcaataataattgttattatataatatataattatgtaagatataataaatatataataatcgtcattgtaa

SEQ ID NO: 224677 - DNA, 352 bp, Homo sapiens
ctcctataacatttttgggtgaaggagaactcaagactttttacagagaactgtgggctcagttatgatctcagcatctgaatggtctaggtagtatcaccattatctctggccctaggtttgccaagtaggatgaagactctaagtgttcctgctgagttgtccaaaggtcctgctccttagtcacctgtgcgaaatgagcagggagagttaaggcatagaaccaaactctttgggttattgtatgggtatgccagtaaattcagacacagagctggggtctgactgaatagaggcccaaaccagcaacttgtaggcagagcccagaatctcttgtgatagaaatacccct

SEQ ID NO: 224678 - DNA, 477 bp, Homo sapiens
taggttgttacagtggcgatgctttattatattttaagggatgaaaatccctcctctcctaccctggttattttctcttgcaaaaaatccaagtgaagaaacactgaactgaaatctggactagcctaatagactctaaagctcaatttttatatgtatatgtgtgtatttttgtctgtacctgaaatgactgctgtcaccatgcagtgattttaccccccttccctggcctcaggaataagccaagaaattctagttgtgcagaactgagcttgttgccccttcttgtactgatggaaatagtgccatgtccaaacaaaataaagaagctcatagctaattacatatcctaataccaccttcctataaaactttgccttaatctgtagtcattcctgcccccagctcataccctcctgtgggcagcttttgtttgctttacctcatcccactgttttgtgatcaccccccgggaga

SEQ ID NO: 224679 - DNA, 191 bp, Homo sapiens
ttattggtactgttctctttcaaacacatacctacatattagatttagttactttgggaatattgggctatttgtactatctttacttagggtgttttggaaaataaatattttgtgggttattagaattctgcttaaaacacctgtgaagtttgaagcttttgctgaatttattgattttttttcccatt

SEQ ID NO: 224680 - DNA, 502 bp, Homo sapiens
gaggcactgaacagccaaatacacagaagaacttgttcggttgacatccttccatcagcttctgctattggccacctggatgctggtaaaatgggcagagaggtatatcagccacaactgtaaactggagagaacaagagcctcctatcctctaggattgctgaaaaaggatatagtctctaatctgactttcatcagtaatgaagatcgtttttatttttaaatttgatctgcctactatgtctagtgctcctttgattccaaactcaaataggaacaacaccaaaaaacagtatgagttactgtccactccctaaacctgcaacactaacagaagagtgctatttcctccaataactgttcacttccttcctatgacacgtaagatacctatgagcaacccagaagggggctacaatagagatactgttagggctgattatgtatgattctcgaagcgctagcttgacctctaccttaaataaaacgtaaagatatacct

SEQ ID NO: 224681 - DNA, 228 bp, Homo sapiens
gaggcactgaacagccaaatacacagaagaacttgttcggttgacatccttccatcagcttctgctattggccacctggatgctggtaaaatgggcagagaggtatatcagccacaactgtaaactggagagaacaagagcctcctatcctctaggattgctgtatgtatcagatgaattagttcacgtacacagtaaagcctcagtaacttttagctatgataatta

SEQ ID NO: 224682 - DNA, 342 bp, Homo sapiens
tcacagacactattctgtcaccgcactcctgcccgcggacctgcaggcctgccgggtctagctgctccgcgggggtccgggaggggtcctgccctcggggacaaggtccaagggagctcgccggccacggcggagggtgggcgcgccggctgccacctcgccggagcccccacggactccccagccctgccggagtcggagcccgccactcgcgcctctcccgggacccgcgccgggctgcgcgcccgcttctcccggcccggccaaccccgagcccgcgcggggaaagttcctgcaacttcgcaggggggaggcggcgggggctccgggcctcggcctccc

SEQ ID NO: 224683 - DNA, 1374 bp, Homo sapiens
aagatgtcacctttgctaactctcctgcccccatcctgcccctctgctgggagggtgtctgcttctccccgccagccctcgatcccctaaacctccttctttcagaaggctggggaagcgaggcctggggagggaagggactcacctgcccggcagatggggtcctcacctgcccgctgctgccagctacacctccgttgcccaggccctgggatcaaaccctgcccaccagctcccctcgtccaaccagctgccacgtcctgtaaccaaaagtgaccgggatgaatgcctggctcccccttctttccagccctagctcaggcccatcgtccccagctgatgtcgccctgtctgcacgatgcctgggcgcctactccacactcctcactggcctcaggccccaccagccctgcctcgagctagcccctccacccgtcatcactcctgccagactccagatgtccaaggtgctccttggctcccacaagctctcctccagcaccccatcttcccctggttgcccctcggttccccacttccccagtttcccctcccaggttcaagcaattctcctgcctcagcctcccaagtagctgggattacaggtgcctgccaccacgcacagctaatttttgtatttttagtagagacagggttttaccatgttggcctggctggtctcgaactcctgacctttagtgatccatccgtcttggcctcccactgcgcccggccataaacttttaaactaaagcatgatctatcgatacattgcagagcttctttcctttagtatctgaaggtttgagtcaaagctgttttcccatctggaatcagttgcccatttggctatccgcccgagcgttgtggtttcctctcctgttcctggcctgcctttgtgactcactctggagatcaccttcgaggttaatggcttgtggaagagttccaagttttatctctgtcctagttggttaaacatcattttctctttttcaagcaagtgaaaagctttcaatagatagatgtttatttcctaagcactaaatgactcataaattaagtccctgtagatttggaaaaactccttaaactgtatctagaggtctagcacttcctagtaggatagacagtcctttctagatactgtaacttttttctgtaccgctttggagtacagtctttatgaagttgtttgtaagcaaaagggaatagaatttaagcctaaaggctgggcgcgatggctcacatctgtaatcccaatgctttgggaggccaaggcaggtggatcacctgaggtcaggagttcgagaccagcctgaccaacatggtgaaaccccatctcaaaatacaaaaaattatctgggtgtggtg

SEQ ID NO: 224684 - DNA, 540 bp, Homo sapiens
ctgttcaatatggttgcacgtagctatgtgtggccattgagcgtgaaaatgtgactcctgtaagttgattatagactaccatgtaatatagtcacccctcagtgtccgaggggtattggttccaggaccccctgcacataccaaaatccacagatgctcaagttcctcatataaaaatggcatcgtatttttatgtgatctacatacagcctcctgtatactttaaatcatctctggataatttataatacctaatacaatataaatgctttgtaaatagttgttatattgtttgtttgttttcttaacgttttttttaatggttgtattgttattgtttatttaaaaaatattttcaattcaaggttggctgaatctgcatatacagaacctggggatacagagggctgactatatcatacacattagatttcaaagacttagtatgaaaaaataatgtaaatatctcatgatttattttgaatatctgttgaaatgatatttttgatatattgggttacataaaatatattaaaatta

SEQ ID NO: 224685 - DNA, 725 bp, Homo sapiens
cacgcgggcgcacacacacacaccatcctggacggcgttcaagtcaagcacgagaaacagccttctgcaagggagaggaaagaaagctggaaatccagacagactgaagggctgcctgcttttagacttgactttgaccgccttttcttctcgggccaagaactgtggcagtgcagaaattacaattaaaaaatacataagactactcccggattgcttttttttttttttttttttttttttaactaaacacaaaaagcgacaccaaaacaacccctgagaaaatccacaaatctgtacctgagacacgtcaagtcagcggcccagggttctgttacagactcaagatctcttttatttaatgcaatacagtgcgatggtatgtggctttgaactgatgggttttgtttgcttcttttattcgttctttgcaccccctcctatccctggcacagtttttcttttcctgtttgtggattgcaaagtggctgttttacccctttcctaaatgtcatttttgttttacaggttgtgggctatagtgctgcatttgcagaactaatttgcaaatatgcattattatttagcgttggcaactttagtacatgtgacacactcttatgacgggaatcagtgagtaacattgtggtccaaacggtgcagaatctagcattttgttctgctttaactctctgctttatgcccctctcccctcagtggtggaa

SEQ ID NO: 224686 - DNA, 414 bp, Homo sapiens
caagctctctagcatgtattcttgtaagggcactaaccccattatgagggccccactctcatgacctctaaacttcattacctcccaaagatcccatctctaaatagcatcacattgggggtcaggacttgaatatataaaggaggtgggggacaccattcagtccatagaaaaatgcttcttatctctatctttaataccttcactctctaacacaattggaaacctccccaggggctccatgaaccgtggctgcaggctctcaggtactctatcccaggaccacaaggagttaatttgatatttccaccaatggagggtatcaggctctcattaagccattgtaaaatggatgtaataaaacaactgttttctaagattactgtaacaataaaaatatttgttaaaactaaa

SEQ ID NO: 224687 - DNA, 534 bp, Homo sapiens
cgtggctggagtggtggcttatggatcctctctctttttcctgtcttagggacataatgcttctgggaatgtcctggtgtcatagcaatactctttagggaccatttctgtgctttctgtaactttgtttaagcaacaaaaaagcaaaaaagctttggacttgctcaaagggtggctaatctgatacagataaagtgtggatgaaactcatttttagcctgtaactatgttgtaggatggaaaagaaaacttgcttgtgggtcaaaattttgtgggttagactctcaaatgaatcagttattcaccatgtgtccattgtcaaaacttatccttttagttgcagtttcttctctggaaagtgagcctaaaatattaatttgaaagcttattttgggattagaaaaggagagtgaattagatggtatctacgtcgtaaagggtcaggcacgtgagcagtgctcagtacataggacctattattaaaatatgatgaaaatactggttatggtgatttgacaaaacaaccttcttttg

SEQ ID NO: 224688 - DNA, 489 bp, Homo sapiens
aattttttttaaataatccaaatttagccaaacgtagttgacactgccttctaaaatgtcctgtatttcttagttctaggacaggcaattacaaggactataaatatggggtccagggctttcaatgcccttttaaccttttacaattaaaattaactgaatcttaaacattcagtttttcattccataattgtgagctggttgtgtgctttgtattgtgttggcaccagggatataaatgtgaaaaagcagacctggactctctctccttgcagcttacagtctagaggtggatacttcattacaccaaaacaacaaaaacaaaaaccgaatcacaccaaaccttgacacttcttgccatacgggggttttcacatttgcatcaatactattctaatagtcactttttgttggaccaatcagccttgaacttactgagaagggccacattgatcttaatatttgttgtgtagctttaagccttggcag

SEQ ID NO: 224689 - DNA, 394 bp, Homo sapiens
accatgccttgtgctgggcagtgggaaggtggggataattagataccgtcaaagaagtcaaataagtaatagctaagaggctgagacttatttactgagggcttagtatgggcaggccgggccctagtgctctgcgtgaagacacacatccagcacttgcagccctcctgttaaggactgtgtctcacacccctccaccacccatttttcagatggcgaagcagatcttcagggtggttgggaagtcaccttggttgcacagttgtggaagggtggagaagggatgaggtcctactgtggacagggcggggcagggtccagtgtgcattctggagcagctgtccctagagcctgccctcttcacctgccctgtccattagacacccccacagca

SEQ ID NO: 224690 - DNA, 719 bp, Homo sapiens
  misc_feature (447)..(447): n is a, c, g, or t
  misc_feature (643)..(643): n is a, c, g, or t
aattagcaagagcgtttaacaggttttctagatagaatacccatataggggaatcatgttcctgtttatatgccagcaaatagccactagaaaatgtaattttaaaaagttactaaaataatttattcaggaaaagttcattagtgcatggagccattaggtgaaaggttgataaaaggtgaactctacacacagaagagaccaggctgtcactgccttgatgcactagttaatcttagcctctttaagagtgagaaaaccaaggaccaggcatgaaccactgtgcccagcaacaactttcttatgtataatattcttggctggcagtttttgtctattagcactttgactatatcatctcattccctcctgatctgcaaggtttctgctgagaaatccactgattgccttggtggtggtggtaatggtggtgccgtatgttatgcnatcggcaccgtactggatcctggccaccgactatgatagctatgccctcgtgtattcctggtcctgcattatccaactttttacgtggattttgctggatcttggcaagaaacccaatcttcctcaaaaacagtggattctctatatccgattctaatacatggtgccagaggtgccccctccatgccttctgcgnaatgttcctaaccaaccctcgcattggcaaccaatcaccctccacagcgggtgcctacactgcccttgccctccct

SEQ ID NO: 224691 - DNA, 385 bp, Homo sapiens
aattagcaagagcgtttaacaggttttctagatagaatacccatataggggaatcatgttcctgtttatatgccagcaaatagccactagaaaatgtaattttaaaaagttactaaaataatttattcaggaaaagttcattagtgcatggagccattaggtgaaaggttgataaaaggtgaactctacacacagaagagaccaggctgtcactgccttgatgcactagttaatcttagcctctttaagagtgagaaaaccaaggaccaggcacagtggctcatgcctgtaatcccagcactttgggaggctgaggcgggtgggtcacttgaggccaggagtttgagaccagcttggcccacatggtgaaaccccttctctacta

SEQ ID NO: 224692 - DNA, 378 bp, Homo sapiens
aaaatgtgatccctttgacaagataacaagccttccattacctgctgcaggtgacccagtttgctggctgttgtgggtagctcagaacaggaccctaaggcaccttggccctccctctgctttaaaactcaacaccaaactgtattcattcttgtggtactgcctgtgtcttaacatgcatcccaacatctggcacagagcctggcactggcaacctcttaggaaatttgttaaatgaactgatagtgtagcattctgtcactttcctcagcgataaaattctcattcttcaaaaaattttccttttgcaactgaatttaaaaatgaaatacctaccacctaccacttcaagctttgctaggtgacggcttactaaaa

SEQ ID NO: 224693 - DNA, 467 bp, Homo sapiens
agctgctcgcctggtgttcctcttccctcactaactgttccttctcagtttctcttgccgctcactctcagctcccagagttggaacacgtcgtatcattgtctgcctttccctttctagaatgtaagggcctgcaggttagggtgtttgcgtcctgcactataatatctgcggtaaccagaacagtgcctggcacagcgtaggcccggcttatgtgtttggtgaatgagtacgtgcttaagtatccgcagccgtgggtcagtgtcggtactcgctccctgggagatctcatccaggttcacagctttcaatgacatgtgtgtgctcataatgcccaccttggctgctccttcctggttccatcctcttttccagttgcccaggtggcgtctctacatgggtgtctaaaagatctcaaacattgtgccaccgcactccagcctggcgacagagcgagactccatctc

SEQ ID NO: 224694 - DNA, 464 bp, Homo sapiens
ctctgtagcataaatggtgaatttctggatagcaagattctgaagcttttcaagtttattatagatgctttctcatctcaaataactcatcaactatggcatttttaagtaccatgaaagtgtgtgttatgttggtgtgtgtgtgtgtgtataaacttcagacctttaaaaaagtgatttctggccgggcgcggtggctcacgcctgtaatcccagcactttgggaggccgaggcaggcggatcacgaggtcaggagatcgagaccatcccggctaaaacggtgaaaccccgtctctactaaaaatacaaaaaattagccgggcgtagtggcgggcgcctgtagtcccagctacttgggaggctgaggcaggagaatggcgtgaacccgggaggcggagcttgcagtgagctgagatcccgccactgcactccagcctgggcgacagagcgagactccgtctca

SEQ ID NO: 224695 - DNA, 807 bp, Homo sapiens
taaaagggacagaggtgaaattttgagtgacttgagtctcttgcagtccctgattacacagaacctttctgggctacttggagcatcacgaatagtctttcctgtacttaccagatttcaagtattcataacttgactccctaagtgtacaagttgggaatagtacagggccaagttcaagtcgcatatgctgtactgttcctcctgcaaatgtggggaaagaagagggagatactagaggaactgaggctccacccattcattcagttgctctaagcaccagaggacttgtttcagaaaaggggagtgggaacgccctcgactttgccctcctccggagcatctctgggacgcagggagtctggctagcgttaataggaaaggttgctcggcagagctgccctggagtactgacttgtctctccctcctttgtcaaggtccatgtttttctggctcttcctgcacactcatccctagattatgagcgttaatgtacgaaatgtgcagagcaaattgaggccaactgtggcatcaatactgcaacttaaacttgacaatcatggtttgctggtcctcaaacaggcactgaaatctcagtatgggtatacgatttaataatcggcccctcccttctatttgtcggttttatgtttctatccttcaatagctgcactgttttctaatgtgctgtagagtttttgaaataatttatgcaagtatttggtttccatgtttacaatttatacagctttcctagcattttaaatggaaatgtcaataaatgctatgaattggtgtcaaagtga

SEQ ID NO: 224696 - DNA, 422 bp, Homo sapiens
gcccccccccacccctgcattacctgggccatggcacccacagagccaggtcttcccctttctgctcaatacccaggggcttgcagtaagaggaagggaagcccgtgacacagaagccagagtttgttaaatatctggggccaggtgagcagcagagtttgcaacacgctctagtagcacattactgtgaactccacaggccctgaccaggctgagggccccagggtggcctggggactaccttgggcttgaaccctccacccctcagcagaaggaggcttttatagaccagggcccaggggttatcgatatttatagagcctcagaggcagctgcttacatatgcaaaaaagacacgttcctggagctacactttactggtctctttcttgaaatacaaacttagttggcagtctctgagg

SEQ ID NO: 224697 - DNA, 263 bp, Homo sapiens
agcagttgtatttgtgattttctcagcctgattttaagttattctgttataattttgaatgttctgttatgcttccctctgtggtgagcatacgtcgaaagctgtacatttccttcagggtaacctttgtttccaacaggagagagttctcactaccacatccagccttgatctctttaacctaaattggaataagccagacagagctggggttcatgggacagatgggagcatctcaagtttagggttggggagtctcagtg

SEQ ID NO: 224698 - DNA, 343 bp, Homo sapiens
aatatcagttacttgattggtatcttctcctttgatatattaagtggacaaacatctaatgttttcctctcgaaatcatgagtttcctgcaagtgtttggggcttggtatccacgtttctgtaatcttctaagacaagccagaatctttttctgtttttatatttacacaggttttattgtgaaattgtcaggaaggatgaggcatgtttcactcattaattttcattgtcatcaaaacatcagagttacagtgcagtatcctgctattccagggcccacaggagctctgattgataacattctaccttcacaaaggttgtaatctaaatggaagaggctgga

SEQ ID NO: 224699 - DNA, 359 bp, Homo sapiens
gaatcagtaataatgcaacaattcccattagagctattttattttattttattatttttgagacagagcccactgtcacccaggctatcttggctcactgcagcctccacctcccaggttcaagcaatttttcttatgcctcagcctcccaagtagctggtgttacaggcatgcaccaccacattcggctaatttttgtatttttagtagagatggggtttcactgtgttggccaggctggtctcaaactcctggcctccagtgatccacctgcctaggcctcccaaagtcctgggattacaggagatctattttaaaaacctaataaggtatcatctttttggaccaacaaaggactt

SEQ ID NO: 224700 - DNA, 418 bp, Homo sapiens
agacacatcatttctcatgctccattgatgagaatttaagtcacatggctttatctcgactgtaaaggaggtgggaaatgtgatcaagtggtcagtcatgggtctctacagagctgttatcatggaagaaaggaaaacaggttttgatagacaactaggagtctaccacaagccgcttgcagtgcatagcgccatttttccttacttctcagcccaagagctggactctcccagtccccaggcctgtcattttaaaagaagaggaggagataagactgtacttatctgccatagtagccacctggccctacttcttggctttgtatagtagtttctccaggagatggagcttgcagtgagctgagatagcgccacggcactccagcctgggcgacagcgagactctgtctcaaaaaaa

SEQ ID NO: 224701 - DNA, 377 bp, Homo sapiens
ccatctaatgtcctacctgcacacggagatgatgtcatctgtctaggtattaggtagctatttgttagacgctcccccattcaacttccagaaggcctagatcatactgaagacaagatgggaaataaacccaggcaggtattaaggatcagcaaatcttgtttactattttaaaaaaatcaaaacaggaaattctgttcatcaaaaatatgatacactaggtggaaaagatgaaccacataatagtagaagatatttgctacatttttttaaagtactcatgttcagaatttataaagaaatgctattcatcagaagttggccaatccagcccactacctgtttttgtaaataaagttttattggaacacagtcac

SEQ ID NO: 224702 - DNA, 516 bp, Homo sapiens
ctgtaatcccaacactttgggaggccaaggcgggtggatcatgaggtcaggagttcatgaacagcctggccaacatggtgaaacccccgtctctactaaaaatacaaaaattagctgggcatggtggtgcacgtaatcctagctactcaggaggctgaggcaggagaatctcttgaaaccaggaggcggaggttgcagtgagtcgagatcgcaccactgcagtccagcctgggccacagagcaagactctgtgtcaaaaaaataaaatagaataaaaaattgtagcttgtttttcttcacttcataatatgaaggcagcaaacctgaaaaaccacaaatcatcttgaagcaaagttgtcagggttcccatagacacagatgagctgatggcacgtgctagagtacccacagataaagacctgggatgcgtgccaagctcatctcaactcagcagaaagcatgatgctgggttaggtgctgcatttccccacatctttctctctttgccgtattccc

SEQ ID NO: 224703 - DNA, 327 bp, Homo sapiens
tccgcattttcacgtgttagtgttgaaatcatttttacttcaggaaaccaagggttggacaatggcttccagactttctcctttcgttatgctccttcagcgccttatgcaaataccggttgtcttatgctgccattcgtctcctctgccagaatgtgaggtccgcgacagcagggataagaatgcattcatttttatatctgcagtgccttggagagtgtctgacacatagtgggcactcatttagaaaccaccaattgaatcattaaggtgaccaaaaacagggtgggggaaatacgtccatcagacaacagggaaatatttctt

SEQ ID NO: 224704 - DNA, 464 bp, Homo sapiens
aaaagaaaaaagaaaaattatctaaattttaaaagcagaagatagccaaagaaaatttatattacctcccgaagagctgtgactacaggtgtgcaccaccacgcccaactaatcttttgtatttttagtagacaaagcattttgccatgttagccaggctgatgttgaactcctgtcctcaagtgatctgcctgcctcagcctcccaaagtgtagggattacaggcgtagccatcacacccggctgacatgctatactaacatttgatacctaattaaaaatcagactcatcttccacaggaaattcctacaaattctccatcactagggtcagttcccagggactagaagcttaaaatatgtcccccaaaacagcccctacatgacccttaggcaactactaatctgctttctcattatactttgtagttttgtgattttaaataaatagaagcatacagtat

SEQ ID NO: 224705 - DNA, 451 bp, Homo sapiens
gcagatgaggaaaataagcagatcttctgatatcagaggagtatgatagagagcagggagaaccaagaagtcctgggagagagatgtcagtctgaactccatagaaatagctgcatttagtcttaggcctcttatttgcctgagaggccttaggcagtagacacatcactcacacctgtaatcccagcactttgagaggctgaagtgggtggatcacctgcggtcgggagtttgagaccagcctgaccaatatgatgaaacctcgtgtttactaaaaatacaaaaattagccgggtgtggtggcacgtgcctgagagaggaggctgagacaggggaatcacttgaacctgggaggtggaggttgcagtgagcctagattgtgccactgcactctagcctgggcgacaagatcgaaactctgtttcaaaaaaaaaaaagaaacattgttatg

SEQ ID NO: 224706 - DNA, 307 bp, Homo sapiens
gtagatttgtggtagcctagggatggggaaatgacagggaaggagtcgtgactgctaatgagcccagggtttcttttagaggtgataattgcacagttctgaatataccagaaaccactgaataatagtcgttgggtgaattatatgtgcagttaaaaaaaatcaaacctagccaggtgggcgtggtggcacatgcctgtagtaatcccctgtagtaatctcgggaggctgacaggagaattgcttgaaccctggaggcagaggttgcagtgagctgagattgccccactgcattccagcctgggcg

SEQ ID NO: 224707 - DNA, 411 bp, Homo sapiens
ccaagaacaaggggggaataagttacaaataagcagttagtgaaataagtttatcttcattttcttgtactggaaaagcatattcatgagaaatagtgacctgatacagtgctcaacagatactgaactaatcaaatggatttttttttttttgcctcgaagaagttatgttcatacctttatatttctttgtatttctgccacatggtagtggtatcttttaaagtttcatttattcataggctttgagcctgtttctccatgcaaacctagaaggtttattgcattctctcaacaaatacttactcagtgtcttgtatgggccagatactatgcttgatactgtggacacaccagtgaataaaacacacacacatccctaccctcttgttgataacagtctatagggaa

SEQ ID NO: 224708 - DNA, 427 bp, Homo sapiens
acagccctagcatgcatcatatttaatggtacagtattgaaaagttttcccctgagctattagcaatgttgttttccacagagatggcctggcaggtggcccagggctgtgtcccttgtggggacctggggctgcgccacccccctgtggccacgggagacacagggtaggagccgtacaagggaaaaacgacaaatcagactgcgctgaaattcagaagttctgttcaccaaaaacgccctgccgagagtcaaggggcagccacagagaatgagaagatattgacactaggttgccgacacagtaaataatggctgaccagcatgagggcagtactgtcagaaatttctttgagctgtgagatggatttatttttaaatgctactttgcaaaggtgacctttaaaaaataaaaggaaaataaagaa

SEQ ID NO: 224709 - DNA, 391 bp, Homo sapiens
tagagattaatttggggaaagttgacatatttacagatggtcaatatttcatattagttataactataaattagattctagaaatctgggttttcttaacatgttaaagaatatattaaaaattaaattttttatatttttccatgtcccatgtttttaaaaatatttttccatgttcaaataaagttgaataatgaagtataacatcgttcctaaaaaaataaatgtaaacggttactttgaaaacaagctgaaacaaagtatttagattgctgtttatctcaaaaagtgtttgtgtcttaagcacatactcaaatgcaaaatgggaaacagaacctgccaaactctatgcttagtgtttgtcccacccaataaaccatccacaaaaatc

SEQ ID NO: 224710 - DNA, 453 bp, Homo sapiens
ctgtggtaaatttctagtgtatgaatgaatggataaatgaatgaatgaatgaaaaaggaaggaaggaaagaaggaagaaaggatggaggaagggacagagggaaagaagaacaaaggaagagagtagggaaggaaggaaggaaggaagacatggttttgaaaatgggaaaaaaatgctgccagtatgattttcttgatgtagtttgtaatgtggtaggagggagagatttgattgagcactcttctatttctgaataaagaaggttatggtaacaataatgtaaatggatgggtgggagatgaatagaggaagtggaatgataatcagatactataatgaggaagtcacattaaaaataatgtgtattgattgtttcctttattacagaaatgtttgttgtagaaaataaataaaaattctctatgatcccattactatcaaataaccactgt

SEQ ID NO: 224711 - DNA, 270 bp, Homo sapiens
cttgcactttgcacttcatgaatctcctacagccaggtctcagagccaatgccaaaatgttgacatggtccagcccattatcataaactgtggggtacacactatctttaaaagacttccagcaaataagagtcaagcccattgatcctttgggcattggtttcagagaaccttgggttactgagaaatgtacttctgcagaacctggccctgtgtattagtctgttctcatgctgctaataaagacatacccgagactgggtaatttat

SEQ ID NO: 224712 - DNA, 567 bp, Homo sapiens
tgcagtaacacacagaaagccttattcaaacaaataagctacctccgattgttcattcaacaagcatgtattaagaacctagggtacaggaacccctccaagggctttaattcggctgaccagttgctcacttgcctagaagtctcagtgtatgcctatcaccctgcatcctgtctggtttattttgtcctggatttttcatttctttattcaaaatacaagtagttattactaagacttattaaaatgagatggaagaattggatagactttcactttctatttcagtggtctcatctaggaacatatgaggttatgtgcagtgaacagagttagcactttaagacataatgtcaggagttcaagaccagcctggccaatatggtgaaaccccatctatactaaaaacaaaaaaaattagccaagtgtggtggcacctgcctgtaatcccagccacttgggaggctgagggaggagaattgcttaaacccaggaggcagaggtgcagtgagctgagattgcaccactgcactccagcctgggcgacagagagagactccgtctcaa

SEQ ID NO: 224713 - DNA, 401 bp, Homo sapiens
acaggtgtgagccactgagcccggccaagatctgaaagttttttaaggggcttccccttcgctgggcactcattctctctccttctgccctgtgaagatgtgccttctgccatgattgttaagtttcctgaggccttccaagccatgctgaactgtgagtcaattacacctctttcctttataaattacccagtcttgggcagttctttatagcagtgtgagaacagactaatacagtgggtttatagttttcatcaagtttcatctaaatttccagctatttttttgagattttttttctgtgttcctctactacttctcctctgaggattccaattttaagtatttttggctacttgaagtaagatctaatatttgatagtacaacagtgtgatgatag

SEQ ID NO: 224714 - DNA, 419 bp, Homo sapiens
ggaattatttactggtagtattgagtctgtgagattgtagtatatactgaaacaatcttctggatggtggtaaggtcttttttagcaaacacagtaaagagcttatttcatttctgatgctttcaagggcatattccaaagtatcacagatgtcaaatagaatatgctatataaaccaaaaatgtgcatttcagatgacctattacagcaatctcagccaatatgtaatatcacaaaatgtgtcaagtcaatcatataagaggatctaatcattcggctgtatttcatgtaccttcatgttgttgatatattgtgaccacaggaaataggtgccagagcatatgcagttaagttacaggctccacgttgcctaggagggaatcataactacatcagaaaatttttaacagttatatctt

SEQ ID NO: 224715 - DNA, 408 bp, Homo sapiens
tgagatctgcttctccccaagcactgactcctggggcctcaggaggttagagagtatgagtgaggttttgggagggccagcaagccccgggctggggaagtgcagcagcccagcacgaagccgcctaggcagtggtactgtcctggtgctgtgaggtgagccgaggactctgaacactgtcgaggatgccaggagcctcaacctgggacaggcaaccgccccagcccatgcgggtgcatagggggtgcagagaaatgtttaaacatagaaagttgtcacttggggctgggcacggtggctcactcctgtaatcccagcactttgggaggccgaggcgggcggatcacttgaggtcaggagttcgagaccagcctggccaacacagtgaaaccccatctctacgaaaaa

SEQ ID NO: 224716 - DNA, 446 bp, Homo sapiens
acttaagcaaaaataatgatatagagtggggtttttaatatagataaaatgaacatttatgacagtagcataaagggtgacatgagagaatcagaaatatacttggccctccatatacttggattccacatctgtggatgcagtcaaccacagatcaaaaatatttgcggcagggcatggtggcttacacctgtaatatcccagcactttgggaggccaatgcagaaggactgcttgagcccaggagcttgagaccagcctatgcaacacagcaagaccccatctctacaaaaaataaaaaagttagccacgcatggtgcacttgtagtcccagctgctcaggagacagatgggaggatcgcttgagccctggaggttgaggctgcagtgatccaagattgtgccactgcactccagcctgggcaacagagggagaccctgtctca

SEQ ID NO: 224717 - DNA, 485 bp, Homo sapiens
cttcccttcagccctgcgtattttaccacggataaacggtgttccattatgcgcctgctctgtcccatttccgtagtgtcttttttttatgacaaagcacagctggtcaaggtgttatcatgggtctgagtgcacgagtgtttgttgctgcacgttccccatccagtcactaagcaagacacagaactgtatgaaagcttatttttacttagtttcatcttagagtcacatttgaacttgtgagtttcttttaaatgaaactgtgtttaattttgagatttgctgctagggggaggactccttacgctttttgaagttagtaacagccctctctagtagaatgtgcacaaaaacggttaatgtgaattggtgggcttgtttctgtgctttgttttgagtgataatacaagggcctacatcatagggggttttcagggttaaattcattcatttcaaataaaatatttagaatgatgtctagcaca

SEQ ID NO: 224718 - DNA, 330 bp, Homo sapiens
gtattggtttcttttcattagtaagaatgaaaatagaattttaagaaatgaacttgtacattgtaaatcacatttattttaagaagtattgggtctcatgtttcgttttcttaggctgtcagtatagtggtggttcttcaccttttagggagtcagagacctctttgagaatctatagaccatttctccagaaaactggacttatgtagataggcacaaaattttgcttataattctaaagcattccgtggacctctgaagttcttctgtggaacttctgagcctctgattaagaatccttgaggtaataaaaatgtattggtctcgtat

SEQ ID NO: 224719 - DNA, 526 bp, Homo sapiens
gggagattccgttttgaacacattgcaaattagatgcctggaggcatccaggcaacgagagacacctcccttcgaagcgtgtatttagcctgtcccccatcttcctttaattcttattgctgtcctatttcataacctcataattgcagtttctaaacaaacattttttagatttatagaacagtttcaaagatcatacagaaagtcctcgtatccccttcacccagttttccctaatgttcacatcttacatatcatgatatatatttgtcgaaagtaaaaaaattgacattgagccaggcacagtggcacgtgcctgtaatccaagctactcaggaggttgaggccagagggaggatcgcttgggtccaggagttcaaggccagcctgggcattgtggtgagactgcatctcgcaaaaaagatattaacatcagccacatactgttatctaaaccatacacttttatttggattagttttcttttccaggatccaatccaggatactacattgcatttaacata

SEQ ID NO: 224720 - DNA, 193 bp, Homo sapiens
ccgggcatccagaacccataccggggcaccgtggtgtggatggtacctgagaatgtggacatctctgtgaccctctacagggtgagtctctagccctccagcatggatggcaattgcaacacaggcagttgcaacaattgcaacacaggtctcctggtaggttgttcatccagatagaagaggatgcgggggg

SEQ ID NO: 224721 - DNA, 690 bp, Homo sapiens
gggaatataggacaagtcagaaagtccaagcatgttgtagatgacctatgtaagtcacgataaagtttatacaagagaatttattaaaatttagatgtaattagccataactgaaaggaaatttatttatttatttatttatttatttatttatttatgatttattttgagaaggagttttgctcttgttgcccaggctggagtgcaatgtcatgatcttggttcactgcagcctccgcatcctgggttcaggcatttctcctgtctcagcctcctgagtagctaggattacaggcatgcaccaccacacctggctaattttgtatttttagtagagatggggtttcatcatgtttgtcaggctggtctcaaactcctgacctcagttgatccacccaccttggcctcccaaggtgctgggattacaggcatgagccacctcatgcacccagccaggaaatttatatataatactctatctaaattttggtgccctatgttaaaacaagtttttcttcaagtattggtttgctttcagtaagattgcaagaaatattgacttttaattctagaatctgtttcctttgaaggcctctcagatttatatcttttccttttcccttgaaaaggtatagcctttgcaagttcaaaactgacttccctagactccttttaggaaaagcaatacag

SEQ ID NO: 224722 - DNA, 155 bp, Homo sapiens
tctaatgctgtgtatatccattaagggtaatttaaagcaattaaatgctaacctggctggacagccaggtgtaggtttgtggcatccagaaagaggagatggacttggtggattctgaattggtcagttccacctcttcgtgttttggaggcttt

SEQ ID NO: 224723 - DNA, 726 bp, Homo sapiens
actaagaggcaacgtcaagggaagggtgacattctggtaaaactgatttgacaggattcttgctgaaggcagaccaggatgatcgaatgtcatctggaggatggtggaggatgatgaatttgattagatgtcaagagtggaggattcttgctaaaactgcaagaaatagttttgtgatgcaaagatgaatacaggagctcaaaggtcaagtcctggttaagtagagggttcagaggaatctgactaaagtgtggccaaggagagattatttgtcaccctacctattatccctagcacactgtggtataattggaagaaaatttccaatcctcttctccctcaagagagaaaaagagaagggaaccaaccatgagtccaatgcgcaggccttttgacagttcgcccaaggagcagatttctatctctcctgacttggagtgctgatggaaacagcggtttaaatgccaggctggggtcactgagatcaaaggtgagtgccacagcttgttatggcaacaataagactgtagtaccacagacagacaccaaggggagcaagagattatgggctgcagaaaagaggcaagcaaacctttgaggaattatatccacagcccagaaaagacttattgccaaaaagaagttagaaaaagccctagaatctctagcgggttgactggtgaaggtcttaccctgtataaagccagcctgaaatgcccaacgctt

SEQ ID NO: 224724 - DNA, 562 bp, Homo sapiens
ggttacggattgaacactgaccttttctttcactcttctgcaagacaaccccataagaaagctgaaacctgcttttgtgaaagcctatgattactataagacaggtgagcaaaacagaatcctagataaactcagttctttccagtgtggtgtctttgatggaaaaataaaataaaagccaatgtgtttggggtttttttcttttttactttatatagatttagggggtacaagtatggttttgttacatggctacattgcacagtggtgaagtctgggctttgagtgtagccatcacccaattagagtacattgtacccattaagtgatttcccatccctcttgccctgtcaccctcccacccttctgagtctccagtatctgttatcccactctctatgtccatgtgtacaaattatttagctcccacttataagtgagaatgtgaagtatttgacctcctgtttctgagttatttcacttgagatagtagcaacaagggtggaagtggaggccaaacctcaattcttaaagcaataaaagtgtggtaaacccttgtaca

SEQ ID NO: 224725 - DNA, 786 bp, Homo sapiens
gatggtagagaaaaagcctgattggcatgggttcaacagaagatgggaggaaaagaactcggagcagtgaatagagacaacattttcagaattttttttgaaagaggggcagaggattggaataggagctggagagttgtatgggtttaatgaagatttctttttttcttttagcttaagactagatatattttgacatgcttgtatgatgatgagaataatctagtagaaagagatcattgatgatgcataagagaggtgacaattgctagagcaatgtccttgggtagataagagagcatgaaacctagagctaagtagggttgaccttcaataggagcatggacaaatcaggcatcgttgcaggagtaaagacaaactatccggattcagctgtaagtatattggaaaatatgatggtagaagcctgtgatgctcttatctgattgcctctattttctcagttcaataaggaagcaaattcttcaactaagactaggttagggaagcaggaggtttggagacttcaaggcaacagaggatgtttggacttgggaaacagcagacttgccaggtagcactaaggacccagttgacattactggtaacaaattttaagtaaaagcacttagcttagctgcgtgttttcctccagctggatttagcttcctgtctgcttgctacatggagagcagtgtttagagtgatgaatcaggggatgtcagctggtaaaggacggtgggtggctgaggcatgtgggaacacaagatcattggaggacagaag

SEQ ID NO: 224726 - DNA, 420 bp, Homo sapiens
tgcatatgggaaatgttgaagcaaaagcagtgaacaatgactcaagtttctggccccaggggtctggattgcagtgctgttcaagaggtaagagttacatgaggagagacaactttggggtagaagatgcatcacttctagacaaattgtgttcaggtgatgtctagcagatagttggatatgtgagtatggaggatgggagagaaagctgagatgagcggcacactgaagcttttgagcctcagtttcttcattcgtaaagtagacttcatttgtaaatacccttgcagagctttagtgaggattaaattagcttatgtaaagtgcttacacattgtctgacagtaattttaacaatgatcattatatgttaatttataagctctacagtatgataataaatgttggaaattagtgtta

SEQ ID NO: 224727 - DNA, 410 bp, Homo sapiens
aatgagagggaaaaagaaaggaaggaggataggaagaatggaattagaagctggtacagaaaagtacaaggtaatttagaatttctgaagtagttgactaagtggaagtactactgtgacatggggtaagattattctctaagcctcagtttgcttatctggaaactgaggaatatggagataaaaatatttgctttgataggcctaaaagagatattgtgaggaccagttgaagtagtgaataggaaagggactttagttaaaaagggaattgctgttctttcagctgaagagtcctgtcagtttgttcacggtttttaaatagatggtctgaaggattaggatctttccctctttctatttaattttggagcaccacccagggcaacatactgagacttggtctgtac

SEQ ID NO: 224728 - DNA, 445 bp, Homo sapiens
gactgcttcattggaataatctgaattacacaccacacctctccacagattttataattaagctcaaacttgtaacagtttgtaatattcttttgtaagaaatcaattttcctggaagaaagagatgtttagttttgggcaccagtgttgtgagatcactggaattaaggcaaacagcaaaacccatagtatttgtataccatgatgagacagccaaatgcctaggcagataaaacagtgtccccagagaacctccgacccaccccacaagtgttgacatcagatgcttttgtgcagatgagggaacctgcccagggcctcgtctgagcctgcccacacgtgcactgggggaacggggtggagccacaggcagcgggaggagcctggctcttcagttcttgtgtggtgacctgggattcaatctgtgaggtgggggacttgttag

SEQ ID NO: 224729 - DNA, 638 bp, Homo sapiens
gaagtgaaggaggagaaagagatgagaggaaaggatttgtttcctgtggccacagctgtagccctggtcctcaggaagccatattcaggagggaaggggacatggagtcaatagccctccttgtgccagctttacccatctgcaggagctcgcggtggctgtgtgcagaccgtgaattgacactgctagcttccagtccccaccctaacactttccagctgtgtgatcttgggaaggttatttgatctttttttgcctgtttcctcatctacaagaattaaataataaaatatccctggttaggcattcactaagtgttaattatttatatggagttgattgcttaactagtgtaaggggccatctggtatatttctgttgcttcagcgtaattattaataatgacctcaaaagagccctgctttggttgatttggtcattctaccagccctcagaccccagtttccttgtctgaaatggaaggagtttgcttgagcagtgattctcaaagttggtcctggggccagcagcctcagcatcacttgagggtggggccagcagcctgtgtcttctgaaacgtgcccaggtttgaggactgttcccttcatcttttatagctactgctttaaagttcacta

SEQ ID NO: 224730 - DNA, 539 bp, Homo sapiens
catgttgggcatccccgtaattgcttattgtttattatccgtctctattaaaaatgcccaaattagctgggtgtggtgggacaagcccatagttccccgccacttgggaggctgaggcaggagaattgcttgaaccctggaggcagaggttgcagtgagccgagatcatgccactgcactccagcctgactgacagagtgagactctgtctcaaaaaaaaaaaaactcagggccaacagcactataattcgtgtctgaatgaagcttatctaacacctcccatagttcttgcacttagcaacactagaaagcacttcagtactacacgtggggacccaagaaaatgtacaaaaatgaaaaaaatgtggcactaactgcatcacgagaaagccttgtttagtgtgtgtcaagcaactcaatattcttgccactcttaattttgatttgaaagtaccacaaatactgatttgggggttacagataaattttagtgagtaggcagattcacagataaagactgaacagtgaagactatttgc

SEQ ID NO: 224731 - DNA, 496 bp, Homo sapiens
caaaccccggcctcgaaggtcccactccgtccctttccttcctttgtgttcctggcctttttacttcccttgcttttcctcttgggcattagagtgggttcagcccaagcagaggaatttatatttttattccacctgggcgacagcaagactctgtctcaaaaaaaaaaaaaaaaaaaaaactcagggccaacagcactataattcgtgtctgaatgaagcttatctaacacctcccatagttcttgcacttagcaacactagaaagcacttcagtactacacgtggggacccaagaaaatgtacaaaaatgaaaaaaatgtggcactaactgcatcacgagaaagccttgtttagtgtgtgtcaagcaactcaatattcttgccactcttaattttgatttgaaagtaccacaaatactgatttgggggttacagataaattttagtgagtaggcagattcacagataaagactgaacagtgaagactatttgc

SEQ ID NO: 224732 - DNA, 566 bp, Homo sapiens
gattctggatcttgcctggctgggaatgagggctccagcagcaaggcttagggtttgaaggggaaatagtgtgtgtgttttaaggggctcagggggagatgtctttggatatacatgaagagtgcttagaatagtgctaagcactcaataaattttagctattaacatatataatgtactgtgccttttgttataaaacgcagacctttaaatagaaactagaagggccacgttcttggaaaaaatgttcagtgttagaagcagtaattatgtattaataattatgtaagtgccaaatttggagcatgcacataatgttgatctctctctacccctcaccctttcattcccttaggccattttggaggaatacattttaaggcgggaacctcggatgtgttacgtaacaaaggccttcttgtgttactgtctagtggatcagtaggcaaaaggaagaaacacattctcaaagcatggtcagattccttaaaatgtacttagataagggggaaaagggtaagaaatctagtaaaggtgtggtgcatgctaattgatggggaagacaa

SEQ ID NO: 224733 - DNA, 234 bp, Homo sapiens
ttggaggggttcttatgcaggaatatgtaatgagaacacccctaatgacctgagctcaaaccagaagtattatttaatcccttttctgtaaaaaagtagaaatttaggttcttgatgtgctctttatggcagacagaaatgacaagtcagagtgttttaaactctttgtttccaggctactgggtgaatataacacaggagatatttattcagggcctctgggaagctagagaa

SEQ ID NO: 224734 - DNA, 497 bp, Homo sapiens
gagacagtcagattccacagagcatgttttggtgtggattggatgagttaggttctgtattgccccacatgaccttttacagacatggggacttaaacagtgtattttctttgtctctctgcgttagcttcatcttcagtgatgaaatcttgttgcttcctgaagcattaaattcagtgagttgagagtggccaaaatgtcttttcagagccaccaggtgtaggtcacacagaggggacagaactcttcaggtggctcaagtctcaggagcaatctagatacagggagaagccatttgtatcccactgagtcctgtgatgctgcacacacacagctgagatttacagaggccgggcggggagggctgctgagagggggtaatggcatgacctgccatgctgcttcagatgcctgggagactgggtctgtgccatttgcatatgtcctctgtacccattcctgatgaaggatgcaattgactcaactcaagcaggtca

SEQ ID NO: 224735 - DNA, 374 bp, Homo sapiens
aacgaaagaggaacagggcctgacaatgttcagagaaggaaaaccgaagaagtaaccatccccaagttaaaaatgacgtggggatgaaaaaataggttgcctgttgtatttgtcattgaaatgcacaatcttgtttactgtttatcttgagactctgggagctctcctgctgcttaggaaaaaagaggcaaaggtttaggaagaaatgctagtcataagaaagagaggcattagaaaccctagagagaatgggaggtgtaaatagtatgtgggcatttggcaatcaccacaaagaaatgggagacaaaggcaagtgtctgatgccagaaatcctaaaaacttgagtggaaaacccagacacaataaaaatgtcc

SEQ ID NO: 224736 - DNA, 427 bp, Homo sapiens
tcagcaaaggggcagggcctggctttgctacaagatagaggactagacaccaggcccagggtgtgagtctgcctctgctgtttaccagatgagagagacctcagccaatcagcagcctccttcctggatggttgctgctcctccagacctgctgcgtttcatcacctctccagcacccaggctcaggacgtgcagacacaggggtgctctgaccggccctgccgagtacagtctctcctgtagcatgccggcctccacctgcgcacacctacgtgacatgaccagaaccctccttggcccagccccgcccatctgcaaggaaggccccaggatacaatggaacatcgggcccttttatttccaagtctttctttttgtcttctctaaaataaagcaaatagctattatatagctagaaatagtacaa

SEQ ID NO: 224737 - DNA, 395 bp, Homo sapiens
ataactcctttgctcggatttcttgctgacatttctttttggtgggagtcaggggtgggagttcactctgaatgcttactatacctcctgctacagctctgtggcattttcataaaataccaaccaccaaaattctagtaatcacaaaaacatgtgctttctcctcatatccactgaaattctttctctcattaaaaaatagaagtctcagaaatgtaattagaaagctaaactcgatatctttacattcctttggtttcaaggcgggggaagaaagctgcagtttttctaatttcccttcagttcaatgctactcttgaatggggaaaatgatacaaaacgtctgaagaattgagagtctgacaagaggggaggatttgtatttccttgttatt

SEQ ID NO: 224738 - DNA, 759 bp, Homo sapiens
  misc_feature (674)..(674): n is a, c, g, or t
  misc_feature (682)..(682): n is a, c, g, or t
  misc_feature (737)..(737): n is a, c, g, or t
gagagtccgtcagtccgggacgaggtactgagaaacttttttttttgtacctttaattggtgcgttcggctgaaaggcggggcctggtaaaaaaaaaaaaacagaactgctgctgaggcggaggagaggacttaaggactatgggtttatcctctggccggaccaaagagaagatatttactccagtgagtgcgaagtgagtgcctcgttcacacccacagtcgcgccgtcccctcttcccgctctggggccagcaactcttgttagaatgcagatgccttttgtccatggactgtgaggcagcagacactctctgcgtaggatcatcatgccgagcataaactggactttcccacttgcctggcaggagtcacacagatccctgcgtgctaaatgaacatctgaggtctttgaggaatcgccacactgttttccacaaaggtcaaactaatttacactcccaccaacaatgtacccttgaatcctgactattggagaaacagcaccatattttggatactgattcagaccatatacagccttctggagaatcttgccccagtcctgaaagttctggctcattgtataagagaagtttgctgccttagtgagatttgttttggtatcaggatgatgctggcatcataaaatgagtatttttcttcagacttcanactgctgngctggaagcaagaatttcaagcattggatcttagcttgctgggctccataggggnggggatccactggagctagacc

SEQ ID NO: 224739 - DNA, 393 bp, Homo sapiens
gagagatgaattcttgctctgtcacccagactgtagcgcagtggtgtaatcatggctcactgcagcctccaactcctgagttcaagcgatcatcctgagtcccagggattacaggcgtgaatcactgcacctggctacctctgagattcttggtcagtttctgcagccaggctgacaggcacctcaggtgaacaaaagggtaaaaacctggatttggccatgagactagccctgggattcctggaacacttgaggctcctaaggacttcaacactgtcttccccaggggagtggggagctcacaggcagctcttaggtgaatggaccatgccctgcaaggcctctcccaaagtggaaagaaacccacagaggtacctgcagctctctgatccc

SEQ ID NO: 224740 - DNA, 411 bp, Homo sapiens
aaaaccattgactagtacactttaaatgggtgaactatatggtatatgaattatatcttaataaatctcttggaaaaaataaagaatacatctaacaaaaaaaaatttaagggatatttattccttttccaattgttataataaaaccaggtggaagagaatggttgtagcagttagaaaaaaaaagaatacaaatctggggtttggccattaaaagttattcataaaaatgagagaagaaaaggcaagaagaagttatttcacattacagacctctccctggccccaaagcctaacatgtgcttaccgagtcaaaaaagagacacagttgattcacaagctgaaggttggaacttgaatagaaccctaggcagggcagtgcccccctgcccggcccaggtgccactaggc

SEQ ID NO: 224741 - DNA, 400 bp, Homo sapiens
tcttcagaccctgcctgtaactgctgtgagaggaaggtggtgttatcctgatccacagggcaagaaacagtgctcagagaagtgcaataacttatcaaaggccacacagcaagtaagggggcaggcagagctggaacccacttagctacagattccaggcccctcttctctttccttttcggcccctgttctctttccttttcgcctagaaagttgcacttttagaaaaatctaatttaaaaaacatgagaataatattatatatagtgtaactgagaagctcaagatgtaacatatttttcaaattgtcttttccaatcaagacaagaaaagctaaggttgtgagatgacaatactttggccagtttgattgaataaaaggatattcaacccactaaag

SEQ ID NO: 224742 - DNA, 390 bp, Homo sapiens
gcacgagtgaagagtatatggaattgcttctttctattaaagccaacctacattggcaaaaagtgtggagaaaatcagtgtgctcaattctttttgtagagtttcatctaaaatgttgcaggtaaaaaagaaaactttaattggtactttctacggtgtgattagaaaaattagtatctatctctgttggttctgctgacttgcttctttccaccgaatctaaatgcaatgtcataggaggaggtttgctgtaaaaacatgtctttttctttggtgtattcattgtaattatggctggcagtgagaaggttcggtaagtctcaatttctctacctcctttacttggagaaaatttgtaaatgtaccctgtgaataaaatgattttttata

SEQ ID NO: 224743 - DNA, 332 bp, Homo sapiens
tctgtgtgccacgaaacgaaaaagtttaccttcgagttgcagactaaagccagctttggaatgagtgaaaaacaattcacattaactctaggaaatttttaaaggccaaaaatatcttgataatttcagctgctaagtaacaggataggttttttccccctctcctcaatatcttttctcttcctattcccattgttttcctagagggtctctctggtaagcccgagagaaaagagatggtaaggcgctaacacactgaagttctgctgcaagtgtcaatgttaacaatataaaggtctgtttgtcttgcagataatttacatggaaaggcc

SEQ ID NO: 224744 - DNA, 1416 bp, Homo sapiens
atttaataattaatggttattgatttattacaattttataaattaatttactaatttacaaataactttctgagctcttacatgtgcaggcactgtgctaggcctgttacaaactctggagaactgagttatccccatatacagatgcagatactgaggccctttggggtgggtgacagctcagatcccacagctagtgtggcacaggcaggaacgaagcccggggtcttttgatggtagctgaaccgcacccagacacccacccgtgtctgccagcactccgtattggctgggaaacactccctgaatccaaaggtgcctgtttagtcagttaccagccagtggtcctcaagtgtccccacctgtaagatgggggcgccctgccccagtactgcagcctcgcgaccccctggagggtgggggacggtagctcaggcgagagtcttccggctgccccggggagggaggaaatgagccggcggcaggggcgggttttcggcggggccaacccacggtggggggagcgcggccatggcgctcctgctttcggtgctgcgtgtactgctgggcggcttcttcgcgctcgtggggttggccaagctctcggaggagatctcggctccagtttcggagcggatgaatgccctgttcgtgcagtttgctgaggtgttcccgctgaaggtatttggctaccagccagatcccctgaactaccaaatagctgtgggctttctggaactgctggctgggttgctgctggtcatgggcccaccgatgctgcaagagatcagtaacttgttcttgattctgctcatgatgggggctatcttcaccttggcagctctgaaagagtcactaagcacctgtatcccagccattgtctgcctggggttcctgctgctgctgaatgtcggccagctcttagcccagactaagaaggtggtcagacccactaggaagaagactctaagtacattcaaggaatcctggaagtagagcatctctgtctctttatgccatgcagctgtcacagcaggaacatggtagaacacagagtctatcatcttgttaccagtataatatccagggtcagccagtgttgaaagagacattttgtctacctggcactgctttctctttttagctttactactcttttgtgaggagtacatgttatgcatattaacattcctcatgtcatatgaaaatacaaaataagcagaaaagaaatttaaatcaaccaaaattctgatgccccaaataaccacttttaatgccttggtgtaagtatacctctgaacttttttctgtgcctttaaacagatatatattttttttaaatgaaaataaaaccatatatcctattttatttcctccttttaaaaccttataaactataacactgtaaaaaaaatc

SEQ ID NO: 224745 - DNA, 4219 bp, Homo sapiens
  misc_feature (382)..(382): n is a, c, g, or t
  misc_feature (407)..(407): n is a, c, g, or t
  misc_feature (439)..(439): n is a, c, g, or t
  misc_feature (459)..(459): n is a, c, g, or t
  misc_feature (488)..(488): n is a, c, g, or t
  misc_feature (537)..(537): n is a, c, g, or t
  misc_feature (543)..(543): n is a, c, g, or t
  misc_feature (562)..(562): n is a, c, g, or t
  misc_feature (635)..(635): n is a, c, g, or t
  misc_feature (638)..(638): n is a, c, g, or t
gttttctaacaatcgaaattactttttcatttgacattgcattggaaacattattccacaacaatataaatttaaatatacattgagattatttttttccaatttttattttattatgtttattttattttattcgggggtacatgtgcagatttgttacctgggtatgagattcttaacatagatttcagtgtatataatataaccaactccgttaagattggaaatttagatatttgtattataagcaatgttgggttaagctatgttaatggatctttgtccacttgcctaattatgtccttaggataaatcctaatcagtggaagtgttgattcaaagactatcatctttttttttgtttgtttttgtttttgagacngagtctatctctgtcacccaggctngagtgtagtggcgcgatctcggctcactgcancctccacctgccaggttcangcgattctcctacctcagcctcctgagtngctgggattacaggcacctgccaccatgcccagctaattttcttttgtntttttngtagagacgggatttcacngtgttggcaacgctggtctcaaactcgtgacctcatgatgtgcccgcctcagcctcccaaagtgctgggattncangcgtgagccaccgcgccggcctatcatctattcttaagtattttgatacctgttgcctaaattgccctcctgaaaagttacatcaatgtatgctccaaccagcagtgttcaggaggatccatttctctacaacctcactgacactgagtatcaaaattcagaaaggttgaatatacagtacagtcaatactagtatactcttcatccagattaatgaaatgttaactttttgcaatatttattttctttttttttctggattgtttgaaagtaaaacattatttttctgtctctttttcttccttttctttcttttttttgagatggagtttcactcttgtctcccaggccggagtgcaatgacatgatctcggcacattgcaacctccgcctcccgggttcaagcgattctcctgcctcagcctctcaagtagctgagattataggcatgtaccaccatgcctggctaattttgtgtttttagtagagacggggtttcaccacgttggcctggctggtctcgaactcctgacctcaggtgatctgcccgccttggcctcccaaagtgctgggattacaggtgtgagccccatgcctggccttttttttctttttctttaaaaaaattttttgacaccagtgtcactcaccaataaaaaatttattctttttgtttttttttgagacgtagtctcaagagtgcagtggtgtgatcatggctctctgcaggctcaacctcctgggctcaggcaatcctcttgctttagctacccaagtagctgggactataggtgtgtgccattgcatccagccaattttttttcttcttctttttttttttttaatgtagagatggagtttcgccatgttgcccgggctggtctctaactccagggctcaagtgacccacccaccttggtgtcccaaagcactgggattataggtgtgagccaccctgctcagccaaaaagtttattgttaatttgatgtgtatcatggtcttcagccctaatttcaataacctattgggtgcttgggattacttgtacatgtaccacatcctacagttttattatacctagtgatcaagctttgggcaaaggagaaattcagttttcagtagcatcattggaagtattatgacttgtgcttaaacttttaccagtgcattcttttgataaatagaaatagtaacaaaatatgaattttaaatatgtggggagatacataaagaacattgcttatttgttcttgaaaataacagtgattcaaatatttcattcagatttacctatgcctaatgaaaaaaatgatgcagaacttgattctccaccttcaaagaaaaaaagattaggttttttccagacttatgatacagaatatttaaaagttggttttattatctgtcctggatcaaaagaaagttcaccaaggccacagtgtgtcatttgtggagagatcttatccagtgaaaacatgaagccagcaaatctttctcatcatttgaagacaaaacattcagaattagaaaacaaaccagtagatttttttgaacaaaaatctttagaaatggaatgtcaaaatagttctttaaaaaagtgtttactagttgaaaagtcacttgtgaaagcttcttatttaattgctttccaaactgctgcaagcaagaagccattctccattgctgaagaattaattaaaccatatttagtagaaatgtgttcagaagttttgggttcaagtgctggagacaaaatgaaaactattccactttctaatgttacaattcaacacaggattgatgaactatctgcagacattgaagaccagctgattcaaaaggtcagagagtcaaagtggtttgcccttcagatagatgagtcatcagaaatctcaaatatcacacttcttttgtgctatattcgtttcattgattatgattgtcgtgatgtaaaagaagaattattattttgcattgaaatgcctactcaaataactggctttgaaatatttgaactaataaataaatatattgatagtaaatctctgaattggaaacattgtgttggtctctgtaccgatggggctgcaagcatgactggcaggtattctggtttaaaagcaaaaattcaagaagttgccatgaatacagcggcatttacacattgttttattcaccgtgaacgtttagtggcagaaaagttgtctccatgtttacataaaattcttttgcagtcagcacaaattttaagttttataaagagcaatgcattaaattcacgtatgttaacaattttgtgtgaagagatgggatctgagcatgtgagtttaccgcttcatgctgaagtacgttggatatcaagagggagaatgttaaaaagattatttgaattacgacatgagattgaaatatttttaagtcaaaagcattcagatttggccaagtattttcatgatgaggaatgggttggaaagctggcctacttatcagatatattttcacttataaatgaattaaatttaagtctccaaggaactttgactactttcttcaatttgtgtaataaaattgatgtatttaagagaaagttaaaaatgtggttgaagcgcacacaagagaatgattatgacatgttcccttcattttctgaattctcaaattcatcaggcttaaatatgacagacatcacaaggattatttttgagcacctggaaggactttctcaagtgttcagtgactgttttccaccagaacaagacttgcgttcaggaaatttgtggataattcacccttttatgaatcaccaaaataataatctcaccgacttcgaagaagaaaagctaacagagctatcttcagatttaggattacaagcactatttaaatcagtgtctgtaactcagttttggataaatgcaaagacaagttacccagaactccatgaaagggcaatgaaatttttattacccttttcaactgtttatttatgtgatgctgccttttcagctttgactgagtcaaaacaaaaaaatctgttgggttctggccctgccctaagacttgcagtcacatctttaattccaaggatagaaaaattagtgaaggagaaagagtagcaatatgcacattgcttaacagtgaagtcaataatcctgtgttaagttttgtataagtatcctaaaagataatttcctaatgtggatttgtgttttcagtgattaaatgttttaataatttttccctttttgttgaggaatttaataattatgattgttataaataattatgtataattataatctagggtagaaaatttagttatttcattaaatttggactagtgacaaagactgcaggtaatgagaagcccagtttataatgtaacagcacaacctggatgttgaaacagcttggcctttagaagcaagtggaacatttcagtcttctagccaaccagctacttacccctgcaaggttgtgagtaggtggaaaagatagatcttttttttgagatggagttttgctcttgttgcccaggctggagtgcaatggcgtgatcttggctcactggaacctctgc

SEQ ID NO: 224746 - DNA, 1473 bp, Homo sapiens
aagggacgcgttgacattcactggctagtccaccgctctcagtcggagaccacattgcctcgaaggcgattgtgaagcggggctctgaggggcttgatgccccccacccctcacacggagaccttgaaagaggtgtccaactatccattaccaagaagaaatctattcgtttgagcctgagacactctttgaggtaaaaaattagaatgaaagaacctttggatggtgaatgtggcaaagcagtggtaccacagcaggagcttctggacaaaattaaagaagaaccagacaatgctcaagagtatggatgtgtccaacagccaaaaactcaagaaagtaaattgaaaattggtggtgtgtcttcagttaatgagagacctattgcccagcagttgaacccaggctttcagctttcttttgcatcatctggcccaagtgtgttgcttccttcagttccagctgttgctattaaggttttttgttctggttgtaaaaaaatgctttataagggccaaactgcatatcataagacaggatctactcagctcttctgctccacacgatgcatcaccagacattcttcacctgcctgcctgccacctcctcccaagaaaacctgcacaaactgctcgaagtataaaattcttaacatccctttttactttacctttttttagtgtgtatattgtttagttcaaacatactgttgatactttaaatctcttcagcatgtatctgtagaaataactttttagttaatggaagaattcaccaattttaaagttttgcaacattaaataagtgacttggtgttagaatattgcctaaaccagttttctatcactttaaattttactatggaaagaaataacaaatgacatgtgggaattgcaggactatcctgtaattgtagacacccaccatttaaatttatttaacagttatcttgaaagctattgggtatagcataaaataatatcactcttttaatagtatacaaaagctatttaattctttaaaaagtaaaaactctacatggtcgcaaaaatgtgtttatttctaatgtccttgtggggtcattgttgctttacaataatgcttagatgcagagagaggaaaaaacagcaacaaagtcacataaatctttccctgacttagtacatttgaaggatttggcatattttgcctatttctgtggtagtgtaatttgaggaatacagtgtgttgttaatagtcactacaggcaaaaaacagtaagagcttgcttttaaattgtggctctgtcatttatctctgtgacttcgggctagatgtttaactttctaagcctccatttctcatcagtaaataatagttgcttcctaggactttaatgagacagtgttagcaaatggcctagcacatagcaagtacttaaaaaatggaatcctgttattattaataataaaaattatatcgtgcgattatttataa

SEQ ID NO: 224747 - DNA, 1060 bp, Homo sapiens
  misc_feature (28)..(28): n is a, c, g, or t
agcgggagggcggagaccaacgctgcgnaggcgtggttggccggtcgttgcgttgggatggatcaggcggaattccagaagagaaaataatccctgtctagatgcagaggacttggttcctattccagtgctcctccggtagcagggaggcgacagaaggtgtccaactatccattaccaagaagaaatctattcgtttgagcctgagacactctttgaggtaaaaaattagaatgaaagaacctttggatggtgaatgtggcaaagcagtggtaccacagcaggagcttctggacaaaattaaagaagaaccagacaatgctcaagagtatggatgtgtccaacagccaaaaactcaagaaagtaaattgaaaattggtggtgtgtcttcagttaatgagagacctattgcccagcagttgaacccaggctttcagctttcttttgcatcatctggcccaagtgtgttgcttccttcagttccagctgttgctattaaggttttttgttctggttgtaaaaaaatgctttataagggccaaactgcatatcataagacaggatctactcagctcttctgctccacacgatgcatcaccagacattcttcacctgcctgcctgccacctcctcccaagaaaacctgcacaaactgctcgaaagacattttaaatcctaaggatgtgatcacaactcgctttgagaattcctatcctagcaaagatttctgcagccaatcatgcttgtcatcttatgagctaaagaaaaaacctgttgttaccatatataccaaaagcatttcaactaagtgcagtatgtgtcagaagaatgctgatactcgatttgaagttaaatatcaaaatgtggtacatggtctttgtagtgatgcctgtttttcaaaatttcactctacaaacaacctcaccatgaactgttgtgagaactgtgggagctattgctatagtagctctggtccttgccaatcccagaaggtttttagttcaacaagtgtcacggcatacaagcagaattctgcccaaaatcctcccactgcctccgg

SEQ ID NO: 224748 - DNA, 449 bp, Homo sapiens
tgcggtgatctagaggatcccgcgatgctctcaccgacttcgaagaagaaaagctaacagagctatcttcagatttaggattacaagcactatttaaatcagtgtctgtaactcagttttggataaatgcaaagacaagttacccagaactccatgaaagggcaatgaaatttttattacccttttcaactgtttatttatgtgatgctgccttttcagctttgactgagtcaaaacaaaaaaatctgttgggttctggccctgccctaagacttgcagtcacatctttaattccaaggatagaaaaattagtgaaggagaaagagtagcaatatgcacattgcttaacagtgaagtcaataatcctgtgttaagttttgtataagtatcctaaaagataatttcctaatgtggatttgtgttttcagtgattaaatgttttaataatt

SEQ ID NO: 224749 - DNA, 3156 bp, Homo sapiens
  misc_feature (28)..(28): n is a, c, g, or t
agcgggagggcggagaccaacgctgcgnaggcgtggttggccggtcgttgcgttgggatggatcaggcggaattccagaagagaaaataatccctgtctagatgcagaggacttggttcctattccagtgctcctccggtagcagggaggcgacagaaggtgtccaactatccattaccaagaagaaatctattcgtttgagcctgagacactctttgaggtaaaaaattagaatgaaagaacctttggatggtgaatgtggcaaagcagtggtaccacagcaggagcttctggacaaaattaaagaagaaccagacaatgctcaagagtatggatgtgtccaacagccaaaaactcaagaaagtaaattgaaaattggtggtgtgtcttcagttaatgagagacctattgcccagcagttgaacccaggctttcagctttcttttgcatcatctggcccaagtgtgttgcttccttcagttccagctgttgctattaaggttttttgttctggttgtaaaaaaatgctttataagggccaaactgcatatcataagacaggatctactcagctcttctgctccacacgatgcatcaccagacattcttcacctgcctgcctgccacctcctcccaagaaaacctgcacaaactgctcgaaagacattttaaatcctaaggatgtgatcacaactcgctttgagaattcctatcctagcaaagatttctgcagccaatcatgcttgtcatcttatgagctaaagaaaaaacctgttgttaccatatataccaaaagcatttcaactaagtgcagtatgtgtcagaagaatgctgatactcgatttgaagttaaatatcaaaatgtggtacatggtctttgtagtgatgcctgtttttcaaaatttcactctacaaacaacctcaccatgaactgttgtgagaactgtgggagctattgctatagtagctctggtccttgccaatcccagaaggtttttagttcaacaagtgtcacggcatacaagcagaattctgcccaaattcctccatatgccctggggaagtcattgaggccctcagctgaaatgattgagactacaaatgattcaggaaaaacagagcttttctgctctattaattgcttatctgcttacagagttaagactgttacttcttcaggtgtccaggtttcatgtcatagttgtaaaacctcagcaatccctcagtatcacctagccatgtcaaatggaactatatacagcttctgcagctccagttgtgtggttgctttccagaatgtatttagcaagccaaaaggaacaaactcttcggcggtgcccctgtctcagggccaagtggttgtaagcccgccctcctccaggtcagcagtgtcaataggaggaggtaacacctctgccgtttcccccagctccatccgtggctctgctgcagccagcctccaacctcttgctgaacaatcccagcaagttgctttaacccatacagttgttaaactcaagtgtcagcactgtaaccatctatttgccacaaaaccagaacttcttttttacaagggtaaaatgtttctgttttgtggcaagaattgctctgatgaatacaagaagaaaaataaagttgtggcaatgtgtgactactgtaaactgcagaaaattataaaggagactgtgcgattctcaggggttgataagccattctgtagtgaagtttgcaaattcctctctgcccgtgactttggagaacgatggggaaactactgtaagatgtgcagctactgttcacagacatccccaaatttggtagaaaatcgattggagggcaagttagaagagttttgttgtgaagattgtatgtccaaatttacagttctgttttatcagatggccaagtgtgatggttgtaaacgacagggtaaactaagcgagtccataaagtggcgaggcaacattaaacatttctgtaacctattttgtgtcttggagttttgtcatcagcaaattatgaatgactgtcttccacaaaataaagtaaatatttctaaagcaaaaactgctgtgacggagctcccttctgcaaggacagatacaacaccagttataaccagtgtgatgtcattggcaaaaatacctgctaccttatctacagggaacactaacagtgttttaaaaggtgcagttactaaagaggcagcaaagatcattcaagatgaaagtacacaggaagatgctatgaaatttccatcttcccaatcttcccagccttccaggcttttaaagaacaaaggcatatcatgcaaacccgtcacacagaccaaggccacttcttgcaaaccacatacacagcacaaagaatgtcagacagaatgccctgttcgtgcagtttgctgaggtgttcccgctgaaggtatttggctaccagccagatcccctgaactaccaaatagctgtgggctttctggaactgctggctgggttgctgctggtcatgggcccaccgatgctgcaagagatcagtaacttgttcttgattctgctcatgatgggggctatcttcaccttggcagctctgaaagagtcactaagcacctgtatcccagccattgtctgcctggggttcctgctgctgctgaatgtcggccagctcttagcccagactaagaaggtggtcagacccactaggaagaagactctaagtacattcaaggaatcctggaagtagagcatctctgtctctttatgccatgcagctgtcacagcaggaacatggtagaacacagagtctatcatcttgttaccagtataatatccagggtcagccagtgttgaaagagacattttgtctacctggcactgctttctctttttagctttactactcttttgtgaggagtacatgttatgcatattaacattcctcatgtcatatgaaaatacaaaataagcagaaaagaaatttaaatcaaccaaaattctgatgccccaaataaccacttttaatgccttggtgtaagtatacctctgaacttttttctgtgcctttaaacagatatatattttttttaaatgaaaataaaaccatatatcctattttatttcctccttttaaaaccttataaactataacactgtaaaaaaaatc

SEQ ID NO: 224750 - DNA, 3105 bp, Homo sapiens
tcgttagtcctcaatgatgggagtgggaattcttggtgggaaggagaatttcggaaagcgtgcggttctcagaggagggatgagcgcccgtagatatttagtaggcgagtgtccaactatccattaccaagaagaaatctattcgtttgagcctgagacactctttgaggtaaaaaattagaatgaaagaacctttggatggtgaatgtggcaaagcagtggtaccacagcaggagcttctggacaaaattaaagaagaaccagacaatgctcaagagtatggatgtgtccaacagccaaaaactcaagaaagtaaattgaaaattggtggtgtgtcttcagttaatgagagacctattgcccagcagttgaacccaggctttcagctttcttttgcatcatctggcccaagtgtgttgcttccttcagttccagctgttgctattaaggttttttgttctggttgtaaaaaaatgctttataagggccaaactgcatatcataagacaggatctactcagctcttctgctccacacgatgcatcaccagacattcttcacctgcctgcctgccacctcctcccaagaaaacctgcacaaactgctcgaaagacattttaaatcctaaggatgtgatcacaactcgctttgagaattcctatcctagcaaagatttctgcagccaatcatgcttgtcatcttatgagctaaagaaaaaacctgttgttaccatatataccaaaagcatttcaactaagtgcagtatgtgtcagaagaatgctgatactcgatttgaagttaaatatcaaaatgtggtacatggtctttgtagtgatgcctgtttttcaaaatttcactctacaaacaacctcaccatgaactgttgtgagaactgtgggagctattgctatagtagctctggtccttgccaatcccagaaggtttttagttcaacaagtgtcacggcatacaagcagaattctgcccaaattcctccatatgccctggggaagtcattgaggccctcagctgaaatgattgagactacaaatgattcaggaaaaacagagcttttctgctctattaattgcttatctgcttacagagttaagactgttacttcttcaggtgtccaggtttcatgtcatagttgtaaaacctcagcaatccctcagtatcacctagccatgtcaaatggaactatatacagcttctgcagctccagttgtgtggttgctttccagaatgtatttagcaagccaaaaggaacaaactcttcggcggtgcccctgtctcagggccaagtggttgtaagcccgccctcctccaggtcagcagtgtcaataggaggaggtaacacctctgccgtttcccccagctccatccgtggctctgctgcagccagcctccaacctcttgctgaacaatcccagcaagttgctttaacccatacagttgttaaactcaagtgtcagcactgtaaccatctatttgccacaaaaccagaacttcttttttacaagggtaaaatgtttctgttttgtggcaagaattgctctgatgaatacaagaagaaaaataaagttgtggcaatgtgtgactactgtaaactgcagaaaattataaaggagactgtgcgattctcaggggttgataagccattctgtagtgaagtttgcaaattcctctctgcccgtgactttggagaacgatggggaaactactgtaagatgtgcagctactgttcacagacatccccaaatttggtagaaaatcgattggagggcaagttagaagagttttgttgtgaagattgtatgtccaaatttacagttctgttttatcagatggccaagtgtgatggttgtaaacgacagggtaaactaagcgagtccataaagtggcgaggcaacattaaacatttctgtaacctattttgtgtcttggagttttgtcatcagcaaattatgaatgactgtcttccacaaaataaagtaaatatttctaaagcaaaaactgctgtgacggagctcccttctgcaaggacagatacaacaccagttataaccagtgtgatgtcattggcaaaaatacctgctaccttatctacagggaacactaacagtgttttaaaaggtgcagttactaaagaggcagcaaagatcattcaagatgaaagtacacaggaagatgctatgaaatttccatcttcccaatcttcccagccttccaggcttttaaagaacaaaggcatatcatgcaaacccgtcacacagaccaaggccacttcttgcaaaccacatacacagcacaaagaatgtcagacagaatgccctgttcgtgcagtttgctgaggtgttcccgctgaaggtatttggctaccagccagatcccctgaactaccaaatagctgtgggctttctggaactgctggctgggttgctgctggtcatgggcccaccgatgctgcaagagatcagtaacttgttcttgattctgctcatgatgggggctatcttcaccttggcagctctgaaagagtcactaagcacctgtatcccagccattgtctgcctggggttcctgctgctgctgaatgtcggccagctcttagcccagactaagaaggtggtcagacccactaggaagaagactctaagtacattcaaggaatcctggaagtagagcatctctgtctctttatgccatgcagctgtcacagcaggaacatggtagaacacagagtctatcatcttgttaccagtataatatccagggtcagccagtgttgaaagagacattttgtctacctggcactgctttctctttttagctttactactcttttgtgaggagtacatgttatgcatattaacattcctcatgtcatatgaaaatacaaaataagcagaaaagaaatttaaatcaaccaaaattctgatgccccaaataaccacttttaatgccttggtgtaagtatacctctgaacttttttctgtgcctttaaacagatatatattttttttaaatgaaaataaaaccatatatcctattttatttcctccttttaaaaccttataaactataacactgtaaaaaaaatc

SEQ ID NO: 224751 - DNA, 3129 bp, Homo sapiens
aagggacgcgttgacattcactggctagtccaccgctctcagtcggagaccacattgcctcgaaggcgattgtgaagcggggctctgaggggcttgatgccccccacccctcacacggagaccttgaaagaggtgtccaactatccattaccaagaagaaatctattcgtttgagcctgagacactctttgaggtaaaaaattagaatgaaagaacctttggatggtgaatgtggcaaagcagtggtaccacagcaggagcttctggacaaaattaaagaagaaccagacaatgctcaagagtatggatgtgtccaacagccaaaaactcaagaaagtaaattgaaaattggtggtgtgtcttcagttaatgagagacctattgcccagcagttgaacccaggctttcagctttcttttgcatcatctggcccaagtgtgttgcttccttcagttccagctgttgctattaaggttttttgttctggttgtaaaaaaatgctttataagggccaaactgcatatcataagacaggatctactcagctcttctgctccacacgatgcatcaccagacattcttcacctgcctgcctgccacctcctcccaagaaaacctgcacaaactgctcgaaagacattttaaatcctaaggatgtgatcacaactcgctttgagaattcctatcctagcaaagatttctgcagccaatcatgcttgtcatcttatgagctaaagaaaaaacctgttgttaccatatataccaaaagcatttcaactaagtgcagtatgtgtcagaagaatgctgatactcgatttgaagttaaatatcaaaatgtggtacatggtctttgtagtgatgcctgtttttcaaaatttcactctacaaacaacctcaccatgaactgttgtgagaactgtgggagctattgctatagtagctctggtccttgccaatcccagaaggtttttagttcaacaagtgtcacggcatacaagcagaattctgcccaaattcctccatatgccctggggaagtcattgaggccctcagctgaaatgattgagactacaaatgattcaggaaaaacagagcttttctgctctattaattgcttatctgcttacagagttaagactgttacttcttcaggtgtccaggtttcatgtcatagttgtaaaacctcagcaatccctcagtatcacctagccatgtcaaatggaactatatacagcttctgcagctccagttgtgtggttgctttccagaatgtatttagcaagccaaaaggaacaaactcttcggcggtgcccctgtctcagggccaagtggttgtaagcccgccctcctccaggtcagcagtgtcaataggaggaggtaacacctctgccgtttcccccagctccatccgtggctctgctgcagccagcctccaacctcttgctgaacaatcccagcaagttgctttaacccatacagttgttaaactcaagtgtcagcactgtaaccatctatttgccacaaaaccagaacttcttttttacaagggtaaaatgtttctgttttgtggcaagaattgctctgatgaatacaagaagaaaaataaagttgtggcaatgtgtgactactgtaaactgcagaaaattataaaggagactgtgcgattctcaggggttgataagccattctgtagtgaagtttgcaaattcctctctgcccgtgactttggagaacgatggggaaactactgtaagatgtgcagctactgttcacagacatccccaaatttggtagaaaatcgattggagggcaagttagaagagttttgttgtgaagattgtatgtccaaatttacagttctgttttatcagatggccaagtgtgatggttgtaaacgacagggtaaactaagcgagtccataaagtggcgaggcaacattaaacatttctgtaacctattttgtgtcttggagttttgtcatcagcaaattatgaatgactgtcttccacaaaataaagtaaatatttctaaagcaaaaactgctgtgacggagctcccttctgcaaggacagatacaacaccagttataaccagtgtgatgtcattggcaaaaatacctgctaccttatctacagggaacactaacagtgttttaaaaggtgcagttactaaagaggcagcaaagatcattcaagatgaaagtacacaggaagatgctatgaaatttccatcttcccaatcttcccagccttccaggcttttaaagaacaaaggcatatcatgcaaacccgtcacacagaccaaggccacttcttgcaaaccacatacacagcacaaagaatgtcagacagaatgccctgttcgtgcagtttgctgaggtgttcccgctgaaggtatttggctaccagccagatcccctgaactaccaaatagctgtgggctttctggaactgctggctgggttgctgctggtcatgggcccaccgatgctgcaagagatcagtaacttgttcttgattctgctcatgatgggggctatcttcaccttggcagctctgaaagagtcactaagcacctgtatcccagccattgtctgcctggggttcctgctgctgctgaatgtcggccagctcttagcccagactaagaaggtggtcagacccactaggaagaagactctaagtacattcaaggaatcctggaagtagagcatctctgtctctttatgccatgcagctgtcacagcaggaacatggtagaacacagagtctatcatcttgttaccagtataatatccagggtcagccagtgttgaaagagacattttgtctacctggcactgctttctctttttagctttactactcttttgtgaggagtacatgttatgcatattaacattcctcatgtcatatgaaaatacaaaataagcagaaaagaaatttaaatcaaccaaaattctgatgccccaaataaccacttttaatgccttggtgtaagtatacctctgaacttttttctgtgcctttaaacagatatatattttttttaaatgaaaataaaaccatatatcctattttatttcctccttttaaaaccttataaactataacactgtaaaaaaaatc

SEQ ID NO: 224752 - DNA, 3116 bp, Homo sapiens
  misc_feature (28)..(28): n is a, c, g, or t
agcgggagggcggagaccaacgctgcgnaggcgtggttggccggtcgttgcgttgggatggatcaggcggaattccagaagagaaaataatccctgtctagatgcagaggacttggttcctattccagtgctcctccggtagcagggaggcgacagaaggtgtccaactatccattaccaagaagaaatctattcgtttgagcctgagacactctttgaggtaaaaaattagaatgaaagaacctttggatggtgaatgtggcaaagcagtggtaccacagcaggagcttctggacaaaattaaagaagaaccagacaatgctcaagagtatggatgtgtccaacagccaaaaactcaagaaagtaaattgaaaattggtggtgtgtcttcagttaatgagagacctattgcccagcagttgaacccaggctttcagctttcttttgcatcatctggcccaagtgtgttgcttccttcagttccagctgttgctattaaggttttttgttctggttgtaaaaaaatgctttataagggccaaactgcatatcataagacaggatctactcagctcttctgctccacacgatgcatcaccagacattcttcacctgcctgcctgccacctcctcccaagaaaacctgcacaaactgctcgaaagacattttaaatcctaaggatgtgatcacaactcgctttgagaattcctatcctagcaaagatttctgcagccaatcatgcttgtcatcttatgagctaaagaaaaaacctgttgttaccatatataccaaaagcatttcaactaagtgcagtatgtgtcagaagaatgctgatactcgatttgaagttaaatatcaaaatgtggtacatggtctttgtagtgatgcctgtttttcaaaatttcactctacaaacaacctcaccatgaactgttgtgagaactgtgggagctattgctatagtagctctggtccttgccaatcccagaaggtttttagttcaacaagtgtcacggcatacaagcagaattctgcccaaattcctccatatgccctggggaagtcattgaggccctcagctgaaatgattgagactacaaatgattcaggaaaaacagagcttttctgctctattaattgcttatctgcttacagagttaagactgttacttcttcaggtgtccaggtttcatgtcatagttgtaaaacctcagcaatccctcagtatcacctagccatgtcaaatggaactatatacagcttctgcagctccagttgtgtggttgctttccagaatgtatttagcaagccaaaaggaacaaactcttcggcggtgcccctgtctcagggccaagtggttgtaagcccgccctcctccaggtcagcagtgtcaataggaggaggtaacacctctgccgtttcccccagctccatccgtggctctgctgcagccagcctccaacctcttgctgaacaatcccagcaagttgctttaacccatacagttgttaaactcaagtgtcagcactgtaaccatctatttgccacaaaaccagaacttcttttttacaagggtaaaatgtttctgttttgtggcaagaattgctctgatgaatacaagaagaaaaataaagttgtggcaatgtgtgactactgtaaactgcagaaaattataaaggagactgtgcgattctcaggggttgataagccattctgtagtgaagtttgcaaattcctctctgcccgtgactttggagaacgatggggaaactactgtaagatgtgcagctactgttcacagacatccccaaatttggtagaaaatcgattggagggcaagttagaagagttttgttgtgaagattgtatgtccaaatttacagttctgttttatcagatggccaagtgtgatggttgtaaacgacagggtaaactaagcgagtccataaagtggcgaggcaacattaaacatttctgtaacctattttgtgtcttggagttttgtcatcagcaaattatgaatgactgtcttccacaaaataaagtaaatatttctaaagcaaaaactgctgtgacggagctcccttctgcaaggacagatacaacaccagttataaccagtgtgatgtcattggcaaaaatacctgctaccttatctacagggaacactaacagtgttttaaaaggtgcagttactaaagaggcagcaaagatcattcaagatgaaagtacacaggaagatgctatgaaatttccatcttcccaatcttcccagccttccaggcttttaaagaacaaaggcatatcatgcaaacccgtcacacagaccaaggccacttcttgcaaaccacatacacagcacaaagaatgtcagacagaatgccctgttcgtgcagtttgctgaggtgttcccgctgaaggtatttggctaccagccagatcccctgaactaccaaatagctgtgggctttctggaactgctggctgggttgctgctggtcatgggcccaccgatgctgcaagagatcagtaacttgttcttgattctgctcatgatgggggctatcttcaccttggcagctctgaaagagtcactaagcacctgtatcccagccattgtctgcctggggttcctgctgctgctgaatgtcggccagctcttagcccagactaagaaggtggtcagacccactaggaagaagactctaagtacattcaaggaatcctggaagtagagcatctctgtctctttatgccatgcagctgtcacagcaggaacatggtagaacacagagtctatcatcttgttaccagtataatatccagggtcagccagtgttgaaagagacattttgtctacctggcactgctttctctttttagctttactactcttttgtgaggagtacatgttatgcatattaacattcctcatgtcatatgaaaatacaaaataagcagaaaagaaatttaaatcaaccaaaattctgatgccccaaataaccacttttaatgccttggtgtaagtatacctctgaacttttttctgtgcctttaaacagatatatattttttttaatggataaagcatcagctaagcagccaggtgttcttt

SEQ ID NO: 224753 - DNA, 3821 bp, Homo sapiens
  misc_feature (382)..(382): n is a, c, g, or t
  misc_feature (407)..(407): n is a, c, g, or t
  misc_feature (439)..(439): n is a, c, g, or t
  misc_feature (459)..(459): n is a, c, g, or t
  misc_feature (488)..(488): n is a, c, g, or t
  misc_feature (537)..(537): n is a, c, g, or t
  misc_feature (543)..(543): n is a, c, g, or t
  misc_feature (562)..(562): n is a, c, g, or t
  misc_feature (635)..(635): n is a, c, g, or t
  misc_feature (638)..(638): n is a, c, g, or t
gttttctaacaatcgaaattactttttcatttgacattgcattggaaacattattccacaacaatataaatttaaatatacattgagattatttttttccaatttttattttattatgtttattttattttattcgggggtacatgtgcagatttgttacctgggtatgagattcttaacatagatttcagtgtatataatataaccaactccgttaagattggaaatttagatatttgtattataagcaatgttgggttaagctatgttaatggatctttgtccacttgcctaattatgtccttaggataaatcctaatcagtggaagtgttgattcaaagactatcatctttttttttgtttgtttttgtttttgagacngagtctatctctgtcacccaggctngagtgtagtggcgcgatctcggctcactgcancctccacctgccaggttcangcgattctcctacctcagcctcctgagtngctgggattacaggcacctgccaccatgcccagctaattttcttttgtntttttngtagagacgggatttcacngtgttggcaacgctggtctcaaactcgtgacctcatgatgtgcccgcctcagcctcccaaagtgctgggattncangcgtgagccaccgcgccggcctatcatctattcttaagtattttgatacctgttgcctaaattgccctcctgaaaagttacatcaatgtatgctccaaccagcagtgttcaggaggatccatttctctacaacctcactgacactgagtatcaaaattcagaaaggttgaatatacagtacagtcaatactagtatactcttcatccagattaatgaaatgttaactttttgcaatatttattttctttttttttctggattgtttgaaagtaaaacattatttttctgtctctttttcttccttttctttcttttttttgagatggagtttcactcttgtctcccaggccggagtgcaatgacatgatctcggcacattgcaacctccgcctcccgggttcaagcgattctcctgcctcagcctctcaagtagctgagattataggcatgtaccaccatgcctggctaattttgtgtttttagtagagacggggtttcaccacgttggcctggctggtctcgaactcctgacctcaggtgatctgcccgccttggcctcccaaagtgctgggattacaggtgtgagccccatgcctggccttttttttctttttctttaaaaaaattttttgacaccagtgtcactcaccaataaaaaatttattctttttgtttttttttgagacgtagtctcaagagtgcagtggtgtgatcatggctctctgcaggctcaacctcctgggctcaggcaatcctcttgctttagctacccaagtagctgggactataggtgtgtgccattgcatccagccaattttttttcttcttctttttttttttttaatgtagagatggagtttcgccatgttgcccgggctggtctctaactccagggctcaagtgacccacccaccttggtgtcccaaagcactgggattataggtgtgagccaccctgctcagccaaactattgggtgcttgggattacttgtacatgtaccacatcctacagttttattatacctagtgatcaagctttgggcaaaggagaaattcagttttcagtagcatcattggaagtattatgacttgtgcttaaacttttaccagtgcattcttttgataaatagaaatagtaacaaaatatgaattttaaatatgtggggagatacataaagaacattgcttatttgttcttgaaaataacagtgattcaaatatttcattcagatttacctatgcctaatgaaaaaaatgatgcagaacttgattctccaccttcaaagaaaaaaagattaggttttttccagacttatgatacagaatatttaaaagttggttttattatctgtcctggatcaaaagaaagttcaccaaggccacagtgtgtcatttgtggagagatcttatccagtgaaaacatgaagccagcaaatctttctcatcatttgaagacaaaacattcagaattagaaaacaaaccagtagatttttttgaacaaaaatctttagaaatggaatgtcaaaatagttctttaaaaaagtgtttactagttgaaaagtcacttgtgaaagcttcttatttaattgctttccaaactgctgcaagcaagaagccattctccattgctgaagaattaattaaaccatatttagtagaaatgtgttcagaagttttgggttcaagtgctggagacaaaatgaaaactattccactttctaatgttacaattcaacacaggattgatgaactatctgcagacattgaagaccagctgattcaaaaggtcagagagtcaaagtggtttgcccttcagatagatgagtcatcagaaatctcaaatatcacacttcttttgtgctatattcgtttcattgattatgattgtcgtgatgtaaaagaagaattattattttgcattgaaatgcctactcaaataactggctttgaaatatttgaactaataaataaatatattgatagtaaatctctgaattggaaacattgtgttggtctctgtaccgatggggctgcaagcatgactggcaggtattctggtttaaaagcaaaaattcaagaagttgccatgaatacagcggcatttacacattgttttattcaccgtgaacgtttagtggcagaaaagttgtctccatgtttacataaaattcttttgcagtcagcacaaattttaagttttataaagagcaatgcattaaattcacgtatgttaacaattttgtgtgaagagatgggatctgagcatgtgagtttaccgcttcatgctgaagtacgttggatatcaagagggagaatgttaaaaagattatttgaattacgacatgagattgaaatatttttaagtcaaaagcattcagatttggccaagtattttcatgatgaggaatgggttggaaagctggcctacttatcagatatattttcacttataaatgaattaaatttaagtctccaaggaactttgactactttcttcaatttgtgtaataaaattgatgtatttaagagaaagttaaaaatgtggttgaagcgcacacaagagaatgattatgacatgttcccttcattttctgaattctcaaattcatcaggcttaaatatgacagacatcacaaggattatttttgagcacctggaaggactttctcaagtgttcagtgactgttttccaccagaacaagacttgcgttcaggaaatttgtggataattcacccttttatgaatcaccaaaataataatctcaccgacttcgaagaagaaaagctaacagagctatcttcagatttaggattacaagcactatttaaatcagtgtctgtaactcagttttggataaatgcaaagacaagttacccagaactccatgaaagggcaatgaaatttttattacccttttcaactgtttatttatgtgatgctgccttttcagctttgactgagtcaaaacaaaaaaatctgttgggttctggccctgccctaagacttgcagtcacatctttaattccaaggatagaaaaattagtgaaggagaaagagtagcaatatgcacattgcttaacagtgaagtcaataatcctgtgttaagttttgtataagtatcctaaaagataatttcctaatgtggatttgtgttttcagtgattaaatgttttaataatt

SEQ ID NO: 224754 - DNA, 3316 bp, Homo sapiens
  misc_feature (28)..(28): n is a, c, g, or t
agcgggagggcggagaccaacgctgcgnaggcgtggttggccggtcgttgcgttgggatggatcaggcggaattccagaagagaaaataatccctgtctagatgcagaggacttggttcctattccagtgctcctccggtagcagggaggcgacagaaggtgtccaactatccattaccaagaagaaatctattcgtttgagcctgagacactctttgaggtaaaaaattagaatgaaagaacctttggatggtgaatgtggcaaagcagtggtaccacagcaggagcttctggacaaaattaaagaagaaccagacaatgctcaagagtatggatgtgtccaacagccaaaaactcaagaaagtaaattgaaaattggtggtgtgtcttcagttaatgagagacctattgcccagcagttgaacccaggctttcagctttcttttgcatcatctggcccaagtgtgttgcttccttcagttccagctgttgctattaaggttttttgttctggttgtaaaaaaatgctttataagggccaaactgcatatcataagacaggatctactcagctcttctgctccacacgatgcatcaccagacattcttcacctgcctgcctgccacctcctcccaagaaaacctgcacaaactgctcgaaagacattttaaatcctaaggatgtgatcacaactcgctttgagaattcctatcctagcaaagatttctgcagccaatcatgcttgtcatcttatgagctaaagaaaaaacctgttgttaccatatataccaaaagcatttcaactaagtgcagtatgtgtcagaagaatgctgatactcgatttgaagttaaatatcaaaatgtggtacatggtctttgtagtgatgcctgtttttcaaaatttcactctacaaacaacctcaccatgaactgttgtgagaactgtgggagctattgctatagtagctctggtccttgccaatcccagaaggtttttagttcaacaagtgtcacggcatacaagcagaattctgcccaaattcctccatatgccctggggaagtcattgaggccctcagctgaaatgattgagactacaaatgattcaggaaaaacagagcttttctgctctattaattgcttatctgcttacagagttaagactgttacttcttcaggtgtccaggtttcatgtcatagttgtaaaacctcagcaatccctcagtatcacctagccatgtcaaatggaactatatacagcttctgcagctccagttgtgtggttgctttccagaatgtatttagcaagccaaaaggaacaaactcttcggcggtgcccctgtctcagggccaagtggttgtaagcccgccctcctccaggtcagcagtgtcaataggaggaggtaacacctctgccgtttcccccagctccatccgtggctctgctgcagccagcctccaacctcttgctgaacaatcccagcaagttgctttaacccatacagttgttaaactcaagtgtcagcactgtaaccatctatttgccacaaaaccagaacttcttttttacaaggtaaagagagatcatgaaagggattgtatataaactcatccagtagaaacacttttgtgttttcaattttgatcactcaatttgctttgacatgaaaaggagttcttaaagataaagcaactgtttagttggctcttaatggactgttgtttctctgcagggtaaaatgtttctgttttgtggcaagaattgctctgatgaatacaagaagaaaaataaagttgtggcaatgtgtgactactgtaaactgcagaaaattataaaggagactgtgcgattctcaggggttgataagccattctgtagtgaagtttgcaaattcctctctgcccgtgactttggagaacgatggggaaactactgtaagatgtgcagctactgttcacagacatccccaaatttggtagaaaatcgattggagggcaagttagaagagttttgttgtgaagattgtatgtccaaatttacagttctgttttatcagatggccaagtgtgatggttgtaaacgacagggtaaactaagcgagtccataaagtggcgaggcaacattaaacatttctgtaacctattttgtgtcttggagttttgtcatcagcaaattatgaatgactgtcttccacaaaataaagtaaatatttctaaagcaaaaactgctgtgacggagctcccttctgcaaggacagatacaacaccagttataaccagtgtgatgtcattggcaaaaatacctgctaccttatctacagggaacactaacagtgttttaaaaggtgcagttactaaagaggcagcaaagatcattcaagatgaaagtacacaggaagatgctatgaaatttccatcttcccaatcttcccagccttccaggcttttaaagaacaaaggcatatcatgcaaacccgtcacacagaccaaggccacttcttgcaaaccacatacacagcacaaagaatgtcagacagaatgccctgttcgtgcagtttgctgaggtgttcccgctgaaggtatttggctaccagccagatcccctgaactaccaaatagctgtgggctttctggaactgctggctgggttgctgctggtcatgggcccaccgatgctgcaagagatcagtaacttgttcttgattctgctcatgatgggggctatcttcaccttggcagctctgaaagagtcactaagcacctgtatcccagccattgtctgcctggggttcctgctgctgctgaatgtcggccagctcttagcccagactaagaaggtggtcagacccactaggaagaagactctaagtacattcaaggaatcctggaagtagagcatctctgtctctttatgccatgcagctgtcacagcaggaacatggtagaacacagagtctatcatcttgttaccagtataatatccagggtcagccagtgttgaaagagacattttgtctacctggcactgctttctctttttagctttactactcttttgtgaggagtacatgttatgcatattaacattcctcatgtcatatgaaaatacaaaataagcagaaaagaaatttaaatcaaccaaaattctgatgccccaaataaccacttttaatgccttggtgtaagtatacctctgaacttttttctgtgcctttaaacagatatatattttttttaaatgaaaataaaaccatatatcctattttatttcctccttttaaaaccttataaactataacactgtaaaaaaaatc

SEQ ID NO: 224755 - DNA, 4491 bp, Homo sapiens
  misc_feature (28)..(28): n is a, c, g, or t
agcgggagggcggagaccaacgctgcgnaggcgtggttggccggtcgttgcgttgggatggatcaggcggaattccagaagagaaaataatccctgtctagatgcagaggacttggttcctattccagtgctcctccggtagcagggaggcgacagaaggtgtccaactatccattaccaagaagaaatctattcgtttgagcctgagacactctttgaggtaaaaaattagaatgaaagaacctttggatggtgaatgtggcaaagcagtggtaccacagcaggagcttctggacaaaattaaagaagaaccagacaatgctcaagagtatggatgtgtccaacagccaaaaactcaagaaagtaaattgaaaattggtggtgtgtcttcagttaatgagagacctattgcccagcagttgaacccaggctttcagctttcttttgcatcatctggcccaagtgtgttgcttccttcagttccagctgttgctattaaggttttttgttctggttgtaaaaaaatgctttataagggccaaactgcatatcataagacaggatctactcagctcttctgctccacacgatgcatcaccagacattcttcacctgcctgcctgccacctcctcccaagaaaacctgcacaaactgctcgaaagacattttaaatcctaaggatgtgatcacaactcgctttgagaattcctatcctagcaaagatttctgcagccaatcatgcttgtcatcttatgagctaaagaaaaaacctgttgttaccatatataccaaaagcatttcaactaagtgcagtatgtgtcagaagaatgctgatactcgatttgaagttaaatatcaaaatgtggtacatggtctttgtagtgatgcctgtttttcaaaatttcactctacaaacaacctcaccatgaactgttgtgagaactgtgggagctattgctatagtagctctggtccttgccaatcccagaaggtttttagttcaacaagtgtcacggcatacaagcagaattctgcccaaattcctccatatgccctggggaagtcattgaggccctcagctgaaatgattgagactacaaatgattcaggaaaaacagagcttttctgctctattaattgcttatctgcttacagagttaagactgttacttcttcaggtgtccaggtttcatgtcatagttgtaaaacctcagcaatccctcagtatcacctagccatgtcaaatggaactatatacagcttctgcagctccagttgtgtggttgctttccagaatgtatttagcaagccaaaaggaacaaactcttcggcggtgcccctgtctcagggccaagtggttgtaagcccgccctcctccaggtcagcagtgtcaataggaggaggtaacacctctgccgtttcccccagctccatccgtggctctgctgcagccagcctccaacctcttgctgaacaatcccagcaagttgctttaacccatacagttgttaaactcaagtgtcagcactgtaaccatctatttgccacaaaaccagaacttcttttttacaaggtaaagagagatcatgaaagggattgtatataaactcatccagtagaaacacttttgtgttttcaattttgatcactcaatttgctttgacatgaaaaggagttcttaaagataaagcaactgtttagttggctcttaatggactgttgtttctctgcagggtaaaatgtttctgttttgtggcaagaattgctctgatgaatacaagaagaaaaataaagttgtggcaatgtgtgactactgtaaactgcagaaaattataaaggagactgtgcgattctcaggggttgataagccattctgtagtgaagtttgcaaattcctctctgcccgtgactttggagaacgatggggaaactactgtaagatgtgcagctactgttcacagacatccccaaatttggtagaaaatcgattggagggcaagttagaagagttttgttgtgaagattgtatgtccaaatttacagttctgttttatcagatggccaagtgtgatggttgtaaacgacagggtaaactaagcgagtccataaagtggcgaggcaacattaaacatttctgtaacctattttgtgtcttggagttttgtcatcagcaaattatgaatgactgtcttccacaaaataaagtaaatatttctaaagcaaaaactgctgtgacggagctcccttctgcaaggacagatacaacaccagttataaccagtgtgatgtcattggcaaaaatacctgctaccttatctacagggaacactaacagtgttttaaaaggtgcagttactaaagaggcagcaaagatcattcaagatgaaagtacacaggaagatgctatgaaatttccatcttcccaatcttcccagccttccaggcttttaaagaacaaaggcatatcatgcaaacccgtcacacagaccaaggccacttcttgcaaaccacatacacagcacaaagaatgtcagacagatttacctatgcctaatgaaaaaaatgatgcagaacttgattctccaccttcaaagaaaaaaagattaggttttttccagacttatgatacagaatatttaaaagttggttttattatctgtcctggatcaaaagaaagttcaccaaggccacagtgtgtcatttgtggagagatcttatccagtgaaaacatgaagccagcaaatctttctcatcatttgaagacaaaacattcagaattagaaaacaaaccagtagatttttttgaacaaaaatctttagaaatggaatgtcaaaatagttctttaaaaaagtgtttactagttgaaaagtcacttgtgaaagcttcttatttaattgctttccaaactgctgcaagcaagaagccattctccattgctgaagaattaattaaaccatatttagtagaaatgtgttcagaagttttgggttcaagtgctggagacaaaatgaaaactattccactttctaatgttacaattcaacacaggattgatgaactatctgcagacattgaagaccagctgattcaaaaggtcagagagtcaaagtggtttgcccttcagatagatgagtcatcagaaatctcaaatatcacacttcttttgtgctatattcgtttcattgattatgattgtcgtgatgtaaaagaagaattattattttgcattgaaatgcctactcaaataactggctttgaaatatttgaactaataaataaatatattgatagtaaatctctgaattggaaacattgtgttggtctctgtaccgatggggctgcaagcatgactggcaggtattctggtttaaaagcaaaaattcaagaagttgccatgaatacagcggcatttacacattgttttattcaccgtgaacgtttagtggcagaaaagttgtctccatgtttacataaaattcttttgcagtcagcacaaattttaagttttataaagagcaatgcattaaattcacgtatgttaacaattttgtgtgaagagatgggatctgagcatgtgagtttaccgcttcatgctgaagtacgttggatatcaagagggagaatgttaaaaagattatttgaattacgacatgagattgaaatatttttaagtcaaaagcattcagatttggccaagtattttcatgatgaggaatgggttggaaagctggcctacttatcagatatattttcacttataaatgaattaaatttaagtctccaaggaactttgactactttcttcaatttgtgtaataaaattgatgtatttaagagaaagttaaaaatgtggttgaagcgcacacaagagaatgattatgacatgttcccttcattttctgaattctcaaattcatcaggcttaaatatgacagacatcacaaggattatttttgagcacctggaaggactttctcaagtgttcagtgactgttttccaccagaacaagacttgcgttcaggaaatttgtggataattcacccttttatgaatcaccaaaataataatctcaccgacttcgaagaagaaaagctaacagagctatcttcagatttaggattacaagcactatttaaatcagtgtctgtaactcagttttggataaatgcaaagacaagttacccagaactccatgaaagggcaatgaaatttttattacccttttcaactgtttatttatgtgatgctgccttttcagctttgactgagtcaaaacaaaaaaatctgttgggttctggccctgccctaagacttgcagtcacatctttaattccaaggatagaaaaattagtgaaggagaaagagtagcaatatgcacattgcttaacagtgaagtcaataatcctgtgttaagttttgtataagtatcctaaaagataatttcctaatgtggatttgtgttttcagtgattaaatgttttaataatt

SEQ ID NO: 224756 - DNA, 1065 bp, Homo sapiens
  misc_feature (11)..(11): n is a, c, g, or t
  misc_feature (19)..(19): n is a, c, g, or t
gtcgctctagnggatcccnatatatccggcctatccctcctgttacataaaattcttttgcagtcagcacaaattttaagttttataaagagcaatgcattaaattcacgtatgttaacaattttgtgtgaagagatgggatctgagcatgtgagtttaccgcttcatgctgaagtacgttggatatcaagagggagaatgttaaaaagattatttgaattacgacatgagattgaaatatttttaagtcaaaagcattcagatttggccaagtattttcatgatgaggaatgggttggaaagctggcctacttatcagatatattttcacttataaatgaattaaatttaagtctccaaggaactttgactactttcttcaatttgtgtaataaaattgatgtatttaagagaaagttaaaaatgtggttgaagcgcacacaagagaatgattatgacatgttcccttcattttctgaattctcaaattcatcaggcttaaatatgacagacatcacaaggattatttttgagcacctggaaggactttctcaagtgttcagtgactgttttccaccagaacaagacttgcgttcaggaaatttgtggataattcacccttttatgaatcaccaaaataataatctcaccgacttcgaagaagaaaagctaacagagctatcttcagatttaggattacaagcactatttaaatcagtgtctgtaactcagttttggataaatgcaaagacaagttacccagaactccatgaaagggcaatgaaatttttattacccttttcaactgtttatttatgtgatgctgccttttcagctttgactgagtcaaaacaaaaaaatctgttgggttctggccctgccctaagacttgcagtcacatctttaattccaaggatagaaaaattagtgaaggagaaagagtagcaatatgcacattgcttaacagtgaagtcaataatcctgtgttaagttttgtataagtatcctaaaagataatttcctaatgtggatttgtgttttcagtgattaaatgttttaataatt

SEQ ID NO: 224757 - DNA, 3134 bp, Homo sapiens
  misc_feature (28)..(28): n is a, c, g, or t
agcgggagggcggagaccaacgctgcgnaggcgtggttggccggtcgttgcgttgggatggatcaggcggaattccagaagagaaaataatccctgtctagatgcagaggacttggttcctattccagtgctcctccggtagcagggaggcgacagaaggtgtccaactatccattaccaagaagaaatctattcgtttgagcctgagacactctttgaggtaaaaaattagaatgaaagaacctttggatggtgaatgtggcaaagcagtggtaccacagcaggagcttctggacaaaattaaagaagaaccagacaatgctcaagagtatggatgtgtccaacagccaaaaactcaagaaagtaaattgaaaattggtggtgtgtcttcagttaatgagagacctattgcccagcagttgaacccaggctttcagctttcttttgcatcatctggcccaagtgtgttgcttccttcagttccagctgttgctattaaggttttttgttctggttgtaaaaaaatgctttataagggccaaactgcatatcataagacaggatctactcagctcttctgctccacacgatgcatcaccagacattcttcacctgcctgcctgccacctcctcccaagaaaacctgcacaaactgctcgaagtataaaattcttaacatccctttttactttacctttttttagtgtgtatattgtttagttcaaacatactgttgatactttaaatctcttcagcatgtatctgtagaaataactttttagttaatggaagaattcaccaattttaaagttttgcaacattaaataagtgacttggtgttagaatattgcctaaaccagttttctatcactttaaattttactatggaaagaaataacaaatgacatgtgggaattgcaggactatcctgtaattgtagacacccaccatttaaatttatttaacagttatcttgaaagctattgggtatagcataaaataatatcactcttttaatagtatacaaaagctatttaattctttaaaaagtaaaaactctacatggtcgcaaaaatgtgtttatttctaatgtccttgtggggtcattgttgctttacaataatgcttagatgcagagagaggaaaaaacagcaacaaagtcacataaatctttccctgacttagtacatttgaaggatttggcatattttgcctatttctgtggtagtgtaatttgaggaatacagtgtgttgttaatagtcactacaggcaaaaaacagtaagagcttgcttttaaattgtggctctgtcatttatctctgtgacttcgggctagatgtttaactttctaagcctccatttctcatcagtaaataatagttgcttcctaggactttaatgagacagtgttagcaaatggcctagcacatagcaagtacttaaaaaatggaatcctgttattattaataataaaaattatatcgtgcgattatttataattaacataaataaatataataaatatatgtgtatataatacatattactatgtatacttaacatatcacttgtaggcccctattttgtctttggctgtgtttatctgctttgtgtcttgacttaaactatttaaaagtagatcctgctatatggaaatttccaagtaaagaggagagaggatttttttttttctttgttgcccatggtagagtgatcacagctcactgcagccttgaactccccgggctcagatgatcctcccacctcagcctttcaaatagctgggaccacaggcgcataccaccatgcccgactaatttttgtatttttttgtagagatggttttgctatgttgcccaggctggtctcaaactcctgggctcaagcaattagcctgcctcagcctcctaaagtgctgggactattggtgtgagccatcacatgtggccaggagagaggaattttaaaatatttatatactctaaattagtttgttgcaaaataccattctaattaatgcttttatgtcattctcatgaaactaatctgaaagagtaaacttagttttctatttttagatattgtttcaacataccaaataccaaaataaaattaaataattttaaagaacataacacaacttatacatccaaatgcctattgttttcttaaaagtagtcacccccgtcagtgactttttagcataaggttaggagacagattcttatcttttcagcatgcatttgatttttacaaattttcaaaggctgcttgataccttaatcaggccaatatattagctaattaaattaagtcatactgttaaaacatgatatttataaaattaaaagttaaaaaatagtctaagggtttatcttaagttttatcttaaaaaaattagaaaaatgttttgagctatgttattgttggaaggtgtggtttttctacggtaaatgttacgatataacactcatttgcatgtgtaaggttcagagtacacttataatttatgtgcacagattttcattataaagtcattctctttgatttacatatttttacttgctatttttgtacttattatgccactggcagattcaccttattaagtgaaactctttattgctctgttttcagtagaaaaatcacttttcaaaattaatacttcatctgtgtataagcatattcttttggtttctaagatttgctgtcatatttttaaagttgagttttaaagaattaaaataatttttgttgttgttattttctcatggtttaccattgaatatacctgtataataaaggtgcaggatgggaggcaggatagtggaataattaattccatagactagaatcagattgcctggattagtatttcagctttattgcctactagcaatatgactttgacaagctatttaacctctcattcagtttcctcatctgtaaagtggcagttacagtaatacttaaccttatagtggtttggggattttttttttttttttgagacacggtctcactctgtcacccaggctgggttgcagtgagctgagattgtgccactgcagtccagcctgggtgacagagcaagactgtctcaaaaacaaacaaacaaacaaacaaaaaaaaa

SEQ ID NO: 224758 - DNA, 2411 bp, Homo sapiens
  misc_feature (28)..(28): n is a, c, g, or t
agcgggagggcggagaccaacgctgcgnaggcgtggttggccggtcgttgcgttgggatggatcaggcggaattccagaagagaaaataatccctgtctagatgcagaggacttggttcctattccagtgctcctccggtagcagggaggcgacagaaggtgtccaactatccattaccaagaagaaatctattcgtttgagcctgagacactctttgaggtaaaaaattagaatgaaagaacctttggatggtgaatgtggcaaagcagtggtaccacagcaggagcttctggacaaaattaaagaagaaccagacaatgctcaagagtatggatgtgtccaacagccaaaaactcaagaaagtaaattgaaaattggtggtgtgtcttcagttaatgagagacctattgcccagcagttgaacccaggctttcagctttcttttgcatcatctggcccaagtgtgttgcttccttcagttccagctgttgctattaaggttttttgttctggttgtaaaaaaatgctttataagggccaaactgcatatcataagacaggatctactcagctcttctgctccacacgatgcatcaccagacattcttcacctgcctgcctgccacctcctcccaagaaaacctgcacaaactgctcgaaagacattttaaatcctaaggatgtgatcacaactcgctttgagaattcctatcctagcaaagatttctgcagccaatcatgcttgtcatcttatgagctaaagaaaaaacctgttgttaccatatataccaaaagcatttcaactaagtgcagtatgtgtcagaagaatgctgatactcgatttgaagttaaatatcaaaatgtggtacatggtctttgtagtgatgcctgtttttcaaaatttcactctacaaacaacctcaccatgaactgttgtgagaactgtgggagctattgctatagtagctctggtccttgccaatcccagaaggtttttagttcaacaagtgtcacggcatacaagcagaattctgcccaaattcctccatatgccctggggaagtcattgaggccctcagctgaaatgattgagactacaaatgattcaggaaaaacagagcttttctgctctattaattgcttatctgcttacagagttaagactgttacttcttcaggtgtccaggtttcatgtcatagttgtaaaacctcagcaatccctcagtatcacctagccatgtcaaatggaactatatacagcttctgcagctccagttgtgtggttgctttccagaatgtatttagcaagccaaaaggaacaaactcttcggcggtgcccctgtctcagggccaagtggttgtaagcccgccctcctccaggtcagcagtgtcaataggaggaggtaacacctctgccgtttcccccagctccatccgtggctctgctgcagccagcctccaacctcttgctgaacaatcccagcaagttgctttaacccatacagttgttaaactcaagtgtcagcactgtaaccatctatttgccacaaaaccagaacttcttttttacaaggtaaagagagatcatgaaagggattgtatataaactcatccagtagaaacacttttgtgttttcaattttgatcactcaatttgctttgacatgaaaaggagttcttaaagataaagcaactgtttagttggctcttaatggactgttgtttctctgcagggtaaaatgtttctgttttgtggcaagaattgctctgatgaatacaagaagaaaaataaagttgtggcaatgtgtgactactgtaaactgcagaaaattataaaggagactgtgcgattctcaggggttgataagccattctgtagtgaagtttgcaaattcctctctgcccgtgactttggagaacgatggggaaactactgtaagatgtgcagctactgttcacagacatccccaaatttggtagaaaatcgattggagggcaagttagaagagttttgttgtgaagattgtatgtccaaatttacagttctgttttatcagatggccaagtgtgatggttgtaaacgacagggtaaactaagcgagtccataaagtggcgaggcaacattaaacatttctgtaacctattttgtgtcttggagttttgtcatcagcaaattatgaatgactgtcttccacaaaataaagtaaatatttctaaagcaaaaactgctgtgacggagctcccttctgcaaggacagatacaacaccagttataaccagtgtgatgtcattggcaaaaatacctgctaccttatctacagggaacactaacagtgttttaaaaggtgcagttaccatagaggacagcaactggtgattgtttcagagaaataaactttggtggaaata

SEQ ID NO: 224759 - DNA, 2487 bp, Homo sapiens
  misc_feature (28)..(28): n is a, c, g, or t
agcgggagggcggagaccaacgctgcgnaggcgtggttggccggtcgttgcgttgggatggatcaggcggaattccagaagagaaaataatccctgtctagatgcagaggacttggttcctattccagtgctcctccggtagcagggaggcgacagaaggtgtccaactatccattaccaagaagaaatctattcgtttgagcctgagacactctttgaggtaaaaaattagaatgaaagaacctttggatggtgaatgtggcaaagcagtggtaccacagcaggagcttctggacaaaattaaagaagaaccagacaatgctcaagagtatggatgtgtccaacagccaaaaactcaagaaagtaaattgaaaattggtggtgtgtcttcagttaatgagagacctattgcccagcagttgaacccaggctttcagctttcttttgcatcatctggcccaagtgtgttgcttccttcagttccagctgttgctattaaggttttttgttctggttgtaaaaaaatgctttataagggccaaactgcatatcataagacaggatctactcagctcttctgctccacacgatgcatcaccagacattcttcacctgcctgcctgccacctcctcccaagaaaacctgcacaaactgctcgaaagacattttaaatcctaaggatgtgatcacaactcgctttgagaattcctatcctagcaaagatttctgcagccaatcatgcttgtcatcttatgagctaaagaaaaaacctgttgttaccatatataccaaaagcatttcaactaagtgcagtatgtgtcagaagaatgctgatactcgatttgaagttaaatatcaaaatgtggtacatggtctttgtagtgatgcctgtttttcaaaatttcactctacaaacaacctcaccatgaactgttgtgagaactgtgggagctattgctatagtagctctggtccttgccaatcccagaaggtttttagttcaacaagtgtcacggcatacaagcagaattctgcccaaattcctccatatgccctggggaagtcattgaggccctcagctgaaatgattgagactacaaatgattcaggaaaaacagagcttttctgctctattaattgcttatctgcttacagagttaagactgttacttcttcaggtgtccaggtttcatgtcatagttgtaaaacctcagcaatccctcagtatcacctagccatgtcaaatggaactatatacagcttctgcagctccagttgtgtggttgctttccagaatgtatttagcaagccaaaaggaacaaactcttcggcggtgcccctgtctcagggccaagtggttgtaagcccgccctcctccaggtcagcagtgtcaataggaggaggtaacacctctgccgtttcccccagctccatccgtggctctgctgcagccagcctccaacctcttgctgaacaatcccagcaagttgctttaacccatacagttgttaaactcaagtgtcagcactgtaaccatctatttgccacaaaaccagaacttcttttttacaaggtaaagagagatcatgaaagggattgtatataaactcatccagtagaaacacttttgtgttttcaattttgatcactcaatttgctttgacatgaaaaggagttcttaaagataaagcaactgtttagttggctcttaatggactgttgtttctctgcagggtaaaatgtttctgttttgtggcaagaattgctctgatgaatacaagaagaaaaataaagttgtggcaatgtgtgactactgtaaactgcagaaaattataaaggagactgtgcgattctcaggggttgataagccattctgtagtgaagtttgcaaattcctctctgcccgtgactttggagaacgatggggaaactactgtaagatgtgcagctactgttcacagacatccccaaatttggtagaaaatcgattggagggcaagttagaagagttttgttgtgaagattgtatgtccaaatttacagttctgttttatcagatggccaagtgtgatggttgtaaacgacagggtaaactaagcgagtccataaagtggcgaggcaacattaaacatttctgtaacctattttgtgtcttggagttttgtcatcagcaaattatgaatgactgtcttccacaaaataaagtaaatatttctaaagcaaaaactgctgtgacggagctcccttctgcaaggacagatacaacaccagttataaccagtgtgatgtcattggcaaaaatacctgctaccttatctacagggaacactaacagtgttttaaaaggtgcagttactaaagaggcagcaaagatcattcaagatgtgagtttaattgttaatacttttcttgataatgccacttgggcttattttcactttggatatggcattctaatatatctgaatacttttctttttgctgga

SEQ ID NO: 224760 - DNA, 2691 bp, Homo sapiens
  misc_feature (28)..(28): n is a, c, g, or t
agcgggagggcggagaccaacgctgcgnaggcgtggttggccggtcgttgcgttgggatggatcaggcggaattccagaagagaaaataatccctgtctagatgcagaggacttggttcctattccagtgctcctccggtagcagggaggcgacagaaggtgtccaactatccattaccaagaagaaatctattcgtttgagcctgagacactctttgaggtaaaaaattagaatgaaagaacctttggatggtgaatgtggcaaagcagtggtaccacagcaggagcttctggacaaaattaaagaagaaccagacaatgctcaagagtatggatgtgtccaacagccaaaaactcaagaaagtaaattgaaaattggtggtgtgtcttcagttaatgagagacctattgcccagcagttgaacccaggctttcagctttcttttgcatcatctggcccaagtgtgttgcttccttcagttccagctgttgctattaaggttttttgttctggttgtaaaaaaatgctttataagggccaaactgcatatcataagacaggatctactcagctcttctgctccacacgatgcatcaccagacattcttcacctgcctgcctgccacctcctcccaagaaaacctgcacaaactgctcgaagtataaaattcttaacatccctttttactttacctttttttagtgtgtatattgtttagttcaaacatactgttgatactttaaatctcttcagcatgtatctgtagaaataactttttagttaatggaagaattcaccaattttaaagttttgcaacattaaataagtgacttggtgttagaatattgcctaaaccagttttctatcactttaaattttactatggaaagaaataacaaatgacatgtgggaattgcaggactatcctgtaattgtagacacccaccatttaaatttatttaacagttatcttgaaagctattgggtatagcataaaataatatcactcttttaatagtatacaaaagctatttaattctttaaaaagtaaaaactctacatggtcgcaaaaatgtgtttatttctaatgtccttgtggggtcattgttgctttacaataatgcttagatgcagagagaggaaaaaacagcaacaaagtcacataaatctttccctgacttagtacatttgaaggatttggcatattttgcctatttctgtggtagtgtaatttgaggaatacagtgtgttgttaatagtcactacaggcaaaaaacagtaagagcttgcttttaaattgtggctctgtcatttatctctgtgacttcgggctagatgtttaactttctaagcctccatttctcatcagtaaataatagttgcttcctaggactttaatgagacagtgttagcaaatggcctagcacatagcaagtacttaaaaaatggaatcctgttattattaataataaaaattatatcgtgcgattatttataattaacataaataaatataataaatatatgtgtatataatacatattactatgtatacttaacatatcacttgtaggcccctattttgtctttggctgtgtttatctgctttgtgtcttgacttaaactatttaaaagtagatcctgctatatggaaatttccaagtaaagaggagagaggatttttttttttctttgttgcccatggtagagtgatcacagctcactgcagccttgaactccccgggctcagatgatcctcccacctcagcctttcaaatagctgggaccacaggcgcataccaccatgcccgactaatttttgtatttttttgtagagatggttttgctatgttgcccaggctggtctcaaactcctgggctcaagcaattagcctgcctcagcctcctaaagtgctgggactattggtgtgagccatcacatgtggccaggagagaggaattttaaaatatttatatactctaaattagtttgttgcaaaataccattctaattaatgcttttatgtcattctcatgaaactaatctgaaagagtaaacttagttttctatttttagatattgtttcaacataccaaataccaaaataaaattaaataattttaaagaacataacacaacttatacatccaaatgcctattgttttcttaaaagtagtcacccccgtcagtgactttttagcataaggttaggagacagattcttatcttttcagcatgcatttgatttttacaaattttcaaaggctgcttgataccttaatcaggccaatatattagctaattaaattaagtcatactgttaaaacatgatatttataaaattaaaagttaaaaaatagtctaagggtttatcttaagttttatcttaaaaaaaaaaaaaaaaaaactcgaggttttttttttttttttttttacaattttatttataacaatatctgtgttatttagttgtaaaggaattcagcaaaaattattaaaacgttcacgtccccaaaacggggctgcccgctttcccttcctgggtgtggcccacctccttggcgtccccaggggaggggaggctggaggatgtttaccagaggaagtctccagccctgggaacctcggtgggggccctggagacagggagggcctgtctgggaggggggttgagcatggccatctcat

SEQ ID NO: 224761 - DNA, 478 bp, Homo sapiens
cttggttgcaatatatacagtattttataatttcatatgtgagaggaaagaaaaaacacttaaaatttccaagttagtttttgtgtaagtgggacttaatagaggttagttgtggttagatttcagatttttataaagttccttgatttttttggtatattattgattatttaattttttcattctcccaatacatttttgtattgtttgttcattggtataacttaatcattgtttttaattttttgtcaccaaggtgtccaggtttcatgtcatagttgtaaaacctcagcaatccctcagtatcacctagccatgtcaaatggaactatatacagcttctgcagctccagttgtgtggttgctttccaggtatgatctaaggtagcacattatgcatgtggttctgttaggcatcgatctgtggcacagtgttaactgctgaaggcctgttcttatgaaagtttaaatttgaatt

SEQ ID NO: 224762 - DNA, 438 bp, Homo sapiens
tctgcagaaaggaatgcagccatgccaacaccttgattttagtccagtaggacctgtgtcagatttctcagctgatacggccaaagtgcagttaaagtagaaaaaaaaattatatatatatatttgtgtggatagtagttcatttagaagttgctggccggggacggtggctcatgcctgtaatcccagcactttgggaggccaaggcaggccgatcacctgagttcaggagttcaagacaagcctggccaacgtggtgaaacctcgtctctactaaaaatacaaaaattagctgggtgtggtggtgggtgcctgtaatcccagctacttgggaggctgggtcaggagaattgcttgaagctgggaggcggaggttgcagtaagccgagatggcgccattgcacttcagcctgggcaacaggagtgaaactccatctc

SEQ ID NO: 224763 - DNA, 451 bp, Homo sapiens
gggatgacacagtttgcctaattagaaataccttttgtgactgtcgtttgtttacctctattttgcagcagcatagcacttctgagatgtttaacttcttttttcatcaaaattattttgaacatgctgacatatctttgagatttaattcctagtcatttaaagaaaataaggggctaggggtggtggctcacttctgtaatcccaacacttggaggccaacgctggaggatcacttgagtccaggagtttgagaccagcctggacaacatagagacctgtctctacaaaaaaaaaaaaagttagctgggcgtggtggtgcacgtctatagccccagctactctggaggctaaggtgagaggattgcttgagcctgggaggtccgtgtctgcagtgagctgtgatcctgccaatgcactcagcctcggctcagtgagaccttgttaaaaa

SEQ ID NO: 224764 - DNA, 507 bp, Homo sapiens
ctgccagcaccctgctcctgagccaacaccaccaccagcgagaccaaacacacagccatcagcagggaccccctgtctccccctaactacactgtctctgccactgtagtgaatgcccgcagggaggcaagcaccccaggactcatgagcactctgccacagctgatgagtgtgcaccccactgcactgccactactgctgctgctggcatgcacaaacaagaatggatcctgctatcactgcactactgaacactttggctgacacaacccatctgagtatagtgaccagcagtctgggagcaccttggcacccccagcacagtggattcctaaccttgaggggccagagaacaaaactggggcctgatacaagtcccccagagttacagcacacagtccaggagttgggaacagagcgttggcccttaaaatcttccagaaatgaagctagtcagatgaatccacctaatataacaatcaaaccctcaagatcatcaaataggat

SEQ ID NO: 224765 - DNA, 552 bp, Homo sapiens
tttcagggattaaggagaagatcaaaacagtttcagattaagaaaagctaaggacatctctgaccagcagttctaccctaaaagaagggctaaggggagttctctagacggaaaggaaatgattaaagaaggaaccttgggacatcggaaagaaagaaaacagcaaaataggccttccttctcctcttgagttttctaaactatgcttgacggtttcagaaaaaaatcatagcaccattcaatgtggttctaactctccataaagaaaatgtttgaaatggttataaactgggagggtaaagagacctacaagggaggtaactcgtctatcattcactcaaattggtaaaacaatgacaccagtataccgtgtggttaagatatagatgcacagatatacgaatgtctggaaaaaccaagagggctatacaaacagacatactcaaaagcactatggataaggcaaaacaccattctcaaagatgttcaagtcatgacaggaaggtaagaaaaagaaagcatatccagaaaacgaaaccagggagaacaaac

SEQ ID NO: 224766 - DNA, 278 bp, Homo sapiens
gtggttcaagaatgaggaaaggtttagatgatttagataagggtagggcatgaacaaagttcctaaagcagaagtgagcatatgctgtgtgtggagctcataagatggggttgaagaggctgacctgacacttgcatgtaggggagggatagaaaaagaaaactggatagaggtggtggaggcagagtcaattgactttaagagccacatggtgtgatctgtaactgagaggaccttgttgctgagcagcgagattaagaacttaatcctctgtgaga

SEQ ID NO: 224767 - DNA, 372 bp, Homo sapiens
ctactcaggaggctgaggcaggagaatcacttaaacccgggaggcagaggtcgcagcgagccaagattgcaccattgcactccagcctgggcgataagagtgaaactcggtctcaaaaaaatgaatagataaataaataacttttctagattcaggcaagttggacaagaatagaaagtctttataccacagaaatgtataggggaaataatgaaaaggttagctttgcttcctgcatcagctaattgaagttcgtcagtgctttgaatgtgtcttctgcaactctagaatgctccttctagtataaagttctaagattttgttaccttcaaactgtgaattgagtctattcaataaaatatgtaaataata

SEQ ID NO: 224768 - DNA, 312 bp, Homo sapiens
gggaaaggaacggaaaggaaaggaaactgatcacagtaatcggcacttggaaagtgctcagtgaatgtgggcttctaccatgctggggactggtggtctccattgccctcccaggtaccggagtagatccactggccccttttccagctctgctgtttacacagctcaaagcagggcttgcagccttgtcacatttttgtgatatctgccaaagcaggcctagggaagcaggggccttggtatccctagctacacagctttctctcagcccccaccacaagagttatcatgcacctgtatccccttatccta

SEQ ID NO: 224769 - DNA, 351 bp, Homo sapiens
atttcgatcctggacctgaaaaagaacattagtggcacaactggtaaaatttgaataagaattataaattagttactaatattcttgtcaaggttaatttcacgattttgttaattgtgctatggctatgtaagatgttaaaacttgagaaagttatgagaagggtatacaggaattctctgtactgtttatacaacttttttgtaagtctgaagttatttcaaaacaaaagttaaaataaattataaataaacaggctttctagtatagccaggccaatttttatccccaatgacaatgtacataagcttcaaaactcaatgttaatcaaaataaatagtccattaatct

SEQ ID NO: 224770 - DNA, 323 bp, Homo sapiens
atatatgggatgatttaaattgcaacataatcatctcaataagagtctagaatcttttgctgatctccatgttcttcaatggacgtcaacaattaggttgacatagtggagaatctaaaatggtctgatactgaaaatctaaattttgcttttacaaacagagtttttaaagagaagaatttaatcccaacgattgagacctctacaaaacttaaacttcataaagagttaaaattttttctgatgtttagagatgatcaaaacaagcatttgtatcccatgtgtggagacaacctgggtctccacatttatcatagatcata

SEQ ID NO: 224771 - DNA, 546 bp, Homo sapiens
ccataatgtggaatgtgtgctgaagcgagactcaggctaagaagatgtagaagagagcttagaaaggtaactttgactagcctgctgtcaggagcccgtgaaacacaaaaagctttgctcctttaattcaaagaatccagccatgtatacccaaaatccccacaatgtcacatgtgagtctgtttgtccattttgctatatgcaaaacagaaatgatagacgcattttggagtcactttaaagaacagtggtccaggctgggcgtggtggttcatgcctgtaatcccaacactttgggaggccgaggcaggaggagtgcttgatgcaaggagttcaagaccaggctgggcaacagagcaagaccctgtctctatagaaaatttaaaaattagccaagcatggtggtgcgcagctgtagtcccagctactcaggaggaggctaaggtggagagatcacttgagcctaggagggtgaggctgcagtgagttatgatcacaccactgcactccagtcttggtgagacacagtgagaccctgtcttttca

SEQ ID NO: 224772 - DNA, 583 bp, Homo sapiens
tgattgatcaccgttccggtaaaaagctggaagatggccctaaattcttaaagtctggtgatgctgccattgttggtatggttcctggcaagcccatgtgtgttgagagcttctcagactatccacctttgggtcgcttgctgttcgtgatatgagatagacagttgctgtgggtgtcatcaaagcagtggacaagaaggctgctggagctggcaaagtcaccaagtcttcccagaaagctcagaaggctaaatgaatattatcttattcattattcaatgaataatacctgccaccctggtcttaatcagtggtggaagaatggtctcagaactgtttgtttcaattggccatttaagtttagtagtaaaagactggttaatgaatcataacaatgcatcgtaaaaccttcagaaggaaaggagaatgttttgtggaccactttggttttcttttttgcgtgtggcagttttaagttattagttttaaaaatcagtactttttaatggaaacaacttgaccaaaaatctgtcacagaattttgagacccattaaaaaaatttaatgagaaaaaaaaagtgac

SEQ ID NO: 224773 - DNA, 166 bp, Homo sapiens
tctagcaggacacaagatttgtggttgacagtcccccctgccccctacccccagcactttgaaaacagaatcctacagagggagcaggactgtaaaaaaagaaaaaacaaaatgccagtctctactagcttataaggtacctgctgtgaaatctgctgttagtcta

SEQ ID NO: 224774 - DNA, 438 bp, Homo sapiens
atatgattccattatataaagtttaaaaagaagcaaaagcaagcaatatattatttgggaatatacatgtgaaaacttatcaaaatgcaagggaataataaagcccaaatataggatagtggttacctctgaggggaggctgggagtgatggtaagaggaaagaggatataagtagatttatgctcttatttttaaaatattgactaagctcctattatgtggctgacactcctctaggtcctggggatatagcagtgaacaaaatggacaaaaatccatgccttcacagagcttccattctaatagggttgatgcaatcatgatgttaatgttgttgattctttaatctgggctcatcaacattaattttattgttatgacatataaattatatattacatgtattctttgatattactaaaacagcacataatgaa

SEQ ID NO: 224775 - DNA, 385 bp, Homo sapiens
tggcttcatgcaatcctcccacctcagcctcccgagtagatgggagtacaggtatgtgccaccatacccagctaatttttgtattttctgtagagctggagtctcatgagccaccatgcccagcctgccttacttcttcctttccttctttcctttcctttcctttctttcttttttctgagactatcccgtagaaccttccatgacctgccccacctgtcttatgtataatgttcatggtgttgatatcatgataggtgttcctagatgtgatggtatctttctttctttctttctttctttctttcttttctctttctttctttcctttcttccttccttccttcctccctcccttccctttccttcccttccctccttcctt

SEQ ID NO: 224776 - DNA, 739 bp, Homo sapiens
gggaaaaaaatctttaactgttttcagtagtcatattattctgacactattttgtgtgtaatatgggataaagcaaatgagtaattatgtgattctctaatttcatcatctgctgattcaaccaaggaataattctccagtggaagaatgagtaagatgtagtcctgtatgtgaactggaaatatctatatgagctctcctggttcaggtcactgagaaggcctagaagtaatgaccaactcatggcagtagcattcctatgcctaggctgtcacgttgaaataccatttcctactaaaagaaatcaggatttcttatgggtgattccaagcgctctctcatatcatagagcaagaattgataaagaatgactatgattgtaacataaggactcaggagctggtgtgcacagactcttacaggccacaggtgggataaagaggagcttcaataagggataacaggtgcaggagcacaaggcacatcaactacatttatatccatgacatcacagtgaaacttacaaacaagtatcctttggagaatcactccacaaactgattaaaaaatcaagcatgggctgggtgcagtggctcacacctgtaatcccagcactttgggaggccgaggcacgtggctcaggaggtcaggagttcgagaccagcctgaccaacgtggtgaaaccccatctctactaaaaatgcaaaaaaattagctgggcctagtggtgggcgcctgt

SEQ ID NO: 224777 - DNA, 539 bp, Homo sapiens
gatgccagtgtctctacatcgtgacaactttgaatgtgaccattgtatcacctactaagtccggcagaactagaaattatggctgaagttccagaaagttccagaaagcacatttggccttataatagataattactaactgcaagagctgtgcatttactaaatgatatgctctgccaaggagcgagttccccatcacagagagcagcagaagccatcatcaggaatgctgcgtgtggatttctgagttgagtatgcggttaaaacacaagacgctaggtttagtccaatcttaaaattctacgattttaatcttttaaaaatagtgtttgcatagtatttttaagtttttgatgaacctcacatacatgatctcattgattcttttttaaaaaatggaggtcactttttcttggcttaaacaaatgaaaataaatataaacaatatagacttctgaagaaggatggcagaataaaggcaaaataaagactctcctcctccaacatctaaaatatgaataaaaataataaaaatcagc

SEQ ID NO: 224778 - DNA, 513 bp, Homo sapiens
cagcaaatggatggataaacaaactgtggtacatccacgtgatagaatattacttggtaataaaaggaataagtactgatatatggtacaaagtggatgaaccctgaaaatattacaataagtgaaagaagctagtcataaaggaccttgtattatatgattccatttatacaaaatgtcccaaataggcgaatccatagagacagaaagatcaggggttgccaggggctgtgggttggagggatgttgggaggaagatgacagctaaagagcacaacatttcttttctggggtgatgaaagtgttctgaattggttgtggtgataactgcacaattctgtaaatatactagaaactgttgaagtgtgccctttaaatgagagaaccatctggtatatgaattatatatcaataaagatactatatatttatattttaaaactgtaccatgaaaaaaaacaaattatgcatttggtaggctctcaataaatatccactgaatgaatgcaccaa

SEQ ID NO: 224779 - DNA, 552 bp, Homo sapiens
taatatctgttgaatgaatgaatcaatcctctttggttcaataatgcaaattaagacttagagaggaggtccaaattttggtcttaaacagaatacatcgtgacaattgggtctcagctggaaagacttactaatcaaggctagtaataaatacataaagaagaatattttcatatcccttctgactttgatctagtcagataatcgcccactttaccaaatgctaatcttatattttgtatcagcaggcaatttctctgaactttctagaataaacaatttttaaagccttcttacaatcaagttttgtgcatgtataaatcagaaaaccaaagttacccacattttgttttttgttttgagatggagtttcgttattgttgcccaggtattcattcatttatatattcattcatttactcactcattaacttttattgagccactactatgtgacaaggtctacaacactgactgtgatgaacaaaattggagtgacctttgcccataattaataacctttatgaaaacttttctggttatttgtccttt

SEQ ID NO: 224780 - DNA, 265 bp, Homo sapiens
gagttctcaaccctggttacatcctaatgtaatttttttctttgttcttggaaatcttttattgagccacctattctgcttctttgcaacaaaatatgttcttacattgaatttttaatttcttgttgtaagtgtaaaagttatatgggctgggtgcagtggcccacacctgtactcccagcactttgtgaggctgaagcaggaggattacttgagcccaggagttcaagaccagcctaggcacatagggaaacctcatctctac

SEQ ID NO: 224781 - DNA, 536 bp, Homo sapiens
tctgcatattgcatatcttattgtgtgactttgccaaagttgtttattactagtagattgtatgtgtagtggtgggggacatgtattccttatcatttaatatacatacaggattatattttctgtaattaaaatacttttactcttcttttaaatattgatatactttatttttcatttttttcttgcttgattgcttgacaagaacatccagtgcagtgttgaattgagtagcaagagtgaatatccttgtcttgtttatgacattagaaagaaggcattctgtcaactttaagtagatgttaactgtaagtttttcatatatatcctttataaggtaaaggaagtttccttctattacaagtttgttgagagcttttgtcataaaagagttttgaattttatcaaatatctttctccgtttattgagatgattacattttttatatttactctatgtggcatattactttattgattttcagatgttaatctatcttgcattgtttaataaatcccatttgtattatggtgca

SEQ ID NO: 224782 - DNA, 435 bp, Homo sapiens
atttttgtgtttttagtagagacagggtttcaccgtgttggccaggtttgtctcgttctcttgattacaggcgtgagccaccacgcctggcctctttattttttaatagcagtgatgaggttgattcaggctatttgaaaccttctttcattggttaatttagcaaacattaagtgctgttgtatgctggatactggacattggagtaggctttggagactgagataagcatgttgacaacttacatttactgactgtttactgctttccacatactatgctacgtgcttgatgtgtcattcagtcctctcaacaactttactataattatcagcatttttttatgaggaagtaaagttacttgcccaagttacacagctcataaattttgaatctggtgagcagtttgaattaaaagccattacaatatgttcc

SEQ ID NO: 224783 - DNA, 444 bp, Homo sapiens
tcaaattagagacctctttactttatagctccattggagagccacacactacgtgcccttatattagcacattacttcttttttcttttttttgcatgaatgaattaaaaagtttgaggaaaagattgcttaccctttttatagtatgttcaaactattgttcctttcatagtttcatggatgcattcctattgataatgtctgttttttgtagaaaagagtaatactgacattttagttctaaaattgacttttcctgttgtaaaccaggagtcagcaaactttttctgtaaaagcccacactgtaaatattttacactgtgagtcattttgtctctgttgttgctacttaactccgctcttgaaatgtgaaaatagtcataggcattgtgtagaaaattataagcatggctgtgttccaataaagcattatttacaaaagca

SEQ ID NO: 224784 - DNA, 214 bp, Homo sapiens
ctgtagcatctttccacaccttctactgacaacactttagtgccagctccaaagaaaacatacttccaggggccagatccgttttcactgagcaattagaaacgatgaatttggagctgaatatcaatccactgaaaactggtacactggctgaccctccacgccaaggccaggaaacaacgtgtttgaaggccttctaagcagggctggcaga

SEQ ID NO: 224785 - DNA, 442 bp, Homo sapiens
ttttctctagactactttattgtaagaatacagtgtataatacatatatgctattcaactgtttatgttactggtaaggcttccagtcaacattaagtaggctattactagttaagtttttggggagtcaaaagtcatacatagattttctgctgcacaaagtattagtgtctctaactcctgtgttgttcaacggttaactggagttatgatcttcatggccatgtatacagtatttaacttctctgagactcaattttcccacctatgaaataggggtggtaatcttgcttatcttatacagtgacatgaagatgtattgagataatgcatgtcaagtgcttgactcagtgtctgactcatatgtatattaaatagctattattattccattgctgtttattaaatcacatttttataaaagattactgtgtggcaatga

SEQ ID NO: 224786 - DNA, 368 bp, Homo sapiens
catagatacaaaaattgttgaatataggaaagagaaaagagtacattagtttgtatttactgcagattgctggagtagaaaatgatcttagtgtttttcctttgaactctacatcactcatcttaatgcttaaaaaaatggatagcagaaaatgtgaaaggcactaagcaacatttttacactcaaaattttgaagacaattcatagctagtatctggatttatcatttattttctgggatagaaatatataagttgggtgtttgattaggaaacctaaaggactgtattttaagccaaagcattttctatatacttaagggcctataaagcaggctttcattaaatattaagtatagctccaccaca

SEQ ID NO: 224787 - DNA, 961 bp, Homo sapiens
ccgcattgcccatctcatagatccataaatcggtcttactctctgtcatcttatctcccataagagggtgttttctgtccttatcctcaccaccaccttctgtttttaaatcacttttttttgtgctgacagatagagagagcttatcactgagaggtctacagacactttcctagtaatggcctggatgaccccatcagccaggccttgaaggacacagtgagagccattcagactggacatcgtggtcaaatcagatgctgctggccagccatgcgaccttggctgagttatgccacccctctgactttatttctttatttgtgaaacacttagggggctgttatgaggatcgagtgagatggcatcttgtgcctgcatctagtaggcattcaggaaaaatctgatgctggcaacgttcttacgatgtgagcggtatctttctttctttatttttaattgtaattttttttttttgagatggagtttcactcttgttgcccaggctggagtgcaatggcatgatctcggctcactgcaacctccgcctcctgggttcaagcaattctcctgcctcagcctcccatgtagctgggattacaggcatacgccatcacacccagctaatttttgtatttttagtagagacggggtttcaccatgttggtcaggctggtctcgaactcctgacctctggtgatccacccgcctcagcctcccaaagtgctgggattacaggtgtgagccactgcgcctggcctatgtgagcagtatcaaccccagcagctcatgagctcacatcttctgagactctactatgtgccaagcacgggtcccagcttttgatatgtgttaagtaatttaatcctctcaatgctgatggcgatactaccattatcctcatgtgagagatgaagaaatgaggcacagagaggagaggtgaagtcactaaacaagtgag

SEQ ID NO: 224788 - DNA, 526 bp, Homo sapiens
cctcaatccactccagtgtggctcctacccaccctagacacaagagcactgaaaactttaatcaaatcaattattgacattttcctaaaacataagtacttgtaaattcttcccttgacctgttagcagtacttagcattgttaaccagtaggatgtacgtgcttagtacatgaaggggttcggtagataatttcccaatcctgtacatccatatgtatttgttcctaaattgatctgccttaagacaactacctcttatttcacagcctttctcccactagaggaaaggcaatacctctcagccatgccagacctactgtgtttaattgtcccagggaataaaatatttcatgggtccaaacaaagggacaatttgaaacattcatgtttatgttgaggcctgaatgactccctttgcaagtcagatggtttctgtcatctgtcagatgccctcaatgaaactagcagacaagtgaattgtcagctaatttattaaaaataaattttgatgcaagatcactatga

SEQ ID NO: 224789 - DNA, 439 bp, Homo sapiens
cctattccaatatcgaacatttggaacaattgaaactcccatacactgtagataggaatgtagaatgatacaaccaccgtagaaaagttttggcagtttcttataaagttaattatatacctgccctgtgaccagtaataccccttctaggtatttactcaaggaaaatgaatacatatatggccacaaaaaagactgtacaagaatgtcataacagccttatgagggttcttcaaaaagtttgtgggaaatgtgtgttatgaaaaaatatccatggagtttgtattagtccattttcatactgctataaagatactacctgaggccaggcacagtgcctcacacctgtaatcccagcactatgggtggctgaggtggggcggatcactttaggtcaggagtttgagaccagcctggccaacatggggaaaccccatat

SEQ ID NO: 224790 - DNA, 629 bp, Homo sapiens
aaacattgttcagtgaatggattcttgccctttgctagagtcctgttagcagtaatgaatcttcagagtccctaaaccaggatcccaggatctggttagtcttctgtacccgttatatggtccctttcttgaagaagaataagaattaaagtaagattttttatataatatatttaaacctgtgtggagatatgctgttttctgttttttaagatttacctccaaaattttagtaggtagttgttaaagctgcacaaaattgaaatattctaaaattttagatatgaggtaattaagaagaaaaagcatacgcatatatcctttaaaaacataatagttactatatataattgaactcaaatatgtgaaattattcttgaaagagttttaagtcgtttttttcttttgaatactgttacaattactatttcagaacattataaaacatcactaatagtttctatgccaataatgtttcctaagtgaaatatttttatgtatactttttcatgccatccaatatgttgatgtatggcatttccacctaaattttaaagaaaattcttcttagaagactgctcattccccagactgaacattgggtttgtaagacctgataatttcagatg

SEQ ID NO: 224791 - DNA, 277 bp, Homo sapiens
ggcccgggacgccccccgactagcccgacagccgtccagaccccaggctccgccccaggcctggctagagccccagtcctcgtcaggggacccccaggattgtccctgctgtctctccttctcagagtctctctctgtctctctctgtctctctgtctctctctctctgcctctgtctctgtctcttctccaagctcaaggtctctgggtctcagcatctctcagccccaggcctctgggcgtccccctgtcgggctagtcgggaaggatcctctag

SEQ ID NO: 224792 - DNA, 275 bp, Homo sapiens
ggcccgggacgccccccgactagcccgacagccgtccagaccccaggctccgccccaggcctggctagagccccagtcctcgtcaggggacccccaggattgtccctgctgtctctccttctcagagtctctctctgtctctctctgtctctctgtctctctctctctgcctctgtctctgtctcttctccaagctcaaggtcttgagaggctctcagagcgctccagtcctccttctcagtagctctgtcgggctagtcgggggagatcctcta

SEQ ID NO: 224793 - DNA, 366 bp, Homo sapiens
catctctcagccccaggcctctgggcgtccccctgtctctttctgtctcttcctggtctctgacctctccacttcccaggcctcagaatctctgcgcctaggtggtgaggggtggtcttaaactctgtctctctccctctttgtctctctctgtctctgtgtctccttcagtctccagacctgagtccctggatttctcggcctcaaggtctcggcgtgactttctctctctgccctgtctctctttgtgcctctgcccctctcgggctctctgcctctgtttctattctctctccctctctgcctcccccatcctcaaggcccatctccctccctcgctgcatccttccccccttccctccccgc

SEQ ID NO: 224794 - DNA, 570 bp, Homo sapiens
cagttttaagtttgtgcaagtttatttggttttatacttacaatatatacactcaataaaatatgatatacctcaataaaaataaagcaatgccttccctgcctccaaaaacaaaaccaacctgggaatacaaagatcaaataacagtgcctgcagaagcttagaaaatcggcacagatgtgacatttgactcagttcagcacacattatggagggttactatacaagggagactgcacacagagaccatactcaggagcctgaggatcctgaatcactgacctagagggaagaagtaccagcccctatcttgaggacctcatattacaaggcagtaatagacatgcaaaaattaatagcaacagtctgattctggcaattggctgatatgccaactcttaccacttttcaacattgtgctagatatgtaagtggcagaaagactgaaaaggaataaacagattattatttgcattctatgctcttatttacttagaaaatccaggagaatctatacactattagaaaaaaattacacttataaaacttactagataaaagatcagtatc

SEQ ID NO: 224795 - DNA, 313 bp, Homo sapiens
agaatcagtaataaatacatttgccagccatttttccctcttgtatcctgaagcataacaggcatttccaatggaaaagactcaactctgtaagaactgtatttttggttttgaaaaatcagatcaatatttacagcttcaagaagaacaagaagaaatgctcctctcaataataaacatacataaattccaaagagtcaccataatttccatacaaattcatcctacacacccccaccgccctatttttttaagataatgactgaacaattctaaagtacattttctgtatctccaaggtgattcagttggg

SEQ ID NO: 224796 - DNA, 459 bp, Homo sapiens
aatcatggcagaagttgaaaggcatatcttacgtggcagccggcaagagagaatgagaagaaatattgggccaagcaaaaagggaaaaccccttataaaaccatcagatctcgtgaaactttttcactaccacaagaatagtatggaggaaactgccccatgattcaattatctcccaccgggtacctcctataacacgtgggaattatgggagctacaattcaagatgagatttgggtgaggacacagccaaaccacatcagcatattcctacagtgtaaaagtactcagaagtaagaaagaaacaacctctgatatataataatgtgaatggttctcaaaaattttatgttgagcaaaagaagccagatacacaagagtagacactgtatgaccatttgtgtgaagttccagaacactgaaaataagctttgatgaataaaaatcataatagaggct

SEQ ID NO: 224797 - DNA, 420 bp, Homo sapiens
cattgctatatggaaatacttgatgctgggtaatttataaagcaaagaaatttaattgactcatggttttgtaggctctacaggaagcatggtactgacattggctaagcccctggtgaggactcaggaagttttgattcatagcagaaggaaaagtgggagcagtcacatcacacggccagagcaggagcaagggtgggaagaggtgccacacattttcaaacaaccagatcttgcaagaactcactattgcaaggacagcaccaagccatgaaggatccacttccatgatccaatcatctcccacccggccctacctccaacactggggattacatttcaacatgagatttagatgggatacatacccaaacgctatcatttactaaaccaaaataatgaaaaattctagtgtgtaag

SEQ ID NO: 224798 - DNA, 443 bp, Homo sapiens
gctgccccctggagcgtggcttcgtgtttgatgagtgcggcccaccctgtccccgcacctgcttcaatcagcatatccccctgggggagctggcagcccactgcgtgaggccctgcgtgcccggctgccagtgccctgcaggcctggtggagcatgaggcccactgcatcccacccgaggcctgcccccaagtcctgctcactggagaccagccacttggtgctcggcccagccccagccgggagccccaggagacaccctgagccaggacagtgcctgataagggttcatcaggccaggagtctccccttggcgagcagttcccaccctggttagggctatggagagaatgccctgcctggacactggagcctgggcccctgccctgcaaagacccccgccatgttgagtcaccagcagtaaactctaggcctgcccgaaag

SEQ ID NO: 224799 - DNA, 588 bp, Homo sapiens
tgtttggataacaagtgaaagaaatagccaataaacagtagatgatattattattacagggtttcatcacaatgaaacactttaaagaggtttttcaatttgttagtaccattttacaccagtagtcagtgaagaaacactgagctttctacagtctttaacatgggacacccagcaactgatacagtaccctgcatataccagacaccattggtgctaattaatttaaactaactcttaattacacataggaacagagtaactccgaaagcaatcatacattcactagaatataaagtccttgaaaagatcttttgtctattttgttcactgatgaatcccaagtgtctaaagtgtctagaacagtgcctggtacatagtcggcattcagtaagtatttgtcaaatgagtttgggaacttgttttttagtactttaatactttgattaaggcttttcaaaagacaataatcttgacactcaaggacaacttttactcttcatataccagcctatacagaggtacctctcctcactctaaaagtaactacatgagccaggcacggtggctcacgcctataatcccagc

SEQ ID NO: 224800 - DNA, 195 bp, Homo sapiens
gccatgacaggacaattgtgcatagtgtgtgctggtaactgtgtgcacagctgtgtgtgctgctctcccacgacttggtcagcagcttccagtgctagagctccagatcttcacctccatctatagcctctcatattagttaaaatacatctacaatgtgaatggtatctccttagtaatggtgctcttgagcag

SEQ ID NO: 224801 - DNA, 383 bp, Homo sapiens
atgtttgataagctttataaattgatgacattttaatgataggtagatggattataattttaatttttcaaatcaaaaaattcaggcatggttatttttaataaagatttgatcaatttgattaaattaacaaactataagcattggcttataatgccattctttttgttattaagatcttacctgagccctaaaaatactcgcggtataaaaaaaataagaacactgtttttcctgtgtcaattgccctactaatttctcagctgtatggtgggaaacatgttgagagaaagtattaaaatatattaaagccacatgggattattaaaaactggaatgaatcctctaaatctttgagacaactattcatcagttgctctttt

SEQ ID NO: 224802 - DNA, 483 bp, Homo sapiens
ctagttacgtacccaagagaactgagagcagagactcagatatttgtaacgggaatgtccctgacagcacttttcgtaatcgccaaagggtggaaggcacccacatgtccgtccccagatgaacgggtgatggaacactattcacccctctcaggaacggggcctgttgcatgccacagtgtggaggagcccagaagacctcatgctgagtgacagaagccagacaaaggtccaggtgaaatgtcccgaagaggcgaggccacagagacagaacccaggggccgggggagtggggagcaaggagcaactgttgaatacgtatggggtttccttttggggccgtggaaatgtcttggaactacacagaggcgatgcctgtgctatgccgtgatggtgccgaatgccacaaatctcccactgaaaaatggataattttatgttacgtaaatttcatctcaataataaaagtaaactgtaactatt

SEQ ID NO: 224803 - DNA, 528 bp, Homo sapiens
acacacagggcaaacggtcagtaatctgtactatttcatcagacgactgagaaaaagaaaatttattgacacttttgttcttaatgctcacatataaagatttcactttacctcgtgttttcagaaacactccagacacatcaaataaactctcttgaattttaaaatagaaaaaggattgactgggctatgtgtgtgtctgggagtgggaacacagggatgggagtaattcaggatcaaaaaacagagtattaagtttaaagcagttgttactctctgccttccccctccttcctattctccagaaggcagggttcatagtgaaacactgtgtagtcttagatgcccctcctggaaaggcatatgaatcctagccccactccactctactgaaaactcagtgatttaaagcctcttgctttaaaaaaggacttctggttcaaaagactgctatgatcatgtgttaacattcatgtagaaaaagttctagtcatattaataatcaataaaaatgcaagtaaaaactat

SEQ ID NO: 224804 - DNA, 633 bp, Homo sapiens
gcacgagaaaattggctaatcagatttttgtgctgattaatgagggaaagtttttactctatttttgtggaaagtaatatacatattcatgttggaatataattattcccatttcttagattttaaattactacttttaaataaatacagtctcttttattaacctgtgttttttctttccaccgtgggtcttttcagtttcatgattttgctctcaaaactttttaattattgatttctgtcaaatctgttcattcattacattattttattatttattaaattgttttatctttttaagtcttattaatatgtactgaatttgtaacaatttggaaagtcaagtaactcctgttttatctttttcttggtttatgagtgtttttaaagttttacgtttcttgaagatcacagctgtagccccaattccatggttctggctacttacatttatcatacttattaatatcatgaatgtaattggaatacccctttgattttactggtgacgtatacccactagtgtactgagacggaaaaaaaagtctttagaactcagataaatatacagttcatatttactatttatgtatgtgtgatctcgttattaaattactctatcatgtttgtgga

SEQ ID NO: 224805 - DNA, 690 bp, Homo sapiens
tatggtgactccatggtcatgagaaacccatgttctttctgtccactgtgccatcttcatcctcatgctatgcagtgggatggagtaagagaagatgaaaatcctaaaagccatactccgagaaacagcacttctgctcacatttcaccatagcctagacacatgaccacacctagtagcaggagaagagggaacatatacccaactcaaaataggggtccttttactatagaaagaaaaaaacagacatttggaatctgactctggcacgtttccagaacagcttcttcctttggaattcattcattcatgcataaattactaagtgccaggaactgtagagtcttggaatatacagatgaataaggcaagaaactaagtaaagcacatagtcaagtgggaagatggcaaccgatagtgcagtgaggaggaaagtactgtcatggagatctatgcagatctccccactctgcctgggacagaagggaggaaggcttccagcgttacagcagacttcaaagtgtagtacttcaaaggacagggaaaagttaatacagttgcgtaaagaagattgtaatggttacttatagtcttatccagagatgacccctattaagatatgagtatatcctttagattactgtttctaaagaataacccctgcctctagctaatcatagcttccatagg

SEQ ID NO: 224806 - DNA, 540 bp, Homo sapiens
aaaagccattcaaaatgtgtgaattaaaacataaatatcatattcctaaaggcatctattaatggttttataggaaaagggaactttgagatctggaagtgtttccgttgagatcggtattgtacaactgttacttgggagtcactgttctaggagctgagaatacagggatgcataagacaaatagatgacatagagtctctcctggcagagacactgcattcttgtttagggggtagttaatctacaaacaaaatgaacaggagaaatgtcacctagtgataagtgctacgttgagaattaaaatagggcattaggattggctgactactttaggttgggttgtcagggagccctctcaaagacgatggcatgaacagtgtgatctgatgaatgaagaggagtcagctatgtgaagttgagagtgaggcgtcttctgggtagtagaacttccagaggaaagtccttaaggtaagaacttgcacagcatgttttgttcgaggaaataaaaggaagtctggtcactggtttaggagaggg

SEQ ID NO: 224807 - DNA, 345 bp, Homo sapiens
taatccctttggtacaatttggcaagatcttcttgggattgttataagaattttattgatcattctcctttcagatttcaataagacccagaaatgggtgtagttatggtgttgtgcatgtgtaacgtaactcacagttttttagggaggtatgcctaaattgcattataatgctttgaaaccagaaagaaaaatgaagccaggttttgtgcctcacacctgtaatcccagcacttcaagaggcttaggcaggaggatcacttgaggccaggagtttgagactgtaatgagccatgattgcatcatggcactccagcctgggcgacagggtgagaacttgtttcc

SEQ ID NO: 224808 - DNA, 402 bp, Homo sapiens
attctatacttttctaaataaagagaacacaagaatagagcaaacagggctctctcaatttgtaagggactgaagtagagagaacaggcaagtaagcaatgagcattttattcatttcctgattcttgactatgtacagaaagaaagacaaactcatctaaaggcagccacatgtcaaaataataaaacaatgagacttccatattccccaggaagagaaggtcttggctacctccaaaagagttaaaactaagcattggttctctaactgtactattttagcctctctctctctctctctctctctctctctctctctctctctctctcactctctctctctctgtgtgtgtgtgtgtgtgtgtgtgtgtgtgcatgtgtatgtgtacgttttgaactcag

SEQ ID NO: 224809 - DNA, 443 bp, Homo sapiens
agctgggagcaccttccgtagaaggcagggggtgcatccctgtgtgctgagatgaggctgtgagccacctgcaggatagagcctagctccttagtgtactacctggacttctgccaatgttccctggtcctattggctccttgtcccaggctgcacaaagtcacaggagcctgtcaggtccccactggctattcctgacagcttacgtattatgttctttctgcccccaaaaccaatatttacttatgaaattccaccttatccttccagaaaactcagttgtatgtaaaaaggagcagtttatgctccagtgaagtctgatgggaaggaaacagggtttggagcaagacagacatgtgcttgcatcctgaagccatcgctggatggcccgatgacttggggatgctatttacattttctgagtctcacatttcttgtataaa

SEQ ID NO: 224810 - DNA, 600 bp, Homo sapiens
gggcaagccctctgggaaaagataaagcctggaaaagaatagttttattctcacaatgtgtataacaagctctaaatgggtcaaagacttacatttttaaaatatgaaactaaaggaaaatatgagtatatcatttttaattttggaattgggaagccttttctttcaagttataattcaaaagccagatgcaaataataaataaacaaatgtgactatattttaaaagcacatgaaacagcagcaaaacttcggcatagcaaacaacaacaaaaatgaaaacaccacaaacaaaagcaaaagataaataacaaactaggaggccgggtgtggtcgctcacgcctgtaatctcagcctcccgagtagctgggattacaggcgcttgccaccatgcccagctaattttttgtgtgtgtttttagtagagacggggtttcaccgtgttagccaggatggtcctgatctcctgacctcgtgatctgcccgcctcagcctcccaaagtgctgagattacaggcgtgagccaccgcacccggcctagggttgattcttagtagctcgggctactaaatcaggggtgctccagccttggttaactc

SEQ ID NO: 224811 - DNA, 340 bp, Homo sapiens
gaaggtgttaactttctactctgattctgtctccataatggggtaaactgttgatagtttaccccatcaacagatggtcggtaaattattgattcgaagaatcgagagagtgcagcaacataaatctgttaatgtctgatcaagctcctgccctgttctccgaattcagcttcataattaagggaaggcctgttttctatcctcagatttaggttctagtagcagttgtgtaaccactagtgagtcacttaactcctctgggtccccatttctcatgtgcaacaagaaagaggggaactggagatgatcactctagttccagacaagggaacatttcaca

SEQ ID NO: 224812 - DNA, 542 bp, Homo sapiens
tcaggcatgatggtgcaggactgtggtcccagctactctggagagtgaggtaggaggatttcttggaccggggaggtcaaggctatactgatctatgtgattgtgccactgcactccagcactgggcaacaagagtgaaactctgtctcaaaataaaattaaaaaaaacaaaaaataaaaaacaatgtgtgcacaattctgttaatcatttataacaaaggtcataaactggtgacctggggttgggattcagctgatatgtggttttgacgtacattgtttaaacagtaacaaaaaattagtttcaaattgggagattttgagtaaaaaagcccaagttttggggagtcttttgaaaaactgaaaaatctggtgacactacatttttacattgggttttaattttatttttgtgagacagagtctcactctgtcacccaagtaggagtacagtggcttgatcatggcttactgcagcttcaacctcccaggctcaaacaatcttcctgcctcagtctcccaagtagctgggaccaacgcgt

SEQ ID NO: 224813 - DNA, 737 bp, Homo sapiens
ccaccccagaaagatactggttccacaagtttattaaaaaaataaaataaaatggccgggtgcggtagctcacgcctgtaatctcagcactttgggaggccaaggcgggtggatcacgaggtcaggagattgagatcaccctggccaacatggtgaaaccctgtctgtactaaaaatacaaaaaaaaaaaaaattagctgggcatggtggcccgtgcctgtaatcccagctactccggaggctgaggcaggagaatcgctggaaccccaagaagcagaggttgcagtgagccgagatcacgccattgcactccagactgggcaacaagagtgaaactctgtctcaaaataaaattaaaaaaaacaaaaaataaaaaacaatgtgtgcacaattctgttaatcatttataacaaaggtcataaactggtgacctggggttgggattcagctgatatgtggttttgacgtacattgtttaaacagtaacaaaaaattagtttcaaattgggagattttgagtaaaaaagcccaagttttggggagtcttttgaaaaactgaaaaatctggtgacactacatttttacattgggttttaattttatttttgtgagacagagtctcactctgtcacccaagtaggagtacagtggcttgatcatggcttactgcagcttcaacctcccaggctcaaacaatcttcctgcctcagtctcccaagtagctgggaccaacgcgt

SEQ ID NO: 224814 - DNA, 536 bp, Homo sapiens
ggatgaatgaatgaatggtcaggaaattggaatttgttggatatgtaatttgacagcagacttttaatgacacacttcaggttccattttccctttaaataaaataagaacagtgctacctatgaaacaggcagtacttaggaggattatttcccataatataactttgggtgtttaaaatgctattaaaaatataactaccatctatgaagctttgtatgtgttgagcactttattaagagctttatttttattacctcttttagtcctcaccgccacccactgtgagggaggaattattgatcctagtttatagatgacagagctgagtccagagaggctgagttacttgctgaggtcacagagctggtaaggcattgagcacagggtccaactccagggtgtctggttctaaaggcttcccatcatgccccattgcttctgagtgctgttaggtgcttcccaccacttttttaaataaaagagacagatatcaattttggagaggggtcttcaagatagaaacaaatggcaaa

SEQ ID NO: 224815 - DNA, 288 bp, Homo sapiens
tcaaaactccacataaagcatatggcaacctgttttgaactccttccaaggggtcattttattgaaataacttcctttttaccatcccatggagaagtatctgttacacttgggctgttcttttttttttctcttgacttttttcacaatcctactccagtatttatcccctctctttcatatttcagaagagaggaatgttcccaaacttgttgtttctttggttagaggctgggaaatctgttatttctgttgtaaaggaaatggctgtgctcacctttctttcat

SEQ ID NO: 224816 - DNA, 557 bp, Homo sapiens
gtgtcggttgcagatgtagaggacagcgagagaggatttagttctaggccattttggttttctcctgtcattgaaatctaaaaagtgaatagtgttaattatattgtgggaagctgaaataaataataaaatgacttcctatttagtgagggtcttgactagctctgtaacttgctagctgtagaactttaggcaagtaacttaattttgtacaccttagctccctcagttgtaaactaggtaacttgttgcttcttgtgaaagtttaataaaatagtctacttaaagggcatggctgaacatctgccatacaagtgtttaataaattatgactattattatttgtcactttaaaaataaaagagccacagcagaaactcagtttgcatgattctaattattttgtacatatctatcttccctgatgatttccagtaaggaaatgatttcagcaatgattgatttctttatccctgtaaccacggtatgatgtatcttcaaggatgcaattaaaaaagatatttaagaacgcttgtgaaataagaagtaatggaaaa

SEQ ID NO: 224817 - DNA, 569 bp, Homo sapiens
caaaatgaacagaaaccttggcagggattgtgctctctgcttcctctttccccagtctctccctagctgcccagggccaaaagccccatggccatgatccagcatcctcttgggaaagctgcactttagagggaacttatgagtttattttacctacagatttttctctgaggagtagaggtagcaaatgacttcaagggaaaacataaagaagtaacatggagatgaggaatgacacaagatagattatattgggttgccttccatggagtaagatttcagaccaaataaagccaggattactgggcctacatcccccagaggcattctctggcagtgtttgtgccatggcaagtcagagatgcaaagaagcagaatctgggaaaaggtacgacaaggactaaaaagttgaagcaatacagaaataagaatctaatccaatctgaaggacactccaatagaggcattcaaagaaggaataggctgaccatggaacgattagttcgctatcattagaggagttcacatacacactggtgtccattttctggggatgttcaacatgggca

SEQ ID NO: 224818 - DNA, 227 bp, Homo sapiens
tcagttgagcacacagtggacagctgtaggagtgtgctgagcccaaacacatcagtaacgtccgccctggcaggagagaggttacagaccccaggccctcacgtgccaggccagtgccagccctgccaacagctgtgtggtcttggacaagtctctccacccctcagtgcctcagttttatcacttggttgtttttgaggattaaatgagatcacgtgaaatcagga

SEQ ID NO: 224819 - DNA, 328 bp, Homo sapiens
tatttttcttaactcaatagatacaaaatattatttcaacatgtaatcaatatgaaaacattatcgagatgccttacattcctttttcccgttacttctttgggatccagcgtgtattttacctttagaacccatgaggtcccacgtggtgagtgccccgggtgggaaccgcctgcagctcggggaggaacgaagctaccagagaactacagctcccggcatgctccgggcgcgccccgtgacgcacttcctttgcggtggccacagcgcgcccccggcggcgggagcgaggcgcctgtccgagaaccacatctcccggcatgcgcca

SEQ ID NO: 224820 - DNA, 217 bp, Homo sapiens
ggtagaaatggagttttgctatgttatgcaggctggtcttgaactcctgggatcaagtgatcctcccgcctcagcctcccagagtgttgggattacaggtgtgagccaccacgcctggcctctttttaatttgaagtaccaagctttccaacttagatctaaactctagacctaccactggttatagtgaagacaaaggctttaggtttaatttgat

SEQ ID NO: 224821 - DNA, 334 bp, Homo sapiens
caaggccaatgatcccatctgctgtgggctgggtcatgctcccaatgcttacagaacctgggaggcagaggaaaactctgcccatcccatgggacgttacctgtaagctttgaacaccagaatcttgaggcctatctctttctggaaggctttgtcttcctctaaaccaggaagctggagcaattccaccagattctgtacaacagatgcaacaagaaaattcatgaagagtagatcttaggttgaatttttcacagaagaccttgtaagaacagacaatggtgagaaaaaaaaagcccgaggtcaatacaatggggaaaagcctgtgaagtga

SEQ ID NO: 224822 - DNA, 307 bp, Homo sapiens
agtcagtaattaattcattttagagtaagttcatcttggggctgacaaagaggtgtagtagctaattttaaaagatgagtgtaacatctttcccatgtcatacatgtcaagattaaacttaaattatgtattatatattaatgaccttaattttattcataaactactgtaagtacaacagaaatcaatttagttctatttcagccatcatttctgggtgtgaacttctagtttctataaggaataaagagataggcatgaactagtacctgacctcatgaagcatacactgtagttggagacgtat

SEQ ID NO: 224823 - DNA, 523 bp, Homo sapiens
tccttataaaaagaaagaacgttaaaaataaatacaataaactcagaatgatgctattaaattctagctacaaatacattttaaccaaagatctgttttctctttttgtcaaaaagaaattagcaagtattggagactgactagcaccaaactgggtcttttccttggtgaactcagtaggattggaatgggaactttttcaccatgtggttcaatgttgcttaatgccctatcaatgcactgtccaaaatcatgccttataacattttaattccatcctttgggaaagaatgggttaaaaccttttttctttttaattattattttctagaaagttttagttacatgtccatatgcatttgtgtcatcccagctggacaacatatgaagctattatcaccctggagttaatggccctggtgaagttggcatttgggcattcctgctgatgttaaagtaacagggcattcagcgtggtacatgagccctttttccccccagggtcagaaatgcatctattaaa

SEQ ID NO: 224824 - DNA, 441 bp, Homo sapiens
tcactttggtctaaaactgtggagcagatcttcacagagggtggaacatgagagtccaggagatgaataaggaatttttagggttagaggatgggaaacaggaaggcaaaactatgggaacacagctgtggtttcagactgaatgagacatccattttaaaagtttttgtctataaatttactcctaccagaagctcttttgattttaaaataccgagcagaatgtatgaagctaactgtggaaagttaatagggcaataccagggtagccttgttttacccatttcatttatggtcccacttgggctgctgaaaaggaacttggtcctgggatgggtgatgaaatctatggttcatctgcctctggctgaattccaaaatcaagcatggattcattcattattttcccttccattcatctagaaaatcaagagttgagta

SEQ ID NO: 224825 - DNA, 274 bp, Homo sapiens
cgccaagtcctcagactctcccccagaagctcctgcggcaagtccccagctggcaagtccccatcccggcccgggcactgggggaatgtcaggacttaggagagagagggtcttgccccttggatccattgatactgagacaagatttattcttgtagctggccatggtggctcatgcctgtaatcccagcactttgggaggccaagacaggaggatcactcgagcccaggaatttgagaccagcctgggcaacatagtgagaccctgtctcta

SEQ ID NO: 224826 - DNA, 461 bp, Homo sapiens
tgatgcacaattctttgaaatatacgacatattagaacaaatttcaaaagagccctgtgtgacatgccagagccatggagcctgattagaactggagttggaatcatttgtggcactggatataatttaagacaccatgttgttccttaggaggaagccttatttataacagcagtaccatgctgcacaacagatgccagtggaaagtgaaacgatgatgaaattaatttgacctttcttaagcctgcagaacataaatcagatctatttaataaagatcaagtttgcaagaaataacttcaactgcagatgtgtaaatgcttcaatgaaagaaatgatggcaacatttgtacagttctgaatatagtttaaattagacaaaaatgatgaaaaaatgtagttcagagatgtgcaacttttcttcattaaatgtatgtggcatactaagaaatttggtcatt

SEQ ID NO: 224827 - DNA, 764 bp, Homo sapiens
atttatccatttatcagttaagaacgtttgggtttttttcactttttgggtattgtgaataacacttctaagaacatttgtgtacaaggtttcctggggatgtatgtttccatttctcatggctacatacctaagagtgaaattggtgggccatatggaaactctatgtttaaccatttcagaaggtgccagactgtttccagtgtacatgaaccattttatatacccactagctgtgtgagggtcccagtgtctctccatattcgagccaacatttattatcaactctctttttgataaagtcatcctagtggttctgaagttgcatctcatcgtagtttgcatttgtgtttctctgatgttgaacctctttcacgtacctattcgccacttgtatatcttctttggagcaatgtgtactcaacatttagtaatttttaactggtttgtgttttgtcattgagttataagaattctttatatattccagataaaaatgctttacaagatataatttgcagaaatattctcccattctatgggttgtcctttactttcttgatggtactctttgaagcacaaaagtttttactttggatgaagtccaatttatctattttttcttttgttacttgtggttttgatgtcatgtttaagaaaccgttagctagtcttaggtcatgaaatttattcctatgctttttccttttttaaaaaccatcttaaacattttaaattgtacaatttagtaatgttatgtatat

SEQ ID NO: 224828 - DNA, 334 bp, Homo sapiens
cagaatttggagtgcacctatgttgagccctagctatttcacttactataaaatcaatgtatcctcactgtgtcttcagtgaaatgtaaaatggagtctgtataggggttaggaacacagactctagagtttgactgcctgagtttaaataccaactctactatttactagctgtgtgaccttaggtaaattactgaatccttctgtgtctcaattttctcattagtaaaatgggatcaatgtgaagattaaatgagttaatgcatataaagcccgtagaagagtgcctctctcaaagtaaccctatatacatgtttgctgtttcaactgcata

SEQ ID NO: 224829 - DNA, 452 bp, Homo sapiens
ccgcagaatgcagttgagatgcatagaaaaagtctgggactacttacacctatttgctagcatgtctttgaagaatgttactagagagaagcaggtacaaccttgtgattattatgctttgaacttgatgctgtgctgaacacataaaaagagccctcatgatgagagattggaaggagaatgaaagaaaggaagcaagatcatccagagaaccatgaagtagtgaccttcagtgaccttcagtgatgaggtgaaaagtgtccggacaggatgagacctgtatacttgtaattttttctagaaatatctggaaaacaaagcaagagaagtagaagtatttgtagcttttactggagaagatttttgtatttttctaagtagatatgttagttgcccatgttagtaaaattttaaaatgttttaaaagtcttaaacatttttatctctagtgt

SEQ ID NO: 224830 - DNA, 239 bp, Homo sapiens
ttcctagaaaattttcttgtcatttatctgtatgtagaagtatatttctttaacaaatttatacctgtgggatcatgctatacaaaattcctatttgcattttcagttaatattatattggagatgtctcaattttagcagatgtatatgtatttcattttaatgactacctattattccatagtgtgaatgttaccataatttacttaaataaatctcacatttctggacatttaggt

SEQ ID NO: 224831 - DNA, 300 bp, Homo sapiens
caatggctccagaacctacagaaaggagagaagcagagaccgtgaatgtgcaaactgaacgcagaccaggagggcgccctgctgtggcacctgacatcctcactaggtcaagggaggcaggagagaaggcaacatcctgggacactcccagttgaccccaggacagtcacatctggagtggctgtgcacccctgccccgagctgcgcttgaaggaccctgtccttagcacatcatctgccaaaactctgccttaggcaaagtcctggttcttatcagctccagcatgcctcaaacttctg

SEQ ID NO: 224832 - DNA, 132 bp, Homo sapiens
gagaaaacatttttatctttataacttcattttttggtactgagtgcatattgttttttacttctttattacacaaataatacatgaataaagtttcatcataaaaactcaaacaatacagagatatacaaa

SEQ ID NO: 224833 - DNA, 872 bp, Homo sapiens
tttattttcacagaatatatattatcctgttgatttaaaaaattccagtgaacacagaaaacatgtgtcatctattttatgtgaattaaaaccaaaagatctaggcatgaaatcaaaaacatcaagacatctcattcaaaaagatctcaagaaatatataaaagacattgtgaagaaaaatttgttatggatatgattgcctttgaaaaagcctgtgaaagacttcaagatgctaaaacaaaagtagcaattgtgaaaacaaatttagactttaaagttcccaatggactgataaaatgaatcaatgccagatcacatcctatgatcatcttaaattatagtcattatttttagttgaaggaatttgaaataatactctaaagcaagaaatactctacatcacaagatggatttatatataagtcttctaaaaatataaagattagttaaaatgtttctcttattggtcataatttaacttaaagttgacttagcacctctgaaaaatttcttagatcagatgcctaaggaacaattaaactgatttaatgtattgcagacaatgttgcaatgacattgctgatattctgtttcatattctttctaaatatagcaattcataagctaatttaggtttttctggaaaccttagaatagtaatttctactccaactgctgacttttattaagacactgtgtacgttgatgacttttattacctgcttttatatatttcctgcttattttgttaaaacaatttctgaatttattttttaaagtatggtttcaatattttgtcagtgatatatgctgttataaaaattcagaaaatatgaactatgaaaagtaaattaaacattcttatcaccttc

SEQ ID NO: 224834 - DNA, 1094 bp, Homo sapiens
tttattttcacagaatatatattatcctgttgatttaaaaaattccagtgaacacagaaaacatgtgtcatctattttatgtgaattaaaaccaaaagatctaggcatgaaatcaaaaacatcaagacatctcattcaaaaagatctcaagaaatatataaaagacattgtgaagaaaaatttgttatggatatgattgcctttgaaaaagcctgtgaaagacttcaagatgctaaaacaaaagtagcaattgtgaaaacaaatttagactttaaagttcccaatggactgataaaatgaatcaatgccagatcacatcctatgatcatcttaaattatagtcattatttttagttgaaggaatttgaaataatactctaaagcaagaaatactctacatcacaagatggatttatatataagtcttctaaaaatataaagattagttaaaatgtttctcttattggtcataatttaacttaaagttgacttagcacctctgaaaaatttcttagatcagatgcctaaggaacaattaaactgatttaatgtattgcagacaatgttgcaatgacattgctgatattctgtttcatattctttctaaatatagcaattcataagctaatttaggtttttctggaaaccttagaatagtaatttctactccaactgctgacttttattaagacactgtgtacgttgatgacttttattacctgcttttatatatttcctgcttattttgttaaaacaatttctgaatttattttttaaagtatggtttcaatattttgtcagtgatatatgctgttataaaaattcagaaaatatgaactatgaaaagtaaattaaacattcttatcaccttccttgaagactgtaagatttttgtatatttacttttgatgggtttgccctgtttggtatacatgtgaagacagggaaaagacagaggagagaagcaagagacaacccatataattatatattggaatcataaaatatacagaaatggtatatattaaccataagtctgtttaatacataccaatggtagaaaatttgaaaaataaactgttaaaaaagacaga

SEQ ID NO: 224835 - DNA, 1115 bp, Homo sapiens
tttattttcacagaatatatattatcctgttgatttaaaaaattccagtgaacacagaaaacatgtgtcatctattttatgtgaattaaaaccaaaagatctaggcatgaaatcaaaaacatcaagacatctcattcaaaaaggtcaggagtctgaagatgaaattgtggatgaaaaattggataccagttttaggatatcagttttcaaactacccatatacacttcaggttcattgaagaataatgcagtattgagagagaaaaaacaacatttttttcctgcatatcctcagccaatctatactactcatccaaagccaatcattaaaaaagacatacgattggagcggagtatgaaagagttttttgcaccacaaagagctgatctcaagaaatatataaaagacattgtgaagaaaaatttgttatggatatgattgcctttgaaaaagcctgtgaaagacttcaagatgctaaaacaaaagtagcaattgtgaaaacaaatttagactttaaagttcccaatggactgataaaatgaatcaatgccagatcacatcctatgatcatcttaaattatagtcattatttttagttgaaggaatttgaaataatactctaaagcaagaaatactctacatcacaagatggatttatatataagtcttctaaaaatataaagattagttaaaatgtttctcttattggtcataatttaacttaaagttgacttagcacctctgaaaaatttcttagatcagatgcctaaggaacaattaaactgatttaatgtattgcagacaatgttgcaatgacattgctgatattctgtttcatattctttctaaatatagcaattcataagctaatttaggtttttctggaaaccttagaatagtaatttctactccaactgctgacttttattaagacactgtgtacgttgatgacttttattacctgcttttatatatttcctgcttattttgttaaaacaatttctgaatttattttttaaagtatggtttcaatattttgtcagtgatatatgctgttataaaaattcagaaaatatgaactatgaaaagtaaattaaacattcttatcaccttc

SEQ ID NO: 224836 - DNA, 1096 bp, Homo sapiens
aaagagttagagtagctgttaatgaacatttgaatcagaaaaaatatgctacacaaaaactaattgaagaaaataaagagacaattcagaacagtttacgacaagtttggcaaaacagattcaactaccttgaaaaagctagagagagaaaagctctgtttctaaaagaaaaatcccaaaaggcttcagagcgtttattagttcaaaacttaaataatgagcgcactcttttgaccagaggactacttaaaattgacagactggagaagaatgaggctgtcctaaaagagaaaagcctgattgttaagcaaaaactaaaagcagaaaaatatagaaagaatttacttaaagaaatgaaaaaagttagatctcaagaaatatataaaagacattgtgaagaaaaatttgttatggatatgattgcctttgaaaaagcctgtgaaagacttcaagatgctaaaacaaaagtagcaattgtgaaaacaaatttagactttaaagttcccaatggactgataaaatgaatcaatgccagatcacatcctatgatcatcttaaattatagtcattatttttagttgaaggaatttgaaataatactctaaagcaagaaatactctacatcacaagatggatttatatataagtcttctaaaaatataaagattagttaaaatgtttctcttattggtcataatttaacttaaagttgacttagcacctctgaaaaatttcttagatcagatgcctaaggaacaattaaactgatttaatgtattgcagacaatgttgcaatgacattgctgatattctgtttcatattctttctaaatatagcaattcataagctaatttaggtttttctggaaaccttagaatagtaatttctactccaactgctgacttttattaagacactgtgtacgttgatgacttttattacctgcttttatatatttcctgcttattttgttaaaacaatttctgaatttattttttaaagtatggtttcaatattttgtcagtgatatatgctgttataaaaattcagaaaatatgaactatgaaaagtaaattaaacattcttatcaccttc

SEQ ID NO: 224837 - DNA, 478 bp, Homo sapiens
ttgttttttatttttcttctgtatatgttgatgaaaaattaagaaagaaacagaaactaaaaatttaaagttactgaaaatatcacacctttttaaatgtttattatgagttttacattaaaaaaacttttaggttcaggggtacatgtgcaggtttgttatataagtaaacttgtgtaatgagggtttgctgtacagattacttttctcacccaggtactaagtgtagtacctgaaaattattttttcctgattttctccttcctcccaccctccactctgaggtaggccccagtgtctcttgtttctctgcttgtatccatgtgttctcattatttagctcctacttataagtgagaatatgcagtatttttttttgttgttgttattgttcctgcattagtttgctaggaatattggccaccagcttcatccatgtttctgcaaaggacatgatcgtgttctttattattgctgc

SEQ ID NO: 224838 - DNA, 259 bp, Homo sapiens
caaaaaaaagaaaaaaaaaactcgggtttgaacagtgtggcctgcaaagggacttggctctcatttacttcacctttctatcttattgccttgctttattttcatttcagcatttaggaaattttcttgttcttttgtttattgtctgtgttcctatccagaatgtaagctcctgagagcagaggcctcttctgtcctcttctgtcttattccctgctgtgtccagcacatggtctgcactcaataagtatttgttgcg

SEQ ID NO: 224839 - DNA, 402 bp, Homo sapiens
tcagatctgggaactccagacatgcatctcttaatagtgatggttagctagagccaagaagcaaagtttatagataatgcacttgatataaaatttaaaggtattacgaaatactctgggctgggcatggtggctcatgcctctaatcctagcactttgggaggccaaggctggtggagtgcctgagctcaggagtttgagaccagcctgggcaacacggcgaaacctcatctctactaaaaatacaaaatctagcccggtgtggcaatgtgcgcctgtagtcccagctactctgggatgaggcaggaaaattgcttgaaccagggaggcagaggttgcagtgagctgaaatcgcgcgactgaattccagcctgggcgacagagcgagactctgtctcagga

SEQ ID NO: 224840 - DNA, 449 bp, Homo sapiens
cagtttagtacacagtgttctcaagtgcacatggaagattattcaggacagacaaaatgttgggccatgacacaaacctcaatagatttttaaaagatttaaattgtataaagtatattctttagccacagtgaaaataaattagaaattggtaacagaaggaaatttaggaaattcaaaactatgtgaaaattaaataagattatttattgattactcctgaataatcaacagggcaaagaagaaatcacaaaggaaattagaaaatgttttgagataaaggtaagagaaaaacacaacatattaaaatttgtggtatgcagctaaagcaataaagggaattttaaaaatttatttagtagaggaaaatttatagctacaggtatttaagtaaaaaaaaatcttaaataacataacatttcattttaagaaactgtaaaaagaaagag

SEQ ID NO: 224841 - DNA, 497 bp, Homo sapiens
cagcatttatggatgagcaaagtaagtggtttcttgggatggacggtgaacactgcagacagcagggtaaggtcacttctgtcaggtccaaaccaaccgaggccagagagtacacagcggcagggctcacgcctgcatggctgagatgaggacagtgtcaaagacattctaaaataaccccacaaggaattccttatcaggaatgcagcaattcagacaagatgctctaggaagaacactggcccagcagcggcatctcaaccagtgaacggctgccaactctggttttcagcctcagagccagtgaactctgtttccaagcagcttatgtgaacttctcagccagggagagcttccctgcccctccctctccggcacatgggtggctcgccacactggctcatctctcgatgagagtcccccaccctctggccacagtggttcatctctggttataatcctttcttctaattcccaaatacatttgacatgtgaaa

SEQ ID NO: 224842 - DNA, 509 bp, Homo sapiens
ctagacctcccgtaactggtcgcaagtccaaccaccccaaatggggatttgaaggaaaggttgcattcaggcaggcacagaagggctgaaggttggacttgccaggcaaaggagtggaggtaggaaagtatttaatagtgggtagtgtggagggagtttcgagtgttacagtttggttgtattgtggaattcatgaagaggggcagccggaaattatggcaacgtggtttggggccaagttctggggcacctgatttgtagataattgtaagtcattgaaagttttggagcagtgaagttacatgaagatgaatctggcagcaagataacaattgagggaggcaggcttattggccaggctataataagactttagacaaaattaatgagcatttaaatgagtggcataagtgaggaagagaggttgaaaaataaattatggtaggatgaacagtataaagcagttaatcagatttgaggacaagggagatgggagaaataaactagat

SEQ ID NO: 224843 - DNA, 1191 bp, Homo sapiens
tcagaatatagattcctattatatttttatataatgattacctgtgaaacaactctttaaatttggaaacctatgtgagtaaaggataagatctattccctgtgacctcagagggtcagtgaactaggactaaagtggaaactactgaaaggtgcctttctaccttgtcaacactctccagaacagtacaggcttccacttaatgtaaaaacattcttatgcttaattgaagaaactagtagtggagatgggattagactgtaccttttaatttctaacattaccattttgtaaaagtagtggattttgttagccagcttggtaagaaggtatgatgacattgttaatagagtccacatcataatcaacaatttacaaagactataaacaatttttacctagtatctctgatgtataaggtcctcggctaagttctgtggaggcatataaattggcagaggccctgtctgtctacatataacttaacagggaagatgatgaatgctgaggcaggagaatcgcttaaacctgggaggcggagattgcagtgagccaagatcgtgccactgcactcagcctttgagagcaaaactccatcccagaaaaaaaagaagaaagagacaagaaataaagattaaggactaatagctgcagtgtcagtacaggaggggagagatttgtaggaaattaggggaagacttcatagaggcaaccacagccaaatggggatttgaaggaaaggttgcattcaggcaggcacagaagggctgaaggttggacttgccaggcaaaggagtggaggtaggaaagtatttaatagtgggtagtgtggagggagtttcgagtgttacagtttggttgtattgtggaattcatgaagaggggcagccggaaattatggcaacgtggtttggggccaagttctggggcacctgatttgtagataattgtaagtcattgaaagttttggagcagtgaagttacatgaagatgaatctggcagcaagataacaattgagggaggcaggcttattggccaggctataataagactttagacaaaattaatgagcatttaaatgagtggcataagtgaggaagagaggttgaaaaataaattatggtaggatgaacagtataaagcagttaatcagatttgaggacaagggagatgggagaaataaactagat

SEQ ID NO: 224844 - DNA, 460 bp, Homo sapiens
agttcaagaccagcctggccaacatggtgaaaccctgtctctactaaaaatacaaaaattagctgggcatagtggcaggcgcctgtaatcccagctactcgggaggctgaggcaggagaatcgcttaaacctgggaggcggagattgcagtgagccaagatcgtgccactgcactcagcctttgagagcaaaactccatcccagaaaaaaaagaagaaagagacaagaaataaagattaaggactaatagctgcagtgtcagtacaggaggggagagatttgtaggaaattaggggaagacttcatagaggcaaccacagccaaatggggatttgaaggaaaggttgcattcaggcaggcacagaagggctgaaggttggacttgccaggcaaaggagtggaggtaggaaagtatttaatagtgggtagtgtggagggagtttcgagtgttacagtttgg

SEQ ID NO: 224845 - DNA, 725 bp, Homo sapiens
gcaattaactacttttttcttaatttctctaactttggcccaactaaatattttcccatcattcctgttttgccgccctcgagctaggacatggaacttacttgttcggaaaagcttctatctgattgaaagggcatgctaattctttctttatagtgtaattgtttcacatttaagagggaaggagaaacgcctaaagtaataccacagaagaaataccctcaactaatctttctaagcagtacgacaatgagtaatgattacagttaattaagttaggcaacctccatttccattcacttagtagcactgctaattatactcatgctacaaggtttctttagttcttctgtaatttggatgcagtactctttgtagacaagggaatacggtacgattaatgagatttttcccaccaacacctcctgttctctccaaatgaaatttccgcatctgaaaattgagagtagggaacggagaaaaaaaaaatcagtcacattttaacttactgccagcacggtccatgcttataattgccaaatattttatattaaagaaaacaaggtgtgggtttttttttttgtttgaaaccttgtaaaattgtggcttacgtaaaaatgaaataagtatagaacatggctttttaaaaatatcagtggcaatgataatgacactttatattgtatgcttttggtcgcattaaataaacatatgttgagcacata

SEQ ID NO: 224846 - DNA, 376 bp, Homo sapiens
tagagcatcattttgtttcacattgttgtatgctaaaaataattttaaacctataagtatctgatgtatattagatgcttaatagaaaatgggatctataacactggagggaatatcacttagtaagagcccaatagataggaattgccctttaaaaatggaatctaataggcaaacacaaagcattgctgcacagtagcccaaagtaatttcttagcccagtggacttcagtaagacaaacacatctcaaaaatcatatcgaagaggccatatgtgttggggactagaatcttaaaggtaagtctggttttcacccagtaggccctaatggtacagctagaccagagtttacagctggacttcattgagattgtc

SEQ ID NO: 224847 - DNA, 835 bp, Homo sapiens
tgtggtaatgtaaactttgatatatagtctttttatttttctcttattaatctgccaaagatgggaacagatacaagaatttttcaaattggcttttgtaagacaattgatgattgtaatagtgtttaatcttccagaaagctttatatgttgttccacaataaaattgatatttgtttcagcaaagttttcctgacactcacaaacccacaaactgttcctcttaatgcagatattgtagaatctacaaagttcaaatccatttttgatccaaagaaagtagaggagtatttgagacatgagtgtacccagccctttttttaatcacaggcaatgcatgggtctggctggttacactttgccaagaagacttgtcttatgaaacccaaggtatattttgttatgccattttatgtccttttcttttaacattgtggaaagtggtatgttgaatcaagtgtaagctgagttttccagacaactgaagtagctacatcatgaatgttattttgttattaaagggtttttactcagtgctttgtgccaatggatgtccttttccttggagacacataactacaaaattacctcagcttggcctggttttctctcctgccctcttggggaaacatgggcctggcctgggaaaaggcaggtcatgggctggaaggtaggttttggtactaggaagaaatctctgtatctgtcagctttaaagagaactgggccaaaaatctctaacctcactctctctggactccaacacttccctgcaatcctttggtcttgagcatgtgccagcatgaaggcagactccagttcatacatgaaaggc

SEQ ID NO: 224848 - DNA, 447 bp, Homo sapiens
ccctgtaagtgattattaaacctccgcagtcctgggctcaactttgatcacctgtatggtgatgctgtcatttggtgattagggagtatgaaggtcaagttggaacttcagcagtttcaaagaaactcaagttgaagagggatgataagaatgtgtttgggccgggcgcggtggctcacgcctgtaatcccagcactttgggaggccgaggcgggtggatcatgaggtcaggagatcgagaccatcctggctaacaaggtgaaaccccgtctctactaaaaaatacaaaaaattagccgggcgcggtggcgggcgcctgtagtcccagctactcgggaggctgaggcaggagaatggcgtgaacccaggaagcggagcttgcagtgagcgagattgcgccactgcagtccgcagtccggcctgggagacagagcgagactccgtctc

SEQ ID NO: 224849 - DNA, 389 bp, Homo sapiens
gatgctctacaatctggcccaggctgaccatatcctgcctggagggccgggtaagtggggcactcaggcttagaacagccacatgccttcccctccctgtgggacccacttccaagggagccagcctgaggcttgcatcactgtttggtctcctcctacccttccagatcttcctggtgctggagttagtgcccccttttttctcagctgagtcatgaccctcacccagcccagcccagccccctaccctagatctgctcctacacctgattgatgccctggcctcaggcagggctggagcttggggctggtgcctcgggccttcagccttgcccagggcagcctgggcagaagctgagattggatgtcatttgtcaaccttggcagag

SEQ ID NO: 224850 - DNA, 335 bp, Homo sapiens
tattttaacatagggtcctgccttgtcacccaggctggagtatggtggtgtgatcatagttcactgtaacctagaactcctaggctcaaatgatcctcctgtctcagcctcccaagtagccaggactacaggggtgtgccatcacacctggctaattttgttttttaagagactgggtttcactatgttggtcatgaactcaaaaacactgaatactaaagtatactaacactgaattgtacacgttaaagggttgaattttatgttattcaaactgtatctcaattcaaaaattcacgtgaaaataagattgcattaaaatattctagttcact

SEQ ID NO: 224851 - DNA, 330 bp, Homo sapiens
tcagtaaaggaaatgggcttctcacgtagaaggtgatatgcatggacatttatttaccattgtctgtccatagattgtggaatgaattggcttgtgtggaaaatacagaatgacctatccctggatcccagacagagttttggatactacaggttgtctctgcaaggaaggttacccagctcccttaaaatcattctataggaagttcccctccatgcttcttcatgcagtttaactctaatacctaaaaagaagagttgttctttccccttgatgtcacatcctctgtgtatattaagagtttaacttaaaaatgttacccatttcatt

SEQ ID NO: 224852 - DNA, 506 bp, Homo sapiens
aaaaggctcagagactcccccttccataagcccttagactgcagtgcttgtgcctttccccatactgcctcacctcacaggagggccaggcaccacttgtatctctcagatgcaaaactgccaacccctttctcctgtcttgggttggctggcactggggcgggcacctagggtatagtctctgcccatggcactgggcctccatttcttccacatatgtgtacctccagcttggccaaccctcagcctggctgtgaggcccaaagcatcttcccttccccttggagtctctgggattgggatgagtgcctggctcccatctccttctccccttttgtggctattggcagctgctggctcaggggcatcccacttccaggctctgggttccactctcagggaagggctctaggacccattcctacacccacccacggccaggagggccaaggtcccatgctggatatttaaatttagaggctggcttccagggtgcatagataaat

SEQ ID NO: 224853 - DNA, 694 bp, Homo sapiens
tggtttgtttgtttgtttgcagagacagggtctcactttgttgcccaggctggtcttgaactccttgcttcaagtaatgttcctgccttggccaccaaaagtgctgggattacaggcatgagacactatgcctagctaagaattttatatcctaccaaatcaagcttcataagttaaggaaaataaattctttctcagacaaacaaatgctaaggacattcactgatactagaatgacccaacaagaaaagcccaaaggagttctaaacatgaaaactaaaggatgatacttgccatcataaaaggacatataagtacaaagctcataatcctagaaagcattgaaactccaacacaacaggctaaaaactttatgacaggtacaaaacctcacatatcaatattaatcttgaatccaaataacctaaatattctacacaaaagctacaaagtggcaaattgtatttaaagacagacacagactcaaaacaaaggggtgtgtgatggttaacactgagtgtcaacttgattggatcgaaggatgcaaagtattgatcctgggtgtgtctgtgagggtgttgccaaaggagattaacatttgagtcagtcgagtgggaagggcagatccacccttaatttgggtgggcacaatctactcagctgccagcatggccagaataaaaattgggcaaaa

SEQ ID NO: 224854 - DNA, 216 bp, Homo sapiens
cagaagtatttaattggtcttcctcccctagagctgtacattttgttgcattgaaggcaaccttctgggctaagtattccgtggtcagaagtgaacaacagaaatggccagctgagaatgtggtaatggtttatcttcttagctgtgtgatgacatctgggctcatctaaaatcatagcaggtgttccgaagatgctggcttgaactgtgaagctt

SEQ ID NO: 224855 - DNA, 506 bp, Homo sapiens
tcacccctttcagcagcatatctgagagccaggggtggcagtgcttgggaaagcagctcactatgcacgccagtcactgtgcccagcaaggctgtgactcgacgtcccacagggtcctctgtcaccttcccaaattgccctctctgcttttccttgcagggatggcctgtgactcccccctcaacctgcctcaagaccagcagggcagtgggaaccaagagaggcatctaaggattgcaccggtcacctagcccagtcctggatcaagcttttgggtgtggttcagcccaggagaaggaggagtgagcgaggggggcaggaagacagcaggcaggctggccagtggctgtgggagggctgaagacatcccaaaggccccacttggttcccatgtccacccctgcagcggaggagtggccggcaggattccgagatgcagcccccagagccgcgaggaggaaggagcagaccctgaaggagaggaggcaggacaaatacaaaaaaaa

SEQ ID NO: 224856 - DNA, 324 bp, Homo sapiens
gccagtttttcccagggcttctattggcttcataatgtcagcctccgttctgtaaagctgtctggtcatagatgaaaatatgacattccagtcaaggccttggtaaaataaccagtgtttccaattgtgttctgttacaagaagaacagattcttactgagcttatgcaaataactacattaccataaaataagaatattcatgaatttcaacattttggagggataaggtagagagaaaggcaaatgtttcaattttgttcacaaaactatacccaattgctgtaaactttaagaggaataaaaggaagctccttaactttgg

SEQ ID NO: 224857 - DNA, 464 bp, Homo sapiens
cttctgtgaacccatcacccaaatactgaatgtagtacccaacaggtagtttttcagtccatatccctgcccccagtgactattatttccatctttatgtccatgtgtacccattatttagctcccacttataagtaagaacatataatattagattttctgtttctgatttagttcccttaggataatgacttccagttccatctatgttgctaaaaaggacatgatttcattcttttttatggttgcataatgcacagtgtgtgtgtgtgtgtgtatgtgtatatatatatatatatatatatatatgcatatataatattttctttagtcaaccattgatggacagtaggttgattctctaactttactgttgtgaatagtgctgtgataaacaaaagcaatcagtaccaattccaaaccctgtatccagaaaaggtacattaaaaaaaaaattcctaaaa

SEQ ID NO: 224858 - DNA, 388 bp, Homo sapiens
tcggctcactgcaacctccgcctcacgggttcaggcaattctcctgcctcagcctcctgagtagctgagattacaggcacacgccacgcttggctaacatttctctttctaaatgttttcatgttttctgtatttttcataatgggtgtgttttacttttaaaaagaggaggaaaaggctttgtttttaaaattaaattaagaatgatattaaaagaccatgtataaatcaaatctatgctgagagttcggccgtgtcagaaagacgcgtccatatcacaggaacagagaggagcacacggaggggagaggagagaggtgaaggggcagagggagttgctttccttgctcaacttttccttgtatgatttcgatgctgtttatttagg

SEQ ID NO: 224859 - DNA, 206 bp, Homo sapiens
caaattttcccatgtaagcctcgcttctctttccacttttcctttgatacgtatctctattttttcaggtaaaagtaatttgcttccacttgaaaatttttgttaatcattttttagacatcatatattaacaacacgcacacaaacacataaaggaagcattatatactcactcacccaaccctacctccacctttcctgtctct

SEQ ID NO: 224860 - DNA, 368 bp, Homo sapiens
agcgtgtattctttgaccagctttgcgctggggcccagcgactgaagggtgaacccaaacaacaggcagccctccccgagctcagtccagtgggaacacagacctcgactgcagagcaacagaaagataagccgggctggaggctcccggcccccatcttcccacagtgaccccattttgggaacaggaacccccatccctcgtcttgtttcgggattaggcttctccaaatctggcaccctatcaccttgactcctctcttgcccccccgccacatccaaagtgtctggaaagcctgtcactctacatgacaatgtaacctggtgctgcgggctcctcttccttgtcactccccttcctcgtcatcc

SEQ ID NO: 224861 - DNA, 382 bp, Homo sapiens
agcaggactccaatcataattaatccttttgggccgtatttaaagaaaattacttttcttagccctgttcacttatttctaaaatgtagttatttgctttatgttccaggatatccttgatcaaataatccttttctaaatcaacttatttcgacatatgtggccaatgtggctgtcatcctaacctcccttggcattcacacccagctctattttatttactatcctacttttagcactgtgagcataaaccataggttcttctttttacaggagaggttggatgccagtagcctttagcctccttcagcccatcctgtaccttgaacctggacatgatgtatagagccccagcaaccacttgataataaaccaacttgcc

SEQ ID NO: 224862 - DNA, 426 bp, Homo sapiens
gtgcacacaaatcacctgtgcatgttaaaatgcagacggtgacttacagatcttgggggaggccaagtgtctgcatttccaacaagctcccagatgatggccacactgctgatctgaggaccacattttgaacagcaatccttaaaacacacaaggctgtgggaccgcactcctgagaagagacctcactcttggaagggattctaggaggctgcattcaaaccatcccagagacagctcacaattttgttagggacctgatactaaaaattaccaaatcacaatcgtgtgctgagggcttactttgtgcttttcagatgacatttcatttgatgctctcaataaccctgaagggatttcagagatggggattatgatggagcttcagaattaaactgattaaaactggcccagagtcacacaact

SEQ ID NO: 224863 - DNA, 476 bp, Homo sapiens
cttggtcttcaggttctcctcgtgcttgttgagccggcggcgcatggcgcgtgtcttcttaggccgcaggtccaggggcttgtacttcttgcccttgtagaatttcctgaggtgatcttctagaagatcacctcttaaatgccatattattgcccacagttgccaaatacaaaatatcaagtcctctgctgaagaagactgaggtcccatcgtttcctgtgtcgcaggtcacttcttcaccaggtggctgactgcatcattgtgaggcagagccatgctgtgcaagtgtcataagtcatcccactttcaactctcaggaacactcgcagccagtgccacgctgtcctcgccatccaatattgatagccaccccagttcctgccagccagcctggcacacataaccataggatcccctctggtcatgggtcaccatgccttttcttaaactgcgcttctagtgacatggccttaaac

SEQ ID NO: 224864 - DNA, 447 bp, Homo sapiens
ttccactatgatttgtagtttgcattagtgtggtaaatttgttacaactgatgagtcaatgttgatacattattattaataaaacccatacacaagggctcactctttgtgttgtgcattctataggttttgataaatgtataatgacatttatccataattatagtatcacacagaatagtttcactgtcctaaaaatcctctgtgttccacctatttacccattcctcctctctaatgcctgatattcattatctttgtactgtatctagttttgtctcatccaggatgtcatgcagttgtaatcataccatatgtagccatttcagattggcttctttcacttagtagtatatatttaagattcttccatgtcttttcacagtgattgttttatttttataagctaaaatcgttttccaaaataaatgaaaactcttaatttta

SEQ ID NO: 224865 - DNA, 346 bp, Homo sapiens
tcagagcatggacggcggtctgaggaggaggccgtggagaaaatgggaagaaataatgagaatttcatttgaaatacacatttgtacacatcattccccaaacccaggtcataaactccagcaccctggagccaggaggtccctggcaggtagtcactgccctgaggcacaagactgaggtctttcatggctgaggggttgagttctgttgggtggaggtgcctcagcctgccttgaattccctgtgacaccaaatccaaataaatccaatgttgatctttgaggctggtgtcttagtctgttttctgtagctataactggacaccagagactgggtaatttgtat

SEQ ID NO: 224866 - DNA, 435 bp, Homo sapiens
aaaagcagcttaataattcagttcactcccttctttgataccttagctagtagtttgtaatgggtatgagcagttattccgaaggaatgagtaaagttgttgaaccacttgcaatatggtggtttcattccttcaataaaaattttagtgggccaggcatggtggctcacccctgtgataccagtacttcggtaggccgagacgggcagactgagctcaggagtttgagaccagcctgggcaacatggcagaatcccatctccacaaaaaatacaaaaaattagctggatgtggtggtggtgcacacctgtaatcctagctacttcaggaaggctgaggtgggaggatggcttcaggctgggaggcggaggttcagtgagctgagatcatgccactgcactttagcctggataatagagtgagattgtctcaaaa

SEQ ID NO: 224867 - DNA, 490 bp, Homo sapiens
cagattgaggcaatgtgttcagttaggggtcaccgtgactcagcatcagctttgagtggatttatgatgtagtataccactaatataaatatgataataacaaaatagctgcatttattgatgaagttctgggtggtgtcctaagggctttaagtatattttcttatttaaccttcacaataaccaataattaggtgttataattgtccccacattgtaaatgaagatattgggacttgtaatggtaattggcagtactggaacaggaacgatattattctctggctaatgtcattagaatagtattctcatttaggttaatcttggtgcttccttcttcagtaaactcatgttaaatttgtaccctccattctcatcttcctctaaaataaaagggagaaatttgttctgagctagaaaagggatgacttcagattggtttattcataaaaactcaagcaaagcactgttttatgaagctatttttgtg

SEQ ID NO: 224868 - DNA, 581 bp, Homo sapiens
tcaagcaagtatatctttgggccaactgtaacctataactctatagggaagaggtttctgagaactctgtgtcacagcttaaccatacgaagacaatacaaaccatcccgatgatgatgatggttggtaataatgaagaaaataatatgagtgttttctcaaggaaggctacttcttgatggcagttctgggagacataagagaagttttatttttacccaaatggttggtaaataaattactgtgtgacatgacagagttcaagttatatgatatagtagattcacattatgccaaaaactataagcctcccagacacagcccaggaattcattttgagagctatcataggcttctgaatgtgctaccatctatgctcttaatttaaaccttaatttgctgtgtggacgacagactactctgaaaaaaaccccaaatgcttcagtgcaggactatgtgtcgtggataaagtaacaaaattacatattcaacccattatggccatcctcttgtatgggagatgcagattgttaccaatatttaactcttataattaacttgaataaatttccttacaaaat

SEQ ID NO: 224869 - DNA, 825 bp, Homo sapiens
gtagtaggttgaagggtcaatgcggtgggagatattacaaaaggaaacttttctttccagaaagaaagaacttagattacagacagggccacagatgggaatttgttcagcatttccaagctgctttgaaatcctgttggtggcagctgccgtttccccgagagttaccgttgtttagcattgcggtagactgttcctcccaggcagctgttgtgactgagtttcgattgatcccatttctacaaggctccattagcatcttcgacttattgattttttttttttcttagagctggaagagacttttagcaatcaactagttcaacctcttcattttacagatgagaaaagtgagaccaagacatgcagtgtttttccaaggtcacaagcagcatttctggtagagacagagctaaaatctaggactccaggctgctgtatccataccgatacccacagctctcagccacttgggggtctttgaggtagcatgatgtcaggaaatagacatggctgcagtaaaacagacttggattcagattttaccacttctagccctgaagccttaagcaagatatgtcctcttagtctgtatctatcaacagacaatactactgtcatttaattcctaatgaacatgttagtcaagactttttgggctgcaacagagaggaagtttctcagctcctataacaaaaagcccaggagctggatccagtgcttaagcgaaatcatttagaatccccagccatcttggcttactttcttccaagttaagtttattctcaggagggcgttcttggtgatgggaaagttggacaccag

SEQ ID NO: 224870 - DNA, 488 bp, Homo sapiens
cagtcttcaaattttggacccatgaagggaggaaactttggaggtggaagctctgacccctatgggggtggaggccaatacttggccaaaccacaaaaccaaggtggctatggcggttccagtagcagcagtagctatggcaatggcagaagattttaattagggaacaaagcttagctggagaggagagccagagaagtgacagggaagcttcaggttataacagatttgtgaactcagtcaagcacagtggtggcaaggtctagctgctacaaagaagacatgttttagacaaatactcatgtgtatgggcaaaaataggactgtatttgtgactaactgtataacaggttattttagtttctgttctgtgcaaagtgtaaagcattccaacaaagggttttaatgtagatttttttttgcacccatgctgttgattgctaaatgtaatagtctgatcatgacgctgaataaatgtctttttttta

SEQ ID NO: 224871 - DNA, 709 bp, Homo sapiens
ggctgggagagaccagggatacgagagaggagagagagcctgcagatttctcggctcccatcctagaccatgaagaccccgtgctctgggaattccgtgcctgtctggcacacagatggtgctctgaggctaggaaatcaaggggttttctccaagtttgtttgaaagccctggaatcgacagggaagtgttcctgggagagggtctggctgtgtccccaggcaagaggccccatagtgattttccaggcctttcctggagtggcctcactgtagccattgggtggaggccacaccaagatgcactggagcttgggtctagtctgcttcccaaacctacacttgccccctccactgcactgtctttgagatggaggaggttgatagagccactctagttatcactggtcaggcaacatcaagagtctaggtttggtcctgggccaggtttttcttcaactggaaagcatacggtgaaagatgatcacacattcatcaagtgtttgaatgactcacacataagcttggcagaaaaaccttagttttttcccagttcactcatgtactaagcatttatcaagcaactctcagttgccttgtggcagacactgacctaggcactagggatatgacaaagaactatgcaggctgggctcagtggctcacacctgtaaatcacagcaatttgggaggctgaggccggaggatct

SEQ ID NO: 224872 - DNA, 601 bp, Homo sapiens
tatatgattgggtagaaactggacagatgagcaagtccaaagcaagcccacaaggggagaaataatccaaactgtaattagaaaatggtatctgttctgggagttaaaatccaagactgaaatcatagaagtctacatgtgactgtgttccgtgaaagctagagaaattactgtggcttaaagagactgcacagtaaaaacccagtccttcttgtggccaagaaggattctgggaagaaagcagagtgttgttttctagtatgaaatcatgatatgtgtatgaaatagcaggtaaggtcaccgcatgtcaagaaatacacaacagagctccgagtaaaaataaaggccgaaaaaaattaaaacatgaagtttgagccatttccatgtaagagtagacatgcagatgtcaatgtagaaaaacctaagccgatatatgatcaaaatgaataaaattatgaataaattgacaaggtatatataaagatttgttcaccaaagtataaaatacttgatctagaataatttttttttttaatttagaagtgttatgctataaaacccaattctttccaatgctgaaaatccaaataggtttaggaaa

SEQ ID NO: 224873 - DNA, 375 bp, Homo sapiens
atttaaattactgtattataatgttttctttctgttgagcaatgtgattttaaaatgcagatacaattactgcattatatagattatggtgatttctatacttcagcttgcagcctttttaccaaaaaaaatctgtactcttttcttatagatctacacttttcctgtttgtaataaatgttggtccatgtctgtgtgattattcagatttttactttaaaactcaatatgcttttttatctagtttcttagatgcatatataaatgtagaatagagatgtattacaagaaaaaagtacttgtaaacagaactgagtgataatctgaaagtgctttgaataaagtactgtttgataagcaaaggaaatatttgca

SEQ ID NO: 224874 - DNA, 880 bp, Homo sapiens
aagccagtgtacagaaacaggtgtcgcatcagtaggcattctccagaggccgaccaatatattggagagacggattaatagacggatgatagtgggtttgtcaggggaattggcccatgcggttagggaggccgagaagtcccgggagggatgccatctgcaagccggagacctgggatgctggcagcctggctcggtccaagtcaggaaacggaagaaccaggggagctaaaggtgtgactcaggccagggctgaaagctgagaatccaaggagccgctggtgttaagtcctggagtcccaaggctgggggccctgtccaagggcaggaggaggaagagagagtcccagcgccaggaacaagagcagaacttcttttccctctttttttttttttttttgacagagtctcgctctgtctcctaggctagagacagaatgcagtgcagtggcacgacctcagctcactgcagcgttcacctcccaggttcaagcgagtctcctgcctcagtctgcagagtagctgggactacaggtgcatgccaccatgcctggcaatttgttttgtattttttaggagagatggggtatcaccatggccaggctagtcgcgaactcctgacctcaagtgatccgcctgcctcagcctcccaaagtgctgggattacaggcgtggaccatcgtgcccagcccctttttgttctatctgggcccccaggcgattgatggtatccgcccccatggagggtcttccccttggtcccccgacccccaggcaggctcctctggaaaccccctcgcagacacacccagaagcagcgccttatgaggtctctagggatcccttcacccagccaagtaggtgcttgagatgacccacg

SEQ ID NO: 224875 - DNA, 519 bp, Homo sapiens
gtgggaggattgcttgagcccaggagtttgagaccaacttagggaacatagtaagagaccaacttggggaacatattaagaccccatctaaaaaaatgacaataaaaatccaactcgatcatgtataatctttttgatatgttggtagattcagttttctaatatattgttgagattttttgcatctatgttcatcagggatattagcctgtagttttcttttttgttgtatttttgtgtagaattataaaaaaagatctacacaatatatcttctaattggagattgtggttgaaatgtgatctttttatatacaattgtttcaaattagacattgaagtttttaatacacttatttataactggcatttaaattataacctcaaacaacagtatttactcaaactatgatttttcgactattagccaatatgtggcagttagaattttggctgtttcctgaaagaaacttccccaaatatctgtgaaaagtattatgaattaaagatatattaattc

SEQ ID NO: 224876 - DNA, 505 bp, Homo sapiens
gttttacttcaggttgagactagtctcctttggtgaagtgttgatataatatgactaaatgcttaataaaggggacaggataagactgcagataacaagtatattagatacttggtagacattttatatatgttaccttatttaacaaatatacctggccttatacatacaaatgattattgtccccttcaaaatgggcccctttggagagctgtagtctagtgatgcggtaattgcccaaaacagttgtagaatcgtcttttataatggcttactggcttgataatatgatctttctaatacagtcctaatggcaagccattatggtttgggagtaggtttaatttttgtaaataaacaagatcagacccaagataagtgaccaagttcaataaaaacttttttttttaaatcaaagcaaagtatatctgcagtaaaataatgaaacccattttcttggtttacaaactggcttagaaatctttgaactaaagatttatggtga

SEQ ID NO: 224877 - DNA, 508 bp, Homo sapiens
tataagatcactgggtttatcttatgttcatgctgctgttacttcagctctgtgaattggcccacgtgaggctcacttccttcctcttatttccttgccaggtgtcttgcgtggtctgcactgctcttcccttttcatccctacaggcttccacagcaactcatgtcttcattttatcttgtcatttcctccacctccctcctgcctgtatccttgctattttcaaattcaataagtgctgattttctgataaaattaacttcctgaatgaaccctaacatggtagtaaaacaaaatttgtgatctaaaagccaaatgttttttccctttagttatattggcaaatagtcttactagttaagaaatgcctttaaacaccaagtacagtgctagctgcagtggcttacacctataatcctagcattttgggagaccaagataggaggctcacttaacgccaagagttcaaaaccagcctgagcaacgtagcaaaacccagtctctacag

SEQ ID NO: 224878 - DNA, 489 bp, Homo sapiens
gaagcacagtaataggggaagatgcataatttcctgtccccttgtagatgcaatacctctacaaaacaacttaccaaatacattagtgaatgtccatttttgtaaagaaatctttacttgaaaaagtaatttatctttataagagtttaagtcagtgtcccaccaccttcctacttggatgtgggctgcatttagtgactcacttgcaaaaggtatcttatggaaagacagggacaaataattttacaatggagtagcctggcaaacactacctccctaggtcaccaaggtcaccatcaacagtggtaagtcctgtgggtagcttgtaccccggctatgaatgactcttctgcaggcttcctctccaaatctataaccccagtacaattaggggaaaacattagaaaaattccaaatgaaggacattctgcaaaatccctgactggtacccaaagctgtccaggtcatcaaaagcagggaaagtcggag

SEQ ID NO: 224879 - DNA, 351 bp, Homo sapiens
ctgttgacatctaagtgaatgcacatgagggcctctgcaccagcacaggtgcaggaatagagaaccagtgagacacctgaggaccagcttgggctcatgccaccaccagcacactgccctgagatgctcccccatggctccttcgtcctggtgaggtagtgtcaatcgccgaaattacctgggggatgattatttacacatttccaaaagtatagctccaaataaggggctcaggctttattcacttttcggtagcatgtgccatgctccaggcactgtgccatggtgaacacacagacatggagtttgtagatatgtgaggaaaacagataaagacaaatacatacaaat

SEQ ID NO: 224880 - DNA, 940 bp, Homo sapiens
tccaggtccagcacacaaactcacagtaatgaattcatgaataactcattgattacagttcaggaaacggcctcagagaggtgaggagacgcccacagtcgcgtggcatggtgcacctgtgttctgaactgtcacttgcctctccctgtgagcctctctttactctgccttgtcttcttgtcctggggcaagaagttagggttcaagacccttcgggatgtgaggatgtttctgccactctggacattagttttctcccctaagtggctctatctctcccggcctgagtttggaagggagacaccattctggtacgacttttcttaggcctgtgctgccatctatggggctcgaaggtgctcgccatgctccagaccggccacctggcagtcaggtgagcttgcaagtgtgaagagcagcgggatgcgggggagggagcaagcccagtaacaaataaagcaaatatcatcggcccttgtcctcagctgctcgctcaggccccccagaatcctgtagcatttctggggattaagagggtggtggggttttcacctctatcacgtctactgccagcctggcgcccaaaggttcggccgtcatccgccccagcgggtccctggaaccgccgggatgcccaggctgccagggggtctaatggggaactgggagtttctttcaggtcacaggataggtctgcagtgcgactcaggctcccgcggggacctgcccactcgaacgggggaggaggaagaggctccgggggagagccaaggaggcggggaagaggagcggcgtcccgggaaaggggatgctggagctcctgccgacgctccacctgtagccccgcccttgactccgcccacttccccagcccctcccttccaggcgcagcctcgaggtggcgctgtggagccgcgcagggtctagggcgactctctga

SEQ ID NO: 224881 - DNA, 471 bp, Homo sapiens
  misc_feature (402)..(402): n is a, c, g, or t
gaagtctataaaggaaggctagaggagagagagaagcaaaggaaggctggaggagagagagaagcactgaaagagacatcgtggcaattggcatggcacatgggctagaaattaaaataggactcacggactgtgaaggaagcctggtttattttaggctgttgtctacgaatttgtagcagtaatgctccccctggctgtgtgaggacaactagcaattctcagaaccaaatgcaaattctgagaagccaggaagttagattcatcaagggtgaagatttctgccagactcttgttgagaacagtagatcaaagcaggtttgtatgttgctaggaggtggcttgtaaggaaatgaagaaagagggagaattgcttgccttgggggaggcgggaggttgcantgagccatgatcgcaccactgtactccagcctggatgacagaatgagactctgtctcaaaaaaaacaaa

SEQ ID NO: 224882 - DNA, 359 bp, Homo sapiens
tgggtggcagaggccaccagacactcccttcctagaatgttccagaagctctctcatgtagctatggaaatacattgagacatccctcaagattattttcatttaggtgctgtctttaactttttaaaaattttagtcacaaatcactggaagttccaacaggtgagcgtgagatcatgttgcattcacctaacagagcacctggcaatgagtctgggcatgataaatatttgccaagtgtcgctgaattggaactgggatttaaagagacaaccaaacagcaatttctgttaaccctccaagttatccaaatccaaatcttcctttatgattcaaattctagttgttagttgttgctt

SEQ ID NO: 224883 - DNA, 359 bp, Homo sapiens
tgcagaacattgtgaatacactaaatacggctgagctgcacacttaaaatgcttaattgtatgttatgtgaattttgcctcaataaaacattgggctataatatactggttcatttatgcaaatacttgagaacctaccatatgccaggcacactcctagtacacaggttaaggtaatagaaatacattctctgcaggccgggtgtgggggctcctaaagtatttttaattaaggtatatacattgtgttttagacacttcgcagcctacagtacagtgtaaatcctttttttttttttttttttttttttaaagggggggggcctggggggttgcccaagggggttccaaaacccggg

SEQ ID NO: 224884 - DNA, 524 bp, Homo sapiens
ggatatggggactctgacctctccggatggtgtttgcagaaggtcgtggttggttgcacggagtcatataatcctgaagtggcaacagtgcacacagtgaggaaaggggtgggtgattgggtggctgagagtgttgagagccttggagtgaatgatttccagacctgttagttttctagacgcagtaacaaagtaccacaaactaggtggctttaaacaacagaaacttagtctcaatgttctggaggctgaaagttcacgaggaaggtgcccgcagggccatgccctctgaaggttctagaggagcatctgcccatgcctttctcttatcttccagcgttgctgcaatccttggcattccttggcccctaggactccaatctctgcctctgccatcacatggcacctccctgtgcatctcattttatattcccctcatttcatatggataccagtcattgcatcaggacccaccctaatccaatatcacctcatttttgctaagtgatacttgcaaaaggatg

SEQ ID NO: 224885 - DNA, 304 bp, Homo sapiens
cttttgttttattttccaggagatgtctaataatgcttctattgaatttttcatatcggctagaatgtttttaattctaaagtttcatttaattataattttttaaagtagcatcctattcatgtttcatagttggactgttgtttcgtatccaatacagttataaagttttctcccagcagaagtcctcattttctctacattgctgttttgtgttgataaaacttttctcaaaagcctaccaattctagatctgtcttttcataaagagtagaatattaaaaaaatataagttctataagta

SEQ ID NO: 224886 - DNA, 663 bp, Homo sapiens
aagaagggaaggaagggaagaagggaaggaaggaagaaagagagagagagaaagagaaaagaaagaaagagaaagaaaaagaaagaaggaaagaaggaaagaaagaacgagaagaaagaaagaaaaagaaagaaagaaagaaacaaagaaagagaaagaaaagggaaatggggtccgaccagtgctggggactagatcccggcctccgagtgaaagcagagcgcgtatgaccgatgtcagttgcagagtcaaacagctggagccgcccagtctgaggagcgccaggagatcaaagtgcaggacgggtcacagaggcaggaccagggtcctggaagtatatgttagtccctctctcttctcgttcctaaggagtcgttctccggacccagcatcctttctccttctttcttgtccttggcagacacagagcagagtagagtaaagaccttcgggctcaggttgttcgagaaagcagagctgggtttggctttagcaaagaaacagctaaagcaaacctgggctttcgtagacctgttctgagaagagatccccctggccgggacccaccatttgggttatgcttgctgcgttatcttctcatgaaaggccgatcttatcactcatactattgcgcatgagacaggcatgagacctctcacacta

SEQ ID NO: 224887 - DNA, 475 bp, Homo sapiens
aacagggggtaatatttgtacttagctcccaaagttctgatgaaggaggattaaattaattaataaggtaaaccactttaagagaacctggcacatcgagccactgtgttggttattgttattattgctaatgtcagaaaatatattacaatcaaaaggaaagagaccagagttgcataagtaattaacaataatcatcaaatatcaaagtacgaaatgcttcatctgagacaaacataattattagtaaggaataatcaatgaaaaataaatatttgttacacctatagccaatggagtaataaaaaaaacttaccagctgacagttaatatatagtataatctttttggagtatctttttgtacaaatttctctgggtagacatcaatctttttacattacctagcacctaccaactagcctgaagcccttaacaagctgttacgtggggtggtttaaaacagtaacaagaaa

SEQ ID NO: 224888 - DNA, 313 bp, Homo sapiens
acttatcagaaaggcagattctcaggtctcacttcaaatctgttaaattagaaactctgggggtgatagggccagcgatctgtgtttgcacaaaccctccaggtgacttagatgtgtgttaaagttgaaggccgccgatctagagaaacgtggctgcctatttgccctcaatttcctagtgaacctccctaaccacacatgcagaggtgaaaactctcagtatacaacattctcaacatagaccctcttactatacgtaaaaaaaaaattccattcttgtatttttttcttgaaatcattccattatttagga

SEQ ID NO: 224889 - DNA, 238 bp, Homo sapiens
tttttttttaaaccacccctcttccacaaagaaaaactttaaatttgcttctggtccagcaactcaattttgtgtgacatattgcaatatatatgcccttcaaatacagttgacccttgaacaacacaggtttgaactgtgtgggtccacttatataaggattttctgctgcctctgccacccctaaggcagcaagaacaaccccgcccccttcctcctcctctgcctatgcagcatg

SEQ ID NO: 224890 - DNA, 313 bp, Homo sapiens
gaaagctgtggagtgatggttgctaatttgcagccaggagtgtaagaattatctcaagttctcatttaaattctgagtagaaatctccagagacctttactaacaacttctagtgtttttaacatccaaagtgttacaatttttatcatcactaatactattaacattattatttgcagtagctgagagaaacacggtcttgagtcactgcaagtatagacgcttacgataaaaatatttgatgacgccatcgtaacctagtgacaaaacatgtaataaaacaagtgtttggaagtactggtttgactagttg

SEQ ID NO: 224891 - DNA, 461 bp, Homo sapiens
tccaatatgactggtgttcttataagaaaagattaggacacagacaggtacagaagggaggccttgtgaggtcacagggagaaggtggccatctgcaggctggggagggaggcttctaaagaaaccaactgcttggcaaggtgttagagtgctggcagcagagaatggttggctcatgggtagtaaggggaatttaccaacaacagtataggtttgaaaagggaagttgtattagacagaaagaacgctgcagcagagttcagcggggcgcttcagcgagaggactgggcgtgccagggtagattttccttagagccatttatggaccttaaagcgggaacttaagggtaatttggaccatgttagccgcgtaggtcacggtacatgattacatttgtaaacatttcagtgccttgatgtcagcaagggttgcatgatgagtttctatatgcatgcattcc

SEQ ID NO: 224892 - DNA, 503 bp, Homo sapiens
agtttgatgaaagcattcataaatttcaaataattagaggaatatctgctcaagaaatacagactggaaatgtgaaatctgccaaatggttgtttgaaacccaacctcttgattcaattaaatattttagtgatgtggaagaaacagaaagtaagaactgaacaaactagagatattgttaaaggggatgtcaaaacctgtaaatggctttttgagacccagccaatggagtctctttatgaaaaagtttcgttaatgaccagcagtgaagaaattcataagggagatgtcaaaacttgtacttggctctttgaaactcagccacttgataccataaaagatgactctgaaacagcagtcaaattgcaaactgtaaaacaggaggagatccaaggtggggatgttcgtacagccatttggcagatttcacatttccagtctgtatttcttgagcagatattcctctaattatttgaaatttatgaatgctttcatcaaactgg

SEQ ID NO: 224893 - DNA, 632 bp, Homo sapiens
catggcgcagagcggaggcgcggctttctggggctcagccctagggctacagacccagggcgcggagatgctcgcggccgggccacccaccagagccaggcaaccggcgcttccaggcgagctccgcggggccgaggtgccgggagaagcggccccgggcgcccgcgcgctgcccgacctgggtaacaggcaaagcggagccccggggtcgaagtcctaaagttactaatcccgcggagggggagagagcgtgcctcgggccgcccggggcggtcatttgagcgtgtttacttaaagactttgcaagcagagcgcgcgcgaaatcgtcggatttccagcgaggcagcaaatatttgcaggcagaagaaagaagcggagccgagccgagccgccgagtccctccccccggagccccggagccccggcgcctgcctgggcggtcccggccgcgcagacagaaaagaagccgggaatctgcggggctggggggcggggagcgacaccaaaggccagaaactgcagcacggcccgaggccctggcgagctgggcctgggggaggagaagtcccttcccattccagctcgatcaatcttgctgggctgcgatcggtcaataaaaacggtgtgaagcg

SEQ ID NO: 224894 - DNA, 359 bp, Homo sapiens
ggaatccacagatgtaactagacgtaactgatgaattgcaagaagttagaagcctgaagaatgcagccgacatgaaaggcttttattcatacaggtgatgtgatctaaatgactgactgcatatttagaaaataggaagagtgtgagggacggcagcaagggtgaagaatcgcccctcaccagacaagactacaacaaaattaactgagtcctcatttcagctttaaaataaacaaaaggggctgggcatggtggttcactcctgtaatcccagcactttgggaggccaaggcaggcagatttcttgagctcaggagttagagaacagcctggacaatatggtgaaaccccatctctac

SEQ ID NO: 224895 - DNA, 817 bp, Homo sapiens
actagccctaggcctgccttgtcccaggagtttcttcaccttaatcacagaccaaattgcatacttttatcttcgaatcatctaaaatataatttcaaatcacaagacagaataaaataatctttgagagaggcagaaccttagaaaggagatattttatctcatttattttatagatgaagaaagtaaacttcagagagatcaaagtgatttgtctcaggtcacataaccagtggcagaaagaagagaattgctggaatgtcaagataagaatgaattctaggtttaaagttgtttaagtatatcccaaattaaatatttcattcctgagctctaaaacctatttacattgaagcctgatgtcctaaacacggtaattacaaagctgggtaatggtctccatcctttcctttcatgaatccatgtatgaaagttagctttatcaaactatttcatctccagaaaggcatgtacatttcatactgttcaagtctgtaattgtcagcaaaatcagacccaagaccgctagcttctcaattcagcctacagactgctcctctaatagacacactggactctcagggaggtagaatgggcaagctctaacaaaggacagcacttctgtgatggtgtggaagtaccaaaggtttgactgtactttaaaaaggtgacatgcatgagccaccacgcccgcccatgtaatgtgtattttatagtttaaaaaaaaaacttataaaatagtgtggtactcagacacagatcattggaacaaaaatccagaaacagacccacacatatatggtcacaaggcgaaggt

SEQ ID NO: 224896 - DNA, 328 bp, Homo sapiens
taaaacatttaaaaaaaaagaaaaccacactccaaggtgggccttcttgatatcacagctacctagatcagttctctccaaaaaccctgtaacaatgactctacaaaagcagtaaacaagaaaaaagatgagagtaatagaattggaaagccaaagaacatatgagtaagtgtaactgacttagcagaaagacccaagaacatcaaatactcaaacaacaaagcaagcagagactgaatctgattcaccgttatcagacgcccataagtctcaggaatggctgtataaagttgtagtgaaattgaaataaaacaagaaggttggctga

SEQ ID NO: 224897 - DNA, 447 bp, Homo sapiens
acaaatgaacatcaaacatgagtcaggcactggggatacaatggtgagaaacatgcatagccttcatcatcactgagcttacactgagtgactttaaatgttcttttaggatgtgaaagattatggcagcttcaaaaattaagctaagaagctctccatcattttctatgacttgagtttaaagcacaagatttagctcttatgatttttaatcataaatctgagtgggctggaggctttttatttgtgagtacagaactttggcatctttgttccagtcctgtctgtagttattgacttaattcagttttccaccttttttgagttatgttttccttgaaaagtgactatttcattttctattaatatttattggcggtataaaattgtataaaatattttaataatttttaaacctcccttttattaaattaccaaccttactag

SEQ ID NO: 224898 - DNA, 360 bp, Homo sapiens
agaatattttcctatctaaagagagattcaaatgcctctggtaatgacagaatttcagagacatttaaaggtctcaattcttgatgtaaacattgagtcaagattgaaatagctatcctgaaattatctaggttttggaaactttagcagctctccacagagcacagagtgtccttcttcactgtggcaacactcagggaatcccctttcctggacaagaggcacacatcacatgtttccaggaactttcgtcttttccatcaattaaaaaaaagtacaaggtgcagacaccagtctgggtcttatcttgtataggaaaagttcattttcatctcccagaagtcagggaagtaaataaaa

SEQ ID NO: 224899 - DNA, 378 bp, Homo sapiens
tccactgtaagaatgttagtatgttcattttctttgctatttgaaagaggtggataattttgttaggtgttagcaggaaacaactgtctgattagagattattaactaagcagtagaaagtgaaattgcagttttgtttactcattttgtggggtctctgagtcctcaaaaactttctaaagtgtgatagttttttaagaagctaggaaacaagtcagaacaccagatatttctgagcccatgatatttatgactatctgatattctctattcgtcacccaaaaagttgaactcctatctatatttctaacctaggttgagaatatcatttactgtttaaagctgaatattggggttcttgaaaaaattcctacctgg

SEQ ID NO: 224900 - DNA, 501 bp, Homo sapiens
atattagttaacatgtattttggggtagaggaaggaaaaatgagaacttatttaaacaatggctctaacatgcattaaaacagagaacattctaattccctgtgcattcttagacaggtgagtgccaggactatctgttagacactgtacaaaaacaatatctatcctctatgtagcactaatcattgactatttattctttattctaatagtatttttctctatcataattacttatgggtgttactgaatgggatttatttaagattatgtgcaaaatacatttcaaatacgtgagagaaagttggccacaaagacagtgatccaattatttaggtcaaggaaatcaaagtaacatcgataaaaaaaagaaaactaaagccaaaaagtaacatttagagccaacatttctaattgacttttcatatttagttagaatttgtagtgtgatgaaaatataaagctgtcgttctgtacatagcaaattgatttttttaatac

SEQ ID NO: 224901 - DNA, 253 bp, Homo sapiens
tcaatatctgatactcaaactttaaaatgttcgctaatctcttgggtgtgaaataatttcatttcttttcttttttttgagaaacagcccaggctggagtgcagtggcgtgatctcagctcactgcaacctccacctccttggttcaaacaaatttcctgcctcagcttcccaagtagctgggactacaggtgtgacacgtcattacgttatcgcaagtggtgcagaggtaaccacaaaaacctttactgtgg

SEQ ID NO: 224902 - DNA, 414 bp, Homo sapiens
gatatgtaaatgaaaatttatattccagtcaaggaacgtacccaatgagagtacataaattatatatgtattatgcaagataatagttgttacagacatttcatcaaaagccattttaaaaactgcaaaatatgtcaagatgtttacatggtgaaatgaaatttcataatatggcaccttaaaacaatctcacattagattgctgcacctcagaaaagcactattgatatttcactgagccaaagaataatcataattcccttatcaagtgaatatagtggaaaggaaccaggctgaaagtcaaatagaaacaccattttctcaaataataatatattattaataatgatacatatctgaaggcttaagtttcaagatccgaaaattccagaagtataaaatgccacatattat

SEQ ID NO: 224903 - DNA, 709 bp, Homo sapiens
tttgagataatcatatggttccttttaatctattaatgtggtaaagtacattgattttctgatgttaaagaatcctcgcacttctgggatgcaatttcgtgatttttttctccatctctgggggagtttgtgtcccttgaattttagttgcattcatctgttaaactgggattattgtgtttgtagtgtgtggtatggttggttttaggggctatttagatttactgtttcttctagaaagttgtaggtttttctaaaaatgtatcctttttggtcatcgagttgtttaaaatatttttattttcaagtacttgttctatttgaacttagtcccttttttctttcctgatattgcttatttgtatcctctcttggtaatgtttctagagatgtgtcaactttactagtcttttaaaataactgactttttgaacttttgcaaaaatcaacttttatcaaagtgcacaataaaattcacccacttaaaggtgtttgctatgtttgacgaagatattacccttgtaactaccaccataattgtgtgtgtggttataatagttccttcttctcctcctccctccctctctcttcctcctccctatcttcctccttctcctttcacccctttctctttcttcctcccttcttcctttcttccttccacagttctgtcttaaaatgaacaggaaaaaagaatggaaaagaaaat

SEQ ID NO: 224904 - DNA, 435 bp, Homo sapiens
agtctagctctgttacccaggctggagtacagtggcatgatctcggctcactgcaacctctgcctcctgggttcaagcgattctcctgcctcagcctcccaaagtgctgggattacaggcatgagccactgcacccggcccagctattattattatgaatttgcaaactaagatttttctaaaaagctttcactggaatgtttatgtattcccatccaatatttgtatttctttaaaaatatgtctagactgtaaatgaactgcagattctccagtgttcatataaaattaaaacatattatcagaaggtaatatagatagtataatcagaaagtattatattgcaaataagttttcttcaaatttggtagatctacaaaaattttatttggcctatgaaatctccctagcttacctgacctttatgatcttgta

SEQ ID NO: 224905 - DNA, 409 bp, Homo sapiens
ggttcaaaggactacttcgatagtggtacagacccctgacaaaagaaatcaccttttgtaaatgtcatcgctgcaaatgagcaatgtgacggggaactagtgagatgccattgagactggaacccaccccactggaggcagctgagcgaattcgtggatgactaaatgtcggaatactaagttaggagaggggtgcgtgtcatccaaggaatgacgtgcgctcacactgtgcctcaagtgacacagatcatagtagattccagcggaacacttgcagctgtgttgagttcctcaaactaccacaaaactcttatggtaaaacttgtgagaggtggagttaagagagtatgagccctgtgatcgaatccaaatatgaattgtaaaacatgccttaatactatcaccagta

SEQ ID NO: 224906 - DNA, 579 bp, Homo sapiens
aggctgtcagagtggttgcactttacctgcacgccccccaacccagccctctgtgaagggttggtttacatcagggatggctgctcctgacataattgtctatttccggcaacagaggaagataccttctgccatttagagaagagaaataaatattcacttcagagaatacactttgaagtggggctgtgtgtgcatgggtgacagctccctgcctacttttcctgcaaggttcttgtacatcaggaaaggttaatggacttcccttgaagtcagacagagatgtgttcatggaaaatccaagtgcaaaaccaagggcaaactctggctttcctgggggtttttttgttgttgtttctccttttagaatggacagtgaaagcaaggtgaagggcttcattattcctcttttgtaaagcctgttgagcaggaaccttctggagcttctagatggaggttcctggagattgtgtgagtggtgagcagtctggttgaagagggccagtgtttgttggctttgccctcattgtgtcaggaatgagctctgcacggactcagagagctaacagatcagctagg

SEQ ID NO: 224907 - DNA, 655 bp, Homo sapiens
ggggaacagctctggttcacaatactacatacaactgagtttttgtctggttttactatagtgtctgcttgatggcaaaaggggagggtggagggtgggagaggaaatgtcagggcatgtgctctgataaaataaaggcagggaaacaagctgaattacttgaaattacttgaattttcttgtcttaaaactgaaaaaaaaatgtagttacacgttaaaatctgcaaatggtttttacacctctgattttaacatgaacttatactaatgtttggaatcttatgtcagaaatataagcagctatgtacttagaataggttttgaatgggagaggtagaacagagagagaattaagaagggatctgacttataaaagactagaatgtgattagagtgatagaacataccaatgttaccaagaaattgacaagctgctggctttaagcttatgcaagtggtagttgggaaagtaggaggtgtggaagagggtttgcattttggattaattcatgcaaaatgaaggaggaagcctggtctaagaagatactgtctttcaatagaaatgatttctaaactgctacagattaagaatagataatctgattgctgttgttttgtttgtttggaaagaaaaaaaatgtctggcttcttctac

SEQ ID NO: 224908 - DNA, 583 bp, Homo sapiens
cttgcatggtggcaggcaagagagcgtgtacaggggaactgctctttataaagccattagatcttgtgagacgtattcactatcatgagaacagcatgggaaaaacccacccctatgattcagttacctcccatcggtcccctcccatgacacatggggattacgggagctacaattcaagatgagatttggatggagacacagcccaaccatatcaaatggggttcagattgggcagtcaaaacatgactaagctcccttacacttgggacccttttaacatgcaataaatcgtgagactatcctaaagagcagttgttccatcgaacatactttgggaaatactgtcctgggtatttttcacagaaactggtgtgaagatattatgtcctgaagaatctaaccaattctgggctacttttgcctctcactccaagagctaatcattttctgtctctccaggttcctcagtttttgcattggtttgcttttcttttttgagatggaatttcactcttgttgcccaggctggattggagttcaatggcatgatctcagctcactacaacctctgcctcctggg

SEQ ID NO: 224909 - DNA, 300 bp, Homo sapiens
aaaacctagaagagcacatggagaaaatagtactcatcaggaatcccaccaggcaaagatgaccactgttaacatttcatgtaagtgcttctagcatttttgatgtatatttgttttagctttccaaattgccgttgtacggtaatactcttttgaatcttggtagcatttggttttgcactttttgcaatatgttgcaaatggtttcttctttttttcttcttttgcttggtttgtttgtgttttaattattctattttgtattattgtttaaaacaccaataaacattttgtatacat

SEQ ID NO: 224910 - DNA, 608 bp, Homo sapiens
ccgctggtatttctgtgttgcatatgggctggggtccctcctgtccttctctcctacacgatcccagatctgatttctaatggtgttgtatttcctccctaaatcatttttcaatagtatttttgttcttctgtgggatacagaagaacttttttttcctattgcaataaggacaagtaaacaagtcagaagcctcagaagacctcaagagagaaatcacagccttcaattcctggtccctttctgaaacctcagctcttgattcacttaatttcaaggagaattgttttatgactacgccaagctgacccaaagacccctgggaagcacgtggcccatcagagggaagggctaggccctggggctggaaaggatgcagagcctgttttcaacaattacgtctacattttccaagagattaaaccgattggaagccaagcattggagaagagatcttttgtcttccttggcaacatttctgaaatctacagatagggatgaggaagtgaggcacatttttcatctgttccaacaaactgccaatggaatggctgacatgccattttagtgtatgtcatctctcccgtgttccgtcatcactgagggtc

SEQ ID NO: 224911 - DNA, 416 bp, Homo sapiens
cacccccacagccatgtgtcctgcttgaccctgggaacctgacttctttaagctgcctctcaggctttcttactgactgggcagaggttggaattagccagtgggagactctagctggaaggcaaaagtataggaagagagagagtggtcagtgtatccccccaccccgtccccactgcccctccccaaggctgtgtctctccaagacatcagctcctgctggaaaccccttctccacatctctagctcttactggctgtggcaacactattcctctctgtctagccccatgagtaacagcatcctagagttgtttgttttcgtgcttctcaacatccctgttcatcctcttcacctggccacacttctgtaaggactactgccattaaagtctcatcatttgaagcattcaatgc

SEQ ID NO: 224912 - DNA, 470 bp, Homo sapiens
cttgttttgctgcagctagacagtcccatctgggggtgatgggagacagtggcagatcttcaggcattcgattctcataaggcgcacacaatgtaggtccctcacatgtgcagttcacaatagggtttgtgcttctatgagaatctaatgctgccactgatctgacaaaaggtggagctcaggcggtaatgggagtggttgtaaatacagatgaagttttgctcacgtctgccgctcacgtcctgctgtgtgacctggttcccaaccagccatggaccactactgttcaatggcccagggtttggggaaccctgcttgaaatcatctctagattactcatgatacctaatacaatatgaatattatataaaatgtccaacaatgatagactggattaagaaaatgtggcacatatacaccatggaatactatgcagccataaaaaatgatgagttcatgtcctttgtagg

SEQ ID NO: 224913 - DNA, 634 bp, Homo sapiens
tccaaaggccaccaacaggtccttctcgcctagaacagtcaagagtctacaagggtgaaggcaagtggcttcagtctcgtggatggatgcctcttctcaacccctcttcacctcctctgcagcagtctgatcggactccgtagggggccactctcccacctgctggggcccaggatctgggggaggacaccagcagcagccctcagaaaagggatcatcttggcccgggtctggacgctggagaaggcagtgctgcctgaaaaagacagaaaggggaagcgcatcactcggggctcagggacaactttcacgtgtcacttcttcctgtttctgggaagagaaaatgggggaagagatggggcttgctcaattgaggtcctgcccagaacctcaggcaggacgcacccagcacccgctccctgtctgagggaggcggcctcgggcctgagggctgctgggggccctggattcaagggggtgatcaaggtgagatttctaagaaagttgccctcttccccacccccacgggctggtgagagtttcaccaaaattcccccacacgccctggctggaggccgccgggccctccctagggagctgagctttcaaaataaagtttgctgagagcctcact

SEQ ID NO: 224914 - DNA, 742 bp, Homo sapiens
tccaaaggccaccaacaggtccttctcgcctagaacagtcaagagtctacaagggtgaaggcaagtggcttcagtctcgtggatggatgcctcttctcaacccctcttcacctcctctgcagcagtctgatcggactccgtagggggccactctcccacctgctggggcccaggatctgggggaggacaccagcagcagccctcagaaaagggatcatcttggcccggtgggttcttcaccctcacccaccctggacccaggcatgagttgagcaggtaggggtgtggtgggggcagagctgagtgagcagtttctcctggtatttttcctccagggtctggacgctggagaaggcagtgctgcctgaaaaagacagaaaggggaagcgcatcactcggggctcagggacaactttcacgtgtcacttcttcctgtttctgggaagagaaaatgggggaagagatggggcttgctcaattgaggtcctgcccagaacctcaggcaggacgcacccagcacccgctccctgtctgagggaggcggcctcgggcctgagggctgctgggggccctggattcaagggggtgatcaaggtgagatttctaagaaagttgccctcttccccacccccacgggctggtgagagtttcaccaaaattcccccacacgccctggctggaggccgccgggccctccctagggagctgagctttcaaaataaagtttgctgagagcctcact

SEQ ID NO: 224915 - DNA, 500 bp, Homo sapiens
tcatttcctcttggctagggctccctcctgcgtctgtggccagctgggggctaactgactgtgagctggagcagctagttttcctccacatggacttcatctttcagcgtggcagccagtccttttcacacggttttcagtcagagggagtagaattgtgcaaagctatgtttggaaatgttacaacacttcctctgtattctatgcccaaagaaagtaaaaagtcaggccagattaaagggtttagaaatagacttcacttatttatgagaggtgctggaaagtcacattgcaaagcagcctgggcacagagagaggaatgatcttacacatttttgcaaacaatttgctgcattatccaaatctcttacctgtttgtccctcacgcttgactatcagtcacctcttgcaaacttgcttctggccacactggccttatttctattcttccaaaaggcaatcccatttctagctggattgtctttgaccaagttttaccc

SEQ ID NO: 224916 - DNA, 401 bp, Homo sapiens
ctgtatttctaaagtatttttctgcattcaaggtttgaatattccatttctcaacctttttctggcctagtcctatctttcacaaagcttaacttttccctattcagtggctggaaaagggacttaagaggttataaagggttggataggcatatgatgtgtaagaatctgtccctggttctctgcacagccctgtccaatcactgattaattatataagcctgtctccctggatactgtatataaaaaggatataatctggggaagaactgttgtcaagccttggagccccacagtgtagtgggaccactagtactccagaaccataatataactagacatgcctggaatgcttctgatgaaaactaagcaacttccagtttgctgattcaggagctgtt

SEQ ID NO: 224917 - DNA, 280 bp, Homo sapiens
tcgttgatgtttgaatatgagaccatttcatcagtatttaagtgtgcccgctgggatctaactaggagaggagagggtattcactgccgaacatttcaaagaatatacgaacaagctcttttatggtcagaaatgttagcccttttccccttaaacttgtatttcctttcttcttccctcctaaaattttatctaaatgatatttatatttgatgcttttaagccttttattaatcactcctatacttgcctgcaacataaatatataagttgaagcaaa

SEQ ID NO: 224918 - DNA, 395 bp, Homo sapiens
gagccacggatttaagaaaatcttttcaattcacatctttgatgaagacttgcatatgcaacctataaagaagtctcaaaatctaataagaaaactagcaacttaataaaaaataagcaatgtatttaaatggtttaccaaatatacttcatcaaaaagagaaattggacggaaaataagcacatggaaataagcttaacatcagccatgaggaaaatgcaaattaaagccacagtgagatacttctttaacctattagaacgtctcagatagacagaccattaggcaaatgaagggcaatttacaaaatactggaccagtacccctccaaatgcctgataataaataccaagtgttaggtcgacgcggccgcgaatttagtagtagtagtaggc

SEQ ID NO: 224919 - DNA, 384 bp, Homo sapiens
agctcactggttccacctgcagccgtggaggggatcctggcctcaggcaagtctgcctccgtctgaagccccgcttcctcatcggtctctagggggagtcgtggtatcatcacaggactttgggtagttttaaagagataataggtaaaaaatactttgtacaaccattcattatcaatgagaatatttgtatgagcctagcatgagaactgactcacatctatccacttgggctcaattactcgatgggtttatcagcagccaaagaacaaatggagtctgggcctcacccaaggattatggactcatatttatacaacctgaggcaaatactgttaggaatacaaatgcattgcttaaaaatatcatggtatatatctcaaa

SEQ ID NO: 224920 - DNA, 206 bp, Homo sapiens
ttattcccatagactactttttaatagtgctttacacctaatgtaacagaatttatactttaacttttaagttacatgatagtaaaagtcaatttggaacaatggaaaatgccatgttttattagaatcatagtgttaaaattagtcctctgacagtttaagtgatgaaagaaaggaatttacattaataaagtaatcttttaatg

SEQ ID NO: 224921 - DNA, 497 bp, Homo sapiens
ccctgctgaagcagaactgtgtctgcaccttcataacccgtgggctggagcccaaccagccactgtctcctgcacttccgacttcagctctctttgtcaggatatttaaaactcaatatcaaacataaaatttacaaaaggctgtatcctctgaagacagagcatggagtcacaggttaggaaacctcacttctagtcctggattcccgacaacccattcatattatcttcagcttattgctttataaaccccagaactaaatatcctggttgagctttgaaagagccctgtcggctccatgacttcaaggtttcatccttgttttattcatttaaaaaatgttttagaaattatttgtctttatttttttatatctcctaaagtaaaatctgagaatgacccaagaatatttgtttcagagggttgtctttttgttggcaagcagtgaagcacatgtaagtttctcaagctttagaatatatatatattaaaaaac

SEQ ID NO: 224922 - DNA, 556 bp, Homo sapiens
acaggaaccaagaacagccaaaaacccttttgaagactaataataaggaaatcctgccatatcaaaatacattttaatgttctaataaagtagtatggtattgttataagagacatatcaatacaatagagaacttaggacacacataggtttggtctgtgatagaggtgacattatagatcaatggaggaaaaaaatgttcaataagtgaatcctcatattgaaaaagataaaattagatctaatgatatggtttggttgtgtccccacccaaaatctcatcctgaattgtaatccccataatccccacacgtcaagggtgggatgaggtggaggtaactggatgatggggatggtttgccctatgttgttctcatgatagtgagtgagttctcacgagatgtaatggttttataagcatctggcatttcccctgctcgcttctccccccctgctgctctgtgactaggtgccttctaccatgattctacgtttcctaaggcctccccagccatgctgaactgtgagtcaattaaacctctttcctttataaatc

SEQ ID NO: 224923 - DNA, 1322 bp, Homo sapiens
ggtctacatagtctgaaaattctaaaagaatgctgtttaaattttgtttttatttcaatgatttctatgtgcatatacacgtattttaagtcatgagtaaccaccatataactgagttctactacaacctttcagtgctgtttgctttttacaattatacaattgcattctaaaatcattacataatagatttaacttttattttaatatattgtttatcatattgaaacatgcaaaaactctgcaagatcacttattcttggaattctggagtatctcagatatatctcctttttttgtgatggggaggtgtcggcacattactcaagtttgaaaatacaaatatgtattatttaagaaacataacacattacacagagatgtgactgggatgaggtgagtgaggcacatgcctcaggtacaaaattaagggggcaccaaaaacctcagtaatgaagataatattttaacacagtatttttaaaaatcaaatttatgcaaggtccatgaagagcaaaatatcaaatttttaaataaataccaaatcagtattactgattttttccttctgcctccggctccaatggcaccaagattttataaccacaacacaatgttggtccatttaatgtttccgcatattcagtacaatcagtaatgccacgatgaatatctctgtgaatattcatactcccatatttaggattatctcctaagaaaagaattcctgaagtggaactactaggtaaaaaggtacatagtaaaggttcttgatacataatgacaggttgttttcctccccaaaaaatgttcttaattatatttactccagtaatttatgaaaaaaacaccatttaaaagtattttcccactttgtttcaatttgcagctatttttaatgttcatttacaaaaagtacattataatggaacactattaactctcagtagcatttgttatcaacatttcctcaatatgtacgttaagttaaaattttatatatttgtttccatttttgtgccaaaaaaatctgacagtttttacctttgtgatttcttctatctcttacaaagttttatttccacattaaaagaataagaaaatagtttcatttttataataatacattcatttactccagggatcagcaaactttatctgtaagggaccagatagcaaatatttttgactttgcaggccatatggtctctgtcccaactactcaactctgctctggtggagcaaaagcacccacataatatgtaaatgaatgaatgtggcaatgttcaaataaaactttatttatgaaagcagtgggtgga

SEQ ID NO: 224924 - DNA, 488 bp, Homo sapiens
tatttcattattgttcctaacagctctgggagagaggaattacaattttccccattttatagatgagtagactgaggcttggagacagaactgctgagaagaagtaatgcagtacttacaaatatctgtgtgggtgtgggtgtgtgcttagcagcaggtcatggcagcagatggcgtgtgttacgctgctttagaatcagtcatttggtggctgggcacagtggcctgtaatctcagcactttgggaggctgaggtgggaggatcctttcaggccaggaatttaaaaccagcctggacaacatagccagacctgtctctacaaaataaacataaaaattagccagatgtaatggcatgcacccatagtcccaagtactcaggagactgagacaggacgatctatcaagcccaggagttcaaggttgtagtgagctattgtgccactgcactccagcctaggcgacagagtaagaccttgtctcaaaac

SEQ ID NO: 224925 - DNA, 729 bp, Homo sapiens
  misc_feature (655)..(655): n is a, c, g, or t
cgtgcgaggggggcgacgtaagggcgctccgcgagcccgtctctcctcgaatgaaaggaaacaacctccggcgacagagccccgctctcaggcactgctggagaaccgagaccgacttctttctctttaccctcattggcgcttctctcctgcagtccgcctctgggccctgccgcatttcttgagacttaaagtggtggaagctacaatgattttgggaattacaacaatcagtcttcaaatttggacccatgaagggaggaaattttggaggcagaagctctggcccctatggcggtggaggccaatactttgcaaaaccacgaaaccaaggtggctatggcggttccagcagcagcagtagctatggcagtggcagaagattttaattaggaaacaaagcttagcaggagaggagagccagagaagtgacagggaagctacaggttacaacagatttgtgaactcagccaagcacagtggtggcagggcctagctgctacaaagaagacatgttttagacaaatactcatgtgtatgggcaaaaaactcgaggactgtatttgtgactaattgtataacaggttattttagtttctgttctgtggaaagtgtaaagcattccaacaaagggttttaatgtagattttttttngcaccccatgctgttgatgctaaatgtaacagtctgatcgtgacgctgaataatgtctttttaatgtgctgcgt

SEQ ID NO: 224926 - DNA, 4786 bp, Homo sapiens
cgtgcgaggggggcgacgtaagggcgctccgcgagcccgtctctcctcgaatgaaaggaaacaacctccggcgacagagccccgctctcaggcactgctggagaaccgagaccgacttctttctctttaccctcattggcgcttctctcctgcagtccgcctctgggccctgccgcatttcttgagacttaaagtggcattctaaaggcaatttaaaaatcatgtcaagctcagttgaacagaaaaaagggcctacaagacagcgcaaatgtggcttttgtaagtcaaatagagacaaggaatgtggacagttactaatatctgaaaaccagaaggtggcagcgcaccataagtgcatgctcttttcatctgctttggtatcatcacactctgataatgaaagtcttggtggattttctattgaagatgtccaaaaggaaattaaaagaggcacgaagctgatgtgttctttgtgccattgtcctggagcaacaattggttgtgatgtgaaaacatgtcacaggacataccactaccactgtgcattgcatgataaagctcaaatacgagagaaaccttcacaaggaatttacatggtctattgccgaaaacacaagaaaactgcacataactccgaagctgatttagaagaaagttttaatgaacatgaactggagccctcatcacctaaaagtaaaaagaaaagtcgcaaaggaaggccaagaaaaactaattttaaagggctgtcagaagataccaggtccacatcctcccatggaacagatgaaatggaaagtagttcctatagagataggtctccacacagaagcagccctagtgacaccaggcctaaatgtggattttgccatgtaggggaggaagaaaatgaagcacgaggaaaactgcatatatttaatgccaagaaggcagctgcccattataagtgcatgttgttttcttctggcacagtccagctcacaacaacatcaagagcagaatttggagactttgatattaaaactgtacttcaggagattaaacgaggaaaaagaatgaaatgtacactttgcagtcagcctggtgctactattggatgtgaaataaaagcctgtgttaagacttaccattaccactgtggagtacaagacaaagctaaatacattgaaaatatgtcacgaggaatttacaaactatactgtaaaaatcatagtggaaatgatgagagagatgaagaagatgaggaacgagagagtaaaagccgaggaaaagtagaaattgatcagcaacaactaactcagcagcaacttaatggaaactaggtatgaaagttaattatatgggatctgttgtcaggatacaatacacactgatatatacatgttgaagtaatggtatgcagtaagattttttttaatcctattatgtttagttaagagcatgttactaaaatgctgaggattttgtaggcttgcatagtagttgttttttaactagctgattttgtaaccataaaaacaagctatctgctttatcaataagtgtagttgtaatgtcaaatcaataagatattcacactcctcaataacattatattgattgtgttcccctcaagcatcatattttacatttttttatcatcttttaaacaggttcatgggacagagttagaaaactgggaatgaataagacatccataactactattcttttttcactgttttctaaaatcaaaaagggtttgtaactttttactgcccaactcttagatccttcattgaactgcctaaaaatgtcttgtttgttttatgagccctcactagaaggctgagtttgacatgttgatattacgtagctatagtttgcagtttctgggaagcaattgaaacactattaaccctgtgtatagtgtcaacagttaaagcagacgaaacgaagtaagctatatttctggactgaacaaagctctgctgtttagagcatttaagtttgtttagtggatccatactcaaaggaaagcataagcaaattttcctttacaatgcaaacatgccactggtggcagcacatggtaatttgtggatttttttttcatactcaagtaatggaggctagaaatgaagagaaccttctttttctcttgactttgacagcacatgctaaaaatctcttccaagaagtatgctaaagcttttcatttggttcctgttaaagttgttctcactgaccagcatggactcaggcaactggtaatgataagctatgagctccagtgcttttgccaaaattctcttgacagcacacctcctctctttccatgttatacaaaggacttctggcaaaatgattgagtccttcaagtttaaactaacatttggcaacagcaaattaaacgtttttaagatgtaaagaaagggttaccgcttgctaaggacttcagacaccatgtccgaaacctgttcctctcaagtgccctgttgtgtggaacacttcacatattggcgcacagtacgtaaggaggtctcatgtgctgtaggagtaaaaaagtctttgcataaaacagtatttatttttacttttgtgaccactattttagaaactttatttaatattttaatgttttcagtcattgctttggttatctataaaataggcttttgtgccctacttttcttcttgtagggcttggtggtgttttatcgattgtcagaattgtttttgaaagcctaagaacccagctttttagaaaggattttcacactggcatttctaggtagtgatattttcttccacttacctgctgaagcacatttatgcatttctttatggcaaaaccaaataactttagttgtggtctgcctgatactaccatagcacctcagtaccaaggggagggattttgactagttgaattattaagccaccacaataaagcagatttttaaataagaaataataatgttaacttgactgtacattgagatattctgcagctgatagagcagcattttaaaaatgtaacaggtggaaaattacactgtgcttaatgactgatttttttttaaactgcgagtcccttaagatcacgtttgtcaagtgtgtattcacacatttacttaaatcaagggactcaatgcttgcttttattttaaccatcttttactatttttagaaggaaactagctttagtagtgggttgccctgtatgttttctctttttgctcttaatatgccattgggtttttgtgtgtatgtgattttcaaaattcatgacttgaagtgcaaggacagatctagatgtttgtttaccaagctatgtgacttctcccaaaggatctgtactttctttccttacaacagcttgaaaatcattattttaaaatccttaaatcactgtgtctagatcattttttacattgtgtgccatagacttacccatgggacaacagagctccttcatttttggacaactactgtaatcattttttttttaggaaaaatggaaggtgccgggggtaatcatggccagtcaataattatataaaggagttcaaatactatagctgtcagttgatgaatttgttatgtagtaaaatgtatgactttgtatgggtttcttcagccctttttctgccactagcaaccagaatagcactttaccttttggttggctagataagtggctgactacctgtttttctcactgtggtgtgattggctaaacaatctcgcattaaaaattcaaatgtaaattgaattcacatgaaaaatcatgtttggttgtaaacctccaatgttttgattctctaatcatgttttcgtcacatgctgagtaaaagtgccttacaatgtaaaaattgtacagtacttatgttcccaagtagcatcatcatcttctgggtagtaattacattgtggtattaatatttagaaaaatggacctcagcagtgtatttactgtacatctcttaagtccttaactgtagttttaataagcatgacattatttgataagtatataacatttacatcatttcaaaaaatactgccgttactgtcttttatgcatattttagcctgaaattttgaagcgtcttttttctttcttttttcttttttgtttgtttttgttattgatattaaacagtgtaatctttgcaagcgtatattgaagattattctggagcatttattgccttaccagaaatgttagtaggaaatgttctttagagtagaaagatagacttgagtttctatacttttaagaagagctctttgttcctgggggaggggggcagggggtgaattttactttcatctcaagttattaaaaacccacaactgaagtaaattttatttcaagaatcagcagttttagaatttcagatagtacttgctcagaagtacatgctactcaagatattaagagataacaagatctgtagatctgctattgaatcagaatctgtgtacttgaacaaatgtgtgaatctcaaatatctcaaagcaaaagaaaaagtgttctagagtgttgttgcttttttaaaaaaagcgctgaagttagaccaaggtatacagttttgttctaacagacatttaggttaattgtaaagataaggaatgcattatgggtcaaaaatcaaacattcctctcatgttatgtatattttgttcctgttatattggctttattttcaaaattgtagtttgtagtattagtttccttttattggtattcttgcatatactattcattcaataaatgacttatgactttcaaaaaaaaaaa

SEQ ID NO: 224927 - DNA, 2295 bp, Homo sapiens
  misc_feature (13)..(13): n is a, c, g, or t
  misc_feature (17)..(17): n is a, c, g, or t
cggtaccccgggnccgnacggatgtggtctcatgtgctgtaggagtaaaaaagtctttgcataaaacagtatttatttttacttttgtgaccactattttagaaactttatttaatattttaatgttttcagtcattgctttggttatctataaaataggcttttgtgccctacttttcttcttgtagggcttggtggtgttttatcgattgtcagaattgtttttgaaagcctaagaacccagctttttagaaaggattttcacactggcatttctaggtagtgatattttcttccacttacctgctgaagcacatttatgcatttctttatggcaaaaccaaataactttagttgtggtctgcctgatactaccatagcacctcagtaccaaggggagggattttgactagttgaattattaagccaccacaataaagcagatttttaaataagaaataataatgttaacttgactgtacattgagatattctgcagctgatagagcagcattttaaaaatgtaacaggtggaaaattacactgtgcttaatgactgatttttttttaaactgcgagtcccttaagatcacgtttgtcaagtgtgtattcacacatttacttaaatcaagggactcaatgcttgcttttattttaaccatcttttactatttttagaaggaaactagctttagtagtgggttgccctgtatgttttctctttttgctcttaatatgccattgggtttttgtgtgtatgtgattttcaaaattcatgacttgaagtgcaaggacagatctagatgtttgtttaccaagctatgtgacttctcccaaaggatctgtactttctttccttacaacagcttgaaaatcattattttaaaatccttaaatcactgtgtctagatcattttttacattgtgtgccatagacttacccatgggacaacagagctccttcatttttggacaactactgtaatcattttttttttaggaaaaatggaaggtgccgggggtaatcatggccagtcaataattatataaaggagttcaaatactatagctgtcagttgatgaatttgttatgtagtaaaatgtatgactttgtatgggtttcttcagccctttttctgccactagcaaccagaatagcactttaccttttggttggctagataagtggctgactacctgtttttctcactgtggtgtgattggctaaacaatctcgcattaaaaattcaaatgtaaattgaattcacatgaaaaatcatgtttggttgtaaacctccaatgttttgattctctaatcatgttttcgtcacatgctgagtaaaagtgccttacaatgtaaaaattgtacagtacttatgttcccaagtagcatcatcatcttctgggtagtaattacattgtggtattaatatttagaaaaatggacctcagcagtgtatttactgtacatctcttaagtccttaactgtagttttaataagcatgacattatttgataagtatataacatttacatcatttcaaaaaatactgccgttactgtcttttatgcatattttagcctgaaattttgaagcgtcttttttctttcttttttcttttttgtttgtttttgttattgatattaaacagtgtaatctttgcaagcgtatattgaagattattctggagcatttattgccttaccagaaatgttagtaggaaatgttctttagagtagaaagatagacttgagtttctatacttttaagaagagctctttgttcctgggggaggggggcagggggtgaattttactttcatctcaagttattaaaaacccacaactgaagtaaattttatttcaagaatcagcagttttagaatttcagatagtacttgctcagaagtacatgctactcaagatattaagagataacaagatctgtagatctgctattgaatcagaatctgtgtacttgaacaaatgtgtgaatctcaaatatctcaaagcaaaagaaaaagtgttctagagtgttgttgcttttttaaaaaaagcgctgaagttagaccaaggtatacagttttgttctaacagacatttaggttaattgtaaagataaggaatgcattatgggtcaaaaatcaaacattcctctcatgttatgtatattttgttcctgttatattggctttattttcaaaattgtagtttgtagtattagtttccttttattggtattcttgcatatactattcattcaataaatgacttatgactttcaaaaaaaaaaa

SEQ ID NO: 224928 - DNA, 1321 bp, Homo sapiens
ggctgttggttgttggttttgcgactcttcctctggcttcgtttatgctgcgtctctgatttctcttcctctttcgtttgttttctgttgtggttatgtgtttggttcttctcttctttctgtgtgttctggttttttttgtctttcttctcgtatgtgcttctgcgttgtgtttttgctctctgctctctccatgagtttttttgtgtcttgtcctccgctcgctccgctcctgcaccttgtttgggagggggggggagtcggtgtttcttcgttgctgttggttgtgggtgcctgtctcttgttctttggctttgttttttttctcctttttctcttgtgtcttgtctgtgtttttatacaggctgcgcctccctctcttttgttgtttttctgcgtttatatactggttctgcgcttcctctgcttcgtcctcttagttgatgtggtgtgtcgccctcttcccgtatcgatcactaatacgtgtgttgtcggcctcctgctctgtcgtccgccctggcgggaggaataataggttgttgcgccgcccccctctcttttttttttttttttttttttttttttttttttttttttttttttttttttttttttttttttttttttttttttctttcttttttcttttttgtttgtttttgttattgatattaaacagtgtaatctttgcaagcgtatattgaagattattctggagcatttattgccttaccagaaatgttagtaggaaatgttctttagagtagaaagatagacttgagtttctatacttttaagaagagctctttgttcctgggggaggggggcagggggtgaattttactttcatctcaagttattaaaaacccacaactgaagtaaattttatttcaagaatcagcagttttagaatttcagatagtacttgctcagaagtacatgctactcaagatattaagagataacaagatctgtagatctgctattgaatcagaatctgtgtacttgaacaaatgtgtgaatctcaaatatctcaaagcaaaagaaaaagtgttctagagtgttgttgcttttttaaaaaaagcgctgaagttagaccaaggtatacagttttgttctaacagacatttaggttaattgtaaagataaggaatgcattatgggtcaaaaatcaaacattcctctcatgttatgtatattttgttcctgttatattggctttattttcaaaattgtagtttgtagtattagtttccttttattggtattcttgcatatactattcattcaataaatgacttatgactttcaaaaaaaaaaa

SEQ ID NO: 224929 - DNA, 317 bp, Homo sapiens
agacattaataacattctgttaattttgtcagtgtttaacatgggaaaaaataccccagaagaattttattccggttattctaaggagagaaaacaagaaaagtagcattaattacaaaacttttcaataaccaatttgttttccttgacagaaattgatatgcctctaatctgatatacagccttagaaagtcacatactaataatattattttgtcgttttgctgtagatgtgttctttgtgccattgtcctggagcaacaattggttgtgatgtgaaaacatgtcacaggacataccactaccactgtgcattg

SEQ ID NO: 224930 - DNA, 396 bp, Homo sapiens
tatactaaataaacatttaaaaatgtgtatattaaaacctaggtcaaatttttaacaactttcatgaatatgtataaactgattttaaaataaaattaacattgtcgcccttcttattctctgtagcatttcttgagacttaaagtggcattctaaaggcaatttaaaaatcatgtcaagctcagttgaacagaaaaaagggcctacaagacagcgcaaatgtggcttttgtaagtcaaatagagacaaggaatgtggacagttactaatatctgaaaaccagaaggtggcagcgcaccataagtgcatggtaagtataccggcagcaacagagaccttgaaacgattcatgagactcttaataacacatgaatgttcctgaatactaaaaaaaaa

SEQ ID NO: 224931 - DNA, 444 bp, Homo sapiens
tgttacccttcttattctctgtagcatttcttggggcttagagtggcttaatttgtctatactaaataaacatttaaaaatgtgtatattaaaacctaggtcaaatttttaacaactttcatgaatatgtataaactgattttaaaataaaattaacattgtcgcccttcttattctctgtagcatttcttgagacttaaagtggcattctaaaggcaatttaaaaatcatgtcaagctcagttgaacagaaaaaagggcctacaagacagcgcaaatgtggcttttgtaagtcaaatagagacaaggaatgtggacagttactaatatctgaaaaccagaaggtggcagcgcaccataagtgcatggtaagtataccggcagcaacagagaccttgaaacgattcatgagactcttaataacacatgaatgttcctgaatact

SEQ ID NO: 224932 - DNA, 4456 bp, Homo sapiens
cgtgcgaggggggcgacgtaagggcgctccgcgagcccgtctctcctcgaatgaaaggaaacaacctccggcgacagagccccgctctcaggcactgctggagaaccgagaccgacttctttctctttaccctcattggcgcttctctcctgcagtccgcctctgggccctgccgcatttcttgagacttaaagtggcattctaaaggcaatttaaaaatcatgtcaagctcagttgaacagaaaaaagggcctacaagacagcgcaaatgtggcttttgtaagtcaaatagagacaaggaatgtggacagttactaatatctgaaaaccagaaggtggcagcgcaccataagtgcatgctcttttcatctgctttggtatcatcacactctgataatgaaagtcttggtggattttctattgaagatgtccaaaaggaaattaaaagaggcacgaagctgatgtgttctttgtgccattgtcctggagcaacaattggttgtgatgtgaaaacatgtcacaggacataccactaccactgtgcattgcatgataaagctcaaatacgagagaaaccttcacaaggaatttacatggtctattgccgaaaacacaagaaaactgcacataactccgaagctgatttagaagaaagttttaatgaacatgaactggagccctcatcacctaaaagtaaaaagaaaagtcgcaaaggaaggccaagaaaaactaattttaaagggctgtcagaagataccaggtccacatcctcccatggaacagatgaaatggaaagtagttcctatagagataggtctccacacagaagcagccctagtgacaccaggcctaaatgtggattttgccatgtaggggaggaagaaaatgaagcacgaggaaaactgcatatatttaatgccaagaaggcagctgcccattataagtgcatgttgttttcttctggcacagtccagctcacaacaacatcaagagcagaatttggagactttgatattaaaactgtacttcaggagattaaacgaggaaaaagaatgaaatgtacactttgcagtcagcctggtgctactattggatgtgaaataaaagcctgtgttaagacttaccattaccactgtggagtacaagacaaagctaaatacattgaaaatatgtcacgaggaatttacaaactatactgtaaaaatcatagtggaaatgatgagagagatgaagaagatgaggaacgagagagtaaaagccgaggaaaagtagaaattgatcagcaacaactaactcagcagcaacttaatggaaactaggttcatgggacagagttagaaaactgggaatgaataagacatccataactactattcttttttcactgttttctaaaatcaaaaagggtttgtaactttttactgcccaactcttagatccttcattgaactgcctaaaaatgtcttgtttgttttatgagccctcactagaaggctgagtttgacatgttgatattacgtagctatagtttgcagtttctgggaagcaattgaaacactattaaccctgtgtatagtgtcaacagttaaagcagacgaaacgaagtaagctatatttctggactgaacaaagctctgctgtttagagcatttaagtttgtttagtggatccatactcaaaggaaagcataagcaaattttcctttacaatgcaaacatgccactggtggcagcacatggtaatttgtggatttttttttcatactcaagtaatggaggctagaaatgaagagaaccttctttttctcttgactttgacagcacatgctaaaaatctcttccaagaagtatgctaaagcttttcatttggttcctgttaaagttgttctcactgaccagcatggactcaggcaactggtaatgataagctatgagctccagtgcttttgccaaaattctcttgacagcacacctcctctctttccatgttatacaaaggacttctggcaaaatgattgagtccttcaagtttaaactaacatttggcaacagcaaattaaacgtttttaagatgtaaagaaagggttaccgcttgctaaggacttcagacaccatgtccgaaacctgttcctctcaagtgccctgttgtgtggaacacttcacatattggcgcacagtacgtaaggaggtctcatgtgctgtaggagtaaaaaagtctttgcataaaacagtatttatttttacttttgtgaccactattttagaaactttatttaatattttaatgttttcagtcattgctttggttatctataaaataggcttttgtgccctacttttcttcttgtagggcttggtggtgttttatcgattgtcagaattgtttttgaaagcctaagaacccagctttttagaaaggattttcacactggcatttctaggtagtgatattttcttccacttacctgctgaagcacatttatgcatttctttatggcaaaaccaaataactttagttgtggtctgcctgatactaccatagcacctcagtaccaaggggagggattttgactagttgaattattaagccaccacaataaagcagatttttaaataagaaataataatgttaacttgactgtacattgagatattctgcagctgatagagcagcattttaaaaatgtaacaggtggaaaattacactgtgcttaatgactgatttttttttaaactgcgagtcccttaagatcacgtttgtcaagtgtgtattcacacatttacttaaatcaagggactcaatgcttgcttttattttaaccatcttttactatttttagaaggaaactagctttagtagtgggttgccctgtatgttttctctttttgctcttaatatgccattgggtttttgtgtgtatgtgattttcaaaattcatgacttgaagtgcaaggacagatctagatgtttgtttaccaagctatgtgacttctcccaaaggatctgtactttctttccttacaacagcttgaaaatcattattttaaaatccttaaatcactgtgtctagatcattttttacattgtgtgccatagacttacccatgggacaacagagctccttcatttttggacaactactgtaatcattttttttttaggaaaaatggaaggtgccgggggtaatcatggccagtcaataattatataaaggagttcaaatactatagctgtcagttgatgaatttgttatgtagtaaaatgtatgactttgtatgggtttcttcagccctttttctgccactagcaaccagaatagcactttaccttttggttggctagataagtggctgactacctgtttttctcactgtggtgtgattggctaaacaatctcgcattaaaaattcaaatgtaaattgaattcacatgaaaaatcatgtttggttgtaaacctccaatgttttgattctctaatcatgttttcgtcacatgctgagtaaaagtgccttacaatgtaaaaattgtacagtacttatgttcccaagtagcatcatcatcttctgggtagtaattacattgtggtattaatatttagaaaaatggacctcagcagtgtatttactgtacatctcttaagtccttaactgtagttttaataagcatgacattatttgataagtatataacatttacatcatttcaaaaaatactgccgttactgtcttttatgcatattttagcctgaaattttgaagcgtcttttttctttcttttttcttttttgtttgtttttgttattgatattaaacagtgtaatctttgcaagcgtatattgaagattattctggagcatttattgccttaccagaaatgttagtaggaaatgttctttagagtagaaagatagacttgagtttctatacttttaagaagagctctttgttcctgggggaggggggcagggggtgaattttactttcatctcaagttattaaaaacccacaactgaagtaaattttatttcaagaatcagcagttttagaatttcagatagtacttgctcagaagtacatgctactcaagatattaagagataacaagatctgtagatctgctattgaatcagaatctgtgtacttgaacaaatgtgtgaatctcaaatatctcaaagcaaaagaaaaagtgttctagagtgttgttgcttttttaaaaaaagcgctgaagttagaccaaggtatacagttttgttctaacagacatttaggttaattgtaaagataaggaatgcattatgggtcaaaaatcaaacattcctctcatgttatgtatattttgttcctgttatattggctttattttcaaaattgtagtttgtagtattagtttccttttattggtattcttgcatatactattcattcaataaatgacttatgactttcaaaaaaaaaaa

SEQ ID NO: 224933 - DNA, 1224 bp, Homo sapiens
cgtgcgaggggggcgacgtaagggcgctccgcgagcccgtctctcctcgaatgaaaggaaacaacctccggcgacagagccccgctctcaggcactgctggagaaccgagaccgacttctttctctttaccctcattggcgcttctctcctgcagtccgcctctgggccctgccgcatttcttgagacttaaagtggcattctaaaggcaatttaaaaatcatgtcaagctcagttgaacagaaaaaagggcctacaagacagcgcaaatgtggcttttgtaagtcaaatagagacaaggaatgtggacagttactaatatctgaaaaccagaaggtggcagcgcaccataagtgcatgctcttttcatctgctttggtatcatcacactctgataatgaaagtcttggtggattttctattgaagatgtccaaaaggaaattaaaagaggcacgaagctgatgtgttctttgtgccattgtcctggagcaacaattggttgtgatgtgaaaacatgtcacaggacataccactaccactgtgcattgcatgataaagctcaaatacgagagaaaccttcacaaggaatttacatggtctattgccgaaaacacaagaaaactgcacataactccgaagctgatttagaagaaagttttaatgaacatgaactggagccctcatcacctaaaagtaaaaagaaaagtcgcaaaggaaggccaagaaaaactaattttaaagggctgtcagaagataccaggtccacatcctcccatggaacagatgaaatggaaagtagttcctatagagataggtctccacacagaagcagccctagtgacaccaggcctaaatgtggattttgccatgtaggggaggaagaaaatgaagcacgaggaaaactgcatatatttaatgccaagaaggcagctgcccattataagtgcatgttgttttcttctggcacagtccagctcacaacaacatcaagagcagaatttggagactttgatattaaaactgtacttcaggagattaaacgaggaaaaagaatggtctgtagtttttatatttgttatgcaacattacacttgatttgctgctttaaatttagagtacatcccaaatttatccagtcatcagaaaatttaaagtagttcgtatgttaaagcaaagtatatatttgacttatttgtaatataataaaggatgctgatgttacgg

SEQ ID NO: 224934 - DNA, 480 bp, Homo sapiens
agctccaaaattcatcagatatttcttaacaatttcaaaatctttccctttgaaattaattgtgtccagttttgatagaggtctgcatgctttctgctctttattatataatagaagcattatttgttgactagtaggtaattttagattgtttcaatgtgtacctgataaagatgtcaatgatgtttttaccttaacatggaaacctagtttaactagtctattattcaattttcttcttttgtgtaatttgttaaaatagtaagctgtgagctgcatttggaaccaatgtgataaaaccttgaagaagtttcttttgctcagatatgtgaaagagggtctgggaattttctttttttcttttctttttttttttttttgtgagctggagtcttgctctctcacccaggctggagtacatgagccgagatcacgccactgcactccaacctggtgacagagtgagactccgtctcaaaa

SEQ ID NO: 224935 - DNA, 826 bp, Homo sapiens
tccagaaaaatagctcattcttattcagtgtttgttttctgaggatgtcaagtggagtcagaaccaataaaagttctatcaagaagagtctcagttaaccagattagcttgcccaggttggtggaaccatgaaaaccagattaaaaataatgggagtaatcttccattgcttccatccctaggattcacttcctgtcctgttttatacactttgtaaatggtacctctataacccattatgctttttggcatcattgctcactttgactatttgcagattacaaattatttgaggtcaaagaagtgagtggagtacataaccttcaaggtgaagcaggaagcagatgcctccttccgagtataagttctcttaggtcagatactgggaacaaatttgtttacagcaccaagcacagctctttgagggttggaatacccactaaacatctaagcaaatgtggacatttacccttcagggatacatgctgacaaattccttcctatatgccaacctgaaagaccaaccttggagatatatgaagcattgcctagtccagagtgaggcagaagactgagtcaggggtttcgacttagtcaaggaatgctcaattttcaccttttccctcttcctgcataccttcctcatgagtcatgagcccagacaaggccccagggtttttcccaatatagttcttcaggaagtcactataagtcaagtggagttggtatttatatggcatttgttccttttaaaatgtatttttaattgataaataataattgtatatatttataatgtataatgaataaactgaaaaattcaata

SEQ ID NO: 224936 - DNA, 391 bp, Homo sapiens
catatatacatagacttatagaatcagtaagacaactctataagatagatattattttctctattttatggattcaaaaactgagccattagagattatgtattttgctgggcctggcggctcacacctgtaatcccagcactttgggaggccaaggcaggtggatcatctgaggtcaggagttcaagaccagcctggccaacatggtgaaaccccgtctctactaaaaatacaaaaattagccaggcatggtggcaggcacctgtaatcccaactactcgggaggctgaggcaggagaatcatttgaacccgggaggcagaggttgcagtgagccaagatcgtgccactgcactccagcctgggtgacacagtgagactctgactaaaaa

SEQ ID NO: 224937 - DNA, 640 bp, Homo sapiens
cataaagaggaattgttattaccccaatttcattttctgacttttattcctataatgagaggtttctataatttatacataagaatatttacttgaggtctcctttggtagaataaatcctaatttgtaggccataactgcctttttctggttcagtcactttctctaagcatgctgtttcccagttataaagtagtatttcaaattctattttatatttcccctgtgctacagagggcccattcaaaatttagagctaataaaaatgacaagaacaatatccaatttttttttaaatgaaaaggggggaggaactaattaaggccacgaagagtcaccacaaaagaataaaagagacacaatgaccacttcacaacactaggatggctataatttttttttaactgaaaataacaagtgttggcaaagatgtggaaaaactggcaccctgacacattgctggtgggaatgcaaagtggtttgcctgctgtaagaacagcatggcagctccttaaaagattaaacataccatgtgatgatctatggtatgtttaatcatgtgacccagccattccgctcttaggtaaatactcaagagaactgaaaacatatgttcacacaaaaacttgtacaagaaagt

SEQ ID NO: 224938 - DNA, 391 bp, Homo sapiens
cccaggttcaagcgattctcctgcctcagcctcccaagtagctgggactataggcatacaccaccaaacccagctaatttttgtattgtttgtagagacagggttttgccatgttgcccagtctggtctcaaactcctgggctcaagtgatctgcccacctcagcctgccaaagtactgggattacaggcatgagccaccttgctcaacctgtttccttctttataccaagtgctaacattttgaatgaatattaggaattgatgctggttagtgctaaaatatctttaaactatcagtgtaaacataattaggccgtgagtttttgctcttactcccaggtttctaaatgtctaagaaacaataaaatgagagtcatgtacagaaatata

SEQ ID NO: 224939 - DNA, 638 bp, Homo sapiens
ataagcttgattgtagcgtttaggtgcaaacgtgtcacatggcaagagcaggagcaagagcaaacctgagttgtaagccacctatttgacagttactcctttcctgagtttcttccatgtatatatgaaatatacatgttaataaacttctgtttttctcttatcttttgttacagggttctcagccaagaacttaaaagggtataggaaaaattatttttcttcccctaacatgctcaaattggtaccacccctatgaagggcaaactggcaacatctaccaaattgcaaatgtgtttccccttcggctctgcaatcccacatctgggaatctatccatatgaaatgctgtatgaaaaagattaattgcagcaccgtttgtatcagcacccaaatgcccatctacaaaacctggtttaaaaaattatggtatactctacactgggaagttaaggtaaaaaaattatttttaaaaatggtatatccatataatgaaatactataaagcattaaaaaaatcacaaagaacattgtgtgtcttaactgtggtggtgccttcaggcatataattgccaaaactcatcaaattatatacttaaattggatgcagtttgttgtggatagccttgaataatgct

SEQ ID NO: 224940 - DNA, 439 bp, Homo sapiens
gtataggaaaaattatttttcttcccctaacatgctcaaattggtaccacccctatgaagggcaaactggcaacatctaccaaattgcaaatgtgtttccccttcggctctgcaatcccacatctgggaatctatccatatgaaatgctgtatgaaaaagattaattgcagcaccgtttgtatcagcacccaaatgcccatctacaaaacctggtttaaaaaattatggtatactctacactgggaagttaaggtaaaaaaattatttttaaaaatggtatatccatataatgaaatactataaagcattaaaaaaatcacaaagaacattgtgtgtcttaactgtggtggtgccttcaggcatataattgccaaaactcatcaaattatatacttaaattggatgcagtttgttgtggatagccttgaataatgctaa

SEQ ID NO: 224941 - DNA, 363 bp, Homo sapiens
gtccgtttttgtattgctataaataaatacctaaggctgggtaatttataaagaaaacaggcttaactggctcacagttctgcagggtgtaccaagatggctccagcatctgcctctcatgaggcctcagggagcatccaatcatggcagaaggcaaagggggtgcagacgtgtcacatggcaagagcaggagcaagagcaaacctgagttgtaagccacctatttgacagttactcctttcctgagtttcttccatgtatatatgaaatatacatgttaataaacttctgtttttctcttatcttttgttacagggttctcagccaagaacttaaaagggtataggaaaaattatttttctt

SEQ ID NO: 224942 - DNA, 2396 bp, Homo sapiens
agcattcttccatctgtagatgtttcagctgctgtacaagggagtcccatttcaggtgtggggctgggcatggtcactcctgctggatgtctggaaggtgaaaaccaaggacctagggaaataccaggtacagcctttccaccctcatccagagcaggacaaacaggccaggtggtatcaggagcccaggtctccagctggagggaatgtcaaccctgcagtgggagcccatcacgcatcctaggcacagatgctaatgtaggcaccgcgggtaagctgagcttggtacccctccctggcttcaaaaataagccaaacaaggagctttctgcagaatgaaacctgtttttcatccagaagcactgctgactgtttggtggttgctgttggggcagtgagccttttgtccattctgagattgggctggtttctcctcttggccctgccctacagaccataaaggaaaacagcaagaggtccgcagcaaacatctacagatggccctggacatcagccacattctgagaaacatgtcatgttctgggagggctaaggcatcaagtaaggcctctggggctggaggatcccagggcaggtggggcaatccagagctgtgggggcttccatgggaattgggaggtctcaaggcagagggaggggttccacaggaggagtcacagagccaccaaggggtctcctggcccagggagcagccaacaccatggactgaacacccgctgggctccaagccctgggccaggctggggcatatggggccaggaggcagctcagagtgggagacagagagacaagtgtgctcagagggcacccgtatctggatgtagtgtggtcctgagtttctggctgggaagcgcttccagggtttcatatgtattatggagctgcttcctctctccaggctcaccctgcaggaatcccagtgaatatattgccaccatcttggagctcagtgccctcttagtgtaatggcaccagcagatctgcctgtgcacggacttcctgtactacctcactcctgaggggagatgcttctgcagggcctatgacctggtgcacaactttagacaccatcatcctggagcagcacctcaccctcacttgccggggtgttgatgacttcctcaaggctaaggccacattcaagattttggacttcagtgatgcatttttgctgagcaaggtgggcttctccgggattttagttcaggaggtagaatgcagcttgagatcaagtgtctgatcaaataacttgaacttgatctggagagctctggggagccatagaagttgttggataaaggagggacagtcgtatatgttttagagatgactgtggaaggctgcctggaaggagtgaacaagagccaggagaccagggagggagcttgtggggcaggtctggagatgacaagggagggatcctgctttgatgaaaggtcttcagggaatgtctcaggttacactcaggtgtcctcagagctagtgtgttcaggggtcttgcctccaggatgaaaatgagaaggagttgtcagacaagaacatataaatgaaggctggcatcttcgtgagtgccaatcgttgtcctggtgtggactactgtgggaataggggtctctccatccagggacatggtggatggaccctacatcactccattctgcccttcctttccctcccattctgagggcctcagtgcaagggcgctgtccaacctctggtgctgaagcagccgagagacccaagcctgccactcaggatatgacagcacagccagtggcctctactggatcctgtacaacctcagaagacacctagacactgggagtgctgccaccacgtggtgcaagagttctgagggaccgcaattctgaagacattgaatgctgcttcctgctccctccatggacctgcacagaattgtcccatgtttctgtttgtttgggcaccactgaggaaggaagcatgaaggacgcagaggtcaggccattctattgccctcctgctgctgggtctttaatcctgagatggcttcaggggctggtccttctccatggccccctccacatatctcagccattttgcaaaccctggtcagaatgaaacattccttgggaactcgggccatgagaagcatccttcctgaccacctgactgcggaaacatccttatcgcatcctcccgggcgaaggcccaacagcctgactgcaggaacatccttgccatatcctgccgggcagcaagctctaccgcccagacccctccttcccagtcccatgatcgccccagcctgtgagcggcagttggtgatggcactaagctgatttcctcctctgcagggttttgctagtaataaaggtgttgctgttgaagccacc

SEQ ID NO: 224943 - DNA, 2346 bp, Homo sapiens
agcattcttccatctgtagatgtttcagctgctgtacaagggagtcccatttcaggtgtggggctgggcatggtcactcctgctggatgtctggaaggtgaaaaccaaggacctagggaaataccaggtacagcctttccaccctcatccagagcaggacaaacaggccaggtggtatcaggagcccaggtctccagctggagggaatgtcaaccctgcagtgggagcccatcacgcatcctaggcacagatgctaatgtaggcaccgcgggtaagctgagcttggtacccctccctggcttcaaaaataagccaaacaaggagctttctgcagaatgaaacctgtttttcatccagaagcactgctgactgtttggtggttgctgttggggcagtgagccttttgtccattctgagattgggctggtttctcctcttggccctgccctacagaccataaaggaaaacagcaagaggtccgcagcaaacatctacagatggccctggacatcagccacattctgagaaacatgtcatgttctgggagggctaaggcatcaagtaaggcctctggggctggaggatcccagggcaggtggggcaatccagagctgtgggggcttccatgggaattgggaggtctcaaggcagagggaggggttccacaggaggagtcacagagccaccaaggggtctcctggcccagggagcagccaacaccatggactgaacacccgctgggctccaagccctgggccaggctggggcatatggggccaggaggcagctcagagtgggagacagagagacaagtgtgctcagagggcacccgtatctggatgtagtgtggtcctgagtttctggctgggaagcgcttccagggtttcatatgtattatggagctgcttcctctctccaggctcaccctgcaggaatcccagtgaatatattgccaccatcttggagctcagtgccctcttagtgtaatggcaccagcagatctgcctgtgcacggacttcctgtactacctcactcctgaggggagatgcttctgcagggcctatgacctggtgcacaactttagacaccatcatcctggagcagcacctcaccctcacttgccggggtgttgatgacttcctcaaggctaaggccacattcaagattttggacttcagtgatgcatttttgctgagcaaggtgggcttctccgggattttagttcaggaggtagaatgcagcttgagatcaagtgtctgatcaaataacttgaacttgatctggagagctctggggagccatagaagttgttggataaaggagggacagtcgtatatgttttagagatgactgtggaaggctgcctggaaggagtgaacaagagccaggagaccagggagggagcttgtggggcaggtctggagatgacaagggagggatcctgctttgatgaaaggtcttcagggaatgtctcaggttacactcaggtgtcctcagagctagtgtgttcaggggtcttgcctccaggatgaaaatgagaaggagttgtcagacaagaacatataaatgaaggctggcatcttcgtgagtgccaatcgttgtcctggtgtggactactgtgggaataggggtctctccatccagggacatggtggatggaccctacatcactccattctgcccttcctttccctcccattctgagggcctcagtgcaagggcgctgtccaacctctggtgctgaagcagccgagagacccaagcctgccactcaggatatgacagcacagccagtggcctctactggatcctgtacaacctcagaagacacctagacactgggagtgctgccaccacgtggtgcaagagttctgagggaccgcaattctgaagacattgaatgctgcttcctgctccctccatggacctgcacagaattgtcccatgtttctgtttgtttgggcaccactgaggaaggaagcatgaaccattctattgccctcctgctgctgggtctttaatcctgagatggcttcaggggctggtccttctccatggccccctccacatatctcagccattttgcaaaccctggtcagaatgaaacattccttgggaactcgggccatgagaagcatccttcctgaccacctgactgcggaaacatcgggcgaaggcccaacagcctgactgcaggaacatccttgccatatcctgccgggcagcaagctctaccgcccagacccctccttcccacctgtgagcggcagttggtgatggcactaagctgatttcctcctctgcagggttttgctagtaataaaggtgttgctgttgaagccacc

SEQ ID NO: 224944 - DNA, 2158 bp, Homo sapiens
agcattcttccatctgtagatgtttcagctgctgtacaagggagtcccatttcaggtgtggggctgggcatggtcactcctgctggatgtctggaaggtgaaaaccaaggacctagggaaataccaggtacagcctttccaccctcatccagagcaggacaaacaggccaggtggtatcaggagcccaggtctccagctggagggaatgtcaaccctgcagtgggagcccatcacgcatcctaggcacagatgctaatgtaggcaccgcgggtaagctgagcttggtacccctccctggcttcaaaaataagccaaacaaggagctttctgcagaatgaaacctgtttttcatccagaagcactgctgactgtttggtggttgctgttggggcagtgagccttttgtccattctgagattgggctggtttctcctcttggccctgccctacagaccataaaggaaaacagcaagaggtccgcagcaaacatctacagatggccctggacatcagccacattctgagaaacatgtcatgttctgggagggctaaggcatcaagtaaggcctctggggctggaggatcccagggcaggtggggcaatccagagctgtgggggcttccatgggaattgggaggtctcaaggcagagggaggggttccacaggaggagtcacagagccaccaaggggtctcctggcccagggagcagccaacaccatggactgaacacccgctgggctccaagccctgggccaggctggggcatatggggccaggaggcagctcagagtgggagacagagagacaagtgtgctcagagggcacccgtatctggatgtagtgtggtcctgagtttctggctgggaagcgcttccagggtttcatatgtattatggagctgcttcctctctccaggctcaccctgcaggaatcccagtgaatatattgccaccatcttggagctcagtgccctcttagtgtaatggcaccagcagatctgcctgtgcacggacttcctgtactacctcactcctgaggggagatgcttctgcagggcctatgacctggtgcacaactttagacaccatcatcctggagcagcacctcaccctcacttgccggggtgttgatgacttcctcaaggctaaggccacattcaagattttggacttcagtgatgcatttttgctgagcaaggtgggcttctccgggattttagttcaggaggtagaatgcagcttgagatcaagtgtctgatcaaataacttgaacttgatctggagagctctggggagccatagaagttgttggataaaggagggacagtcgtatatgttttagagatgactgtggaaggctgcctggaaggagtgaacaagagccaggagaccagggagggagcttgtggggcaggtctggagatgacaagggagggatcctgctttgatgaaaggtcttcagggaatgtctcaggttacactcaggtgtcctcagagctagtgtgttcaggggtcttgcctccaggatgaaaatgagaaggagttgtcagacaagaacatataaatgaaggctggcatcttcgtgagtgccaatcgttgtcctggtgtggactactgtgggaataggggtctctccatccagggacatggtggatggaccctacatcactccattctgcccttcctttccctcccattctgagggcctcagtgcaagggcgctgtccaacctctggtgctgaagcagccgagagacccaagcctgccactcaggatatgacagcacagccagtggcctctactggatcctgtacaacctcagaagacacctagacactgggagtgctgccaccacgtggtgcaagagttctgagggaccgcaattctgaagacattgaatggtgggtgccaggcctcgtggctgttccccagcccctctcataggctctgctccagctggtgaagggggatgacgtctctgtcaattctgccatgattgcctagcaggaaaaggagcagagcccagaagcagggcctggtacccagcctgcctaacaagggagaatttgtaggctttgtggacagaaagatctgggagtccatatcacccactaacttgctgagacattagtaaaatcagttttcttttctgagc

SEQ ID NO: 224945 - DNA, 631 bp, Homo sapiens
gcttacacctcagtagtaccttcttcagtgttttgagcttgagagttcaggtggcaatttcttcagcccagtattttctccctatggaaaaggatttctttgcccctagaaactttccttgccttctggaaggattcttttttccatttatatatttcctcataaagagaaaagctgtactatgcaacactaaggttagtcaaataggaaggaaaagaacatcagctttcacagttagcattagggagtatttcctagtagaaatattttcagtttcccgcacctccgtacctccactaatctgttctcactctgcctccaacttctttcaggatgtcttggctgtgctgctgtttgggggacagtgttttactctgacgggcagtttgagttcttgcagaaagtaggctcagcctttccaaactaaaccttgggtttcctcccaaagatgaagcaagatggctgctagcacagtcactgcggcacctgcaggctgcctgagagcaggctctgtatctaatgccgtgttttacctggtgggagatgcctgttaattgtgagacacactgttcagtttgtactactgacaaaacaaaaaacaataaaaaaaccatacttcttgcagaaatgt

SEQ ID NO: 224946 - DNA, 429 bp, Homo sapiens
gtaccagcaggtcggtttctgaggaggcctctcttccttgatttacaaatggccacctacgcatcatgtcctcacatggtctttctcagagagaaagagaggtgtctcttcctcttcttcttttgttttgttgagacagagtttcgctcttgttgcccaggctggagtgcaatggcacgatcttggctcactgcaacctccacctcctgggttcaagcgattctcgtgcctcagcctcccgagtagctgagattacaggcatgcctggctaattttgtatttttagtagagacagggtttctccatgttggtcaggctggtctcgaactctcgacctcaggtgatccacctgccttgccctcccaaagttctgggattacaggcgtgagccccgcacccggcctcctccttttcttataaggacacctg

SEQ ID NO: 224947 - DNA, 286 bp, Homo sapiens
tgcttcattattctctactctctctacatatataggtagacacacacatgcacgcacacacacacatttttctggactgagagtaagttatagacatgctgttggagtctaaatactttattttttttccctaaaaaataaggacactgccttacataatcatgaattattatctgggtcaggaaattaacataggtataattctaccacatgatctgtagacccattcaaactttgcccactggcccaataatgcccttggtggctatttcccctcctcttattc

SEQ ID NO: 224948 - DNA, 466 bp, Homo sapiens
tttgatgaacaaagttcttaagtctaattcatcaatcttttctctaacggttaatgctttttgtattctgtgtaagacattgtttattccaagatcatgaagatactgtcgtatgttttcctgcagaagctttattgttgtatctttcacactaaatagaaaccctctttaaaatcaccaactcctactgcattcttaaaatattttgctaaacttttcgaagattctggcaccacaacactcgcttcccagcctcaaaccttttggggaggtggggacagagaaagaaagaagctggcagggaaaacccagcctcagccaagacctagcccagatagtaaattagcagggctgggagtctccatcatatcagcagtcacatgtcttaaaaccagaatctaccaagattatatatatatcttgtatctgccactgccattaccttcttttcattttatgtcaaaaa

SEQ ID NO: 224949 - DNA, 399 bp, Homo sapiens
taggaaatagggaacaaaaaagtgggaggacaggtgggtgtgtgggcagagtatagcaataatattgttaacctatgcaaaggttaggctgattctgaatagagcaagagtttataatggaagattccttttaacacttaaaattcatgaaacgaagagctcaaagaaaatcttagaagccatctaatctactctcctttccctatctccacttgaaaaatggggacttaagagcagagctgttgcgacttgcctgaattcataaaccgagttagtggcggagctgaaagtcgagcctggctcttctgtttttaccatttgcagttgctcccacccctgcccccattcatgggttccacatccatggattcaaccaactatggatcaaaagtatttttt

SEQ ID NO: 224950 - DNA, 570 bp, Homo sapiens
tttattttaagttccaggatacacgtgcaggatgtgcaggtttgttacataggtaaacgtgtcccatggtggtttgctgcacctatcaacctgataacatttttaatttaagaaaaaggttaataccagcttagacagtttattttggctcttatattatttagaattaggcttggtttcatgggcagaaaaattaaatagtattcagaacatgtttacgggcttctgtattcgacagtttattttgattgcaaaggtttgaatctcagaaccttcttttccctttacttaaaaaatggtaaaattcataaaacatggctatgaatggttaaaattcatcattttcaccattttaaagtgtataattcagtgactttagtacatttaaaatgttgtgaaactgttaccactatctagttctggaacattttcatcaccccaagaggaaaccttttaagcagtcattctcctcttcccctccctgcattatcccctggcaaccactgatatcttttctgtctctatggatttgcctactctggacattcatataaatgaaatcgtacatat

SEQ ID NO: 224951 - DNA, 619 bp, Homo sapiens
cactccagcctgggcaacagagcgagcctctgtctcaaaaaaagaaaagaaaagaaaatgtattccatattcaaatgcagaatccactgaagatgagtctcctgcggcaccaacccattccacatcagggcatctggtatttacccaagggtaggttttgccatgaaccaggggtcaggcaagggccaaagacaccgagtacttgtagatgtgattggaaagcaaatcatctctatatggggacaggaagagagaggacagcgcttggtggtccacacatgttccttgggccagccgtgggctatccccccacattcagacattgggtcctgacactctttataaaaacactctgtgttgagtcccttccctgtggatggaaggaagtaggtttcctccaggaacgcatggcccagtgtggtgaacttgtatctgcttggctcctgtctctattaaaaatataaaaattagccaggcacggtggtgtgcatctgtgatcccagctgctcggtgggctgaggtgggagaatcacttgaacccaggaggcagaggttgcagtgaaccgagaccgcaccattgcactccagcctgggtgaaagagtgagacttcatctcaaa

SEQ ID NO: 224952 - DNA, 727 bp, Homo sapiens
acaaaacattcagattgttgtgtaaacaaagtaatcagaatgtcataataaatgacaggctgaagctctgtgcttatttgaaaggggatcaagtaatactgaagaagagtgatgtaaacatactcctgagcaaagtctcactgggatagaatttaatcaagaggttttactttcaagaaataagcacaatcacagaggccaggaaacttagctgtttcagggaattgatgggtagcacaaatgtgtgtttggcagaacacacacaaaaatcaggcattaaattaggcataccctaaaaccttcaaattcatatttttatatataactcaggttgctgatttgtcatctaaaaatgaaaatgatcagggccttaccatgcaaaagtaatgataaaataatgattgtgtggtctgaagaaataaaactttgggaatacttttgattgcttttcaataataaatgattactatagtgatggtgatgttctgtacctaaaataatagtactgcctagaggagagatgtaaaattatagtagcagaagttctcttagacagcagggaaagctgctagataaaggctgaataggttccttttttttttttttttttttttgagacggagtctcgctctgtcacccaggctggagtgcagtggtgcaatctcggctcactgcaacctctgcctcccgggttcaagcgattctcctgcctcagcctcctgagtag

SEQ ID NO: 224953 - DNA, 512 bp, Homo sapiens
agatatgtaatgaagggagatggttggggaggagaggaagacaaaagatacaactccgggggatggtggaggtttaccaagaggagaaaccagcaagacacacagtgggaacaaccatgagggaagaggtgactgagggactgtattgttactgcagcctcggaagcagcaaatataaaaaagttaccctttctgccccacccaagctcagagcctcctcactgattttcctactcccaggccctcccagtgccactgtggttcacactgagcactggtcctggggtcctagcagtcatcattttacacaatttgatcctgttcagctcttctggttttgtctctctttctttccttcttctgaaagtctagctggagaaaataactctccataccccggaacacacaccgcgttttcccatctttagctctctgctcactaatgacttcccctctaatgtccatccccatcatatcatctccacccacccaagtcctacccataaaaggag

SEQ ID NO: 224954 - DNA, 246 bp, Homo sapiens
catgtccctgaagagtgacttgatgcaagagggtggcacagaactgtggaaagaaattggaacatgaacttaataaattagcatatgtaatgcactgaaacatttacacataacagagattagaggagaactgacctctaggaaggtttgggttcttaagtcatccaggtcttgatggccaaggccatctataaaagaaatattttccttttttcatggtgactaaaaaataaattttaaaagtat

SEQ ID NO: 224955 - DNA, 404 bp, Homo sapiens
tgtatatgtccaaatccagattcaacctgcattcacaaagagaaatgaagaactgaatcattcgtctgtgctgtgccaagcttctgcctctatcaaccatatctttcaagcatgggtaggaggcaagggtgaattgccccaatcggttgtttaccttgctaagcttgccttctgatagcttttcttcccattctgattgtccatcacaaagccaagtatatgttgtatatgttccaaagattgtaagagtaagagtatttggtatattctaagagagaaatgtaaactctacaatttgattcaataattaagtatatagccatgttaaaaacagtgaaacaaaaacacccatctgagtctttcttcttagactaagtaagctccaatgaaagcatttctcctat

SEQ ID NO: 224956 - DNA, 286 bp, Homo sapiens
gtacctaatcaatgcatttcccatctgactggttgattatagcccattaaaatagtggagtctgtgcaatagaattctctctcaccccttctgtggtccacgccttcttctcgggtcaagataattgacgagtagaccatagacatagacacaacttaccttttataagacattatatgtctgttatttgtgtgttgtttgtgtttctcctggaatgctttgtaaaacccctgcaatcttacttattttctagtttggatttgctgtaggccaagcaataatgaat

SEQ ID NO: 224957 - DNA, 357 bp, Homo sapiens
caaattagttaaaatggcctaattagtggactgtaaaaatacaaactgaggctggcagcctgatgtgtattagacaaggggactgtctccccacacggggaggcctggagctgagcaggccatgggacccagctcacacctgactgtggggcttcggacctttaatagccagcgacgcagctgaacccaatggttttgccttaggtaacgctgtcttctcctggcccaagtcatggccctagctttggccaagtgggtataatggaaagaacgtggggtttggatccagaacctgagcttgaatctcagccttagttcaccagctactgctttattaaagttgcttaaccctcctga

SEQ ID NO: 224958 - DNA, 267 bp, Homo sapiens
ttccattggagtttatgggctagttgagaaggtagacattaatgaaaatacataactaaatataaaagcaagagagaaagaaaaaaaggaaggacagaaagaagaaagaaagaaagagagagagagagagaaagacagagaaagaaagaaaggaaaagaaagaaggataaaaagaaaaacagatgcataattctgaaatcacaactgtgatgagtgctacaaaggaaaggtaaatataatagaaaggggaaaaatgtatgacagagg

SEQ ID NO: 224959 - DNA, 907 bp, Homo sapiens
tgccctccttgtagtccggtgggaaacagaaacagtaaatagggaattataacacagtgtcatcaagttcgtggtagaagtacaggatgcagcagggccgcatcagctaccttatgcagcgctgttgggtcatggatgacttcttagagaaagtgacagctaagaaagaggcttaagggagaaacagagattagcttcagccacaagaagttcattggtgtctttaatatagacctatttgttttgttgttttgtttttgagtgatggagattgaatcaagataagttgaggacttcatgaaaaaacagaggctgcagtaaatgattcttctatgaagattgagataggatggagagagacagggctgaaggggacataggttgagaggatgttttgttttgtttttaaaattagagtattttgtgctgatgagaaggagccaataaaggaaggtagattgggaatatacggagacaataatgagaaaaattagtaaggtattccctgaggaaaggcaaaaaggaacatgtccagggcatgagtggagggagtagccatgccaatgaaagaaggaaaagataaacaagacagataataagccctgcattcatggaattgtttaaggacaatgttagtcttggagagccctatttaatttggttagcttctttgtggtttgaaaaatatattgattttaattatacaatcccaccaatgatttctgataattatagcttagagacctaatgctgggtttcctggaactctttaaaattacaaatagtggctgggtgcagtggctcatgcctgtaatccaggcactttaagaggccaaggcgggtggatcacttgacgccaggagttagacaccagcctggccaacatggtgaaatcccatctctacta

SEQ ID NO: 224960 - DNA, 214 bp, Homo sapiens
tgccctccttgtagtccggtgggaaacagaaacagtaaatagggaattataacacagtgtcatcaagttcgtggtagaagtacaggatgcagcagggccgcatcagctaccttatgcagcgctgttgggtcatggatgacttcttagagaaagtgacagcctggaaagacttaactttactctgagtgagtggaggagagaagtccgagccgac

SEQ ID NO: 224961 - DNA, 353 bp, Homo sapiens
tcctcccttaaaagggcaaaagcacaaggctcagccctggctttcccagctcctctggtctcgctgctccacggacgtgtgacgtacgctggtgaaacgaagcccgcttgaatgggggcttcactattgtgtgctgctgaacctaggcctagcgcctggcaggctttggtgaatgttcagaaaatgacaattcatttcgtgtcagcgagggcacaccagctttgaatattttgctgctgttcaaatgcacaattttgacaattacctagcaatgtccaaagtcgtcataattgttagtgtcttgcacgtgatgttccttataaccatgtaataaatacagtgtgaagtctcca

SEQ ID NO: 224962 - DNA, 646 bp, Homo sapiens
acagcagtgatttttccgaggtggtcctcaggccaggcatcatcaccaccacctggaatttactagaaaatgaaatgttcatgttggggccccgtcccatatccactgaatcagaaactctagaaatggggcctggtgcagtcacttgcaaacttcaagtgtttaaaagacctgaatctcacaatagtctctataatcatgaaacattaagaactaaacgaatgttaatgccataaaactgggaataatccaaatatctttgaaaagaagaatggataaattgtgtcacattcattcgatggaatacgatacaggattgaaaacgaacagtacagctgcattcaacagtggaggaatctcacaggcaacattgaacagagggagccaggctcatccagaccatcattaaattcatataaatttccaggcaggcataactgcacagcacatttgtgctaactagaaaaggcctcttctctgggcagatttatccccacaggtatatagcttggcaccttcagaaaaagatgccccgtttccagccctggaccacgggacacagtctgcccagcgggtcaggctgaatgtcagctcttgtctgtctctttgggcattacaaaaagagtaaacaagtcaagcgattcat

SEQ ID NO: 224963 - DNA, 536 bp, Homo sapiens
ctgaaatagctacaatgattttgaaaaaataagaggaatctcacacttttgagacttactgtgaaactctagtaattaagacagtgtgcagtgttgaaggaatggatacagagctccatggaacacagtagagtccagagatagccccacacaaacgtgtggacggagagtccggagacagccccacacaaacgtgtggatggagagtccggagatagacccacacaaacgtgtggatggagagtccggagacagccccacacaaacgtgtggatggagagtccggagatagacccacacaaacggggccatcagagttttgacaaagagcaaaataaattcaagggagaaagggtagtctgttcaaaaatgctgctgggaaaagcagtcatttgtgtcaaaaaccaaacgctgacctatccctcatgcctcgtgcaaacatctaaaactccaaagcttttggaagaaaccataggaaatccttatgacctgacactaggcagcaaaattcagaacttttgcttcaagacactttt

SEQ ID NO: 224964 - DNA, 395 bp, Homo sapiens
tgaaatatgccagatatgtctcaatcctttagtcagtaatgatactaaaagacctcactggtcacatatggaagatgctaggaatcaactcgttattttgaaaactgatgcagataaaatgaaatcaagccattattttgccttatatgtttgaagtgtacctgagacagtaactgatgagggaaaaatttggaagcattctagctaatgaagaaacgtgatagacttagaatattactctattactaaccttaatgaaatagtaaatcattaatggccattgatatcacagagagccaaccagacatatatgcctctgatagaaatatacaaccccgcttaggaaatattaccatcaaaaaattaaaccagactgctgaagcaaggacaaataa

SEQ ID NO: 224965 - DNA, 476 bp, Homo sapiens
tgatactcgagtaagtgttcaaagtgagcagcccatgcaactgcctgggggaaaggaggattttccattccttggggaaagggtctgtgccaatgccatgaggtggacatgtgcctggtgtgttgaagactggcaaggaggtcagtatgggtggagcagagtgagcaagtgggagaagagtagtaaaagagaggtaatgggattgagtagggggaaatttcccacagcatttactctgtgttgagtccacggaaaggatttcagcagagggtataatgtgatcagactcctcaaccataatatgccatcaggagtgctccgttgagctgagaatagcccgtatgaggacaaacatgaaggctgataccacttagaacacggaatcatgtgagggacagtgatttggaccatagtggtagcagtggagtggctatattctaggtgtattttgcaagtggagccaacaggatttactg

SEQ ID NO: 224966 - DNA, 457 bp, Homo sapiens
cagggccaccaagtacttggtggagagaatatgaatacagagcacatgaggatttcacttgtttttatcagagcatttgatagtctcctgttgtcgaattgagtaaatatgtgatgaattatgctttgcggtggttgaaggggcttatcaaagagttctactaaatgtataggagttagtttgtagggaagtcatcttagacttattcagcatttttctcaagtgatttggtgaccactgatagcgttttgatcaagttgatttagaactaagaaaaacaagttaaattaggaaaaagaatatggatgaaaaaacaacccttagagtttagagtgatctgctcaatagtaataatgtgaaatttaataaagataagtgcgaatcttgtgttttaacccaaagtgctaaattcataagtacagaataggagaaacacagcctacaatggcacaggttt

SEQ ID NO: 224967 - DNA, 457 bp, Homo sapiens
ttctatacagatgcaaatttatcctacaaaagatagctttgcaggcccacttcattctgctggctctatttcagccatttcaaaatatgtcaaataaatttatttcgcagtaagattatctatctatctatctatctatctatctatctatctatctaatctatctaccacaaagtttaaaacaattgaagacctagaaacatactgggtatttctcatccttcccctatggtaccacaatgccatgttttctatctctagaatatcatttactgccttattttataaaggatgtctgagtatatattataaatataaatagaatgtaagattttgagtatatatctcatgcatttactaatattccacataatccctgtatgatatcagcacataatagttattcaatttactaatttacaattaaaaaaatgaaaacaaaggtaactaaagtaaa

SEQ ID NO: 224968 - DNA, 172 bp, Homo sapiens
ttgttcaagatactggggataagcagaaaaaatgcaggcatgatctcaattatcttggtgcttacactctagtgaggcaagagacaattaagcaaacacataaataaatgagattggttttgaaaatatagaaagcggctgggtgcggtggctcatgcctgtaatcccagca

SEQ ID NO: 224969 - DNA, 221 bp, Homo sapiens
gtttgacgcagagcagaatcatcccctagagcttgttaacattgctggaccccaactccagagtttctgattcggcaggtctgggttggggccccagactttgcatttctaaccagctcccaggtgatgcacgagagaccacaccttgcaaaccattgttttagagtctgtgggaggttcttactgcggttgttggaacaagcacttgtctaaagttcaca

SEQ ID NO: 224970 - DNA, 515 bp, Homo sapiens
ctgctttatctctgggggcaagagcagcagttttgcagtcttaagagaaaattgcaacatggatagtacttgtccttaaaaaaggaaaagtattgtttatggttctaaagtaattaattcagggacagaaaggtgttgcataacggtttgcctaacaaatgatcatgcttggcttattaaatttgaaagtatgcttcagacgatcacaagttcgtaaattaattttcaaaatatttgcggggctgtcttgttactaatggtgttacaagttcctgaattccatatctctttttgccaatttgatataagaaaaacttacgtaaaagaaaccagtgacataacgatagctaagaactttgttgaatagattacgtgtcaaatggttgcaaaaaagcactcaaactggggagatgagatggggagagagttacaaattttttttttttttttttacaaattttgttacatggaagtttctctaatcaatttagaccatatctctttttcctgctcca

SEQ ID NO: 224971 - DNA, 253 bp, Homo sapiens
cacaacatacacacacacgcgccccccagtttttttcatcgtaagccccgagggagccagacccagagggtccaccgacgtcccggattctaataacgacatctgcgcgccaggcgggcctcctgcgggagccggggcccattttctttcgaagctaacgaagctgctgcgcaggcctgttaattccctcagcagccagtgcgaggttaaacacgcgacctcgcaaccatggcttttgagaggaagctgaatt

SEQ ID NO: 224972 - DNA, 260 bp, Homo sapiens
tataaattaacagttaaaaaaattaacagaacaataagcaaaaaacaaagaacaaattgagatcaagatatcccaacaggctaagattttctaaataatgactccagtacaagacacataaccatggcataaattccaaatattctatcctgttatccctcaacccactaaaatatgtatgggctgctgaatgttaaattgaaaaatgttaaatttaacattaaatgttaaattctttctttatgaataacttctcccag

SEQ ID NO: 224973 - DNA, 496 bp, Homo sapiens
cttaccattttgcttctaacaatgactttgatttggaactaattggggtttaaagcacacgttaaccacatctctctcaagggcacttaataaactccctgtcccttgttcaaggagaccagccaggccctccttttgggataagagccaagagcttctgagtacctttcaccaagaaatgagaaccccatgcagagaatcttatctgccagaaaagagccactcctgtccctgagcagagctacttatttcattcctgggcagaatatgctcaagctttctggaggaggtggggttctcctggcaatctgggagggggctcttctgctgctcagctgctgggccatggcagccaaccatcaggtatttggtgaccaaaagaaagcggccagcacccagccaggtgaccagatgtcttcatgcctcagtttcctcatctataaaatgtaaagaataataaaacatatcttgcagagttgttgggaaaattgcatta

SEQ ID NO: 224974 - DNA, 1061 bp, Homo sapiens
acactatatatatacatatatacatgatatacacactatatatgtgattcatgttttaggtactgtaagtaatatatataacaaatatatatgatatataacatatatagtgtgtgtatatatagggttttataaaaattaatatataatgaatatatgagatatataactaatctatatattgaatgtatgtatgtgtatatagggtgctgtaaagaatatataactaatatatatgattatatatagtgtatgtctaatctatataaagtgaggtaagggggatgcttggcaagggatgtttgggtctgagcattgtcggcagggtttatgggctaggcatgatcacagggtgtgggagtgatggtaaggaaagaaagatgagagaggggcttgagatggctaatttggggctttcagaaccttagtggggtaagggcagtatcctccaaaggaatagatggcaactatggatgattgctcacacatagcagggttgttcaaataagtaaatatctcaaggataatgggagccaggcttctctctgtaggagaaagtagttataaatgtggaagggcaaaaactagaatgaactgtatgatgctggattggaggttttactgtgaacacatgatttttcaatatatattgttagacaaagaaatataactgtaaatgtgtgtgtaaggatacatataaagatgtgctgtatatgtgtatgaatgtataaatattccctaactgcatccactcagacagcctgggctatggatatctcaatagcagtgagcatacctagtgctaaataccattctccgctataaggaatcagggctcctgaataaatgattacatccaaggctggagcaggatgagtatgaaacatctaattgccctagtaactaggggagtgctgaaagaatgatggggatgtgtcaaaaggcctcagaatggtaacctgttaatgttgaatctggattatgtgtatatggtatttaaagctcttttaattattctgtattaaaaaatattttacaataaaatgtttacagaatctaag

SEQ ID NO: 224975 - DNA, 1006 bp, Homo sapiens
acactatatatatacatatatacatgatatacacactatatatgtgattcatgttttaggtactgtaagtaatatatataacaaatatatatgatatataacatatatagtgtgtgtatatatagggttttataaaaattaatatataatgaatatatgagatatataactaatctatatattgaatgtatgtatgtgtatatagggtgctgtaaagaatatataactaatatatatgattatatatagtgtatgtctaatctatataaagtgaggtaagggggatgcttggcaagggatgtttgggtctgagcattgtcggcagggtttatgggctaggcatgatcacagggtgtgggagtgatggtaaggaaagaaagatgagagaggggcttgagatggctaatttggggctttcagaaccttagtggggtaagggcagtatcctccaaaggaatagatggcaactatggatgattgctcacacatagcagggttgttcaaataagtaaatatctcaaggataatgggagccaggcttctctctgtaggagaaagtagttttactgtgaacacatgatttttcaatatatattgttagacaaagaaatataactgtaaatgtgtgtgtaaggatacatataaagatgtgctgtatatgtgtatgaatgtataaatattccctaactgcatccactcagacagcctgggctatggatatctcaatagcagtgagcatacctagtgctaaataccattctccgctataaggaatcagggctcctgaataaatgattacatccaaggctggagcaggatgagtatgaaacatctaattgccctagtaactaggggagtgctgaaagaatgatggggatgtgtcaaaaggcctcagaatggtaacctgttaatgttgaatctggattatgtgtatatggtatttaaagctcttttaattattctgtattaaaaaatattttacaataaaatgtttacagaatctaag

SEQ ID NO: 224976 - DNA, 497 bp, Homo sapiens
gtgcatttgggatgagcacagatatcaagacaggaagaccatggccctggtatattaccatcttgtctccagagaaatgtagaaggaaataggtttcaattcactgctttccagtctgccacgtgcagccttatccctcagaggagtgagtctctcaatatctgggtcactggcccagatttttctgtctctgtgctgactgaccacaagacatctctagatgtcaggattgtttggtatgcaaatttaagtagccctccttgtgaggcttactgtgcactttgtgcattagaatggcatgttcaatgaaaaaggagtgaattcacccttacaggtggggaagatgccagaagggaggtgtgtctcacctgtcagatgcaacttcataaatgctgtttgctgggataagctctgtgcatgttcctgagaattctttttctaagatcaaacttttacatgtaacttgaaaacacgtgtggtatgtttgaatgtgcaga

SEQ ID NO: 224977 - DNA, 754 bp, Homo sapiens
gcacgagaaatataacaggaggaagagcatactcatgcaaattagctctcatacagtttcacactggaaagggtttataggacaggggttgagggtgttagattttagggactgaaggaggaaaactgtgtgaaactgtatgagagttaattcaagtgatttgacaagtctaggaagtgacaggaagtagaatgaggcctgacgaggacttaaaactaaaagaccaagggagagtcaaagaaatggaggtgtagaagaggtcagaaagagacagaatgtgagtaaggcaggagagtgttacaatgagttggagatttcttaacgtggagcaggcaaggtccagaatatgaatgtattgccatgtaagtagactgttgaaggtggaacaaaggtgaaggcacaaacaactaccagttggattacaagatggaagagaagcacccatgtaatagcaactgaactgaaaaaaataaaacacctaggaataaacttcaacaagagatatgcaataccttcataggagaaactttaaacacttccgacagacacaaaaataaacctgaataaatagacatgccaagatggcaatgtccctactatacatgtaatacaattccataaaaagtgcctgcaggccgggtgccagggctcacacctgtaatcccagcactgtgtgagactgaggcaggtggattacttgagtccaggagtttgagaccagcctgggcaacaggttgagagcccatttctacca

SEQ ID NO: 224978 - DNA, 920 bp, Homo sapiens
ctcggctctaccttgtcttcccaatttcctttgttgagtgtaagggaattgggaaggcaggtagaggactcatggtacatttgctgaagcttacaagagtcagtggaagctgaccaaagacgagcagaggcagcactgagcagtgatgagggcccccgtgagactctgccccatacagctgtggtttctaatttgcatgagtatgctcttcctcctgttatatttaacactggaaagggtttataggacaggggttgagggtgttagattttagggactgaaggaggaaaactgtgtgaaactgtatgagagttaattcaagtgatttgacaagtctaggaagtgacaggaagtagaatgaggcctgacgaggacttaaaactaaaagaccaagggagagtcaaagaaatggaggtgtagaagaggtcagaaagagacagaatgtgagtaaggcaggagagtgttacaatgagttggagatttcttaacgtggagcaggcaaggtccagaatatgaatgtattgccatgtaagtagactgttgaaggtggaacaaaggtgaaggcacaaacaactaccagttggattacaagatggaagagaagcacccatgtaatagcaactgaactgaaaaaaataaaacacctaggaataaacttcaacaagagatatgcaataccttcataggagaaactttaaacacttccgacagacacaaaaataaacctgaataaatagacatgccaagatggcaatgtccctactatacatgtaatacaattccataaaaagtgcctgcaggccgggtgccagggctcacacctgtaatcccagcactgtgtgagactgaggcaggtggattacttgagtccaggagtttgagaccagcctgggcaacaggttgagagcccatttctacca

SEQ ID NO: 224979 - DNA, 506 bp, Homo sapiens
tttttgggccagtattcacagtttttcagtgctaatccatgtagattaaacataaaccactgattagtatcccactgtaccaacgtatttggctaccctcacatagatgaacacttaggttgcttttgactttttacaattaaaaatgaattattctgcgcttcagtgaataatcctgatcatacatccttgttcacatgtccctagaagggaaacactggggctcaaagcatgcacatttaaaaatctgttttggccaggcatggtggctcatgcctgtaatcccagcactttttggaggccaaggtgagcggatcgcgaggtcaagagttcgagatcagcctggctaacaaggtgaaaccttgtctctattaagaatacaaaaaattagccaggtgtggtggcatgtgcctgtagtcccagctactctggaatctgaggcaggagaatcgcttgaacccgggaggcagaggttacagtgagccaagaccgaaccattgcactcc

SEQ ID NO: 224980 - DNA, 418 bp, Homo sapiens
actgtacaagtcctaagaaaaatatagcgagaaacttgcaggacttgagtaaatgagaaatatttgttaagtaagaacaaatataatggtattgcaggttaataaattgtttattatataaatatttaaaattttgtacagctaaaaatactttaaatatagatatgagttgaaggatagactcaaagaaaatatttgtaaacatttgataaataatatcactaacatacaaatagctcctttataatgacaataaaaagatccatagcgtaaatacaaatggaaaagtcttaacaggtaatagataaatgaatataaattgtcatgtaaaagtccttcttctgaactaaaagttaagaaagtgaaaattaaacatataaacaagataccattttcttttattaaaatttcaaattaa

SEQ ID NO: 224981 - DNA, 195 bp, Homo sapiens
tttcattattttacatcatggaaaaactgaattgcaaaattatcatgaagatactttaagtactctaataggtaatatagaacaagtgtagagcatttcatctgtaggatgaaaaagttgtttacaattattgaccacatagagcgttataaaaagacccaatttaattaaagtggcaaatatggtgaggaaacc

SEQ ID NO: 224982 - DNA, 377 bp, Homo sapiens
ccaccccccacccaccagaccgaggattccaaaagggggcgaaggcggagagcaaagggggctgcgcccacccggagccccgcggcggcccagcgcggcccgccctctcgttgccttggaggcagcccctgcgggcactcgcggtcaaaggcaggatttccgtcggggcggcagcaattcccggatccagcggggagcgcgggccgagaccgccgcgggcgcggagggggcgcccggagaggcctgtccctgccgagggcggggacttccccaggaagcggggacccacgcctcgcgcgcccggcaggagtcccctgcagcccggaacctaccgcaagggcgggccgagagggtcgcggggccgcggtcgcggccgc

SEQ ID NO: 224983 - DNA, 118 bp, Homo sapiens
ttccaatacaattcagctcgtacctaaggaaaaacaaaagactgttgtccttcattgtaatatgttggaagagatgtatgctttgaaatgaagcatttactaagagaactctgaacac

SEQ ID NO: 224984 - DNA, 429 bp, Homo sapiens
ttgggagtgtgtctttgactggacctgtgttttcatctgtctcaggcccacgtttgggagtatgtggctggctggatagcagacgtagcataggcctcacttttctgtgccgttttgcagtcccacctgcagtgcgtgagcatcttgctccgagacctcaccagcactctgcattgtgatgttcttaatttcagccgttccagcagatgtgcactgatgctgtgtcgtggcttggatttgtgatgcttttaatttcagccgttccagcggatgtgtactgatgtgtcctggcttggatttgctttcacggtgaccagtgctgctcctcgtttgttcatgtgcttattggccatttgtatgttttccttgtgaagtgtctgttcaattttttgcctattttttcattaaattgtttattgagctgtatga

SEQ ID NO: 224985 - DNA, 415 bp, Homo sapiens
gggctcagggaccagagcgggattatggaaatcaaaaccaagcttgcagtggaggggagaggtatgggccactttgagaggtgcctcgtgtgggagggggtcagaatggacctcaccattgaggggccgggagaagaggcttctaggcagaagagaacagtgggtgccaaggccctgaggcaggaaggtgtttaggagcagaaagaaggaagcctggggcttagcatgtgctcagtacttggccaagaagcctcggcccaggggctgggagtgtgagcgcaggaaagaggttgctggacacggcaggagagaatgggaactgggccctccaagggcagcccttccaggagatgggacatggattccttgtttgtgttctctgctatagccaaatatatgtgcacgtgtatgtgag

SEQ ID NO: 224986 - DNA, 232 bp, Homo sapiens
tcaagaacaaagattatgttttattcatctctatattcttagcatttagcactgtggcttgcaaatacaagtgtctccctttccacctccccacccctacccaccaaaaaccacaaaatgacttaatctttaaggatacttgattactctgtttggattttaagagttctatgtgcttgaaccataatcacatttcttttggtgaagaaaaataaaccaatgtttatcttta

SEQ ID NO: 224987 - DNA, 421 bp, Homo sapiens
aactaatgaatgttttcctgtcaagttaatttggagtttatcctgagtttattaaggattagcatcctgaagtgtattgaaacaaaatgattatttcataatgtttgaattgcttccaaactgcatgttatttattctaaactctccctctgataggataccgagacctagagaagttaagaaaacaagccccagatcaatcacattgctcctgacagcacctaaccttctagattccaagtccaatggttttcctggtactatgatgctagtagatcttaaaaaataataatctagatctacactatccaatatggtagccactggccacatgtgattttagctcttgatatgtgtttaattcgaatttagatgtgccgtaagtgtaaaatgcacactgaatttcaaagacttagtatga

SEQ ID NO: 224988 - DNA, 313 bp, Homo sapiens
tattgttctaatcatcgttatttatatatgtatttatatatatgaacataaggaaataaattcaatcaaccaataagtattatatccaaacaagcccaaatgttttctttcatctgtttagaagtttttccgataaagaatataacatcttttaattttttgctaaaattagaatttttactttatgtaagaaaaagagcacattgaaactataccatatactgatcatttatataagatagtcttatctgaaaagcaatctatttttgatttgtcttaaataaaactgacatcttttagtaaatctaagttg

SEQ ID NO: 224989 - DNA, 309 bp, Homo sapiens
gctttagttttggtctctgcatttttacaaaagtatgtgtggtatatgtgagaatgtatttttaaatttacgtcttctagaaatgttttgaattcgcatatacttggtactggggtttgaagcatattgtttggtaaaattacttaaaatataggtgcttgttttattaacaagctaggtatttttacaagggagattgtaattgggcttaatgtaaaggccaatgagagtacctaaaattgggtgttgagtggtactgggctgttttaatatatatattttagatattaaaaatcaacggatgtgtta

SEQ ID NO: 224990 - DNA, 477 bp, Homo sapiens
gtattgaagtttcctacaatttttttaaattttttatttatttatttttggagatggtgtctcactctgtcacccaggctggagtgcagtggcatgcctccctggtttgcaccattctcctgcctcagcctcccgagtagctgggactacaggcgcccaccaccacacctggctgattttttgtatttttagtagagatggggctttaccgtgttagccagggtggtctcaatctcctgacctcgtgatctgcccgcctcggccttccaaagtgctgggattacaggcgtgagccactgcgcccagcctctactattattatataattttctgtttctcccttcagttctgtcagtgtgcttcattatattttcaggcggtcatggtttgttgcatatatgtttataattgtatcttcttggaaaattgaccatttaatcaataaacaatgttctttttttgtcttttgtaacaatg

SEQ ID NO: 224991 - DNA, 408 bp, Homo sapiens
attgtttgccattcttctgttctctctacactgtcactccaaatactatgatcacggcaatcttcagctgaaaacctaccaattgcagtatccatagcctatagggtgaactgccaggagctgacatagcaaataattgtttaagatttggtccttgctccctgcccagcctaacgtcctttcatactctcctacactctagaagctgctctgtgttgctggagtttataagccaaggggcagtgaatggcactatcattccccagatgtatgtgggagtcttccttgatacctctgggttcttacctccactcctaacacacatacaacccccaagttgcccctaaatacctctgtaatttatcttctctccatctgtgctgacactataagccaatccatcttcct

SEQ ID NO: 224992 - DNA, 273 bp, Homo sapiens
tttcctgcactgcccgatggggccaacttcttggctggggcaccctgcttctagtaggaccaagatgcactttgagaaggtgattaaagttaccgcttgccccccaaatgctcaagacaactggcagaccatttttggaaggtttacagccaccagtgtcccaaagatcaacacacaacagcaaaaaggctggcatctccctaggtactgttagtgccagaaattatgtattcggttcctcccctcccctgagctctggcaggccctagcaac

SEQ ID NO: 224993 - DNA, 102 bp, Homo sapiens
gtccatatgaattttagaattgttttttttctaattctatgaagaatgatggggattgcactgaatttgtagattgcttttggcagtatggtcgttttcaca

SEQ ID NO: 224994 - DNA, 414 bp, Homo sapiens
agaaaatattgcatcagatgaaaggcaggtttagaagatagcaaataaagtggtttaatatttataaactttttagagttgaaatcttatgatttcatggcatccacatattttaggtttcagaaaatatacagctgccaggaaaatgaatatcctcttcatgaaggttaccctatttaggcttcttctaaaacatacagtaaaatactccttgggctggtaaaacaactgtatcatcataatctagatagaggctaagaactttttgtgtttcccatctcaactttgtacatgttctttaatgtttgtaagacggaaagaaaagtgataaactcttcatccaagcccatacatcacatccatcttggaaatctaagcttaaagacatgaatataaaaaaattgaaatcaaatt

SEQ ID NO: 224995 - DNA, 358 bp, Homo sapiens
agaagagtagggtgggacattgagagattttcatggaagtgaaatggtcggttactagagactgcatatgtggtagaaagaaatggagggggaatgatagtcaccctctcttgaaaggtagttactgttgcatatcacagattattgaacatagataggtcttatttttggaaactgaagagagaatggttaccatagaggacagttccatcaaaagaaccagagtagtgttcttataggggattcacatttggcccctgagattgcatttgataccattttatttagaatatattatacttcttatgtcttaattagtaaaatataatcatttttagtaaccctgaatgaatcgtgt

SEQ ID NO: 224996 - DNA, 271 bp, Homo sapiens
tgtggttccgtgtacatgcaacagcagggtggggagcgcggcagagacagacagcaggtgggctggcaccaggagctgggggaggagaggataagagcaactgcccaatgggtgtggggatcccttctgggaagtggtggttgcacaacaccatgatgtgccgaatgccaccgaattgttcattttaaatggtgaattttacgttctgtgaatttcacctcaattaaagaaaaaaaatattgctcctttgaagcctccatgctgaagagac

SEQ ID NO: 224997 - DNA, 324 bp, Homo sapiens
gaaccttgagaacgttatgataagtgaaataagacagtcacaaaaagacaaatattgtatgattccacttataggaggttcccagagtagtcaaaaattcatagagaaagtaaaatggtggttgttggaggctggtgggaggggaatggggagctactgtttaatgggtgtagagtttcagctttgcaagacgaagaattcaggagatgcgcttaataccactgaactgtacatttttaaatggttagatggtaagtctcattttatgtgcacgttgccacaatttaaaacttaaaaaggtaacaatttaaaaacaaagcaaca

SEQ ID NO: 224998 - DNA, 571 bp, Homo sapiens
caacctcagaagtctacccttccttccagctaaagtgggcagcacagcatctctactttctagccttttctttcagccctaaccactctagttttctatcttgtctttaaaatgagtttgtcatcatgtgcacggttccttctaagtctacattcataagcctgtgtgtaaaatgccccactcagttcatccttatcacctctatatattcatccttcaaagtttcagcttaagttccaccgcctttgagaagcctctctgaccgctacctcttccagcaatgcttttcttcccttcatgttgaccactggttatctatggattgcacttaaaacaattgctttattttttattctgctctatagtttgcttctttattccttgacttctcaggtggagtgacagggactggcctggtccactttaatgacccacagaagaccctaataagtgtgcttactaaactcaccaggacattcgaacactcaagacactttcctctctagagttaccccaatttagagccattcactggctccggtagcttcctccccacccaggacaggaaacg

SEQ ID NO: 224999 - DNA, 773 bp, Homo sapiens
taaagggccagagagtaaatatgttatgctttgttggccatctggactctttcacaactacttaactctgctgttgtagcaggacagcagccatagacaatctgtaaatgactgggtgcggctgtgttccaatgaaactttatttacaaaacagatggcacacagatttgcttctaaggctctagtttgcagcttctcctctactaaactaagagtggtttactgacttagtttcacatctagagtatatttgtgtatggcaaaactcaaagtctttttacatagttgaatgatagtatattgtggtggaatagtaatctgctcaatagtttgctagtggtctaaagatctgatgttcaatcaaagatgtgtaatttactactaagaggaagcaagttaagcctcactaattctaatgtacttgtgagtggaaagatacaatgaatatcatgttaagaaaatagtacacgtttaagaacaatctgttcccctatggtctcctaggtcatcaagagaatggactctttaatggacaagaattatgtgctcagtaaaatggtaatattggctctgcctgtcaaaggaagcgttcattattcacaggtgtatatttatcagcatcttcctgagttgatgcctgtttcccaaccatttcttggcattaaagacttcctctggtaggtctatctcctcacagggctccatgtggtccaggctggatctttgcatatatggcttttcccaccaggatgtgggggtgttagaggatagat

SEQ ID NO: 225000 - DNA, 217 bp, Homo sapiens
agccaggatggtctcaatctcttgaccttgtgatccgcccgcctcggacttccaaagtgctgggattacaggcgtgagccaccgcgcccagcctccttgggcacattctttaaccattctgggtctcagtttcctcatctctaaagtggggttaattcctgcctttcctggattactgtgttatcatgggatagataatgagatacaagtagaacgc

SEQ ID NO: 225001 - DNA, 419 bp, Homo sapiens
gtatcctggcgaagtttggatgcagagaacttggagctgttgttttctaccagacactaggatccctgagagaggtgtcattctttcgcgctgcacacaccttcctccacgtggtgaagatacatcgctcctgacagatccaaagggagatatcgatccatggaagatggttgctctcggaaaatgctgagaagtttgcaaaaggaatggaagcagagttaaccaatgtatcaggaagcttacactttctccttttaaactgctgtgctggtctattaagacatgcctaatacccaaagctgaggggcaaaaggggagagaatgaagtttatgcgtctgtgtcatagagaaaagctgccaaaatgtgattaagctttttgagttagaacttaacaaaatgcctttgctactggtttcca

SEQ ID NO: 225002 - DNA, 512 bp, Homo sapiens
gtatcctggcgaagtttggatgcagagaacttggagctgttgttttctaccagacactaggatccctgagagaggtgtcattctttcgcgctgcacacaccttcctccacgtggtgaagatacatcgctcctgacagcctcatgcctgactggacactgaaaaagaggtgaagagatgaggcgatagaacaaaagaacagaaagataatgaagctgagactaagtaagtgaaagcataattatgtatgcagccacaaatggagcacaaagcaattactgcttgtgggaatttgagagatgctctttgaagaggtgtgagggaatcagtaatacttgcagtgacttttaaggaggtggagtgtgctgatgaagatgccacaaagaactgatgggaagttattcctctccccaactgctattgtatccttcctgtagtgctgtctctgctttttgcatcttgcccagtatattatgacacaaataaaaattctcttttcatcatcttgcaaaaa

SEQ ID NO: 225003 - DNA, 824 bp, Homo sapiens
atcctatgagtggtttttggacaagttgcttccggaagtatgccccaaaatgtctgtacacaccccagagaaattagcaatctgtcaaatgacgtatctgggcatgaagtaattgagtgtgttatcaaccttacaagtggccttgccaagtcactaagtcaaccccagaaaatctcattagcacctgcctttccaggtcatcaggaacaggtcgtggtgacccacggtgctatccccagtgatatccacagtgactggaatccatgaaaactcgtttacttaaaggatcagtttaaaagatctttttaaattggcccagaaatttataaaagttcattcttgtttgcttagggttcattactcatttatttaatagacatgggcctgattgataaaggaactgggaatgcatgtttaactaaaattacatagtacacacatatgcatatactgttgaccctgagaacacgggtttgaactgtgcaagttcacttatatgtggattttttttccaataaatatgttggaaaaatttttggagatttgcgacaatttgaaaaaagtcactaatggtagccttgaaatatcaaaaaaattaagaaaaagatttgccatgaatgtatacaatacacataggtagtagtctatttgtgtgctaatagactgtttatctgtaaaacttcggttcaacagtaggctattggtagttaagttttggaggagtcaaaagttatacatggcttttatagcagaaaaatattactaataaccgctataaaacatggcataagtaaaagttctaaattgatcattgtttatctacc

SEQ ID NO: 225004 - DNA, 368 bp, Homo sapiens
ggtgtaaacctgtcttttaaaaatggaattattttaaagaatttatcctacaatattcctgacatgccaaagatataaagagtaatataggccgggcgcggtggctcacgtctgtactcccagcactttgggaggccaaggcaggaggatcacaaggtcaagagatcgagactatcctggctaacatggtgaaccccgtctctactaaaaatacaaaaaattagccaggcatggtggcaccagctactcgggaagctgaggcaggagaattgcttgaacgtgggaggcggagcggaaggcagaggttgcagtgagccgagatggcgccactgcactccagcctgggcgacagagctagactccatctc

SEQ ID NO: 225005 - DNA, 293 bp, Homo sapiens
catgagggtggtgtctccccaatgcaacagtgcccttataaaaaagggcatatatggagccaggacagtgagaggatctgaaaaccatactatgtagaaatagttgtcagatttgataaatcttgtgtgttgaatgaatgaatagcctggatgagaggtgactgagaataacaactaattttggtgtctgaaaggctgccatggcaagagaatctttgttccatgttattctgtaatgcaggaatgagacaacctcatagaagctcttgagtgacagatttcagcacgattca

SEQ ID NO: 225006 - DNA, 405 bp, Homo sapiens
tgggattatgggcatgcaccaccattcctggctaattttggtatttttagtaaagatggggtttcaccatgttggtcaggctagtcttgaactcctgatctcaggtgataccaccctccttggcctcccaaagtgctgggattacaggcatgagcccccgcgcctcgcggaaaatgatttaaaatagaaagaatgtggtcaggttgttgcagattcatgtttaaacttttcaaaagggggaggaaggataagaacactgacacattattaatagaaaaatcatatgacttcactgcataagtcttaatgatttgattgtaaaccttttcctctaactcagagacacctgaaaacgtgtatgtaattattctttcttttattcaagaggatgtttataaccttatt

SEQ ID NO: 225007 - DNA, 266 bp, Homo sapiens
tgggattatgggcatgcaccaccattcctggctaattttggtatttttagtaaagatggggtttcaccatgttggtcaggctagtcttgaactcctgatctcaggtgataccaccctccttggcctcccaaagtgctgggattacaggcatgagcccccgcgcctcgcggaaaatgatttaaaatagaaagaatgtggtcaggttgttgcagattcatgtttaaacttttcaaaagggggatagtggtatagctgtgtatagcact

SEQ ID NO: 225008 - DNA, 382 bp, Homo sapiens
cagaaataattagatttacatagtgttttaaatggatactgttgacacttgagctcaccataagagcattaggaggtggctacaaaattatagtagtacagtactacagttaattttatgcagttatgatttaatattgcatcttgatgtttgtttatatttctcttgactataaatggtgccatgtatggtctgtaagtgtttgtgtgtaagtttgataaattctaaccttttctaatagatttgtgtattttatggtagtgaatgataaaatagactagtatctacatatatgcattcatgacatatctttgttgtaatgtttttgatatttctatgctatgtgattcatctgcagatttttcaaactgttgcacatttc

SEQ ID NO: 225009 - DNA, 367 bp, Homo sapiens
atttgcaagcttcagctgagaagaagaaaaatccaagtaggtcaagtgatggaaatttctttcagaaggtctatttcaagcctcaattaatcagcatccctattgtccactgcagctgacctttctaagacaagaatctgattatgtcatttattgtgcttaaaagcatttagaggaaagttcagacttgcaagcatagcttactgcatgggggcttcaggtttggcctcctgtctctcagtctcatctaccagtctgcaccccatgcctacctcactcctttggagctactcaccactccccagaacagcatgctctgcccctccgctctgcacatgctgctcctctcatacattccacctttccc

SEQ ID NO: 225010 - DNA, 349 bp, Homo sapiens
tttagtttttgtgacaatctgttaagaagggggcttattgcataatcaaaaaagaacaataaaaaaataaaaatttctactgtgaaactatttcaatctgtagcagctggtcatgttaaaacactttctgttttgcttaattcgtaactaggcataattaaagttaaatgctaaattttaggtagcagctgataaatggttctaagctttcctgacagaatactcctactactttggtgaatcatggaaaactccttctcctttatttttaattatttcttttccatctgttattgatgtcatcaacacggaagttggaaaggtgacaatgattgttctagactgcctc

SEQ ID NO: 225011 - DNA, 479 bp, Homo sapiens
cagatcacttttttttttgcttcttccatagaaagattaccttctttttttgaatctttatgtatagttttattatattctctatgtgctttgaatgataggaactttaggttaactgataacttatggatacagcctcctaccatggctaaaattcctttcataactagcaaggtagtctcttcaattattataaagttctgtgacttagaaaatacttcctaattaatgagccccaaaatcttcctattgatcctattgacataggatcaaatgtccaccatttgatcccatgtcatatctctgtggaaacacagaaataagtctccctttatgatgtagcttttctggcacatgaaaactactgttatatctgccttctcttctcagattaaacatctttatttctttaacacattgctaattcattcattcagcgaatatttattgagcattttttttgaggcggagtctcgctc

SEQ ID NO: 225012 - DNA, 511 bp, Homo sapiens
actctcctggacacgtaggaaagtgtaaacaatacttaaaatgggaaacacatctcagcacctagaagcgaaattagtgacaaatgcgagcagtttttgctcacagctacatcacttatgaccattttaagcacagaagtttcattttctgacccactaactggctcttccttgctcttctatctccataatctcacctttaaaagaatctaatagatggtttataatgtaaaaagtatgtccatgttaggtgggaggagaatggtaagtatccagttacaggttattcaattttcatttcaatgtgtattctataattgggttctctaaatactaatacttgagacattcctccaaccctgttagctgttatcataaatcactgttacatacacttgggtacaccataatttggccacaataccattctaaagcattgtgttggcttctagagtgccaccgcacccagcaaaactactcttttaaataaatgtacgatgtgaattggatt

SEQ ID NO: 225013 - DNA, 408 bp, Homo sapiens
caagctctcagatgttctaaatggcagtttccttttctataatacaagattctaaagaataattaaaggcagcgagaaaagaatcaactgtgtattttagcttagtcaataccacaaaacttgacagaaaattgacaaatatgagaaaggctggttggggttggggggtattaaataaatttccctggcttgctaatttcttactaaaatggccaaagaattcttgcaactggtaggggcctttctccagtttgagtagttcatcagctgctcagaaccccatctgacatccatcaaaacccagctaggttcatttaacctaatagttctacttcctctgtgtttaagacctatgctcatctgagactaggaccttccttgcctctggcagcaaatctacctgctgga

SEQ ID NO: 225014 - DNA, 568 bp, Homo sapiens
tgttatgtaaatggtaattaggctcacacagaagacaaatttacaggaatagagaaataagaggtcagagaaagccacatagaggtggtgacatttcatgtttggaagatgactaaggacacaaaaatctctgccatgcaaaaaagcccatgtaagggagctcggtagagcgtgtcggacatggggttacattgaggttccaatgtgtaggatatgtaactgtatacattggccactaacacagttgtttatttttaaatgtttatattgtaataattcgctctattctttgatgtggttcaaatccattgatttttatcatgttaaaataagaattacaggtgtgagccactacgcctggccttggggtagtttattatacagacttgtcaaatgtaattcagtcattttatttaaagcccactgtgtgctaggccactgtgcttagaactacgatatgaatattagtaaaatgtactccttgcccttaatgagctgtcagcattagttgaagtcaaaggtggaaagcagatctaagaagatagaaccttaaattgcaacaatgcac

SEQ ID NO: 225015 - DNA, 628 bp, Homo sapiens
tgttatgtaaatggtaattaggctcacacagaagacaaatttacaggaatagagaaataagaggtcagagaaagccacatagaggtggtgacatttcatgtttggaagatgactaaggacacaaaaatctctgccatgcaaaaaagcccatgtaagggagctcggtagagcgtgtcggacatggggttacattgaggttccaatgtgtaggatatgtaactgtatacattggccactaacacagttgtttatttttaaatgtttatattgtaataattcgctctattctttgatgtggttcaaatccattgatttttatcatgttaaaataagaaatatccagatggggctgggtgcggtggctcatgcctgtaatcccagcactttgggaggccaaggtgggcggatcacctgagggtcgggagttcgagaccagcctgaccaatatggagaaaccctgtctctactaaaaatacaaaattagccgggcatggtggtgcatgcctgtaatcccagctactcgggaggctgaggcaggagaagcgcttgaacctgggaggcagaggttgcggtgagcccagatcgtgccattgcactccagcctgggcaatgagtgaactccgtctca

SEQ ID NO: 225016 - DNA, 398 bp, Homo sapiens
aggattcaggttgactgtaatatcctgggtttttggggaaaaccgacctgtttcaaagttgagcttgattatgtggcgctgagcacgagggactccattctggcttggtgtggtctgctggggactggctttgtccaaaccaacggcctcctgtaaaatgtatttaccacccactggcttttcagatccttgagttttgactcctctttccaggctcgggcatcttttatgtcttccagaccactagggctctagagtttctatctttaggcctggagagttttctgagaatttccattcccaaggttgcccctcacttagcctgcaacagtatcccctttctttgtctcattaactgccattgtaagctaatttattcatgtaaatcaaggaatcaa

SEQ ID NO: 225017 - DNA, 211 bp, Homo sapiens
aggccctacataccctcttttggcagccttcagcaagctcccagctccctctcttctggaagagaagtcctaggacaagggtttttaaccttattgatgtcatggatcccttgacaatctgcgaaacctatgggctccttctcagaatatttttaaatacctaaaatacataggatgacaaaggaaaccaatcatcctgaaatacaactat

SEQ ID NO: 225018 - DNA, 511 bp, Homo sapiens
tgtctcaagagccgagctccctgagtgagcaattcctgtcccttttaagggctcacaactctaagggggtctgcgtgagagggtcgtgatcgattgagcaagcaaggggtacgtgactgggggctgcatgcaccagtaattggaacggaacagaacaggatggggattttcacagtgcttttctatacaatgtctgtaatctatagataacataacctattaggtcaggggtcgatctttaactaccaggcccagggtgtggcgctgggctgtctgctggtggatttcatttctgtcttttagtttttacttcttctttctttggaggcagaaattgggcataagacaatatgaggggtggtctcctccgttactctggaggctgaggtgggaggatcactcaagcctgggaggtagaggctgcagtgagctgtgattgcaccactgcactccagcctggcaactaagagagactctgtctcaaacacaaaataaatctgtctcaggagcc

SEQ ID NO: 225019 - DNA, 482 bp, Homo sapiens
caatatttaagaagcagctccaatatttttaaaacgtgaaggaaaacttgcaagcaatctctagggctggagggagagaaatgcaaagccctctcagcctgctccaccattatcttttgcattccaataactgacatgctgctgaatgttatgactatttgtttattgttgactgttcttggcactgctcagtgtagccaaagattccttgcctacaagaaagtcttgctcagacaataaaccacggagaaagaaaattgtccttgagaataagggcatttcagagggaaaggaattccaccagaggcaaagaaacccccgtccaccgcagaattcgagctcaatatctcctatgtctatctgtgaaagccatcatggaactcaagggcaggagggggtggtacacaatggtttgtattgtaatcccctgttttcagacacatttttctgaaagcataaactttgctggctaggactgtata

SEQ ID NO: 225020 - DNA, 335 bp, Homo sapiens
ctatatgtagaatatgtctctaaaattttttaaaaattcaaggcaaggggctggatatggtggctcatgtctgtaatctcagcactttgggagaccgaggtgagagatcacttgaggccaggagttcgagaccagcttgggcaatgtagtaggacccccgtctctataatttttttttttaaattagtcgagcatggtggcatgtgcctatagtcccagctacatgggaggctgaagcagaaggatcacttgagcccaggagttggaggttacagtgagctatgattgtaccactgccctccagcctgggtgacagagtgagatcctgtatctta

SEQ ID NO: 225021 - DNA, 483 bp, Homo sapiens
gtatttttagtacagatggggtttcaccatgttgccaggctggtctcaaactcctaacctcatgatccgccctccttggcctcccaaaatgctgggattacaagcatgagccactgcgcctggtcttaaaatgatttttttactgtcctttagtttctgtccttgaatgaataaacaaagatgttagaacaaaaattccagtctttgcaggaagaaaactttttaaaaaatctttcatcatcagtaagttctacacataagtgcttcacatgtgaagcagtagaattgaggcggaatttttaaatgcagaaaagttgaggaagaaccttaacatttaagatctaatataaaaccaagcctgtggggtgggggggaaccaaaaaaacaacaacaaaaaaacaccctctcggtgctgtccaaggttctgatcgtttcagccatattggcttgtccacataaaatcaattaaaaaccttgttttca

SEQ ID NO: 225022 - DNA, 514 bp, Homo sapiens
tttagtgataacattaaaaaatacaaataaaagctatactgtccccctttcatttgccaatctagaggctaaattaaggagactgctgtcactcattaagagacatggggaaaggataagactataacaaactttataaaatagagtttctcaaatgttcatcatctgtgaattaatgagcactgcacataacatgatcaatttatgtaaaacattcactgcatttttatttatttatttatgtatttttgagacaggttctcactctgtcgccaggccgaagtgaagcagcgtgatcacagttcactgcagcctcgacctcccaggctcaggtaatcctcccacctcagtctccagagtagctggaactacaggtatgcatcactatacctggctaaatttttgtatttttagtagagacagggtttcaccatgttggccaggctggtctcgaactcctgacctcaggtgatccacccacctcagcctcccaaaagtgctgggattacaggca

SEQ ID NO: 225023 - DNA, 616 bp, Homo sapiens
gagcagtgccagcggcaagcgaacaaggtgacggaaatcacgcttaacaactttgacaaggtcctggagcatgatggaaagctgaccgaactggagcagcgttcagaccaactcctggatatgagctcagccttcagcaagacaacaaagaccctggcccagaagaagtgctgggagaacatccattgccagatctacttggggctagtggtgggtggtagcctgctcatcatcctgattgagcagctggccatctttctccctcagagtgacaccagtaatgccccacagacctaggatgcaggcaccacctcagggcctggggactgacagctggtcctgagggagaagccaaatggctgcactggctggttccggtctccagagaaccttggtgtttgctctcccctgacccaccccagtgagtgccaaagggcagccccaacacgtgcacccctgcatttcttgtcatgccacagactggccctcgagggcaccctgccatactggccatgccgggccagccccacctgaagctcagtgaaagctgattaaaaaaaaaaaattatgtatagatcaaaataactacaagagtggaaattgaatattcctaaca

SEQ ID NO: 225024 - DNA, 433 bp, Homo sapiens
agtcccatgccctctctgggcttcagcctcaccgctagggtagagaggttgggtgagagaacgacctccttcccaggtctgagctggatggttcaccagggaccccaggctccctggagcagactctgtgcccgctgctgagtctggaattcctttcctgtatcttgcctttggctgccccattcttcatggcccagcaccctgtcttctggtcagaacctagttctgaatgggtttttccagaagttgttgctttcaggggcccctggcagagaggtgtttctggctggctttgtctctctggcatgacaaaggctctgttcctgctggaggcatttcagggctcagtgggcagctggggcagagcccgtgagaccacagccttcctggtgagcccggtctccgccccctaccccatctctggggaaggcgc

SEQ ID NO: 225025 - DNA, 834 bp, Homo sapiens
tgaagtaatagtgccacctagagaacaaaatcaccagctttactagccaaatggcttatttccatatgaaccatttttccaacgctacagttactaggatttccttgttaccatattcagatcttgtgagtgtgtatgggggtgggggttgcatgtggaattacagatgaaattttaaaacaagcagatccacaatttgatatatgcactaaatccttttaacgttgtaatgtagccaaatgtagaatagcatgccaggaatcaacggctagcatcctttttaacatttattattttcatggatatgtaccaaaccgaaccattgagtataaaggttctgattttatttatttgctacaggcaattcattatactttctgagatacaataacaccaaataatttgagtagagagacctttaagaatgttttcgatttatgatctacctttaactttaatgtactcagaagatgtgagaataaaataaagtcaaatataagcaagattttaaacacacacacaaaaaacaaacaaacaagaaaaaggaagaaaattataaggattgccttaaccttagaatagatgaaggtatacatctgagccagcaccaaaaaaaaaaaaaaaaaaagttatggaaccaggaaccaataattacaaattgacttaaaattcttggatgacaaaaatctatatttagttcatttttgcatgcgcccacaacagcatccaaaacagttctggggaggcactttgataaatgttgctgaatgcactaatagattgattaatggctgcttcagattatcactagtgatgtagacagaaacttcatga

SEQ ID NO: 225026 - DNA, 519 bp, Homo sapiens
tgaagtaatagtgccacctagagaacaaaatcaccagctttactagccaaatggcttatttccatatgaaccatttttccaacgctacagttactaggatttccttgttaccatattcagatcttgtgagtgtgtatgggggtgggggttgcatgtggaattacagatgaaattttaaaacaagcagatccacaatttgatatatgcactaaatccttttaacgttgtaatgtagccaaatgtagaatagcatgccaggaatcaacggctagcatcctttttaacatttattattttcatggatatgtaccaaaccgaaccattgagtataaaggttctgattttatttatttgctacaggcaattcattatactttctgagatacaataacaccaaataatttgagtagagagacctttaagaatgttttcgatttatgatctacctttaactttaatgtactcagaagatgtgagaataaaataaagtcaaatataagcaagattttaaacacacac

SEQ ID NO: 225027 - DNA, 458 bp, Homo sapiens
ctaagcaggaacatggtgtattctgtgccctctaagtctttctttacagttctaattcaggatgctaattgcctgcattccatctgagtcaatctgtatacggtgtactaatgatcagcatttcttcaacttttccctttttttatagtggtgttaaatgttcatataaaaattagaaaatataggccaggcctggtggctcgcgcctggaatcccaattgctggtattacaaatgtgagccaccgcgcccggcccctttaatgatttttaatagtttagtgtttcttcagtgtttcaacaactatttctccatagagcttaaacacagtgctttggacacatttaataaacgctcaatgaatgtttggtgaatcggaatcttataaatatttgttttaacatgaagaccatttaaaataaaaatgtattgtcaacttctaaatggaaataacagtaa

SEQ ID NO: 225028 - DNA, 781 bp, Homo sapiens
ggctaacctttcctccttctggtattgctcaggatgctgaccacagcaccctgcacagagaagaggtttaatatttattttattacttaaattgcataagagggatctacctacttgtgaaaaaggttgctgtgacctgtgttccttcttctgtgacaagaaactaaaatgtacatatattctcttcttgatgttctttcgagttttatctccttcctagatctggttcaccagatttcctcccctccttttttttcatcaatacaaaacttcaagtcgcagtcttgccaataattcttctttgactaatttatgagttaaataaagaaaaaattcctcacacacatatcatgtccaaggtcagctcaacattgctttattccacacctctcaatgggtgtatgatgcgggcccactttaacactgtatcagtggttgattcctacgtgcagatctttctgctctttttgcctgaattatcttcaatgttctttgtgcaaaaatcacagccagtatagtctatttccaaaagagctgtaaagaggcatttcagaaacttccctaaacaatatttctttaaaatgcaccaagctggataaagccgctttgtgacctgcataaaaactccaacggataaatgtgtattaccttcccaaagaactacttctccaaagttattccagctctttccagttgaaatgtcaaacttgacataaaaatgagatgttcttgcatcaattaataaacaaataaatctgtgtttcccattgcccttttcatt

SEQ ID NO: 225029 - DNA, 301 bp, Homo sapiens
aaaaattgtgtaaaaattgataatctttttgcactgtactcaagctgtataggataaaaactagttacatgtgaatttaatttaccaattctagcccatccagaggttaaacccatggcccccagcatgaattaacattttaatcataaactatctgtgtggccagtgccatgggtaaacaagaggaattttttttttttttaaatacaaggtctcactctgttgcccaggctagaggttgcagtgagctgagattgcaccactgcactccagccttggcgacagagtgagaatccatctc

SEQ ID NO: 225030 - DNA, 667 bp, Homo sapiens
ccatttagagcatggggggttttcaccagggatgaaatttggtccagcttttaaaaacaggacaaccataattacaatacactgaaattactctttatgtcttccttttcctgccgatgctcaactctgcctgccgaccctccacaccactatacctggtgcgtgttatatgagcagaagagaagagaatatgaagcactttcctatgggacacaggagctctggggtctagtcctgattctactcagatgagtgggcgacttcaggacaggttgaatagaagctacagggtgcaggtattagaaccaaacctcacttcagtcccagccttgtcactttactagacttttaaccctgaaaaagccacccagagtccaccagcttccggggctttatcgctatgatgaaaatgttaatgttaatctggacatgttgtgctattataagtgttattcataaagcccttagcaaatcattactacatattttgacaaaaaggctaccatctactatttttcctcatctctggtttttggttccatcagcaaaaaatggtgggattagaaatagatgatctcagaggtcttctctggatttaggatgacaagatttcccgggcgcagtggctcacacctgtaatcccaactttgggaggctgaggggagca

SEQ ID NO: 225031 - DNA, 1393 bp, Homo sapiens
ttttaactctgcattactaaacaaatataaaagaaattcatctccatttaaaaatcttttttgttatttatattttgttttatttttgtttcctattctttatgcagttacctgatactatggacagtatatccagtggatcttttagtactgtaatatcaaaatgctacaaatatttatgtttcctgctatgttcaagatattgtagtggcaccaacttcttgggcatcagctaatattgcattttggagtcattagggtgttctgtgaagaatgaatactgaagtgacagttttatctagttttttgaggggcatttatgatggggttgggttgccattgtgtctgacagtgcaattcatgtagttcctggcataattgccttttttttttccttaatggagaggcagggttctgattggtgctgtataaatttaagtaactttgtgctttgtaggaatggtgacaaggaaggcatgatttccccctgacaaggaatgaaaggtgaactgtatcagctcttatctggacatatatgttaatgttttctatgctccctgatacaagaagtttccaagttatataggaaaattaagtccattgatcctgtctttatcctcagaggacagaaatgagacaagtggataaaggctgtaggaagctgaattccagattaatcagtgccaaggaagatttttcattatcggaaaacccaacagtctaaaatcaataaccagttcttctgcaaaggggtgagtttaagcagggctaatgtgactgtcatttctgcctgtcctgcaagcttagactagttgaactttgaggtcactctatgattcttttattagggcttcaaatcagcagggagtgtgtcaagaaaaaatgctcccccccaccatttcaaataaaagtgaatgttttctctttcaaagctactattagaggtagttgtgatagacactaacaatccccggtgttaatactttccactccttttattttattttaatttaatattattttattgagacagagtctcgctctgtcacccaggctggagtgcagtggcgtaatctctgctcactgcaagctcctcctcccaggttcacgccattctcctgcctcagcctcccgagtagctgggactacaggcgcccgccaccacgcctggctaattttttgtattttgagtagagacggggtttcaccgtgttagccaggatggtctcgatctcctgaactcgtgatccactcctttttaaagtgagtctagtctgttgatcttcataaataggagggttttcctccagcttggacattaaaaataatttttaaaaagatctttgtggctaactggaaaatcttctggaattatctaatgcttcattcattt

SEQ ID NO: 225032 - DNA, 370 bp, Homo sapiens
tatgatgtgatggagaatgcccacaagagctcttgttttaaatggtagagtgaacatacactggaattctatcctgcttgacccaagctcttgatagcgaaaggtagaaaagatagatggtaaacagatagatagatgatagataaagaaaatacatagctgttccagaaaacagaaatggataacttcatgaaccaaaagcagagtaatatactttagaaaggaagcaggccagaaaacccacagttgcaaagcaaatagaatttccaactgcctcttgtagccccttcctggaagtagtcacagcccagggtgtttgacttcttcctctgttttttgtttgtttgttgtttgcttttctctggggttt

SEQ ID NO: 225033 - DNA, 435 bp, Homo sapiens
acttgacggctttgggattttgtttaaacttttataataaggatcctaagactgttgcctttaaatagcaaagcagcctacctggaggctaagtctgggcagtgggctggcccctggtgtgagcattagaccagccacagtgcctgattggtatagccttatgtgctttcctcccaaagtgctgggattacaggcatgagccactatgcccaaccactggctatgggattctaagaaagtataatttctgtgagcctcaatttcctgacctataaaatgtgattaatattatcacctattacggagtgtagtaggggttaaatgaaataatgctatttaaagtacttggttcagtgcctatcaagcaccagttaagtgcttgatagacgttagctattattagatgtcttggaatgcttggagtgtaagggaggg

SEQ ID NO: 225034 - DNA, 583 bp, Homo sapiens
gctctgggattacagagctgggtgcgtgccactgtatccagccctctatgactttaattctcatatggtaatctttcagctcctgctccactgctaagtgatactgtgaattctccattcaaattcctaagtcaaagtgctcaaccgaatacattttggctgcttgtttgtggggtgagggtgccgtccatgtagtttgtatatacagaactgccatttggcagtgactgtgagttgggcagcttcatgtagtagaaggctgtaggttagcaagtacacgattgacgtttccaataagattggcctgatcatccacttcttaacgttgcttattctggtttcactctttgattctaagtttaatttatcgtgaaattgtctgagctcaccacttttgcccaaagtctgtaacagttctaatcttttatatcatgtgaaactgaaattgttgcatggtacagagatgttctgtatttattgattagttattatttgagattactataaaatatatgttaatactttgacatgttgaaatgtatgaaagatagacaaggaataaagaaaagttgaaccagaattt

SEQ ID NO: 225035 - DNA, 486 bp, Homo sapiens
ctctcagttaccggcagaatcacactcaaaacacggttcgtttattgcattcagctgacatgcttctcatgtctctctccacattcaaactctcccttgacgttctgtttttcctgaattcacgtgataaaataatggatctgtttgttgggagtttcccatattctggatcttgccagctccatctctgtggtgccattgaacacgtcccctgggttctctagatctgctataatcaggcaattggatctaaggcattggttaggttcagagttggatttttggcaagattgcaccattgatggcttcatgtatatgcacacagaatgcctggtgaggcccagagcattggtgttaggatgcttcagtgttcagggaatataggctgacttgcaaaggtccccatcagcttcccacctaatacttttagcagccattaacaatcatttcccagatcctttacatctttgagtgtgattctggccg

SEQ ID NO: 225036 - DNA, 387 bp, Homo sapiens
caatgatggaagcctgcaggagccaagagtgtaagaaatggaaaccgctttctctattttctctggagctatagattcagacggttatcttaacagtctgcaacaatatactgagagaagcactaacgaaactgcatttctctgtcatgctgtgccagctgtagtatgtgggaaaccttgtctctcccaagtaccttctgtctctggcagctccatgtaaacttcaggaatggtcagtgctgagcttttagttgctgtatccaccatctccacagaccaagacccagtgacttgcatttcttgcctccatgtccatggcttattttctccctactcagttatgttatcctacttcattcaccgatgttgtagacactgttctgaata

SEQ ID NO: 225037 - DNA, 419 bp, Homo sapiens
atgcaatgttgaggtttccccaccaggacaagcttgattgctgataacttcacagtgaaaaccaggttcctattaatggtctttgtgagtatgcaaaacactgcttaaaggattgtgacagagacttctccttgaccaaacttgagttggactcttctgggccctcttcttgacttggcttcagtattagtccccatccttgccaggcctgcacagcccagtgttagcaagaatcctgctaagtcagtttagaaagaatcctcccacccctgatacttgatcccattactatctaatcaaattcttcatcccccaggtgacatctgatcaagagttatctgccttcagcaggaatcctgttagtttagcatgaatcacccaacccttgatgtctcctcttagtaatcttccatctacag

SEQ ID NO: 225038 - DNA, 217 bp, Homo sapiens
gcagggatccaacttcattctttttgcatgtggatatctgcttgttccagaacaatttgttaaaaagaatattctttccctcattgaattattttgacatccatgttgaaaatcagttgactaagggactttatttctttatttgtttatttttgagacaaaatctcactctgtctccaggctggagtgcagtggtgcaatctcggctcactgcaac

SEQ ID NO: 225039 - DNA, 269 bp, Homo sapiens
cagattttatacatgaagatgctgaggctcagagaggttgaaagtctccaaaagctgcggagtaagagtggtagccgactcttactttaagagtaaaagcacaagtttgaatctgtatctccgtggtacacttaaatagaactctaatagcacttcacttctaaatgtcaggaatataatccactgcttgaatctatattgagtaatgtaacccctttgttatgagtagcaccacaaaaaaaccctactattaaacatatacgaaatcc

SEQ ID NO: 225040 - DNA, 351 bp, Homo sapiens
tgagacggagtctggttctgttgcccaggctggagtgcagtggcgcgatctcggctcactgcaagctccgcctcccaggttcacgccattctcctgcctcagcctcctgagtagctgggactacaggtgcccgccaccacacccagctaattttttgtatttttaatagagacagggtttcaccgtgttagccaggatggtctcgatctcctgacctggtgatccgcctgcctcggccttccggagtgctgggattacaggcatgagccaccgcgcccggcctcattccattcttataagagctttattaaattataaaagcaatacatattctatacgatttggaagttg

SEQ ID NO: 225041 - DNA, 590 bp, Homo sapiens
gggtgtctgtcatcttaatgacatactgtgtgagggttctttgtctgcaggcatagggtgcctttgtggctccccggggcatttaagacacaatggagaaggaaccttttccgtgattgtggcgcattgaacccgtggctatttacctgtgatgttcgttttcatattcctggtagcagaatcttctgtttactgcagcagcttacaaaagtgggatgtgaggttagattaattcatggactcaaaatcggcacatagtattgttgagaaaggagctgggaggcaaacctccctttgtgaatgtcaacttggcatgtgttctcattgttcaattcccacctatgagtgagaatatgcggtgtttggttttttgttcttgcgatagtttactgagaatgatgatttccaatttcatccatgtccctacaaaggacatgaactcatcattttttatggctgcatagtattccatggtgtatatgtgccacattttcttaatccagtctattattgttggacatttgggttggttccaagtctttgctattgtgaataatgccgcaataaacacatgtgtgcatgtgtcttta

SEQ ID NO: 225042 - DNA, 416 bp, Homo sapiens
agttttcaaaaagttcaagtactactaagtcagcagagttcgagagctctgtcgggttttcttgattgtgaattggcacagtgattatccactgaggatgaccaatttgcctgctatttaaaaaaaataatctctgagcattcaaaatctactgcaactctctgttctgggaagaatgtgacgttggcatagagggagtatgccagtgaaggcttgtaagtaggttctaaaagtgctaagggcacaagttaatttgactttaaaagcaccttaacattttattactgaaagctttatattctcttgcctgttcaaggaattgtacggaccagcccaagaattgcctattactgccagttaaaatgtgagccctggggtcagtgtaatttctggaaataaagtaagtttgagaaaga

SEQ ID NO: 225043 - DNA, 192 bp, Homo sapiens
cctatcaataattatattaaatgtaaatgaattaaactccccagtcaaaaggcatagagtggttgaatggacttaaaaaacaagatccagtggtacggtgtctgcaagagattcacataagctgggcatggagcatggggaagtcaaggctgcagtgagtcatgatcacaccactgcactccaacctgggtg

SEQ ID NO: 225044 - DNA, 391 bp, Homo sapiens
aggaaagatgaagacaatgaaacatgcatgaattacccattcaaaacataaatagctggaaataaaaacaaaagcaaaatggaagggaagataaacacaaattcatgacaggaattttctcaaaattgcaaaatggggacttctcaggctggaggaataagggaacatcaactttatctgtaacactttacatattttgattagaaaataagacaagaagaacaatcatcacctctgagtgataggtacatttatatataaaaatttataaatttataaatctattaatatgtataaatatttgaatcttatataaatgtgtatatatcttatataacaatagtatatattaacaatataaatacatataataaagcataaatacatacta

SEQ ID NO: 225045 - DNA, 420 bp, Homo sapiens
ccgtgtaggtaagcctacggttatgtaaaccacctgaactgagtcacttccaatccttggctcagcatcagtatctatttcatgatggaattcagtgatctcagtttcctctgtttctaatagtgaatgatttaactccgtctgtatttaacaaaatactttcagtgacaagtatcacaatgtattgtgtaacatgttagggctctggcatcagttttcctggacgaaatcatgactctgccatttattagttgtacagccttgactcagtttgttcatttgtaaaatggagtaataacgataacatattaagggctgtcataaggattaagtcataaaaaagtaaaattcttaggacaatgcttggagcatagcgtgtactcaataaatgctggctggttgctcttattgccaccttta

SEQ ID NO: 225046 - DNA, 450 bp, Homo sapiens
gaaccccatctctactaaaaatacaacaattatctgggtgtgatggcacatgcttgtaatcccagctactcaggaggctgaggtgcgaattgcttgaacctggaaggtggaggttgcagtgagccaagatcacgccattgcactccagcctggtgtggagtgagactctgtctaaaaaaaaaaaaagaagaatttataatgaacacatccattatatgcaaatagccacttcctaaaggggctcatgatatgatttctgctttcacaactgtggaaattggagtgtctatctgtagctacgttcaccgcccccccccaaaaaaattatgtcttttctttttgagaaataatgacattgtaaatatttgcatgactaaataaaggtggcagacggtaggtaacaaaagataggtgattcaaaaatgagaaaataaaagattgtttacatta

SEQ ID NO: 225047 - DNA, 543 bp, Homo sapiens
aacagagaaaccttaatcccaaagatttccttaactgttgtggccctactgcagcatagggctccccacttcattcactgtctctcctgcttcaagatgtttcttccctgtggatgaagaaccaggagatcacacacagaaatgggaaaatatctgggtaaaaacattcaaagaatagcacaaaatggtttgggacttccaaataagactctcaggaaagcaggctacagctctacctcaaaacccgccacctcctataacgaaggactggttttccaatggcctatatacacattttgctgcactctacaaacagaaagcaataggcttgaatttcaccatgatatgtggtacacctaccttattattcacttatctttcaaccttccattactttttgattagtaacaaaattaagactcatttctcaaaaatatcagaaaaccaaccgtttcattcttactcgagttcttccagcatgttcattttgaactgtttacctcccatgaaataaaaagtctcttgactctgagaacttttcaa

SEQ ID NO: 225048 - DNA, 278 bp, Homo sapiens
ggtccctgggaggatataagttccagctctttttcgtataatgatgaaagtaacataaaagattctaggatggcaggtacaaagaacatgttaagaacagcccttgaaaatatatatcatcattgcagacatcttcttggggtcaactcataatgttcccaaataaataactgtccatccatgaggactttgtttgaatatgttattgatactttgttttgtttttggttttttaccctaattcttggagagaggactttatgactaaaaacacacca

SEQ ID NO: 225049 - DNA, 345 bp, Homo sapiens
agaattgcttgaacctgggaggcggaggttacagtgagccaagatcacaccactgcactccagcctgggcaacacagcaatattccatctcaaaaaaaaaaaaaaaaggaaaactcatctagtatcctgtgacatcgaaattattatacagcagtaattgctgcttacagagatgggggtaagactaagatcctagtgttccacaaatcattaagaaaagatcaaattgtgatttgtcttgctttagtgttgtatacagttttgtcaaattctttgacagtagttatccttgtatagtatgtcattgtagttcagtggattgaaattaaatgatctattcatcta

SEQ ID NO: 225050 - DNA, 347 bp, Homo sapiens
gaatgctaggattataggcgtgagccaccacacccggtctcaagtcaatatctttaaaaagcaacttgagagaggcaaatatttcttcatctgtcacctttatttgtaaaagcagaaaactctctaagtcagtagactacaatctaatgattagaatatcgaaacctgtctaatagaggcaaagagggtatccattttcagtgggctccagcatgaagcaaattagtcatcagctccctaaaatatgcaatataaactgtaatcatgtgcctaatgctttttctttttctttttttgagacggagtctcactctgtcacccaggtgcaatcttggctcactgcaacc

SEQ ID NO: 225051 - DNA, 470 bp, Homo sapiens
gacgtgattcaaaaaaaggggaagagagattgccccaaagagggccctagatgctcccagacaatagccctgtagactatgcacctcatggcttcctatcacctcctctgcctccagacagggcccatggtaacacctaaagcagggtctccaccatccccacaccctaatctttgcagccagctctgctccctgagcaacggggaataaatacacagccttcaagggttagaattctcttggattcttgctggcacccagtttccatggcaacctgaaactctccttcgccatcttcaggaatgtcattaggctgcgagggggaggctgcaaacaaagccacgatgtgtcaggctgcagcagatgctgaggagggcagcactggggggcagaagcccttttcgtggcaggtatttttttttttctttaaaataaaatacataaaccattccattacatcaaaccaaaaa

SEQ ID NO: 225052 - DNA, 772 bp, Homo sapiens
caggccagtgcttttcctgcagagtcactctttcctgaactgaagctgtcacaaggagtgttcagtgtgttctcgtgactgaaggcagctgattcaactcccaacatgcctgtgctctcattttaccctgtggcgtccacttgaatatcttgacacagtcagagctctgttacagcactttatgcatggtcacgtggtactcacaacatgcccaagtaactgagagcgaaaagcaccagggtatgcctgacacattggaagaacccactgcccagcttggcagggcgcctcagagtgtcttccaaataccacctgcagcagaatcacctgagatgcacgttaaggtgcagatcataggactccacccctggcctacccaatcagcctcttaggtggcagcacctagaaatctgcattttaacaagttccatggatgacttgtgtccacccaactgtgagaactgctctccactgaggtttcaaagggatacataatacccaaagcaggtatgtagtccttcttggctggatgtgggaacttattttgcatcattcttcttcattccacctgctggcacaattgtgagaaggataaatattctcagatcttagggatgcattgttttaatgaagattgccccattgtgcaggatctggattttatgcaaaaaaattaaaaaaaaaaaaagaagatggccccattcccctacctccatcccacctatttaaacaaacagcaatgggggcagggacttttcatgagaggaatgac

SEQ ID NO: 225053 - DNA, 428 bp, Homo sapiens
gattcaaatggcagaattgatgggccctgtttccttcctagtcctttcatttcctttaaacacaggtttggttttgtttaatggcattgttcaatagcccaagaggcccatgaatgcttctcttagggtgatgaatacatcggctaagaagtcatgaattgcaaaggtcagagttttcctattcaaaataattattaattgaatccagtgacctagggctgacctgcaacaaaattacagagctggtgaaatttgtctttgagattcctatccaggcgttctttttcagatttcttttttcttctttgataaaagaatgcctacgtattaactacctgttttgtgccataccttgtccaaatcctgtactagagttgatcttatttactgaatgctgaaatgtaccttatttgctgtagtcaccaccc

SEQ ID NO: 225054 - DNA, 394 bp, Homo sapiens
atgggagatcatcagggaaaataactaatgggtgctaggctcaatacgtggatgatgaaataatctgtaccacaaacccccatgacaaaagtttacctatgtaacaaacctgcacttgtacccccgaacctaaaataaaagtttaaaaaggaagtgaaaaaaactttaaagtagctcaataagttttatattaatgtcaactttaaataatttttatgcataatacgttattaaaattcatttacctttttaaaaaaagaatgtgaaattttagcagagttttcaacaacaatgttgtagttaacaagagaaaagcatccctgatgctttacaaactggtgtttcaatgaattagtcttttttttctgagagggaatctcgctctgtcgcccag

SEQ ID NO: 225055 - DNA, 232 bp, Homo sapiens
taaaatcacccgtaagtcactcagaagaatctgagaattttttaattacttggctttcttttcttaatctatatttaaaataattctataatatgatatggagacattctactgtcatttaaattcaccgcttttgaggtgttttatactaatctttgtcatcttgacactcttattcaactctgtattcttacttctttcccctcctcacctttgtatttgtggagctgtt

SEQ ID NO: 225056 - DNA, 502 bp, Homo sapiens
tgacccacctttgtgctgtctgttgtccagtctgctctcctgatccctaaagatgtttcttatctaggctgccatttatgtgggtaaaagacaaggtagaaaatactcttctgtatcttgtatcaagggttaatctaatgtcttcatcactttgttttgagatattttggaatgttatcaacaattattatagatggagcatgtatgtcttaggtttggtgttaactgtttaacatgcattatcttattcaatcctcacagcagttataaaatgtaggtgttttagaggtaagcatattataggtcaggagagttcaaagagttaaactaccaaaaggggatctgaacccaatttctgaatctagtgttaatgatcttactatcccaaactcctactcctgaacattcttaatcaatgatcaacagcttatcacttggcagctttgagctcaaccctggtaaccaagtcatactatactgaacataatgaagcaatagaagc

SEQ ID NO: 225057 - DNA, 1545 bp, Homo sapiens
  misc_feature (892)..(892): n is a, c, g, or t
  misc_feature (916)..(916): n is a, c, g, or t
gttttagcatactccctggcagagagaagtcagtcaataaatgtttgctaaataaagaatgatgtgatgtattaatggtattaatattaaagaaggtatatatcatcatacacatatgctcataaaataatgactcaaacttccaattctgtatgcagaagctaatcacctccattgttttttacttaaaaaagggagacatttttagtcttcacaataatcatgtatagattggggatgaaataatttaagtttcctactatatataaagccactgagcagtaacttttttatttcataaaaatcataatttttttaatcattaagtatccctttgtatccaccaccttttagaaagtctatttacctacacacctatcctctgagaattgtatgtcctgtatcattccccttccataaaaattgggcctgaaagccatgttttatgaacctttggcttcatcggccacagttgattagaccagaaagagatacctgcctcagactcaattttctcccagaggttcagaatgaaatcacagaaccatgagcgaatatatgaatttaagagttagaagacatgtccatccacgtgcagtggtgaaagacaacatgcaaagtaagaaaaatgaagtggaaaagcaggaagactcagagaaatcatgctaccccagggtagtaagaaaatagctgcatggggctgggcacggtggcctgtaatcccagcaagttggaaggacgaggcaggaggatcacttgaggccaggagttcgaggccagcctggacaacacggtgaaaccccatctctactaaaaatacaaaaatgagccagccatggtggcatgtgcctgtaatcccagctactcaggaggctgaggcaggagaatcacntgaacccgggaagcggaggatgcngtgagctgagatagcaccactgcactccagcctgggcgacagagtaagacgctgtctcaaaataaagaaagaaaaaaagaaaatagctgcctgggttataaatttccagttcctggtttcccttccccttcatgagtcttggctgtacttctatcatcgggtactgtgaaaactccagcatctttgcctaatgggaactaatttccctttttgggtaagccagcttacattttttaaattgtccattactggaacctatgatctgaagagcgtcctgggtcaactgggcatcactaaggtcttcagcaatggggctgacctctccggggtcacagaggaggcacccctgaagctctccaaggccgtgcataaggctgtgctgaccatcgacgagaaagggactgaagctgctggggccatgtttttagaggccatacccatgtctatcccccccgaggtcaagttcaacaaaccctttgtcttcttaatgattgaacaaaataccaagtctcccctcttcatgggaaaagtggtgaatcccacccaaaaataactgcctctcgctcctcaacccctcccctccatccctggccccctccctggatgacattaaagaagggttgagctgg

SEQ ID NO: 225058 - DNA, 646 bp, Homo sapiens
gctctgtcgagggacaggagttgcaattaggaatatacagggaattctgtggtgctgagaggatttgttgatctgggtgatggttacccaggtgtttattcactttgcaaatgattaagttgtatatatgttttacttaagtgttatatttcatagttttaaaaggtttaaaaaatatagagaatacagcctgggcatggtggctaacacctgtaatcccagcactttggaaggccaagacaggaggatcgagttcaggagttcaagacccgcctgagcaacatggcaaaacctcatctctgcaaaaatttttttaaaaatttagccaggcatggtggcatgtgctttgtatagtcccagccacttgggaggctgaggtgggaggatgacttgagcccgggaggcagaggttgcagtgatcccagatgatgccactgcactccagcctggttgacagagcgagaccctgtctcatacaacaaccaaaaaaaaaaaaaaaaaacaaaaacagaatacaaataaaaacagaactaccttctaaataagattgggcttaattttgcttttcttacaaactaatccagcagcagcagttaataacccattagatacgaagatttgattaaactatttttccacaagaaag

SEQ ID NO: 225059 - DNA, 381 bp, Homo sapiens
acctgggttcagaatatgctgggtcagtaatttgctggctgtgtggttgtagtctctccagatggagtgccaaggctgcaaaggctgcgccgccccatcccgggggtcaggcaggctcacagatggacctttggaagtaatccagatgcagagcaacactgagcccatccatccagagccaagtgtcagtgtctgaatcaatgttcagcaagagctctttaataagcttaatatctagagtcctgtacttcctggctgaaggagctctggcaagttacttaccctccctgattctcattttcctcatctgtgaaatgggaataatcccaaaagctacctcacatgtgtgtgatgattaaatgagttttaccacgtgtaaaa

SEQ ID NO: 225060 - DNA, 795 bp, Homo sapiens
ccccatttgccaccccatctccaggaatgtccctagtttctggagtggggctccagaacagattggggctgtcggtgtgacagctactgcttcccctgacgaatggctgtgaaatgccagagttgatggctacacagccaccctttttaccttcagggaaacctctgcttttctatcttttgtggttctctttccactcagaatttttgcttcttgtcttactagatgcactcacttacttgctttgtcaaaatgaaatggacgatgctcggtcagctagtaaacttagtacagacagcccctgacttacaatgattctacttagaattttttgactttacaatggtgtaaaaccatcgcaatttcaacataaattacagtattcaataaattatatgagacactcaacaccttattataaaacaggctttgcataggctaatataaatgttctgagaatgcttaagataggctaggctgagccatgatgtttggtaggttagatgtataaatgcatcttttacagtgggtttatcagaatgtaaccccatcataagttgagaatctatagtgtaaatcgcaagtattcagagaagggctcttttttaagctcaaatgtgggccgtgaggttcgtgctccagttcaggagaattacatgagttttaatgtcattatgggcaataatttgtttgctggctttcctctgtgtttcctgagtgtgaaccggaaatgggagtgagcacaggagaaattgggaggggaagggtgattagactctgggggaaatcagggca

SEQ ID NO: 225061 - DNA, 1235 bp, Homo sapiens
agggtattgagtctttggttggttttgaatattcccaaggattattttttgacatctcgttcccatacatgaacagtagttacttatgggaagtggcctaattttcttaaataataatctaccataacacacacacacacacacacacacacacagaaaaaaatcattactttattgttaaaaatgtgtcagttgtaaagatacctgtcctttgaatcagcatgttgggaggtgcaggagattcctgcctttgaacacctgcctaaagattccataacaaggggatttggtatgatgagatatatgcaaaaggtttggattctggaaaaatatatacaagtctttttccagggggggaaaatacacacacacacacacacacacacccctaaggagtccagtgtaattttgtttctcaaattcctgtttctcaaatacaaagttttaggagaataagacaatttaggaaaatcaacacattattcatgtcccgtaaaacaccaagattgtttttctattttcctgagttatatcaatagaaaaaacataaaatgataattagtctccctgtcacttcatcagagttttatagattagtaattttcatgtatagcacatttatgatataacttatacccttatttattggagatgattttattagatgatacctgcagactatggggaaacatttaaatatcaagctttgccatagcccttttcctctatgcacttatttattcctaaaggttttctttactattaagttaaggtaatggaactctccataggtgcttaatttggccctgatttttggaaggtaacttcaatgagaagtacttcacgaaatttttcgactttacactcgcccatagtacaactgccatcttcttcccatgagtcacattttgaaccattctcttattcggccacttgcttaccttctggtgacacgccattactggcccgcttgtatatcttcccaacactctctctctgcaacattctcacatgccaccatctcacgcctctcttcactcctcatctccacctctctatctgtctctcaataccgtaacgttcttctaaacgggtctctctcattccttcggtgtcatttcctcaataacatctcgttccgatgtcactcgcctacaggcattctcgacactctccctctctcttaccctcttctcagacttcctgttgctcccgctactcgctcgtctacgccc

SEQ ID NO: 225062 - DNA, 433 bp, Homo sapiens
aagctttttactgagactgggcagggtggctcatgcctgtaatcccagtactttggaagaccaaggtgagattattgcttgagcccagaagtttgagaccagcttgggcaacatagtgagaccttgtcgctacaaaaaattaacaattagccaggcgtggtgatgtatgcctgtagtcccacttactcaggaggctgaggcaggaggatcactggagcctaggaagttgaagctgcagtgagccatgatcaccactgcactccagcctgggtcacagagcaagaccctgtctcaaaaaacacacacacagaaaactttgttattgacactggattctcctagattttgctttattttacatcctcattccagaggccagaaaagactacttattctcagatgtgtaaatatagataagtccttctgtttcttc

SEQ ID NO: 225063 - DNA, 1391 bp, Homo sapiens
aagctttttactgagactgggcagggtggctcatgcctgtaatcccagtactttggaagaccaaggtgagattattgcttgagcccagaagtttgagaccagcttgggcaacatagtgagaccttgtcgctacaaaaaattaacaattagccaggcgtggtgatgtatgcctgtagtcccacttactcaggaggctgaggcaggaggatcactggagcctaggaagttgaagctgcagtgagccatgatcaccactgcactccagcctgggtcacagagcaagaccctgtctcaaaaaacacacacacacagaaaaaaatcattactttattgttaaaaatgtgtcagttgtaaagatacctgtcctttgaatcagcatgttgggaggtgcaggagattcctgcctttgaacacctgcctaaagattccataacaaggggatttggtatgatgagatatatgcaaaaggtttggattctggaaaaatatatacaagtctttttccagggggggaaaatacacacacacacacacacacacacccctaaggagtccagtgtaattttgtttctcaaattcctgtttctcaaatacaaagttttaggagaataagacaatttaggaaaatcaacacattattcatgtcccgtaaaacaccaagattgtttttctattttcctgagttatatcaatagaaaaaacataaaatgataattagtctccctgtcacttcatcagagttttatagattagtaattttcatgtatagcacatttatgatataacttatacccttatttattggagatgattttattagatgatacctgcagactatggggaaacatttaaatatcaagctttgccatagcccttttcctctatgcacttatttattcctaaaggttttctttactattaagttaaggtaatggaactctccataggtgcttaatttggccctgatttttggaaggtaacttcaatgagaagtacttcacgaaatttttcgactttacactcgcccatagtacaactgccatcttcttcccatgagtcacattttgaaccattctcttattcggccacttgcttaccttctggtgacacgccattactggcccgcttgtatatcttcccaacactctctctctgcaacattctcacatgccaccatctcacgcctctcttcactcctcatctccacctctctatctgtctctcaataccgtaacgttcttctaaacgggtctctctcattccttcggtgtcatttcctcaataacatctcgttccgatgtcactcgcctacaggcattctcgacactctccctctctcttaccctcttctcagacttcctgttgctcccgctactcgctcgtctacgccc

SEQ ID NO: 225064 - DNA, 644 bp, Homo sapiens
aaaaaatgatgctggcagggtcaaaaatagactagcagagggagacgggatctcaaaaccaccatgctggagtctgaaccaattgttctgtccactttgctaataatcacagcccattcctagcccaataacaaactgaaagttaacaaagctgcagctctggggattctaatgtgacagggacaggcttttgaaatagccacatcattaaatggaatttgtttcaaatcacctttaaaacctccaaacacaggcctgtacacttgcaattcccaaaactgaatcctaagaaccagcatgcccaggctgccccaggagaatgagggggaaagcatcaagacagagaactgtatgtgttagaacccgggggaccactggggtcattaattatatcgactggtggctgtgatctctaggttggaggttgttacagtgtggggaggatccacatcctgaaaagcctggaaagagcctgggattcagacacaggacatggtgaagccgggagagtctgagcaacagccaagggatacaccaggcccactctggccacctgctaatcctaaagtggcttatcaagcagcgtcagcaaacacacccctgacactggcagcgaatcacacgtgtaggccacatccactgcc

SEQ ID NO: 225065 - DNA, 465 bp, Homo sapiens
atagtagctccattaatttttttcatgaatccctcatgtaattgactctaggaaagatgttagggtggtaaattttcttattctgtaaatatttgaaattcaggaaaaccctcccatcaataaattaaatgaagcattgaagtaaaaaagaatattcttaacaaagcttatattgaaaatcaggtttccacagcatatagatctaagaaacctgggggtacccttgtctgtttctcctattctcctctttcaaaaccatttcctttcccaggctggataattacaataaaaaatagagtatgtgttccaaattattgaatgcttcttccttgtgtatggaaaatctgggatgacaaccagtggtctgccattttgtgtacgagaaaaagaggtatgtatgtgtgggagtcggaaggaatcttggtatactattataactaacctctctcttccctattaccttca

SEQ ID NO: 225066 - DNA, 423 bp, Homo sapiens
ttaaaaaatccaacagttaaatatggttgtggttctccaactccatatatattggtaaaatggtcattgaattagacacaaagacatgctctttttcccccaaaaagtatgcatgtaaaacttggtgaaattgtctagttagttgtgttatactagtgtcagtttcctagctttaataatgcattatagttatgtaaatgggagaagctgggtggtgggtacccaggacttctctctactgtttttttcaattactgacgagtctataattaattcagaatgaaaagtcttttaaaaatccttcaattgggatgaatactccattctccatgatgtgattattatgtattgcatgcctataccaaaacatctcatgtaccccataaatatatacacttactatgtaccctcaaaaaataaaaa

SEQ ID NO: 225067 - DNA, 173 bp, Homo sapiens
cagggaacgcagctgtgaggtggtccataccgatcctaaaacctgccaatcatgttcctggctgcagcatgggggtgggagggtgtggtctcctggactcttccacgttgggatgatccaggatttgggatcaagaaacttcatttgtgagtcatttgagggaaaagacccta

SEQ ID NO: 225068 - DNA, 764 bp, Homo sapiens
gccgcagtcgactctggagatcccccctacaacttcctgtacccatatccatagtacgcaatgatctagaacttgcacactagtctctcaaaatgtgtatttttaaaattatttatatttttagtttcgtctgtctgcattctccgctacaaaataggcagcagaggtaggtttgtgttttggtttagattgttgatccagatgctggctggctccgttacttagtagctgttaggcaagttactacatttctcacaacttcagtttcctgacctgcaaattacgataataatattctccttcacagaatgattacgagagtaaatgagatgatgtgtaccaaatgcacagttcaatatctgatacattgttaagcagttgataaatattaacaataaaaggaagtggttatgttgtggaaatagaaaccagtatttaatgagtacttactagtagtatgcatattaagaatatatatctcggccgggcgtggtggctcacacctgtaatcccagcagtttgggaggccgaggcgtgcggatcacctgaggtcgggagtttgagaccagtctggccaacatggcgaaaccccgtctctactaaaaatacaaaaattagctgggcgtggtggcaagcgcctgtaatcccagctacttgggaggctgaggtgggagaatcgcttgtacctggaaggtggtggttgcagtgagctgagatcgtgccactgcactccatcctgggtgacagagtaaaaatctgcctca

SEQ ID NO: 225069 - DNA, 252 bp, Homo sapiens
cttcctcatctcctagaattgttggagtctttaagaggctatataatgtgctgagaatgatgattaaaaatagtaactaatagccaccgtttactaagcctatgccatgtacttgattacaaatagtaactagctgtgcctgatggcttatgcctgtaatcgcagcactttgcgagatcaaggcgggcagatcacctgcggtcaggagtttgagaccagcctggccaacatggcaaaaccccatctctacta

SEQ ID NO: 225070 - DNA, 693 bp, Homo sapiens
ctgcactcccaacaccaagaaacccctgagacgcgaagctgccagcgtgctgccctcagagcagggcgacgcaaagccagcggaccccggggtggcggggcagcccacagacacgcaggtcgactggaacagttcttggcagcctcttctggagggcgtctgaggtcgtcagcagcggcctacgacttcaaggcaggcttctgacccctggggatcacgcccatcggactagccaaggaggagccttcgcactccgacctgcaccgcatgcgcgcccagttcctgatccccaagagcagcccgtctgagctggaggaccgcggcaagcccttggaggagctggcaggcctggcccgacgaggaccccgcgtcctgacactgtcaaggagctccgggagcgcaaggcgaccgcgcgctccgccaacaccttttcttccggggttcatgggcgctgccggcgctggaaatcccaggggcacggcgaggagcccagctcctaggatcccgacatcgccagcgcggcagaggacgcggatcaggcctccccgcaacccggcgtccctctacagtccggccgagtccacgcagcaagctgtactggaggacggccctgcacggctcgcagaagcccgcggagcccgtcgagaggccccgtgttcgtccacgctgggcggcgcgccttccgggagcgca

SEQ ID NO: 225071 - DNA, 444 bp, Homo sapiens
tgagcagcatctggcaacaaacgtctccaccagcgtcctcactaggccacttggatgcacagacctctggcgatgtcccaagccacccttagtatcgcctcagctacacctcatccttgaaggccaaagaccacaggcctatccaaatttttgaagcagcaagtacagctgtttgcacaaaggagtgcaaagatctactgcctaggcacaggaaggggcaccgagtaggaaagcactatggaaaggagcaccacaatggttcacctctcatggcaaaggacacgggaaagaggtcaagaattgaatcttgaaaaaccaacccaaccactctgagaacctgacgagatcaccttactcatgtaggtctgatcacagcggcaggagggaattccgggacagagatcgcacagtcccaatcagaaagaaggtgtaaccgcagcggga

SEQ ID NO: 225072 - DNA, 253 bp, Homo sapiens
gcagcagcagtgaaaatagaatgaaaggaaatagagatccacaccaggccctctgtttctaaataggaaatagttaccaattattaaccagctttcatattgttaggatattacgggtctcaatggtcggttatctctggtctcaagtcctttcactctatttttagggaaaatgtgtttaaacccctattttaaggaaatgatagtttatagattatttataaattatagttaatttagaaaatagaaaaaa

SEQ ID NO: 225073 - DNA, 416 bp, Homo sapiens
gcaggacacaaatgttggtggtagttaggatttccagattgataagaaaagagcttcgaggaaactggaagtaacctgaagactgtctcctgcatggcagctaagacctcggatgccaggtggcttcatctgactcccttctctacctcagctgtgtgatctcagaagtgttaacttagtctttctgagcctcaggctcctcatctacaagatggggctgccaatgattgctctggtcttgaagagctgttaagtggattcaataagagaaggcataggaaatgtcaagcacgatgctggtatacagtggtgttaaccatatgggggctgctgttatatgggtgttatgtgctgctatatgggtgatcgtatccccacgatccccaccaagcttgtgtctcagcctctgacgctga

SEQ ID NO: 225074 - DNA, 185 bp, Homo sapiens
attgtttaaaactgtgtggcacctccccactctctctcagttctgctcctgccatgtgagagcctgtttcttttgccttccaccatgagtacaagctccctgaggcctccccagaagtagatgctgccatgctgcctgtacagtctgtggaacaatgacccaattaaacctcttttctttatttt

SEQ ID NO: 225075 - DNA, 443 bp, Homo sapiens
tagctgggactacaggggcccaccaccacgcctggctaattttttgtatttttagtagagacggggtttcaccatgttagccaggatggtctcaatctcctgacttcgtgatccacccgcctcggcctcccaaaatgctgggatcacaggcgtgagccaccacacccagtcttgggagaaaattttaacaagagaaaacaatgaggaaaatctttattttatgcaacataaaaaaggacatgagaaaaagaaataagaattataataaatttaaaattcaggatgagaaggtagaaataattctaaacgtagcagtaattatgataaatatgaatgggtgaaattcccaaaatagatttaagctaatcagtctctgttaacaaactattgagtgttgttaacatgatatacaaattaaaacaacacaggcaggttttaaaaga

SEQ ID NO: 225076 - DNA, 465 bp, Homo sapiens
gtgttgaaagaattcactcaaatccaaacggccatgatctctgcttcctttcactgctacctgaagatattgtttttactcactagtttcctctagaaatgaaaatgaattatgaaatgtttatatgttatgcattgataacattgtttggtaatgactagattactgaacagcaagaagaaaacatgactttctttcctaagtccttttgacatttcacattaaaaatacattttcctgagcttatcttccttaactgatgaataagctctagagatctgctgtacaacactgtaattatagtcaataataatgtattacacacttaaaaatttaagagggtagatctcatgttaagtgttcttaccaaaaataaaaataataataaaaaaaaattctgtgactgttttagacctcttattttttctcttattttaaagacagtcatttgtttagaaaaattag

SEQ ID NO: 225077 - DNA, 423 bp, Homo sapiens
aagtgtttcagagtttggtttttcagattttgaaatatttgccttaccctctgggtgtcatgcaggcctttttgacattttgaacagtatctttaccccacagagcaggaaataagccaaagaaccccacaatgagtcatgcacataggtctcagccctgtgtagggtgttgtggggaactgctgctgggcatccggtctgcacacatgccatttcatgaccctctgtgggagtacctgcagagggaagtcgccgtgtgcgtgcaaaggatatatcgggccgggtgtggtggctcacgcctgaaaccccagcactttgggaggccaaggtaggaggactgcttgagttcaggggttcgagaccagcctgggcaacatagtgagactctgtctctactaaaaaaataaaaattaaataaattta

SEQ ID NO: 225078 - DNA, 505 bp, Homo sapiens
ctgtctgccaccaacttgtactaacttccgtctctcacctgggaccgtgcagccagcagctcctcctgcaagggatcatggcttaccaccatccaccccaatgtctcggagctgcctcattctgcaggaggaggcccttgcagggatggtggtggcaactgcacagcaatgaacaaaaccgctttttaaatgtcactagtaattcccaggatcacgcacagctctagaaagcaccgcagtaactattccttctgaacaccttggcacaggagacctggagtgaccctacgtggctttcacccagggggaatcatgtctggggctaaatacaaggacaaaggagagagaagcctgggggatgtcggctggggcagtagcagtcagagagcgaagggcttgaaggtcatatcaaggagtctgaattttgttgtgtacaacacagaggggtatgggagacggttaagtggagaactaagagaacaataagagacagtgcaccagagat

SEQ ID NO: 225079 - DNA, 384 bp, Homo sapiens
ctacaggtgcacaccaacacagctggctaattttttattatttttgtagaggtggggtctccctatgttgcccaggctagcctcaaactcctgggctccagtgatcctcctcccttggtcttccaaactgctgggactacaggtgtgagccactgtgcctggcctattcttccatcttttcaaaaaacctaatatatgcctgaaactaaaactattctattaccacatatattccattattactgataaagtacaatataattaatacatagtccataagatttagagtaaccaactagaaatgccacagggttttctcctgaccacagaagaactctatttacagagcagtttgactagtccagttgaggtacactggagcta

SEQ ID NO: 225080 - DNA, 318 bp, Homo sapiens
tacatgacatggaaggaattcacttattatttcagtttgatccttaagtttgaattccccaagaagcaagtccagaaacaacgatttgactgcaagtcgtttatttgtaaggtgatgctaggaaacactggtggaggtgtgggaaggtaagacagaaaagggaaggccaccaaataaacgttgcatgaccaagcacatcaccactgtgggtatctggagcttcactccactgggaaactctgagatccagtgtggaatacacacctcggagttatcccactcaaaaagtgaggggtgctgaggtatctaaacactcag

SEQ ID NO: 225081 - DNA, 385 bp, Homo sapiens
gttaggagagggtcagcctccatacatgggacttaccatggttcccaaaccagccatgcaaccaagcttatgattgcttaaaaatatactacaacagaccaggcgcggtggctcacgcctgtaatcccagcactttgggaagccgaggtgggcggatcacgaggtcaggagatcaagaccatcctggctaacaaggtgaaaccctgcctctactaaaatacaaaaaattagctgggcgtggtggcacacgcctgtagtcccagctactcgggaggctgaggcaggagaatggcgtgaacctgggaggcgcagcttgcagtgagccgagatcgcaccactgcactccagcctggacgatggagcgagactccgtctcaaaaaaaaa

SEQ ID NO: 225082 - DNA, 247 bp, Homo sapiens
tcaatcctaactggaccttggaaccacctggggagctttaaaacctgccagaaccctggccccacccagcccagactcatgaactgtggctgcctgggcctatgggttcttaaatgctcgctgaccagacacagtggctcacgcctgtaaacccagcactttgggaagtcaaggtgagaggatcgcttgcacccaggatcttgagactagcctgggcaacatagcgagaccctgtctttaattttta

SEQ ID NO: 225083 - DNA, 265 bp, Homo sapiens
caacctggataatccaggataatctccccatctcaagattgttaatttaatcacacttgtgaaatctcttttgccatataacactcaaagcttctagggattaggaccttaatatttttggagaggcattattcggccaccccttatgtgtacaagtgtatgttttttcctgagcaaagttacctcatactttcagaatttaagtgttctcagtccaagtctggtcatgatttctatattccaggtccatgttgatggaaaactg

SEQ ID NO: 225084 - DNA, 466 bp, Homo sapiens
aactgaacccttggatccctgtttcattcagctggcgaacaagttgctgctgttagaaatggaaagggtacagagccctggtgttgagagtggggtggataggtaagtctctgggtcctgggactctgcagattaacagactttgtgccatgcccaatgctgggcatctggctgtttgaatcttgaatttaccattcacaatctgtgtggcctggttgagcttcttaccaccctgagcctcggttttctcatctgtaaaatggagctaataagatctttcttgtatgactttggtgaattaaataagaaaatgaatgtgaagtgcctggtacattttggttgttcaatatgtcctgataaatttcctcattctgtcctgataaatacttgattctgacttagtcatttttgaaaatgttcaggtctgattgggagataaactggattaagggtgccattcagttaa

SEQ ID NO: 225085 - DNA, 434 bp, Homo sapiens
taaacagtagccattatgatttttcttgctctggatttaacttttttaagctcctgaattttggattagtaatgttgttgaccatggaggaaaattgaaaaaagatgttggcttcattttcttgatgactgaaaagtaaactagtggccgggcgcagtggctcactcctgtaatcccagcactttgggagactgaagctggtggatcacttaaggtcaagagatcgagaccagcctggccaacatagtgaaaacttttcgctactaaaaatacaaaaattagccaggcgtggggtgcacacctgtaatcccaactatatgggaggctgaggcaggagaatcacttgaacctgggaggcagaggttgcagtgagccgagattgtgtgactgcacttgggcctgggccacagagcaagactcctgtctcaaaaaaa

SEQ ID NO: 225086 - DNA, 562 bp, Homo sapiens
acttgctttacatttttgcttacagagttaacagagatatggcatgaacatgtattagaaaaatgattcacacacaatagaaaaaataagtaagaccaggattgggtggctttggagaatgtaatttcagcttgaatatgaagatgcttgtagaacagtgttccttcctctgaacatggctacagaagaacaaatcagttagtctgaagatgaaaacaagaagctgatggtagacacattctgaactggctaacacaacactctgaaactggaggatatcaactgataagatatgaagttctcccttagtttcaaatacactgggttcataaattattgacataaacaatagatgtcccatcaagctaccatgaagatagctaggtctgcacaactcctcaagtgtcgacccctccaagcacatcctccacctggaactgtgaactgaatggataaatgtgttggtcagaaaggtctttacatctttgaattgtaacgatcatgactagttgctgagtttgccacctccctgcctccctgccctctaccttccaagaattat

SEQ ID NO: 225087 - DNA, 201 bp, Homo sapiens
tatgtgcaaaaggagaatcatttcaactgttggctccttcaggagacatttctgactcctcctccatcttaggcacctgggccatgggggaatggagatgggccaaatctctatcccagctttccaacactctatgcattggtttacttgtttatgctctaacaagagatttaaatgcatttgctgtcttaggactcgtac

SEQ ID NO: 225088 - DNA, 1004 bp, Homo sapiens
gaccgggcccggcccgaggggtgggggcccgcgggcgactcgaggtgctggaacgcgggcgcttaccgaggcgagaacctagggggtctccccgcgtggaaaccccgcccctccctcggccttggacacagtcggcgctcaataaatgaatcgaagtttcttcctggacggcgacctgggctttcgggagaaagccagaggggcagggttctggaaggttccctggcggctggggtgcggtgcgggctgaaatccgagcaggagctgggcgcggccctcggggaccgactatgggggacggcgccgcgggagtggggcaagtgcgggcctggacccttggggccaccgcgtcagcagtcggcggggccgtgggagggacggtgcccgcccgctgtgaagggcggtggcccttctagggtcaggccaagcgcagaggcctgaaggtcaccgggtgaggagccagcgcgggtgcctcagaagccaagcgccccgtcccgagccctgcgcgaaccagtatgaccttccaggaaccagatgagagctgcgttttcaagaagcagtgccagacaccttgggaaatcgacactctcctgtccttgggtgggggtgggggtcctggaaagaagctccgtcagcgtaaagtgaactcttagctttgactttgcagagggatccgttgtgtcacagtgacccgcattcctgtcattggtgtggtgtgtttcacagccattgcctccctaggtagattgtaaaacggcgttcgtagagcctttgacctcataatattatgttggaaattacacgatagtaaacataatgataaatggggaatgttaaatggtagtatgggaacattttctaatggttgcatccttaaaattttctgtttcaagtttttaaaggctatagccttaaaaaaagctgactgtaggaaaatggtggaaagagtcgtggaataaaggtagctttggggattatgacgtgaataaatgacagaaattaaa

SEQ ID NO: 225089 - DNA, 474 bp, Homo sapiens
tgtacacttaaaaaattgttaagagggtagatctcatgttagatgttcttactacaataaaaaaagaaaaagatactgatgcacaagaataactaatctttcttccctcccttaccaaaaagattccccacaggagaaggcagaaaactaatccattattaaagtgaagagaggagagaggagccaagatggccaaataggaacagctccggtctacagctcccagcgtgagagacgcagaagacaggcgatttctccatttccatctgaggtaccgggttcatctcactagggagtgccagacagtgggcgcaggtcagtgggtgcgtgcaccatccgcgagccgaagcagggcgaggcattgcctcacttgggaagcgcagggggtcagggagttccctttcctagtcaaagaaaggggtgacagacggcacctggaagatcgggtcactcccacccgaatactgcgctttt

SEQ ID NO: 225090 - DNA, 469 bp, Homo sapiens
tgccaccatgctcacaaaggtaggatggggaaagatttccccagagctaggtgaaagatcgtagaacatggtctggacccctgcctgacttgagagaaatgcagcaaattcaggcccaagcttctaaaggaggccaatatttttctccagaggaaagacttattttgaaaactggaaaaggatatgaaatgccaggctcaattctaaagcctgtggttgaaggctgtgaggcctggactcaaaatatctggggaaatcaagacaatctggaaaacgtggcttcggagctttagtgacagctagtgtggtattgtccaggcctgcctgagcttcagaaagtcagatgtggggtgggaagctgcatgcgttctgatggtgaccagggccatctgtgggagctgtgtgggagcacaggcataccctcctcagcctgggcgcactgcaatcaacgtgattcaaaaaaagaaaa

SEQ ID NO: 225091 - DNA, 510 bp, Homo sapiens
taagacccagagtgaggactgagtggcagaaagccatgcccctgctactcagaggcaagttcaataccaggactgagactgcctgacccccagaccagaggtccctcctctgcaccacaacttccactctggttagatgtggccaggagcccacagcctcttagcttcccccaatcctaatactcagcagctcagagtcagacgtctcttctactgtcaaatccagattctcagtgtcatttcttcacttcatttcctcctgccctgtcctcggctaaactaacgaagagtgcatcaccaccaccgtttacctgcagatgggccaaacctcaaaggatcccttgagctcattccttccctctttctcagaagatcacgtcaatctcaccggacttgtttgttctagatcatgatggctgctcccaggacagtgtctgtcctggcaaaggtatctcatattgctgttccccttttttctcctttgaagtggaaaataaacttgcagactat

SEQ ID NO: 225092 - DNA, 386 bp, Homo sapiens
tcttaagactgggaaatctagaaaatcctcagcagtttgctagggcagaagagttgtgagttttaatgtttcagttcatctgtttaaagtggtttgttgactttatccagatattctcagtggttggttgttacctttgatagggagttgaaaggttatattacccagagaactgataccatagtatctggggtgtgacgcactgagcttcagagacagcagcaagacttggttctaatcaccatgattaacccgcatgttttctctgtattaaaaagccctgattgtgtcctgcttgtaccttggccactttggagaacaagagtcacttttacctaaaactgtactgtgggaaggaaaaaagtaaagatattattatcaaaaac

SEQ ID NO: 225093 - DNA, 391 bp, Homo sapiens
tctagtgttaatgaggttgtgcaacaataagaattttaatgctctgctgataggagtataaatagaaaaaaactactttgggggacaatttggtgtttagtaaagttgtagatgtttcaacctcatgcctcagcaattttacatcttggaatctaccgtagtgaaacttcttcagatatccagaaggaaacatacccaagtatactgattagagcattatttattctggcaaaatggaagtaaatcaaatagtaaacgattgtggatggtttaataaactgttgcatatttggtcaataaattgtcacatcttaaaaattatttcataaggagtgcatgataacatgggaaaagccttgatgcagtgttattaaaatagaaaagattaaaa

SEQ ID NO: 225094 - DNA, 521 bp, Homo sapiens
cccgaccatttgttgaagggaatcaccactgtcagacttcaatccaacaggacccactcgagccatccacacttgccccagcctcctccaaaacagcacactttccggctgaagaaaagaagaatggtattcacgcagttcccattttacagatgaaaacaagaggactttttctgtgaagtcaagaaagtggttacaatggtactttcagcctgtccgaattatgtattgcccctcccctttttattaataacattgaagtgtgatgggacaaccactgaagccgtcagttgaaacctgctgggactttttagccattctcttcaacataaagaatgggtgtttttggagggggtgagaggaatggggaaatgttgtcaaagagtacaacgttttagttgagacaggaagaatatattttgttgagatctacagcacagcatggtgactgtagttaacaatgaagtattgtctatttccaaattgctaagacaataaatttcaaatgttctcaccacaaa

SEQ ID NO: 225095 - DNA, 255 bp, Homo sapiens
cccgaccatttgttgaagggaatcaccactgtcagacttcaatccaacaggacccactcgagccatccacacttgccccagcctcctccaaaacagcacactttccggtatggacaattcttttttttttttttcacttatttgtttgttgtggtggtagcaacagcagcaacacagacgacacgtatttccctattcttctcgcccttctcaccctccctacccagctcctgccttagaaacaggcttggccta

SEQ ID NO: 225096 - DNA, 405 bp, Homo sapiens
ccaagatcacgccattgtaatccagcctgggtggaagagctagacttcgtccccccgaaaaataaataaataaataaataaataaatggggttgtatataggcttagaatgggtcagtcagaaattcaggggccactggtcgtggtggctcatgcccataatctcagcctcccgaagttctaggattacaggcattagccattgcacctggccacatttaagaattttattttatgatttgggtgttaggattttaattagctggttggaaacttagtgaatagtttgataatgtttgaagaaggaaaatgagttcttgaaataagctgttttatgccaagtcaaaataataaaaatatgaatactcagacacataccaccccaaaaaataaataggccttgggc

SEQ ID NO: 225097 - DNA, 436 bp, Homo sapiens
aagctgggcactgagcttccttggcactgtccatggggcagaatgtttgaaaatgcctggagaaggctgtaggaacgggtgcagccatgggccctgtgccaagttgggctgagcatgagtgcacctgaacacacccacagtctcctctgcctggctccagggggcagcacaaattctggcctgtttggggtgaagtggggctctaccatggatctcattagaagctctggactgggaggccttggtctccagaactctcttttcttgtcccagtgactgattccagaacgttcttaggatttgctctctgctgtcacatgcctttgcgtgggactgtatagctggctgtgccatcgtggaggatggctcagaacttgactgttatgtttgaataaatacacgaccgcggcttcctgtggagatttagaatgaacga

SEQ ID NO: 225098 - DNA, 479 bp, Homo sapiens
ctattatcctcactgaaaccgagagacccagcagataaagaacttgtctacggctatgcagccagggatgaaaacgaatcaagtgactgaaagagaagaaagtttcagatgacaggagtgacgtgcaaaggtacagacgcttgaggaagcatggaataaaatttttggtcgggcatctgctgtccagaataaagactacattttccagcctcctttgcagctggacgtggtcatgtgaccgcatttaggtggcatgtaaatggaggcactgtgtggcagcttctggaaacttccttttgaggtgccatgtaggtgaacttggattcttctctgcccacttcccactcctcattttgatgcctaggctttaatgcaagcttggaccacaaagttgaggactgccccacagggatggcatagggtaagccagactgtgacctgaatgtgagagaaataaactctcttgtttaagccaaaat

SEQ ID NO: 225099 - DNA, 393 bp, Homo sapiens
cttttgcccttgctggatatgaatatgctgtacattgttttgttgttgttactcctcttaaccattctagaataaacacctatagaagggtgtctccactgtacacatactacttgattagggaacagtataactagaaccctattgtactatacttatgagtgtacagggactcgattaggaacttgtacttataatcagaccacctattcaatttgtgacccaagaaatggtcagccttatatatgctgtgaccctgagtctttacctgggactcggttggagattcatactgagtcaaaggaaagaagttttataggtcaaacccaagcctctcttcctggagctatatgcatatactttgatatttgtcagttaacatctatgaaccca

SEQ ID NO: 225100 - DNA, 430 bp, Homo sapiens
gcctcccaaagtgctgggattacaagcatgaaccaccatgcctggcctgtcaatcccattttgcagacaaggaaattgaggtaaacggatggtaaagagcttgctcaaggccacagtcagtcagaggcagtgccaggattcaaacccaggttggtgtgatgtccagacctaacacttgtagccatttggctatattgcctcctgcagggttaacacagagccatactcagaacctcagagcagctgacacctttcagattgcagtagaggggaatgaggatcaaggtcagagattgatcactatcctctgaatatatccccactcttcccattgatctctgtctcccatgttctcattctctagtccatgtgttgctgtcatctctgcctggaccacagcaggccctgactggtctccatctctgtactc

SEQ ID NO: 225101 - DNA, 1039 bp, Homo sapiens
agtaagtttaataaaataacctaaatattgtcaaatctaggttttacaatgtattgctcaactgttcaaactctctatatacaacacatacacacacacacacacgtcagttactacaagtaaaataaacttagtgaatcattgactattcttggatataacccacttttctgtgctctttaaacttggcataagtaatataggagacagcattggaataacaagagtaccttgcaagtcacattggtaaggtgcgctagactaaacatgtgacaaggctagcgttagaaccgcagtttggtgtctaagtttagaagcaggttagcaactgtcaacatgaaaaatgtatcatattttcttctggaaaatgatttttgaagaaatcatatagctgcatatctatctgttaaaaggttaataaactcagaagtagaaagacttcagatgctgaggaaaacatataatctatagcattcttgagagattttccatttgctttttatttgctagataattacatttggcttaatctgattttatggttatttagatttctcccttgagcaaaataacataattttcagtatctaagattcatcgattttttgttgaaaacaaatagatgtgacatgttaagggagaccaagttgaaccatccctcagacccagtacaaatatacctagtaagtgcccccctttcaatacattctaattgggaagaagaagagactagtggcttaaaaggagaaagcagaagctcctggtagtgttacctgatagcagaacttaccaggcagttggaattcacgagtgttattcttgaatgactatgtctagggggaatattgtttaaccttcgtgcctcagattacccattagacaattgggtataatcatattcacctacctcccagggatatcagagactttactatttcaaaaatattttgagtttttgtaaaatgtcctatataattaaaaatagtattatcatcttcctgcagaggctaaaaaatgttttccttataatgagtataaa

SEQ ID NO: 225102 - DNA, 1359 bp, Homo sapiens
cgactaccatcagagatactatgacacctctatgcacataaactagaaaacctagaagaaatggataaattcttggacacatacaacttcccaagactaaaccaggaagaaggtgaatccctgcataggattagacttcatcctgcatgaaacatggcttcagtgaactgtactttatcttttacattacaggtaatttcttctctagatttttctctttgccctcaactcttgacatttctctaacattctgttggccacacaatcccttttctttgataaatttggcaaattccatggcttcaagtatcaaccacatatagtactataaactcgaaattctctttggttcatcagcctcaaattttccacctgtctcctacatgtctctgtcaaaaacataacacatacacacacacacacacgtcagttactacaagtaaaataaacttagtgaatcattgactattcttggatataacccacttttctgtgctctttaaacttggcataagtaatataggagacagcattggaataacaagagtaccttgcaagtcacattggtaaggtgcgctagactaaacatgtgacaaggctagcgttagaaccgcagtttggtgtctaagtttagaagcaggttagcaactgtcaacatgaaaaatgtatcatattttcttctggaaaatgatttttgaagaaatcatatagctgcatatctatctgttaaaaggttaataaactcagaagtagaaagacttcagatgctgaggaaaacatataatctatagcattcttgagagattttccatttgctttttatttgctagataattacatttggcttaatctgattttatggttatttagatttctcccttgagcaaaataacataattttcagtatctaagattcatcgattttttgttgaaaacaaatagatgtgacatgttaagggagaccaagttgaaccatccctcagacccagtacaaatatacctagtaagtgcccccctttcaatacattctaattgggaagaagaagagactagtggcttaaaaggagaaagcagaagctcctggtagtgttacctgatagcagaacttaccaggcagttggaattcacgagtgttattcttgaatgactatgtctagggggaatattgtttaaccttcgtgcctcagattacccattagacaattgggtataatcatattcacctacctcccagggatatcagagactttactatttcaaaaatattttgagtttttgtaaaatgtcctatataattaaaaatagtattatcatcttcctgcagaggctaaaaaatgttttccttataatgagtataaa

SEQ ID NO: 225103 - DNA, 1049 bp, Homo sapiens
tccctttctcatctgcagggtggggagagtgatcgctaccacagcatgtgtcattctaaggactgcatggtgcttgggacatgtcaatgctcaacacatacacacacacacacacgtcagttactacaagtaaaataaacttagtgaatcattgactattcttggatataacccacttttctgtgctctttaaacttggcataagtaatataggagacagcattggaataacaagagtaccttgcaagtcacattggtaaggtgcgctagactaaacatgtgacaaggctagcgttagaaccgcagtttggtgtctaagtttagaagcaggttagcaactgtcaacatgaaaaatgtatcatattttcttctggaaaatgatttttgaagaaatcatatagctgcatatctatctgttaaaaggttaataaactcagaagtagaaagacttcagatgctgaggaaaacatataatctatagcattcttgagagattttccatttgctttttatttgctagataattacatttggcttaatctgattttatggttatttagatttctcccttgagcaaaataacataattttcagtatctaagattcatcgattttttgttgaaaacaaatagatgtgacatgttaagggagaccaagttgaaccatccctcagacccagtacaaatatacctagtaagtgcccccctttcaatacattctaattgggaagaagaagagactagtggcttaaaaggagaaagcagaagctcctggtagtgttacctgatagcagaacttaccaggcagttggaattcacgagtgttattcttgaatgactatgtctagggggaatattgtttaaccttcgtgcctcagattacccattagacaattgggtataatcatattcacctacctcccagggatatcagagactttactatttcaaaaatattttgagtttttgtaaaatgtcctatataattaaaaatagtattatcatcttcctgcagaggctaaaaaatgttttccttataatgagtataaa

SEQ ID NO: 225104 - DNA, 492 bp, Homo sapiens
aggtcctcccccaggtactggggtgtgaactcggagagctacctgatgtcgcgcccctcggggacagaggcgcggccccaaaccctccacgcttctacaagaaccccctactcaaaatggaggctcaggccggtgtaaagcgggcctccctctgacggcacgcgggccagtcggggctgcggcaggacggctggcggaggtcccggcgcggaacagcaagggccgtgtctgtgcgggtgagtggccccgcaactgcaggctgacgtcaccgcaggccgcgcgggccttcgtggggctccccgggcgcggctggatcaggacaagcctacttcaaggaatgtttggtgtgggtgcccacttcccggccccgccccgccctccccaggagaataatcgggtatttaatctctcccggtcttaattcttggcagcgtggaaggtggtttgcaacgggaaataaaacttgacaggagcattttctctaaaagggat

SEQ ID NO: 225105 - DNA, 362 bp, Homo sapiens
gagaagacgacagaaggggcatactcaaagtgactttcttccataaatttcagcacaatctaatcactacttatccagtatcgtaagtccaaatttaaaactctaccaaaaaaagttttgaaaaatcaaatgccatttctcaaagatagccaacttataaagactttaaaataaatgtgagtggtaaaaatcagaaacatataaatatttagaaaaagggctgagtgcagtggctcatgcctgtaatcccagcactttgggaggctgagaatggcttgagcccaggagtcgaagctgcagtgagctatgattgcaccactgtactccggcctggctgatagaggccctatctcaaaaaaaaa

SEQ ID NO: 225106 - DNA, 571 bp, Homo sapiens
caagcaatcctcctgccttgaactcctaaaatgctgggattacaggtgtgacccactgcacttggcttattagccaatgttaacatattaaatgaatctatatattgctaggcagagcagcttacaaaatgccagaatgcataatcaaactggacaggctcaatgaatgattacactgtgcttaatggctaagctcaacaccttgatatagctttatgatttgcagaaaatttttaataatggtccctataagaatcacctgtagaccaggtacggtgactcacgcctgtaatcccagcactttgggaagccaaggcgggcggatcacctgacatcaggaattcgagaccagtctgaccaacatggtgaaaccccgtctatactttaaaaatacaaaaattcgccaagcatggtgctaatgtctgtggcatgcacctgtagtaccagctactccagaggctgaggcaggagaatcacttaaacccaggaggcggaggttgcaatgagatgagatcgcaccactgcactccagcctgggtgacagagtgagacttcttctcaaaaaaaaatt

SEQ ID NO: 225107 - DNA, 606 bp, Homo sapiens
tgaacactccaccctgaagtggagggcatgtgtgctgagacgaggaatgcacgtgtacacatgcaggtgtccctacagtggtccctgccgggctgccaggacagggtctcagtgcttgttaccctacagggtacccaacagggcttgcctttctcaggtcacctcctgtgctgggagtgcccctgcagctgggtagccatcctggtataggcccagaagaggccagtggtaaggacagcacgcctcagctggcagggcccaccatctttccagcactgagttggcaacagtctcaaataggtcacaggtgaagagtttcaaggacatgtagcttctgccttagaagcacttagttgacactgcttcccttagctctaactttacaaaggttggtgggtaagatgactttcagtgccctcctaagctagtgaggtttgtttttttttttttttttttttgagacggagtcttgctctgttgcccaggctggagtgctgtggtgccatcttggctcactgcaagctccgcctcccgagttcacgccattctcctgcctcagcctcccgagtagctgggactacaggcccccgccaccacgcccggcaa

SEQ ID NO: 225108 - DNA, 725 bp, Homo sapiens
acagagtgagactctgtctcaaaaaaaaaaaaaagaaaagaaagaaaattgcatttagttcctgtagactgtgtgtcaaatgtctaaatctcttctaacaaatggcctaaggaggtgcaaagcgaagcatcctcaccagcatcctgacttggcagtgaggcatgggaccctggagggagtagtggtaagtgtgactctggaattcttcctgggctacttgtcagtgactggctccagattgagaggagagcccagaggacacaagtggctgccccagcctggaggtgaaagtcttaaaataaaatgccagatgcctagaccattctaatcctttcttaggagctgaaatcatcccttctggaagcgctctagttctaaaaggacagatatacagcaagatcttcctggggctaatatggagtttataggcaagtaggcctcagaacctttccctggtagtgatatctgtgggcaggcacagtttccacactttccagaaattccagcggaaggagtgagaaggaggaatctgcccttgagtgaggaccaaagaaagcagaaattcctcttgggaatttttcctccagagaccaaacactacttgggagcttgtttactgggctttaaaagcttgtgacccccagtcactctttcttgaccccaaggctttgcatttctgtggcttccccactggacagaagtggaactgtcatgctgcctgttct

SEQ ID NO: 225109 - DNA, 342 bp, Homo sapiens
ggaaagaatttggtattatttagcagatagaagacacacatagctagcaatttcatttctaggtatacctgagatcagggctcagcaaactttaaagggccagatgtaaatgtggtaggctttgcaggtaacatacagcctttgttgaatatttgtttttaaaaaaactataaaaacataaaaatcattcttagctgggtggctgtaccaaggcaagctataggctgcatatggcctacatgccagtagtttgttgatgtctgcactagttagggtgaaaatgtgaagggaatggtgaatgatgaagatttggctcaggtttcagggtaacagttaagaaaa

SEQ ID NO: 225110 - DNA, 546 bp, Homo sapiens
ctgtagagaaatagaaagagagtatgcagccaaaaaagattttcatttgtttgttttttgaaagcagcaggctgccactgcatatctctggagaaagattgatgatgcagaagagaaagagatagcattgcaggagaaaagtccttcaggcggccagaggagatggcacttcctgctgtcagagtgacttccaaaagggaagtttgaatgatgcaattcccctgctctaaaattccccatggcctcctaaataagcccaacttcgtagcctggtatttaagcccagctccagccaaactttccagctttgtcatccttcaggaagactcctgtgtgtattctatgcggaagccgacacaagctacttactggtcccttcatatcctgagtgagttctcatctgcagggctttgctggtgccctttgccctcagttctacctgttgaaagactactcatgcttcagtgctttccatgatgcccccagtaagaaatggttcctttcttctctatctcctacagcactttgcaattcttaaggcttgtt

SEQ ID NO: 225111 - DNA, 618 bp, Homo sapiens
ctgtagagaaatagaaagagagtatgcagccaaaaaagattttcatttgtttgttttttgaaagcagcaggctgccactgcatatctctggagaaagattgatgatgcagaagagaaagagatagcattgcaggagaaaagtccttcaggcggccagaggagatggcacttcctgctgtcagagtgacttccaaaagggaagtttgaatgatgcaattcccctgctctaaaattccccatggcctcctaaataagcccaacttcgtagcctggtatttaagcccagctccagccaaactttccagctttgtcatccttcaggaagactcctgtgtgtattctatgcggaagccgacacaagctacttactggtcccttcatatcctgagaaaacctggaaacatccagctaataatgtttcacagccgtgaccacagcctctgcctgctggcacaccacaccacttccaccctgctctcatgccaggcaccattcagtccccagcatggcatcagctacccacagtaaagaacaacaggtggtttggaaaaatccagccaaatgcttacaactccctctgggcattgtaatggctatttaatggtgaacaaactgagg

SEQ ID NO: 225112 - DNA, 398 bp, Homo sapiens
ttttagcagccccagcggagacaacactctacctggacattttatttgctgtaatgttcttacgagttgcaagcctggtccactttttacttcacaactaatgtggaagagaacacatctgattccaaggagaggagactcatctcttgtcctcaataacaaatgaggaatctgaagagcttgttttaaacaattttggtggtcttacaacccactggcatagaatctcgagtgtacttctttctattcaccatgccacctacttctactgcagacatgaaattaatcaagatcacgtagaaatccattggcttgggaggacagaacaatcttattcatagaaacatgatgttactttattagtaaacaaattcagtataaatatgcatctgtgactt

SEQ ID NO: 225113 - DNA, 426 bp, Homo sapiens
cctgttgtgtgggacatctcagcctgatgcctggtctggtgggagggtgaggaaggggacagagcaccatttaaaagcccaggcttataaaaaaagaataagatcatgtttcttgcaggaacatggatggatctgaaggccattattcttagcaaactaatgcaggaacagaaaaccaaatactgcacgttctcacttataagtgggagctgagtgatgagaacacatggacacaaagaggggaacaacagacactggggactgtttgaaggtgcagggtggtaggagggagaagaggtgaaaatataactattgggtactacgcttaatacctgggtgacaaaataatttgtacaacaaacctcgtgacacgagtttacctatataacaaacctgcacatgtaccctgcacttaaaataaagctt

SEQ ID NO: 225114 - DNA, 227 bp, Homo sapiens
tggagtaatgggtaaataaatttttttaaaaacctaggtcacataatcccaggccttccagctgataataatttcagcagttttgttatactctgcaacaatagttcttaaactttcaggggtcatgaaccctttcccaagaaaaaagttttcatataatttcagggtatttttaaatccctgaattcattacctccatggattctcagttaagaactccctagttc

SEQ ID NO: 225115 - DNA, 417 bp, Homo sapiens
tgcatttgcatataggcaggcatatatatacacacacacatgcctaacgcacatctatttttaacacaaatgggataatttatactgttcagattgttttgagactttgcattcttcagtcatgaatatatgtcgacttcctcctctttcacactcttccaaatcttccccatccttcaaggtgtcattcattctttgagaaagcccctagtggcgctgtcaatagtgagttttggtaggtacgtttctaatgttctttaaattcctgtaatcctcttcccctctggaccgctcactttgtctaatcttatgttgttctttgtttattcattagttaattaattccgttgagctacactcagttatttggcccccaagaagtttgtcgtcggtggaagacacagacatactaaacat

SEQ ID NO: 225116 - DNA, 737 bp, Homo sapiens
gtttcataacaagttgactccatttactttgataaataggttacatgttaaaatcaggtttattttcatagatagtatcaacatgctacttgctaactgaaacggaccttgacgtaaagcagagtattagactcaggaatgtgcactttcagtagaatatggtttctgagatctgttgctctaaggcccacaagctttaaaatgactacatggtgtccaaaagcaatgaaactaagctatgatgtgcttgcttaacattttgtctagctcagttctggacttttattagattgaattttctctcttttgaagactccagtttttaattgaataaaaatttttttcacttcctattttgcatattccaagtctttgcctgccttgattgttttcagtgacctggcagaataggtgtgtgtgtatagcaagcaagaatacactcatttttgggctggacacagtggcttacgcctgtaatcccagcactttgggaggctgaggcaggtggatcacgaggccaggagttcgagaccagcttgaccaacatggtgaaaccccatctctactaaaaaaaaaaaatacaaaaattagctgggcatggtggagcacgcctgtaatcccagctactcaggaggctgacacaagagaattgcttgaacccaggaggcagaggttgcagtaggccgagatcgcaccactgcactccagcctgggcaacagattgagactccgtctca

SEQ ID NO: 225117 - DNA, 801 bp, Homo sapiens
actttgtgtgtgtttatgtgtgtgtgaggtatgttgaatatggtcacaactgtgctttagggaatattaatccagtgaccatagaagcggggagttgggcaggaataccgtaacagaacattattgtaacagtgaatgaaaataatagtaaaattataagaaggaaagaatggctgcaagaggcgtttttaagaattgactcactgattgtgtatagaggctgtttaaaagactgaatgcgtggaagatgatggtgatgccagtagaaatggagaaataccgagtgaacgcagctttgagggactctgatttcagtttgagatctgttgaaattatagtgcagtagaggcccacagctgctggcatttcaagatgtgggtttggagtgcaaaaagcaagctggtgccaaagatttgagtcttcttggaacagagatatattgaaagtgtgactaaggagatcacaaaggaaaaaatgaaaagagggaataaaagaacttgatgcatgtctactgtttttcagttatgtattgttgcatcaaaaataaaactctaaacttagtggctgaaaacaagctcagcttattgttcctcaggattatgcgggttgactaggcggttctactggtctcacctggagttactaatagagctgcattcaggtggtgaattatttgagcactaggcctggctgggctttaacttgggcattttggttctcatccacatgacctctgtatagctagcttgggcttccttacagcatggcagtcttatggcagtgagccaagagctacagcag

SEQ ID NO: 225118 - DNA, 424 bp, Homo sapiens
tggtatttttagtagagatggggtttcaccatgttggtcaggctagactcaaactcttgatctcaggtgatctgcccaccttagcctcccaaagtgctgggattacaagtgtgaaccactgtgcccagccaagagtgtgttacagttttctatgtagccgtcttgcataactttgttagatttattccttagcgtttttaaaagtggtattgtaagtagtgtttttaaaactgcatttaaaaattgtagctgtaatataaaaataagatagatttttatattattcatgtatattgctgtaatagttgataatttacatttaggttcttttggattgtatactgtacagtcatctgtgaatattatatcatctgcaaatgaatcttttatcttacccttaccaatcttatgtcttctatatatc

SEQ ID NO: 225119 - DNA, 464 bp, Homo sapiens
ttagggggttgccctagaggagctgaggattggccccaaaggcataagggggccagttcaactcatagcccaccctagtcctcccggtcacatgcaggtagccagttacttggtaattaacaaaacaagcttgtggttgttgctgtcttccattttactcctatgtcttttggggccttcttgggaaataaaggcttcctttttcctcatgtacctcataattattgtgccccagaactgcacataattattattatttttccattcaggagttaatgcttcagccaaacaggtctggatggaaacccagtttgcattcagaggaaaatagttgactattctcagactagaccacttgagggcggcattgccttaggagagtgtgttttgaccaactaatacataacctaaggaggaaatatgcagcgtgggtgtcacaggcacatcactgtagttcagggaat

SEQ ID NO: 225120 - DNA, 123 bp, Homo sapiens
ccgcccccaccccgccccagctgtccccgggctgctccgagaggaccccgggcccaccttaccccacctcaccccacctccacccctggagcgcgtcccggagcgggcgggcggccggcgggc

SEQ ID NO: 225121 - DNA, 396 bp, Homo sapiens
cctctctgaacttgagcatcttcatctgtaaaatgggagttggggtctgttctgagcatcccaggagatagaggatgagcaggtggattgtaaactaattaaacaaatcagtcctactgatcccatagaagaaagggagtcaggaaccctttcattccatcaatatttattgagtacacacagtgtgcttggactggtgtagtagatacccaccatcttttcacattaccctgaccgccctctaatctattctccaccctgctgtcagagtaatgtttctaatgatcagaaatatgatcatgtcactactctacttaaaagtatctgttgatggccaggtgcagtggctcacacctgtaatcccaacactttgggaggctgaggcaggtggattgt

SEQ ID NO: 225122 - DNA, 485 bp, Homo sapiens
caccccagcctcctgagtagctgggactcgatgcatgccaccatgcccggctaatttttgtatttttttagagatgaggttttgctatgttgtccaggctggcctcgaactcttaggttcaagcaatccacctgccttgtatctcatgatttttaaaaagatttttatctttccagattataatttggaaaaaaaaagtgaatgaaaaggcaacaaaagtagaaaggtctttgttggttttagcagaattttttgtttgttttgaattagttgctgtgacagttaaggtatgttttcagagttgtaaagcttataagatttctaccttaaaataaagtaagaatatgaggagtggccttattgtgatttaaaaacaaactgcctcatattttattccccacccaaagaaaacaccgtgccttaaaggaaacaatgttttatctaatgtttttattactttaaaaaaaaaagtcgacgcgattatt

SEQ ID NO: 225123 - DNA, 536 bp, Homo sapiens
actatgagagactaatttaggccgtgtggttataaatgagatttcaattcatttcttcttctcttaacccgtctcagaggagatatcacagggtgactttctatgttgcgttttgacacaaggacagtttgtttttgctttggctgatggatggggcagctctagttgatgaatgtggtttatatgctcacaggcagatgaaagtgtccactctgccctgagaccctctcctttctgcttagtggtgttatgaaagccccatgggtatttgatttttcaagaattaatcagtacacagaagttgaaatgtagaccaaaggaaagaatatgttttttcagttaggctttttgtctttttttaattatatggggtttaccctttgtgtttcccaactcaggggtttcactattaaataattgtctttgactcttaaactttttaggtaaaatttatataccaggaaatgcatagatattaaatatacagtttaatgagatttgatgaattattataaccaccaccttaatcaatagag

SEQ ID NO: 225124 - DNA, 333 bp, Homo sapiens
tgttgagggagatgataaatgtcacagtggaagtatggttcagtgtagtgctagcatgtaggaagaaaaatctaggtccacttggaggaggaaagagaggcttcaaggagtgtgagaagacagctgagtcttgaaggaagaatagatgttttccagacagataagggacaagaaatagaaaaaaggcagagagaaaaatatgtgaaaatgcatagaaaagtaagaacacgtgatgggggaactacaattagttcagttttgctggaccataagtgatgggaatagcaaaatatgggttaaacatgcaggacataggttatgaaggatactgaa

SEQ ID NO: 225125 - DNA, 606 bp, Homo sapiens
taaaacacttctacctgttgccatcaaagtttaaaagtctcatgaatcactatatttgccaatcagaatggtgacctaatatcagatttagaatatcccgtgccatttagggagaaaaactcctgcaatttctctattaacatattttatgtcagagaaggggtccctttaaaagagtagatataattatatattgcacgtggttatgttaaaaatataaaacttattctaaaataacaaatatcatttcttaaagttataaaaaattatcaaagacattaactgtcttatgtcttcatttaaaaaaaatctaaatctaggctgggcgtgatggctcacgcctgtaatcccagcactttgggaggctgaggcaggcagatcacctgaagtcaggagtttgagactagcctgaccaacatgaagaaatcccgtttctactaaaaatacaaaattagccgggcatggtggcgcatgcctgtctgtaatccctgctactcaggaggctgaggcaggagaatcgcttgaacctgggaggcagaggttggggtgagccaagatcgtgccattgcactccagcctgggcaacaagaacgagactccatctca

SEQ ID NO: 225126 - DNA, 801 bp, Homo sapiens
ctgtgaaagagtaaaattggcttaaaaattttaagtacaaagacatttcagaagagttttgtccataactttgttagactgaaatgaggaattacatttggcaccaggaaatggatctggattatttagaacaaatgttttccaggtttgaatcttctatgtggaagtacagcctgacttctttgccttttccctggtccgggatcctgacagtcagttcttcagctctgtgcctccagaatttcatgtttatgctgcacaaggcctgtattttataatggtggctcttttggacgatgacttcctcgatggtgaaacttccagtaatctccctcatcatactgaaatgatatcagtatatcatcagaacaccatggagcttgtcatttgagggacacagcttgcttgtgtgcttgggaaagaagaggtttagcatggtttcaggtcagtgatgagtccaatgatctctgcaagttcccttagctctgagaattctgatgtcatatgcacttctgccgccagagttgctgcttactggatgcgtaagaagaaaggaaaataaatgtaaaatgcctggcaccactgaggaagtagggtgaggagttaagttagacagtgactggcttcttcgacagttcgacaatagtcgggcagtgtcatgcgtgacaggccggcggctggattgtgaggaggactcccgctcacacacagacagtcacaatgcacgtcaagcgacgagtatcccggatccaacgagtcacacagaactcttaggggggccagacttaagtactttatcct

SEQ ID NO: 225127 - DNA, 516 bp, Homo sapiens
aaacaatgtctatcaacagttaactggataaacattgtgatacatccatagagtagaatatggctcagtaataagtaagaagtaactattgatacatgcaacaacatggacagttttcaaagtaattatgctaagttaatgaagcaggatgaaaaagagaacatactttatgattccatatatataaaattctggaaagtacaaactaaccctagagatagaaagatcagtggttgcctggaaggtaagtggggagggtcaggctgtaaagggcaggagggacgaataacagaggggtacaaaaaacttttaggggaaatggatatgttcattattttaattggggtaatggttttactggtgtatacagatgccaaaacatgtcaaattatacactttaaataaattatttattgtatatcaactatatttccaaaaagccacaaggacaaggaatgttacttatactctagcagtagcataaaaactgaaatacttgaaaaatacaacaaaatg

SEQ ID NO: 225128 - DNA, 291 bp, Homo sapiens
aggtgcaagtgagatggccatagcactgggttctctgggtgacgctggctagattagtgtagtagaagattcaattgcatgaataaaaccatggggatttaattgaggtcttagctaccaggagggtgggtcaggtcttcgcattggggcagttgtggaaattgttaggaagagaataatgggagttgagattatgagataacagatgcttgttttcaaatattttttctctttttgattattttaattgtggacaaatatttataatataaaatataccacttaaccatt

SEQ ID NO: 225129 - DNA, 578 bp, Homo sapiens
atatgtatatattgtacagtgattaccacagtcgactaacatgttcatcacctcacagttatcttttgtgtgtgtatatgtgtgtgtgtgtgtagtgatgttctggattcatatgaacaactctattgaggtataattgattgtaataaattatacatatttaaagtgggcaatttgttaggttctgatatatttctacacccacaggttcaatataagaccatttgaaatctaccctcttagcaaatttcaagtagcaatacattataaacaatgatagccaccatattgttcattaggtctccagtaattactcatcttataattgaaagtttgcacccttgaccaaattctccccctttccccccaccctcagcccatagtaaccactattctattctttgttacccagagtttgacttgtttttagattcaacatataagtgagattatttagtgtttgtctttctgtgtatttcacttagcatattgtcctcaagagtcacccatgttgcagatggcagaatttccttcttttactaaggctgaataatcttttattatgatattaaaaaccg

SEQ ID NO: 225130 - DNA, 444 bp, Homo sapiens
ttctttatttccaccatttactcttttattagtcattcattcaacacttttgggggataaagtgatgaacaaaccacacataattcctgcactcagaaatttaaaattctagttcaaactttctcttaatttacacgacaaggaaaccaaggtgcagagagccatttgttcaaggtagcaacaggagtcaggagcagggttgggggtgggagccatggcttttgacttcttatctagacagaactcatgatctcttttttccctgtgccattttagcagttgtaacttttgcttggtaattaaaatacaatatttattttgaataggataaacacgtacagttgttccttggtatctggaggggattggtgccaggacccccatcaaataccaaaatcctgaaatgctcacgtttgttatatgaaatgttaccgtatttgcatg

SEQ ID NO: 225131 - DNA, 460 bp, Homo sapiens
cagtatactcatgctctcagagaccggtttgataaatgccgatctttgagaatttagaggcctaatttgtagacaacattcctgataaaatgagttcacctgtagtggccagtcctttggggtttccataagcaatgtgagatacattattttctaataagacatccaacaatttgaatattaatgttcaatggaattaattttgcatgctaaaagccaactgatgattttagtggatctctcttaacaatcattctttctcatgtctaaagatgagtttgggttatttctcctgaaattatggttaactaactttcatgaattttactgaaaatgatgagaaacagaaaaatctgggatttgtagacagtggcgagaaactctctgtctagtatttatacccctcaccaagcagcactcctgggccctcaagctctgctgctgtgcagaaaccgttcca

SEQ ID NO: 225132 - DNA, 559 bp, Homo sapiens
acacttttcatttgggtttgaattccttaaacatgaagactatagtaagttgcccatctctggaagtaaatactgaggggtacatggcagggtaatccgacccgatgacctagccagaagttctggctgtcctactcaactatgccctccgcaagcccagcatggtagcctttcacctggatttgaaggggaaaattgtatttctctctgaatgtaattacattttggcaaaggtcagtctagttaccaccaaaaaatattctacgagttgaagggtgggggtgggagcgtcagagcaaggttaatagtggtattttattgattttgaagtaaatataactctacgtagtcatttgttcaaccaaaacgaaaaatattcatcaaatattccctaataagttggtactcatttccttagccactttaaaaaacacaagtcaaatataattgattatataaattgtatttgcatgaagatttgagtccaaggactataagaaagattcaaattttaaattttctgcatacgatatggttaaataaaatgtttgtatactaa

SEQ ID NO: 225133 - DNA, 400 bp, Homo sapiens
ggagatctgggactctggtgactgctgctctgcatgttgaccagaaagcaagcagaacatgtgaacgctggttcttgggaagagaaaaaatttgtgcttttgctttgggtccaggaggacatataatcagctagggaactctgagacacgggtactcaactcatggcaacagtgacataaagtttgaaaaaacttcaataatgattttattttaaatgaaatattcgttgctgccaccggaccccaaagggcaaagtgttattcgtaaaggttgaggtgaaaaagttacttggcttttagaaaatgactttcacctaattaattaattaatattctgcctcattccaaggaagaatgtgaggcagtttataaaaatgcatgtcggtaagaaatgaagttg

SEQ ID NO: 225134 - DNA, 511 bp, Homo sapiens
agcttaagaaggtactgtttgaaagagaaggagattccacgacaaaagcctcatctctcacctggacaagtgtgcagcctcctacctagcttctgcacctaatctctgcccctacccctaacacacacacaattcaccttgcgaaggacagtccatgataaggactctggaatgcccaagaggaaagggtgaagagacttgtagacccccgatatggtttggctgtgtccccacccaaatctcatcttgaattgtagctcccacaattcccatgtgtcatcggagggaccaggagggaggtaattgaatcatgggggcggctctttcctgtgctgttctcatgatagtgaataagcctcatgagatctgctggttttataagggggagtttccctacaccagttctctcttgtctgctgccatgtaaaacacaccttttgccttctgccatgattgtgaggcctccccagccacgtggaactgtgagtctattaaacctctttttccttat

SEQ ID NO: 225135 - DNA, 450 bp, Homo sapiens
atttctgagaaaatgatgtgggtgattttatataggctttagttttgaattacttatgtgtggtatgaacttcagtatccggaagaaagtcttcaagtcaacagctctgaaggagtttttttttttcccagagaggaggggtgagaaaaatcaagggaaggggccgggtgcggtggctcacttctataatcccagcactttcagaggtataggtgggcagatcacttgaggtcaggagttgaagactagcctggccaacatggcaaaaccccatctcgactaaaaatgcaaaaaaatttagccaggcatggtgatgggcacctgtaatcccacctactcaggaggctgaggcaggaggatcgcttgaaccgggaggtggaggttgcagtgagccctgatcgcgccacttccctccagcctgggtgacagagcgagactctgtctcaagaa

SEQ ID NO: 225136 - DNA, 455 bp, Homo sapiens
gcctgctgagtacctgctaaatacacattatgcacctgctgagcgcctgctaaatacacactgtgcacctgctgagtgcccgcagagcacacactgcgcctactgagtacacagtgtgcacttgctcagcaaccaaatacacactgtgcacctgctgaatacacaccgtgtgcctgctgaacactgtacgcctgctgagcacctgtatacacattgtgcacctgtggaatacacactgtgcgcctgctaagtgcctgctaagtacacactgcacttgctgagcacctgcttagtacacactgtgcatgtgctgagaacctgatgagtacacactgcgcatctgctgagcacctgctgagcacacactgcgcctgctgagcgcccggtgagtatacactgtgcgcctgctgagtacacactgtgcacctgctgagtgcctgctgagtacacactgt

SEQ ID NO: 225137 - DNA, 240 bp, Homo sapiens
ccaccccatccacgacacgctgacccatggagtccccaacatctgctccttgggttggagggcacggcagcaaagcagcaggtttaattaatcacactgaactcagccgctggtgaccccaggcacagccagggagggcactgggggacaggcagccgagagagtcacctgccaccttcttctctccccatcatgggagacaggagctgattaaaatgcacatgatttattgggatttat

SEQ ID NO: 225138 - DNA, 148 bp, Homo sapiens
gtcaaaatgccaggaacactgacacacggaaataatcaccaagagaaggttataatatctatcttacggagtgaaaactgaggctgcaaactatgaagtgaactctttaaaattaaaggcaacttgcatactattttgaaaatgaaaa

SEQ ID NO: 225139 - DNA, 298 bp, Homo sapiens
ttgacaaagctgtttatttccaccaataaatagtatatggtgattggggtttctatttataagagtagtggctattatatggggtatcatgttgatgctcataaatagttcatatctacttaatttgccttcttttatagagaacctaatttaaaggaagtcttctttattaactaaaagaataaatctgcaggaggctgaggcaggagaatcacttgaacccaggaggcggaggttgcagtgagccgagattgcaccactgcactccagtctgggaaacagagcgagactccatctc

SEQ ID NO: 225140 - DNA, 296 bp, Homo sapiens
ccaaagctcagctccctttttgacacgcgttatgaattcagctcatttctggatcatggcccttctggggaataatagaacataaagaaacctctttctaaagtttcaacacttttcataaatcaatagtctagtcaaaagtcaatgttcttttttggcattaacttttatatcagtcagagtttggttagaaaaacaggaacctctctgcgttccaggcatgaaggttataggggcttatgggactgcgggaaacgggggctgacagaatggctggaagatccggggtgtcagag

SEQ ID NO: 225141 - DNA, 228 bp, Homo sapiens
gcacgagctcgtgccgaattcggcacgagaagcaatatattgctttgccaacatatgcaaatgtttggaaagtcttccacatttaaaggaggaaaaaaatacaacataaattgtagtcaagggaaaaacagaccattgtttggttttccatcttccctggggagcagctgctgatttcactctaattttagctgctattgctttgagctaaactttccatttttatta

SEQ ID NO: 225142 - DNA, 441 bp, Homo sapiens
cttctgctattcaacctgtccgctagtctgagtgcagcacagttttctagctgtattgtatctctccgcctgttaatacattgcttttctcccatgacatctttaggcccattgccctcagtattcaaagtggccatcttctcttgtgtttaagaggccgtgtcttggctggacacggtgattcacgcctgtaatcccaacactttgtgaggtctcggtgggctgatcacgaggtcaagagatcaagacctggccaacaatgtgaaacctcgtctctactaaaaatacaaaaattagctgggcgtggtggtgtgcgcctgtagtcccagctactcgggaggttgaggcaggagaatcgcttgaacccaggaggcagaggttgcagtgagctgagattgcagcactgcaccccagcctggtgacagagcaagactctgtcta

SEQ ID NO: 225143 - DNA, 442 bp, Homo sapiens
tgcaatcagtctgactggttgcggaaagaaaccagtcagagatactttcaattttccatttgccacgcataaaaaggggaggggggttgcaaagggagtggcctctggtccttttgttacttagttttggaaagttggggttttcctttagatttagttctaggaagtcagtgtgaatcagccttaggttacctgccaccagaccctattctcctgcctcagaaacaataggctacaccatatagccaaggtgtataataggacacataatccaggtttgtgtaagtacactctgatgtttgtacaatgatgaaatcgcctaacaatacatttctcaaacatatctccgtcattaagtgatgtatttatttaatgataaaaaatttattaaaacgtttatttgatatttaaatactaaaagaatttttcagcaccaccaaag

SEQ ID NO: 225144 - DNA, 411 bp, Homo sapiens
tagaggcggaagaaaaggctgaggtggattcacaggctctatagatagagaacagtgtagtgctgaaaaggttagagaggtcttttgttctgacaataatgaggtagtttgggatcttggatttctgaatatgacttggatgacacataaggagatgggtttcccccatttcacttacccaagtgtaggtagccccaacacagttaggtccttagccttgtgaattgttgaacaagtgttgtaaacccagaatttctgcttctacagaaatgtccttctttgcctaccagtattagcatttggatatgtaattcttgctcgactttttttgttacttaaccagaatgacagtctttcccctatcttccttctttattcttatcttctacctttccctcccaaactctttcc

SEQ ID NO: 225145 - DNA, 418 bp, Homo sapiens
acgtagaactgacatcatacacttatcccatccagcctatacgcagaccctcattgcttcgtccacataggcctcattctgcacccctgttccattgtgtagctggctttgcagccctgacacgtttgcataaatacagtcctataacccctaccctgcatgggccttcacaagatcctgaactcttcacaaaaccaaagttcatccttttcatccaactcaaaataatatgttaagcctctcaggcagagttccctatgttcccaaggggccactggtctctacttcatagtcctgatcaccctgagctgtgcctatctatgtccatctatgtctccccctcagagaataagcactctcagagcacaggacttgcctgcagctcctccttgggagctcagaataaatgactgagtaa

SEQ ID NO: 225146 - DNA, 468 bp, Homo sapiens
agaggaaatatattgaaatcgacagtgatgaagagccgaggggtgaattactttctcttccggacattgaacgccttcataaaaagccaaaatctgacaaagagacaagactagcaactgcaatggctggaaagacagaccgaaaagaatttgtgaggaagaaaaccaaagtgaatccattttccagttcaaaaagtaaagagaagaaaaaacagaagaactttatgatgatgtggtatagccagaatgtctggtcagaaaataagcgttccttctgagaaaaacagttggcgctgcgagatgccttttgaaaagagaaaaagaatgaagtaacttcccagaaagttttccattccaagaagaatgctaagtttgtgtcattactctgaaaattggtaaatcaagcatgtttgtttacattaaaaagtccagaagcactatattatgaaaactgctgaaaatgtggca

SEQ ID NO: 225147 - DNA, 453 bp, Homo sapiens
ctgtgggggtggtggagcgggaggaagggagggggtgacccgcgagtctcactgccgctcatcaataggaccaagcgttgtgcaagcggaggactccgggtcaccaccaggggaacacagagcatcacaactgcaggaggaaaatggggcaaggaaagatgatgcaaagttcccgtgcaccatctcggagccgggaagccacagccccgggaagcacctcccgtggtgcccacacggcagaggggtcctcagcgggggtggcctctagcctctgtcctaccatgtgtgtctcaaacgcacccagatcctccaccccatcgaggcttactcattgggaataggagatctattcccgggaggagctttgtatcggaaaggaggatgtgtggttcctttggtttttaaaatacctactttattaaattacaaaattttagaaacctagtttttcct

SEQ ID NO: 225148 - DNA, 446 bp, Homo sapiens
aacacatattactgtgttagaattgcctgcagtgttttcagtacagtaacatggtgtacaggtttgtagcctaggagcgataggctatatatcatacagcctaggtgtgtagtgggctatatcacttaggtttgatcaatgattatcattcagtcttgtgtgaattaaatgtaaagaactcaacagaataccaggatcataaagtatattcaacaaatggatgcaatcattatttttaactgcataatggcagagacagccacccatagtaagaagtcacttttgctcaggtctcttcatttgagatttgttgtatggagggaaacccacgtagtgtgttacacaaccttagtgagttggctttaaacagctttcttgtcctctccagtagcagtacatccataactacttcccaaccctcagtggccaaggttggaatgctctca

SEQ ID NO: 225149 - DNA, 94 bp, Homo sapiens
gtatatggtatgaaatcaagatcaagcttgaacaagaagcctgtgtcacacttttttctgtgtcaaataaaaagagactttaattagaaagaca

SEQ ID NO: 225150 - DNA, 471 bp, Homo sapiens
ctcttgttgccagggctgcagtgcagtggtgcaatctcggttcactgcgacctccgcctctcggatgagaaaatttaaagaagacgtgtaatttctccaaagtcgcccagctcagaaatgccctggcggagaatgtgaagatgaggccagagggaacattgagaagaaggatctcagagaagaaggaaaattcagcagaacctaggaagtgcaactgctattgcctgggcctttgttcctggaatggactctgagagtgcatgatgcagcttggaggacgtctcctctgggatccctccccactgcccccaccgcttcctggggtgaatgagtcctctgtagccatcaggattcgctgtatcaggagtgttcctctgctgtcacctctgatgactattttcctcaattcagaatccccagcacctgcaaaaggcctggataaagaaggggctgagcaggaacagaggattg

SEQ ID NO: 225151 - DNA, 700 bp, Homo sapiens
gggaagagcatttctaggagaagggtcaccaagtacaaaggtgatgatgaaggaggaatgggcttggcatctctcaaaaaactcagcgtttggggaatgtgagaaaagacttgtattttgggtaaatcatgtaatctttcagcttaatttcttataagatatctatatctgtaatttcttgtgatgattgaatgaaatcacatttgaaaaagcttttcatataggaggtactcaataaatataattggaatttgttgcaaaagagagaggcaggaaggacagtaaagaccagacgtgtgcagctggagcatagtgagcgagggaagagctacgttagaagaggtaggagagggcagccagggccttgaggtcactataaggagttgatattttattctcgaggaagtaggaaatgcctgagggacttcaagaagcaggatggcatgagctgagttaggcttttaaaagtcactctggctgctaaatacagaatgatttgaagggggcagtcagagaagtaggaatatcaggagtggtggtctgattactctgagatgtgtcttgattctattttgttttctttgaaattccttgtctcctagtttttcatagcttttgtagttatctacacttacaatgcccaacaagctgaatacagtctccctaccctttaataaattagtgtagctttttagtgcag

SEQ ID NO: 225152 - DNA, 484 bp, Homo sapiens
aacattgattcttctgtttaaagaaaattgatttcctttggctgaaaaagttttgttctctctctcttggtgttcattattttagatgttccctttggactctgtgcacatccccatcatagaacctactatatttactatgatagtaaattgacctctctgccaacaccactggaccatgtaagttccttgaaggcaggggtccctagtgacaggcagagtaatatctggtacattgtagacactcagtaaatgtttgtgaaatgaatagagtgaccaagcaatctaatgaatatggtcctatcatggtcccaaccagtcattggactgagtatagttttgatggtgtcatctcaaatgaacatatctcaaatcacatccaggttcagcaaattttcttctctgtcttgccaaggtgggggccccactctgagtcccagagatagaaactccagtcatctttgcatttcttttacttccttag

SEQ ID NO: 225153 - DNA, 427 bp, Homo sapiens
agccgctgcaccagcctggtcgatatctttgtattaatgagtcaagtgatgtctttgctgaattagataatagttttcaaatacctgtactataagaatattttctcaattgtcctgttcccaatgtaatgacttcaggcatgacacgctttttaagtttaattgcattattaacattttctccatcactttcttaagtctaaaccccaggagttggctaactttttgtaaagggccagatagtaaatattttcatctttgcaggccatatggccgtagagcttctgttgtactgctatctttgtagcacaaaagcagccagagacagtatgtgagtgaatgagcgtgactgtgttccagtaaaacttgatgtggttaatttatgtcaatgtgaattttacctcaataaacagcatgtaaaatgaaa

SEQ ID NO: 225154 - DNA, 179 bp, Homo sapiens
caaatgtttctgtacttgctccgattgccccattgcttgtacttctgtagtacttgtgagccataggatcttttctcaaaagccttgataaagaagttttataaacttataagatgatttaatgtagtaccataaaattaactgtagcagtaggctttttcaggaagacatgtgaaata

SEQ ID NO: 225155 - DNA, 622 bp, Homo sapiens
tgttactagaatgtttaagggaagattagactaagtcacctgcctttttttgctcctgggtgcaggtcccttaccacctccccatcccacacctcacctactgccatggggagtgttaaccatcttatttccttttctgtaaaatgtgggaacattttcaactatttaatcaaatctttaagaattttagtgattataggattgtttaggttttctgttgctttttaagtttgcttagtttatttttatgtagtactttattttacaaaaattttcaaagttactggcaaaagttgttcacaatattgttttcttaaaaacatatgatgcatttaatttctaataacatttgtctttgccttatttttaaatcaattttaccctaatttcattttcttcaaatgtaggcctcgttgattctttttacttttgtctctttatgacttcctgccttttatttatttatttacttatttatttatttagagacagagtctcacactgtcacccgggctggagagcagtggcaccagcttggctcactgcaacctccacctcccaggttcaagtgattctcctgcctcagcctcccaagtagctgggattacaggtgccccccacc

SEQ ID NO: 225156 - DNA, 581 bp, Homo sapiens
tgttactagaatgtttaagggaagattagactaagtcacctgcctttttttgctcctgggtgcaggtcccttaccacctccccatcccacacctcacctactgccatggggagtgttaaccatcttatttccttttctgtaaaatgtgggaacattttcaactatttaatcaaatctttaagaattttagtgattataggattgtttaggttttctgttgctttttaagtttgcttagtttatttttatgtagtactttattttacaaaaattttcaaagttactggcaaaagttgttcacaatattgttttcttaaaaacatatgatgcatttaatttctaataacatttgtctttgccttatttttaaatcaattttaccctaatttcattttcttcaaatgtaggcctcgttgattctttttacttttgtctctttatgacttcctgccttttatttatttatttacttatttatttatttagagacagagtctcacactgtcacccgggtggaggttgcagtgagctgatatcacgccattacactccagcctgggagacagagcgactctgcctca

SEQ ID NO: 225157 - DNA, 473 bp, Homo sapiens
gatgcaaaataatgaacagtaattaagttttccatcgtttctccccactatcactgggattttcctgagaccttaacagtaaatgtgaaaataatgtgtggccctacagccagacacccttatcactgccctgttcaccttccctggaagaggcaagtaggcatggctgttagaaacaaagggttcagatttgggctttccaggttcagatcccaatatctcagtttactgggtgtatgacctttgcaagctcattaacaattccaagcactggtttttgcagtggtacaatggggatagtaattatactaacctcctaggatttgtgggagcattaaattaagataatgtagtaatgtccctcacacgatgaccagtgcccagaaaatattattagcatcattatcagtccagtaaattgttttaaaaaccaaaaagacactagtggaaattgatttgtggtgtttcctggc

SEQ ID NO: 225158 - DNA, 405 bp, Homo sapiens
gagtaagaaaaactcgcagcaaaactaggaattaaaggataagaagaagaactgtatcctataaaatgactgagaaggatcagccagagaggtgagaagaaacgcaggtcagtgaggtgtccggaaagctaagtgaagaaaatgctgccaggagggagtggtcaatatgcaaaggtccatgatgtccactgaactgagcagcaaagggtcattggttatctctgtaagagcagtctgggcagaatggcagatgttgagtgagcaagttaggacagcaaatgtggacagtattgtctagaaatttgcctgtgaagaggaggaaagataagggaagtatttgaagaagaacattggtcaagaaaggtaggggtgtgtgtgtgtgtgtgtgtgtgtgtgtgtgtgtgt

SEQ ID NO: 225159 - DNA, 382 bp, Homo sapiens
agggcaaaaagaccaagcgtgactccctgtctccccattgcatcctgattgtctccctgtccagggacagaataaatatcctcaagacattgactcttttcacagtgaagaagctgaggttggagctttggcctcatctcctataggttcatgctgcatctctgatctctacaggcagggagaaggtctttcctgctccccttcctcctggcacatgacaaaatcctagtgccttaaggtctgcaggaggagagagtttatatagtgttttccagttcaagttccttatcatataatcatactccccccacctgcatctcctttgttacactgtgcacatattaaacatcacaataaagtacgtgcatcctgctgcctgcgt

SEQ ID NO: 225160 - DNA, 471 bp, Homo sapiens
actacttcctggctgtgtgactgaaggtaagtccaatcccctcctccattttctcatctgaacactaggggcgattgtagtactgctctcatctctggttatgatgatatactggcaatgcacataaaacatttggaatggagcctagtgctacagatgaatgtttgtgtcctccccaaattcacatgttccaatcctaacccccaacttgatggtattaggaggttggatgtttgggaggtgattagatcatgagagtagaaccctcatgaatgtgattagtaaccttataaaagagtcaacagagctccctcacccctgtgccatgtgagaacacagtgagaagatggccctctgtcaaccaggaagcagaccctcagcacacaccaaatctgctgcaaccttgatcttggatcttccagcctctagaactgtgaggaataaatttctattgtatagaagccacccagg

SEQ ID NO: 225161 - DNA, 413 bp, Homo sapiens
cccattgctataaaaaataaaagattagctgggcatggtgacatgtgcttgtagtcctagttacttgggaggctgaggagggaagatcgcttgagcccaaggattcaagattatagtgggctgcgatcacgccactgcactccagcctagatggcagagcaagaccctgtctctaaaaaagaaaacaaaacaaaaacaaataaaaaacattaaattcagcacatggagaaacagggctagagttacagaatagaaattcatccatggaggggcagggacaggaatagatgaaaatgccaggaatcctggggaggcagaagaggccaaggacagagctttgaggtggtcacgtgttcctgcccagcctctggtcctgctctcctctcgttgatgtctagaaaaacattcttacc

SEQ ID NO: 225162 - DNA, 188 bp, Homo sapiens
cgtgatagctgttctagagtatcccttgtcatgcagtgactgcagagtcacttccccaggcctcccatagaagttgggtgccatcaacatagggaaataagaaaagcttaaatgtaaggaagggtcttgtctttttctgtgcagaaaaaacaagaatggcaacacagatgcagaaaaatagagccaga

SEQ ID NO: 225163 - DNA, 378 bp, Homo sapiens
actaatttcctgaaaagtatgttccgatagatgaacagatcattaatgcagaatgagaatcactcctaaaataggtaatggtaaaaattaaattgacaattacctctctctatgcagaaggaaatatcacctatatgacatcatcatcatctattgatacttgctggcagtgctaatattgtttttaatgccaatttgtaagaagttttatctctctgtcactgacatcctacagagtcacttccccaggcctcccatagaagttgggtgccatcaacatagggaaataagaaaagcttaaatgtaaggaagggtcttgtctttttctgtgcagaaaaaacaagaatggcaacacagatgcagaaaaatagagccaga

SEQ ID NO: 225164 - DNA, 469 bp, Homo sapiens
atcattgtctgacccccatgtccagatgaggacacagaagccccatgagtggaagggatttgcctcacgccacagtgaacaaggggaagaggcaggatcagaactcagggagcctggccgcaagtcctgcactgctcacaacaggctccagctgccctcgtatgaagacaatagctgtaaggatgaaggcacacaaaatgccaagtgagagctctggctacagtccctctcaccatctcccaaggcaaaccctgcggctgtggccttggctttgccagaaactgattccatgctgctcccccaggggacctcgaaactgcaggtgtgccaggacattcctggctgacaagtgcggggtcgcaggagggctggacggcgtgcctctgtgtccatcagctccttgcgtgggtgcgctcatgtacggggtttaatgaatgaaatgattaaaacctggaaaaatgtgtattga

SEQ ID NO: 225165 - DNA, 458 bp, Homo sapiens
aaaaaaagtgcctgtttagatgcaacttttttttcaaatattttccttctgtgattggttcaatccatggatatggaacccacggatacagagggctgactaatttaaaattttcgacctaattaataatataattattaagctttctgacctaagagataaacgaatacacacgtgcatgtatatgaggataaaatggtgttcatgggcatacaaaaatttatgaaaacattttatctgataaaatatttgagataaacaatgccagtgataaaatctttagtccagaaagggttctgcaaaaagggtggtgtagattctctctaaatcagtactcgatgaagtaagtggaactaatggaaaaaggaaaactgctgacagtatttggtgtacttggatatatctgctaccttgtttgcatgcataaaccaactcattctgtgtgtgtgagacattga

SEQ ID NO: 225166 - DNA, 469 bp, Homo sapiens
ctgcatgactcttcaactgctacctgtcaatagaccagttagtagtagagaaatccagatccttagagaagagggctgtgccgactcctaaccacagtgacccatcctgtgggaaatgcaaatgtatgtgcctttgctgttcacgcacggaggtgcttgattgatttgaaacattcctcagtgatttttaatgaacttatatcttaccagtagttccaaattttctttttgacattgtacttaattcaggactcaaattcaggactcatggaaatcagttaaccaccatatatattttttttatttactctaagatactgagtacctacattgcactagacatctttaaatcaatcatcttctaaatgtctcaatctgttttccttccttttcaatttcatagtcactgtcctatgacaggcctttataatttctcacctagataattattgtcctctcttaagtcttt

SEQ ID NO: 225167 - DNA, 382 bp, Homo sapiens
ttaggtaaatgtcagccgttctcctcatcatttggtggagggtagcagagggtcccctactcttgtcccctgccagagctactgtggccagtgccggcctgtgggatgggtcatgagcagatagggctgggggggtgtggagccacacacagtatggacatcctgggccagtcactcgcccaagcctgcctgctcttctgtaagatggagagaacaccaaggctctgaaccatttattgccacagtccaaggtgaccaacggtcccagtagctccggactgaggggtttcttgggatgtgggactttcagggctaaagccagacagaatttggcaagtagaatggcgggtcacccgacacggatcctgttgactacacaaaa

SEQ ID NO: 225168 - DNA, 400 bp, Homo sapiens
gagtacggctacacacatcttccttttaaatgatcacttttgtttggagatttggacttgacatttcaggccattagctcaccatccatggcctgttatggaaacccactcctgcatccatctgtattaagattgcatttaataaaaaagccatgaattagtgaaaaaccagaaactgagttgagcccatctttccatatgtttgcctgctggcggtctggagctgagttctttcctctcagacagggctctgctgttgggatggccatgtgcttgagcggagggtggcaggagggaggtgggaccaggccaggctctcccaggccgggaatgagggagctagcacatcaccagcgggtctaagggtttgtggaagctgcagtggggacccagcattggg

SEQ ID NO: 225169 - DNA, 128 bp, Homo sapiens
gatgggtcagccacgaacagccagattgtttaaattcttcctctttttcctcctgctgcactttgacctggtcgttcaagattcttgttcccaggtctggagggtgccatgtcaaatgcgcatctgaa

SEQ ID NO: 225170 - DNA, 1037 bp, Homo sapiens
aaattttcactctatataaattaaccatgatctaatttgctaataaaatgcatttatttattaaaatgacattcctgaattagctttataggacaatatacacacatgtgtacatatttgagtatatatacatgcatacatacactaaacatatatgttagagtattggagagacagcaaggcagtatggttatggctacgtgttattcatccacacatttacaaccaaaagtataggtttatttattgaccaattagatatggccaaatgaataaccaaaatagtacattttcatcatgctgaaatctttccttttaaaaatgcacttgactaagtttctcttttagattaacctacaattttatttctacattcagcttcatttttggaaacatttgaatagactaaaataaattatttgcagttgtactgtgagttcaaagtaatctcaagtacgttaagacctcccattgttgtggatcatattttccaaaaatggctacaacaatattcctagtccgacagacccttgtaactttccagccaagagtagtttatctctcctctagacacagtttttaaaacttgatggacctttgtgaatgcttgaacaaatagaatgcagcagaagcgatattatgggatttcggagaacatgtcataaaaaaatatatagtctctctctcactttctttttctccatctctcattctggaaccctgagcaactatgtaagaagtctggctgccatgatgccaccatgctggagggaccacatggacataccatgaagatatatagagaaatgctttagaaacctcagctgttccgtctttcagctatttgagtcttcctaggccaagggccagatatataaacaaagaagacttgatggtgactccagccttagtcaacgtctaactgcaaccacgtgagagactttcaaccagaactatgcagtggagctgcttctgaactcctgacccatagaaaccatgaatgataataaatgattgctgttttccttaaatgtttg

SEQ ID NO: 225171 - DNA, 177 bp, Homo sapiens
gctgtgacgcatagccctggcaggtgctttctcattgtcatctgtctgaccgactgggcagagcccagctccagtggctacattcaatgttcatgcaccctctggagctgtgccaggctgtgaacctatttacaccctataatgttctaactttactggagaaaggactgaaacagt

SEQ ID NO: 225172 - DNA, 667 bp, Homo sapiens
atataattacattttattatatcacattcttgtttatattgtaacattttaataattttgaatacattatttacaatgtttatgggcaaaccttatagcagtctagtgatttaacaagtattaacctccccaaattatagctgaggaaatgacgcatattagctccattttagtagcatgcatttgaagtcgattctcagtagacagagccatcttcacatgattcttagaaatgaacacatagttactttcccgagaatatgattgagaaagttagtcttcaagaatctgaaattcaaactgaaggcttctgtctcccagtcctttgctgaaataaagaaaacaacaaaacataatgggaaaagtaaggaagattcaattaaaggtaggcatataagctcctgacagaaaaagaatacatgctaaatagaaatgatggtatctcttaagataatttatgaatttaacaagactccaattagggtgccagaatattactttacatatcctcacaaagtggttctaaaatctgaacaaaataagtaaatgaaagggcaaactagcaaaggaatcatgaaggaaaacatgtcctaccaaattcagaacatgtatgaagtgagaacttttcaaagagtaccatagagatttaaaatatgaaagtaaaaaa

SEQ ID NO: 225173 - DNA, 982 bp, Homo sapiens
aaaatttgttgcacagaatgactgaagagaagacgctgactgctgagggtttggtaaaactcctccaggctgtgaagacgactttcccaaacctgggccttctgctagagaagttgcagaaatcagccactttgccaagcaccacagtccaaccaagccctgatgattatgggactgagctattgagacgctatcatgaaaacctctctgagattttcacagacaaccagattttattaaagatgatctcacacatgacaagtttagcccctggagaaagagaggtcatggagaagcttgtgaaacgtgactctggttcaggtggtttcaattctctgatatcagcagttctagaaaagcagactctctctgccacagccatttggcaactgctgctggtggttcaggagacaaagacctgtccattggacctgctcatggaggaaatacgaagggagcctggtgccgatgctttcttccgggcagtgaccaccccagaacatgccactttagaaacaatcctgaggcataaccagttgatcttggaggccatccaacagaagattgagtgcaagctctttacctcggaggaggagcacctggcagagactgtgaaagagattctgagcattccctctgagacagccagccctgaagcttccctgagagcagtgctgagcagagccatggaaaaatcagtcccggccattgaaatatgccacctcctgtgcagtgtccacaaatcttttccaggcctgcagcctgtcatgcaggagttggcatacattggtgtccttactaaggaagatggagagaaggaaacgtggaaggtgagtaataaatttcaccttgaagccaacaacaaagaagatgaaaaggcagccaaagaagacagccagcctggggaacagaatgatcaaggagagactggttccttgccaggacagcaagagaaagaggcttcagcctccccagaccctgc

SEQ ID NO: 225174 - DNA, 305 bp, Homo sapiens
tttctaatagcattgaatacacacacatataaaagatattgaggtattactgagatgcatgtgatattcaaaaaagcaaaaacatttgagtttctaatgttataaaggttttaattcttctaaaattaatatagacttgaaatatcaatacaaaaacccaatgggatttctttttgacagctagtatgacttccctatgttacttcagaattcaagtttgtgtctgcctacctctgaatacttattagtcagggttggtgattctcagtgataaaggcatatgaaagaagcagaatgatgtcaga

SEQ ID NO: 225175 - DNA, 578 bp, Homo sapiens
ctcactgtaaatcctcaatccatgttagctttttgtaacattaataacatagcaataataatttgtagcttgaataatagtaagttgcctaaagagatgtagctaaggaagtctgagttagcctttggactctgaactgcctctgcatttagcacactgatatgcagagcaagctgtatccacactgatctcagtgtgctgcagtttcaaaagctgttcagctgggatcaaggaaagcaatgaccgcctactccccaaatcctttctatttcgaaattcccaggtcaatgatgaccattgccagagggtctcaggaaggtggaatccacatggagagttggaaaagggaggccgaggtgggcagatcacctgaagtcaggagttcaagaccagcctggccaccatggcgaaacctcgtctctactaaaaaatacaaaaattagctgggtgttgcagtgggtacctgtaattccagctacttaggaggctgaggcagggagaactgcttgaacccagaaagcggaggttgcagtgagctgtgattgtgccactacactccagcctgcaaccctgtcaca

SEQ ID NO: 225176 - DNA, 546 bp, Homo sapiens
atgccatttttagcaagtgctaactttccacatatactggtaatgttttctagattttcaataatttttcactgatttaactctgtggcaatgccatgccattttgattattatagctttatggtcagttttaatatctggtgaagaaagtctcctctcattcaacttaaaaaaagattagcaatcttcgcatatttttccttccaaattaattttaaaataatctttgtcatttatttaaagcttggttttcttgccagaattgtattaaatctctatctaaaatatctataaaaaatagatatttgtatattacatcttctaccaggatattttgttgtttatttttggtcttttggtattttttatcttttttttttttttttatgtatttcgagatggagtctcacacagtcagccaggctggagtgcagtggtctagggtccaggctctggacaaacctgggttcaaatcctttctcttcctctctctaagctatgtgatatcggataaatcactttacctctcagaactgcacttaaaaa

SEQ ID NO: 225177 - DNA, 652 bp, Homo sapiens
caaagacagttgttattttatgtggaatataataattacaggaagcaatgctttgattaaaggcattggcacctcccttgcaagcattgatttgctaggttcttaaaacttcaactgccagtgctctatgctgatcttagtagttaaagaggacaaggctcattttgtatagagccctgcttctcttggctttggcattttctgttgtttgaaaacacacagactaataaagatgtctgcgtattttgtttaaaggcttgcatggcataggaaagaaaaatagttttagattttaaaaagttgaaatttggtgataatttattttggatcagaaataaagctttgtgaaaaaattataacccacgtatgtatttgaggattgctgtctgattaaaaagaaagctttttatttcttcccctttaaaagatcacgttaagctaaggaaaatcctggttgatgtttttaacagtaataagatgtacggggcacatatggtttttaaagcccttttatattctgtcttatttgattctgaataagctaagttggtagatatgtgttcaattccatcacagtcaaaaggttactgacagagaatcacttttgaagtataaagaaataaattattcaataacacttaatttctagaaa

SEQ ID NO: 225178 - DNA, 439 bp, Homo sapiens
gggtattttcttttgatttttagaattttacttgtaaacatgctacatatacatataatttggtgccctgtttttccatttacatattatactttccatattagtacattgtctgatatttctgcataatactcaattcaacttacctgctattgtttttatcatatctctattacaaacattaggcccatttcccttttttaaaagaggaaagtttgaggttatgggcggtgttctgataaaataaataatattttgtcatgtttgttttttcattgattaggaaacattgttttgaatttaatgcctcaaatttggtgcacaataatttgaagggaaaaactgacaagtttgaaatgaacattgatattacataatttacattaaaatgatacatcttttgtaaatttgtaagaagaataaataaatgaaaacctga

SEQ ID NO: 225179 - DNA, 187 bp, Homo sapiens
cacaagttagtacaagtttattttgttgcaaaacaatttgaaattcatgcattctttttcccaatatgcattttccatgaacgttctaaagatcactcatccttcctccccatgttgtctattcaatgtcagggaggatgtgaccccacccactgctcacctttgtctcccttctgtccccaccatc

SEQ ID NO: 225180 - DNA, 380 bp, Homo sapiens
tccaatagaagtttgagttttaggatcagcttctatgaagcagaagatttcactgagctagagaatcttttcactcctttggaattatttgcaaaagcacttattgttaacacattcttagctcatgagttgaatttgaggcataagtacaggtacgtattgctatgtatttttgttctgtaggtacatatttttatttgacatgttggtaaaattttaaattgtagtttgaaatattaaactgagataatagtaaatgcataatgtaatgaattgtgaaggtatatttgtatactacaccaaaatggaagctgtttttaaatatatatatacaattttcttcataataatctttgatttattcttttctaggaaactgt

SEQ ID NO: 225181 - DNA, 391 bp, Homo sapiens
tcgctagctcggatcccagggcagagggtcggaacacggtgctcttggtggctccgcgcaggggtgaggcgagcgcgtggtggcggagccttccggagaccgctctgagggtggcggagaatcaatgctgcctttgtgctcggtggtttccgagggagaaaaggagtggagagtaggaggggcgacccaacggcccggccccgccctgcagacgcgggatgcggtagggctgggaggcgcgggagctggacggtcagggctactgggggtgggattctgtgtccccgggaggtgcgtctccttggaccagcccagggtgtcctgaggtcagcagccaggtgtgtcccctggctgccaggagcagaagtgagtcctcttctggcttggagcg

SEQ ID NO: 225182 - DNA, 590 bp, Homo sapiens
cgggtgagatctctttctgtctttgcagtctcttagtaggttgcctgtaatgtatatcagattctggtttaatatttatttaataagaaaactattttctttctctattacatttgtggagagactttctgggttgggaggagactttgtttttaatcgtatttccccaacagctaacaagcatggcacctatgctatgaaatctatcaccccattcacttccatgagccgctttcagccaaagacagagaagggggcagattcaatggtcaggcctgctcctgggagactcaggactcctctaatttgcaccttgggcttgataactccctactggacatcttgaaatgttctcaggactgcactgctgcctaagaccttccttctttccctctctctctccttcacaggggtcaaagttatatcctagtacaatagctctgttcacctttcgctctctccttgctttctcatataggcatttatcccaatgactgccttgcttctcaggagatccatgaagacaccatattttaatgtttctagcttataactaaggtgaatgaataaaaaacatttaaatcttaagg

SEQ ID NO: 225183 - DNA, 427 bp, Homo sapiens
ttctgtctcactgcccaagaccctcagggatatgtacgcatttctgagaaggacaaaataaggagaatatccgttttgttcactgctgtatgcccagcgctgcagatggtgactgacatatagcaagtgttcaataagtatttattaaatgaatgaacgacattaaatgactggttattctaaaaagtgatgtaagcagatggttgttagattattgcagaggcaaaatccagagaagtaggatttggcccttctagtctctgctgccagatagtcctgcatgctgaatgaaatacatccaactacctaatgatttcaattcactcacctgtgacaccacagcccaccaaaaatcttggatatttaagaggggttttgtggggtaggggtgaaatagatctctgcttgcctctggattaatctcaaa

SEQ ID NO: 225184 - DNA, 507 bp, Homo sapiens
cagttaagatgccttttcagcattttgttgcttgtttgcagaagggagagaggtaggatcaagaatagtttttactcctgcagagtcgagtgcgagacttggaggctgagtccaggcgctctcccctccccgccagtcccgtgtcctggagcaggtcactgacctggttcctcgagtgcgacagcgcagcctcatcgtaataaaccgcctcccaaagcgttgtcagatcaaattccagaacatgttactggaaagcaccttgaacactctaaactgcagcacagttattagttagcaatactctttggggtttcactggcaccttttctaacaaataagattgatagatgcctgctcaaacaaattgaagtgcttgtctcagatgacacacttggcaggcatgggacgttcacaggccaactagagagctaatttcaaaactgagatataaaagtgtatcgctgtacttacaagttaccaagtgttgagaaattactcactttcaaa

SEQ ID NO: 225185 - DNA, 410 bp, Homo sapiens
tgggcgcagtggctcacgcctgtaaccccagcactttaggaggccgaggcgggcagatcacttgagctgagtttgaaaccaacctgggcaacacgacgaaaccctgtctctataaaaatatgcaaaaattggccgagcacggtggctcacgcctgtaatcccagcactttgggaggctgaggcgggcggatcacaaggtcaggagatcgagaccatcctagccaacatggtgaaaccctgtctctactaaaaatacaaaaaattaactgggcgtggtggcacacgcctgtagtaccagctactagggaggctggggcaggagaatcgcttgaacccgggaggcggaggttgcagtgagccgagattgcgccactgcactccagcctggcgacagagtgggaatccgtctc

SEQ ID NO: 225186 - DNA, 550 bp, Homo sapiens
aatctggatgacttgagtttgggggacttttaatcagaatcatttcatttctctgtattttatttggaaaattttcttagatgcctaaatcagatggtatatacagtgggctacagtaagcttagtgtttgcttaactttttattgaataagttattagttatgtacaacgtgaagccagacaaagtatatatactttgtagaaatatatagagtagtagaatatcatacagccattctttgatgctttctcttagctttaaaaactgtttatgtagcgagcagaccagtttcaggaccagtttctccgggtcacagttgagagcttctgccattggacccctgcctgacttcagcctggccccccttctgctggtattacaacacccggttttaattatcagtctccttatctgtcactttcattagactttgggcttcttgggtgggcctgtgtcctgaggacacttctgtcttgcaaagagaagtccacacaggtttaatgacttccctagaggcctactctcttggcccagaataggcagatgaat

SEQ ID NO: 225187 - DNA, 347 bp, Homo sapiens
tattctgtaatgaagatgggaaagaacggagtactgatacacgctacaacatgggtaaactgaaaacattattacgtgaaataagccagtcataaaccacatattgtgtatattttatccataagaaatgttcagaataggcaaatctataaaaatacaaagtagatttgtagttgctgagggctgggaaaagggtttggggagagaaatgactgctaatgggagtatgggatgttcttttggggctgataaaatgttccaaaattcattgtgtgataactacacatctgtaaatatactaaaaaccactgaattgtatccaataaagtactaaattgtatgatata

SEQ ID NO: 225188 - DNA, 1311 bp, Homo sapiens
gaaatgtagcccgcctgacctttccagccctggttctgttcctctgatttgaccttaatctttccacctatggtatgggaagaagaaaaatactaaaaaggaagtcagagagcagaagagagaaagaggaaatggtggtggacaaaaaagcaagtaattttccctcccaatattttactgtgacaatttgtaagcacacggggaggttctacagtagtacaggggatcccacagcagacaccatagaccaccacctaggtcctacagttagcatctcactatatttgctttataggaaatggatagatagggtttcactggtcaaaacaggaacactgagacaaatccactgaaagtagaactgaatacctgactttctttttttaaattttaattcgaattattatttttttaaaattttactttaagttctgggatacatgtgcagaacatgcaggtttgttacataggtataaatgtgccatggtgctttgctgtgcctatcaatcagtcatctagattttaagccccgcatgcattaggtatttgtcctaatgttctccctccccttgccccctacccaccaacagacccgggtgtgtgatgttcccctccctgtgtccatttgttctcattgttcaactcccacttatgagtgagaacatgcagtgtctggttttctgttcctgtgttagtttgctgagaatgatggcttccagcttcatccatgtccctgcaaaggacatgaactcattcttttttatggctgcatagtattccatggtgtatatgtgacgcattttctttatccagtctatcattgatggatgtttaggttggttccaagtttttgctattgaaaatagtgctgcaataaacatacatgtgcatgtgtctttttagtggaatgatttatattccgttgggtatatacccaataatgagattgctgggtcaaatggtatttctggttctagatccttgaggaatcaccacactgtcttccacaatggttgaactaatttacactcccaccaacagtgtaaaagcattcctatttctccacagcctcaccagcatctgttgtttcctgactttttaatgatcgccattctaactggcgtgagatggtatctcattatggttttgatttgcatttctctagtgaccagtgatgatgagctttttttcatgtttgttggctgcataaatgtcttcttttgagaagtgtctaaatacctgactttcaacattggcctgaactgaaggagcagtgaaagaaagcagggtgcagaggctggggacgtggac

SEQ ID NO: 225189 - DNA, 412 bp, Homo sapiens
ggcaaaataactggaagactccaaaattagacgtttggttcagagacattatttaaccatatagtataattcatgcaatggaatactatgtaatcgataaacatcaggccagagaaggttatttcaaacttggcaaaagattataatgtattgctaagtgagaagtaggcgccatacggcatgcatggcaaaacaccagtcagggaggaaaaattgacatatgtaaaggaccacagaaaagtagccagaaagaaacataccaaaatgttaatggtgattataacagtggggagtggaattatgagtatcagatgattttaaaaatatctttgtgtttttattagttttccaaggtttctgcattgaacagatactgcttttgtaatctaaaaataaaaagcaataaaaaata

SEQ ID NO: 225190 - DNA, 1031 bp, Homo sapiens
ggtctaaagcagggagtaatatgatcaggtacattgttcagaaacattcctccagctgcaccgtggaagcgggactgagcgagcaagtgaagtggcagatccagttatgtggctggtgaggtgcatgagaggagatgatagtggccggaggtgtggcagtggaaatggagtgacacggttatatttgagggcagagttgatagtacttggcagctggctgggaatgggaagagggagagctgaagaccactcaggtttgtgtcctgcagcaggaagtaatagcaagagcagactcgaggtgacagcgaggacgaaaccactgatgtgtgtgagggcctgctgtgtgctgggtactgtgtccctgcctgttgactaacttagtcgttgtgagcaccccatgcggtggatgcggtagtatatctatttgacagacgaggaaaccaaggacaaagaggttgagtaacttgcccatggtaacccagcctggtcatggccgagctgggattcaaacccaggcagcccagaccccaaagcaccacattgtgcagctgatacttcatctccacagactgtcctaccatatttggcatagaatttaaaaatggaaatgattcttggtagcaacacgaatgtagtggagacacacagacctgggttgtaatctcactcagccaattcctcttagtgagacctggccataccacccaggttttcagaagcttagtttccacattaaataaagtaagaggccaggcgtggtggctcactcctataatcccagcactttgggagcctgaggcgagtggatcacttgaagcccggagtttgagaccagcctggccacatagcaaaacccaatctctaccaaaaataacaaaaaaataactgtgcattgtggcgtatgcctgtaatcccagctatgttggagaccgaggcacaagaatcacttgaacccaggaggcagaggttgtactgagccaagatcacgccactgcactccagcctgggcgacagtgagaccctgtctcaaa

SEQ ID NO: 225191 - DNA, 811 bp, Homo sapiens
ggaactgcaagttcccacgtccacccccgccacacccacagcctgccctgcatacaccactgctggagatgtagccaggacagcttgccctgtcccctgaccccacggaccttgttaacaccgctgctcccctcggtgatatttacctgtccgtggctgtcctgaccaatactcccaaggagacagtgcatcactgggccaacagggcagagccccaggggaccactccctttacgacatggacggacactttaggagtgacggttaccctctccttggatgaggaggggctccaaggatggacatgtcagtctcacctggagggagaggggcagtgggtgggggcaacgctcagtggctggtggacaggcaaggggtgagtgagccctgcccaactgactccattggcggccactggccttgcctggcattcacggaacaggcgcttcataaacttgttgcttcaatgtgaaatcacctcaattttgtaaatgcgtctgtagcatccacaggactcatcatctagaattcaaacccttaagggtaaaggctgcgtcttctgtttcctctgcgtcttctcgaagcactgtgtgtaagggccagagcacagaggatgtttcatacacgtgcctttgccctgagaccgcagccctgcctccccggtcccacgcagacctcatggagtggcctccacttcggggcttggtactgctgtgtacggaaggggcggtttctatgggaaacatggacaaacagttctatttggaataagcaaccacagggtgcccacccagccatcctcccaaagatt

SEQ ID NO: 225192 - DNA, 433 bp, Homo sapiens
ggtatttattttgtaatcctaatgcatcttagagttgtgtgtattttatgtggtactatttctttttcctccaaaaaagctgctattaaaatgactgcgtatttcagaattcatggagtcttggaatttagagaatatagcacacatatatttatgtatacacttatagtttatatgcacatatatatttagatgtgtgcctgcattttccccttgatattatatcataaacatttcctggtagtattagggtctaggcacttgtaatgtctaaatcatattaatttatgtgattgtgactttattgatatgattttgcttcagtcacttaggttgcttttagttttttgactaagtgtagttaacattcttaagaatattttttgctagttttctgtctgaatatccaggacccatttcgatctgtattctt

SEQ ID NO: 225193 - DNA, 402 bp, Homo sapiens
agattttttttttttggaggaattgttttattgagtggtgttaaattgtgacagtatccttggtcataatttttatttgctctgtggcaacatttttctgctgagttttctttcactgccatgtgtcccctacctttgctctctgctgattattacttatatttgaatatcttgagttcttcttggactagctatttgctagtccagatatacaaaagggaaaggtcacaatcatgtccccgaccagcaggaaataacccaatttacttaagactcagggttacatgttgagttactttaggttttattagtacacataaacagagatcagaaactttaggggtgcttggagtgtagagtgctgtgcccatagtctttttttgaaaatacagtgcacctgta

SEQ ID NO: 225194 - DNA, 1130 bp, Homo sapiens
aagttgcagtgggtgatatgtgctgagtgacttggggtctgccccggcattcacttatacttgtttcttactaagaaattgaatgtgctttaagctgaaaattagaaagcagtagggaaggacaggctggatggtttgggttgttggtttaggaataaaatgcccttttgttttggtggtgggtgatgccatctatagaagggttttaggtcattgtgttggtgtctttccgtctttcccacttgagaccctcttgtaaatatggacttgacccacccattgtactcagaagaaacctcaaagattgtactctacaaagtaaataggttggtatcaatgattattggaactagagagccgaggacaagttttttgatgttgccttctttttatagtataaaatattctaattttaagtatttttgttgagatataatttacagacagtaaggtatacagatcatatttttacaattcagtgaatttgggcaattgtatcagcctttgtaactcacactcccatcaaggcccggaccatttcacctctgaaagatccctcgtaccccttcccagtcagttgacccctctgccccaggcagccactgttgtgatttatttcaccatagatgaggttttcttgttattgaacttcatataaaggtattcatgctactcttttctaaaaataaacaagaaataaactcgaggggggcccgtacccaattcgcctataggagtctgataaattaattgccgcctttaaacgtgtgatgtaaaacctgcgtacccacttaatcccttgagacatcccctttccaactgtctaatacaatagccctaccatcgcttccacaatttcagctgatgcaatgaaattaacctaatattgtaaatccgttaattttaataatcttttacaatagctattgtaaatctataataaaaataccggaaagtgatgtttcatttaaaaagcctttaaaactgcttatctatgctaatctttttacgagtcctttcttacactctaaaattttctctcagcctaaacatattctctaatacccttaactttggacctctctcgtataacaattaacgctctatttcattaattgcgttcagctccg

SEQ ID NO: 225195 - DNA, 600 bp, Homo sapiens
tgttagaggtgatctagaggacccctgccaaagcgtagtacccaacatacaagccatcagtaaatcctgccagctgtaccttccaaatatatttcaattcggcctcttttctcagcctttgccgcaccaccctatccaagtcaccttcatatctcatctggaatgatgcattcgctgctaactgttctccctccttcttatcttatgccctgcagtctatcctcagatcaccaataaatcaggttgcatctctcccttgtttaatccttctaacagttactgactgcacttggccctaggtgatctggccactggctacctgtctgacctaattttctaccactctcccaccttggtttctccattttagccacactgaccttgctgaccctcagaaatgtcaatgatacttccatctcaaacctgaacaattctaccccaaatacttacatagctctgtcacttcacatatggtctctacatcatgtctttggagccctttctggatcatcctaaataactaaataactaaaataatagccctgggctgggcgcagtggctcacacctgtaatcccagcactctaggaggctgaggtgg

SEQ ID NO: 225196 - DNA, 381 bp, Homo sapiens
ctcctaaacaagtgttcccagtatcagtaaattatacaacccagtgacctcaagccaaaaaattgtgatgtcatctttttcacacccaacatacaagccatcagtaaatcctgccagctgtaccttccaaatatatttcaattcggcctcttttctcagcctttgccgcaccaccctatccaagtcaccttcatatctcatctggaatgatgcattcgctgctaactgttctccctccttcttatcttatgccctgcagtctatcctcagatcaccaataaatcaggttgcatctctcccttgtttaatccttctaacagttactgactgcacttggccctaggtgatctggccactggctacctgtctgacctaattttc

SEQ ID NO: 225197 - DNA, 642 bp, Homo sapiens
atgggaagaatcctagattagggggagagaattttggttttagcctgaactttccaccactgtgctgtaagattcagttaggttaaatacttcgacctcattgagccactgtcttcccatttgtaaaatatagagatttggcagatgatcactaagatcataacctaaagaaaagaatgggttgtatgtgatagtaattactgttttaacttactgaaattcaaagaaacctgagtctgattaatttgaatgcaagtctgatgtgatacctacaaattcagcatataaaatgaatctaaagagtgctttgcttaagaaaaatctgcttagctgctcattgaccctaatataaaaacatttgaaaataataagatttaaaaagtaaggccaagtatagtaattcaaacttgcttgtcatctttaaaacaggtccctattttaacaggggttgggtggtggtggttgctgttttttaacgctttgaattagtttcttgattcagtggcaaagggtgatgattgttcttcctattgaaagaggtttttaccaacacctttgccatgtctgccctcaggggatttaagataagtagcaccaagttggccctctaaatttgcccccctctccctgccacagcattta

SEQ ID NO: 225198 - DNA, 379 bp, Homo sapiens
gttgcactatgttggccagactggtctgaaacttctggcctcaggtgatccgcccgcctcagcctcccaaagtgcggattacaggcatgagccactatgcccagctatgatcctaatcaaattctaatcctaattttgacatactttttgagtggacttgaattcaactgggaaccggggagcagagagtcaattttaggacaaccgacctattgaaagcaacctaccaaaaataattttaaacacccattgctctgtagtgacctccatcatttttgaacacctcttttgtatttgctctgatgcacgtttataggaaagtctaagcagagactgcctagcaaacctttttgtataatgattcaacacattttctaat

SEQ ID NO: 225199 - DNA, 313 bp, Homo sapiens
gtccaagtgtaattattaacagtgccccctttcactctccaaagagtccctgtccagacagttaattgtgaagtcgccttcagatggctggcggtaaggaaagtagagtgagggaagcagggtaggtggaggtgtgaaagggagagggcctcatctcagggtggctggacctgcaccagcatcggcctgcatgaatgtgctcctactcttgcccaggctgagtatcaagagaagcaagaaatctagataaaaatccaaatccagaaacatcagcgttttgaggttaacatgttggcaattattcagctttatg

SEQ ID NO: 225200 - DNA, 693 bp, Homo sapiens
taaaatctagcgaatgaaaccactgtgacttatgactcttctcctttcgaccctgaggcatagctcaggcaagtatcttcattacactcacattgcttcagtagttattaaggcaatattttctgacttacacagtgacttccaattcctcatctcataggttgctagttttatgtttttattatttattatttttttttagagatggggtttgactatgttgtactggctggtcttgaactcctgagctcaagtaatcttcctgcctcggccttccaaagtgccaggattacaggcatgagacactgcgcttgtcctattaatttttatatatttttttaagagatgggggtctcactatggtgtccaagctggttttgaactcctgagctcaagcaatcctcctgccttggcctcctaaagtgctaggattacagatgtgaactatcacgcccagtctcaggtcgctagttttagaaatgaaatctaagtggttttttttggtaaaattaaggtagaaaatgcatgacttggatgctttaaagaggaagaggggtaaagtccttccaaaatgtactagaaacgaaaagaaaaaggccgggcgcagtggctcacacctgtaatcccagcactttgtaaggccgaggcgggcggatcacaaggtcaagagatcgagaccatcctggccaacat

SEQ ID NO: 225201 - DNA, 503 bp, Homo sapiens
ttattttttttatttttaatttttttgtgttataataagtgctgcaaggcataattgcatgtaaatccttttctaccattctaattattgacttggaataaattattcaatataaaaatatttggttaaattataggaagttttaagaagttctttgttcattacttctaaattgttctcaagaaaatttatattcatttatagttcaacaaagagagtgtgaaacggccattcctctacccccaataatcattttcctttaattatacacttgaaatcttaatatgcatggagtataaagaaaaatatagagtaatttatgactagtatattcaacatctctctctctcctacataaataaaatcaattcagaattctatgttaaaaacacttattatttttattttttaattaaatataatattctgtcttattctaaaagagatttaaaatttgttgataaaatataaaataatcaacaagatacatttaaagtattact

SEQ ID NO: 225202 - DNA, 333 bp, Homo sapiens
aggtgttcttttttttttttattctctccccactgggcagcaaaagttgttccacagtggaaatttaggcatcctcaagtttcttcccagcttctgctgtgttttcttagagtaaattgccaatttctgtttttacaggaaatccttttttaaaaatggaatcagtgtggtccccatctactctgcaaaaattgcatttttctctattttcaaatgagatttgttcaagtttcaaaaccacgtgaaataataaatgtatagtagttttcttttccttgggcattgcttgatatgtgaaatgggtttatgaaaaataataaaatcataacgcta

SEQ ID NO: 225203 - DNA, 509 bp, Homo sapiens
acacatgcatctctgttactcaaagtaaaaacaagatactccaccagtaactgtgatgggaagtcaaggtagagaaccatggaatcagtaattccattttacaaggctgatgatgttcaaaacaggtaaatcttagagcaaacaaagttgagtgtgtaagcaggagggaaaaaaggtgccaaaaccttaaaagctccttaagatttaagatattggacaaaaacgcaactttcctcatcaggaaaagggtgtgtttcctaaatcagcattttttagtttggtctgtggaccacctgaaacaaaatcactgggcttcatcctggacctactgaatcaaagtccctaagtataaagcccaagtatgttcactgattcatctttgaatccactgtgatgagccctctcaagacaactgcttatctgaatgtttcttcaagtaaagtttactccagttcctacaagaccgctagttgataacacagtaaatgaaaggcagggaagggactaat

SEQ ID NO: 225204 - DNA, 462 bp, Homo sapiens
tagtcagattgttaaatttcagatttttttgttcataagattttcttcaggaattggtgagttccccattgtgttcacctggaaaatagccagctgaagaaaaacttcactgaaaagaaatctgagagatctagtgtagataaacattaatttccccccaaatcaggtcatcacatgaactacctgggttagaatttgtcttttccaatattttctgaaagtatttcaccttggctactatactataaatactcctcaacctttttcagtcttttttttagggtattgagataagaaagagaaaggaaattgagaagcattttacttgccctgaattaatgtatatataattttctatgctttcttataatgttaaagacaataacttggacaaactcaaactgctacttcatctctgccctctcatagaaaatgtcattaaattgcatttgatattgtttc

SEQ ID NO: 225205 - DNA, 630 bp, Homo sapiens
  misc_feature (594)..(594): n is a, c, g, or t
ggccctgaaatcctctagttcagaacagtaccatatgggtactttccccttgttttagttcctttcagcaaaaatacacgaaccaaaatgctaagtaaggccgggcgcagtggctcacgcctgtaatcccagcactttgggaggccgaggcaggtggatcacgaggtcaggagatcgagaccatcctggctaacacggtgaaaccccgtctctactaaaaatacaaaaaattagccgggcgtggtagcaggcgcctgtattcccagctactcaggaggctgaggcaagagaatggcgtgaacccgggaggcagagcttgcagtgagccgagatcgtgccactgcactccagcctgggcgacagagcgagactccgtctcaaaaaaaaaaaaaaacccagtaatatgctgttaaaatacatgtttctgtggactattataatatataaataattacatatatccccatttgctcttctgcccatagaacctttcattttatacaagttctacctatttgtatacatgcttaaatttaaactatttggttttttggttatttttattttttgctttttaagctgttaggctctttnctctgtgcttcaattaataaaaaatggaaagaatct

SEQ ID NO: 225206 - DNA, 539 bp, Homo sapiens
taaagcagggctcagaagcagagagagaaagagaatttttccacagcctcagagagaaaatccaggaaaatccaggagtagaactcatgaggctgaggttctggaactgtgttcccaaactgccttctctggaaaaaatgcagagggaaccagccgattcctagtaaaaaatttttgacttactgactttcaaaaagaaatgagttccatatgatgggaattgcattctttgatttggacttaaaggattttctgagcttttaaatggtttcctatgtaatattccatctcttctggtttgggagttttccatgaaatgcctttttaaaaaatacccaaagcatcaaatgagcttttcagcttgatgaagaacttaagaaatttcatcattccttttcttcctggctgaccttttaattttacacaagatatacaggagtgatttgtcttgtctggtttgtaaggatttttaatcaccagccacacacattagtcactggcttttgtacctacaagcccaattttctttgttttggggg

SEQ ID NO: 225207 - DNA, 431 bp, Homo sapiens
ggatggtcccttttggacatgtcaccctaactaaatctccagccatattgtgtgccttcctataatggtttattttgctcaagcttcagctatcttttattagtttcctttatagtggtatgttatttttatcatctttacagtcatatgaaagggtagtggaataatcatttcccttatttcataactattctaacagttttcctctgctgaatctagtagcaagtaaatgactattaaaatgtatttctttctttaatgttttgtacatacagccatagaagtcttgaaggaaaacttgactcagtatttatttagcatgttccataagtcaggaactcttctaaaatgtgggatacaaaaatctgaatgcttcccacacagaattgcttcatgtaagagtatttaaatagaactgaattctgtccata

SEQ ID NO: 225208 - DNA, 324 bp, Homo sapiens
aaggtgctgtcacagacccttaccagccacgaagaccccacccagaccatccctctgctgtttcactctttgatattctctggagctctctggggaggtgcgagacctgctgtctggtttgtacggtttgaccaggtcttacactcatggctggctgtctctctctgagaactgggactcctgaacttggtgaaatacctcagccattgatcatgttaaattatcgggaacactcatttaaaatccgagtctgctccagatggactctctctctttctgccctgaccatgagagagagagatcgtgagagagagagaccgtgag

SEQ ID NO: 225209 - DNA, 614 bp, Homo sapiens
ttctagaaatgaaaagaatataatctttaacaaaaaaggcaaaaagtctttatggtacagttatactgcgactttgttgcttaaaacacagttggcagagagatgaaaactaaaggttttttattctaaaattaaagttttatgaaaagtttataaatttttaaattaacaaagtttcctatcttttactccttcccccatcctcacaaagttgcaattcgatgagtatcttcccagtattttctgacatacagcacgctttttatttgtaagcactgcttcaacaaattagatccacagcatttagggttgactatagagtggtgaataaaacagctggagtgtaaactcttcaacaacagggacaaataaggaccacagtctacatttggtggatatcttttcgtatcagaatattgttacttaatagcactttttttttttttcgagacagagtctcgctctgtcgccaggctggagtacagtggcacgatcttggctcactacaacctccgcctcctgggttcaagcgatgctcctgcctcagcctcccaagtagctgggattataggcgtgcgctaccatgcccagctaacttttgtattttctgtaga

SEQ ID NO: 225210 - DNA, 303 bp, Homo sapiens
tagaagcataatgtctgtctcgctgaatttcatggggaaacgaaaatttacaatgtgtggctcatacgtgtaatcctagctacttgggaggctgaggcgggaggatcacttgaggccaggagtttgggaccagcctggggaacatagaaatactctgtctctaagaaattttttaaaaattagctgggcatggtggcaacatgcctgtgatcacttgagcccaggagtttgaggttacagtgagctatgattttgccactgctctccagcctgggaaacagagcaagatcccatcttggggaa

SEQ ID NO: 225211 - DNA, 387 bp, Homo sapiens
ccaaatgaatagaattgatccagagaagactcgagctgcagctgattgaaaagcaaggccataaagcccaaatcaatagaatagatccagagaagactcgagatgcagctgatctaaaagcaagtccataaagcccaaataaatagaatagatccagagaagactctagatttgctaatttttccaactccacattcagctactggtgttattgttcaagagcaagatcttgtagaatggctttttcttccacatactaattcatggcctctaactccttatttggatcaaattgctactatgataggaaatgggagaactcggattgttaaattacatggatatgatcctgaaaaaattgtccctctcacgaaggcacaaatacag

SEQ ID NO: 225212 - DNA, 535 bp, Homo sapiens
acccctctaatatagtttggattttttaaaatttttatttaaattttcttgtagagacagggtcttcctattttgcccaggctggtctcaaactcctgggctcaagcaatcctgccttggcctcccaaagtgctgggattacaggcttgagccaccatgcctggccttgtttggatttttgtcccctccaaatctcatgttaaaatgtgatccctaatgttggaggtggggcctggtaggaaatatttgggtcatggggcaaatccctcatgaatggctttggtgccctcccgacagtaatgagtgtgttctcactcttagttcatgtcagagcaggtttttaaaaagaggctggcatctctcttaatcctttttcctttttttgtcatgtgacatgcctgtttctctgtgccttctgccatgaataaaagcttcctgcagcctcatcagaagacaagcagatgctcgtgctatgctcgtacagcctgcagaaccatgagccaaaataaaccgttttctttataaactatccagt

SEQ ID NO: 225213 - DNA, 705 bp, Homo sapiens
aaaggtgggggcataggtggtgttagaaaaagtatttgaagaaataatgatggaagattttccaaatttgaaaactgaactgacaagtttgagaagttatccataccccaagtagaagaaacaccatgctaaaatgtatagtaatcaagttgttgaaaactggtgataaaaatattaagtgcaacgagaaggaaaaaggcacattaagtacagaagaacaaagataggaataactgtcggaaacgatgcaggccagaagacaatgtagctacatctttgaagtactgcagaagaaacaaatttgtcagtagaaattctatacccagcaaatatatctttcaaaaagtaaggctgtacttttccagacaaacaaatgcatcaccaacagacctgtaccagaagaaatattacgtgttcttcaggcggaagaagaatatcaaatggaaatgtcagtctacacaaaggaatgaagagtggaattgctctcattttttcatacctctagaagacaggtgactaaggcagaactaaaacaacatactgtgggatttataacatacagaagtaaaatataatcacagcacaaagaaggagacaaaatggacaaatatactgttggaagatccttctactctacataaagtggtaaaatgttatatgaaggaagactgtacgttaaagccatagtaaatcatagagtaacca

SEQ ID NO: 225214 - DNA, 367 bp, Homo sapiens
gttcacagctgcgacaccacgaacacattatgttttagcacctcctagccagagcatcaagaagcactttatcgctaagaggttctgtagaacagaaagacacaagtttaaacagcgatgcattggctagaaataacctctaaagaagcacacatttccctctgtcacgttatagatcgctaacgactcctcgggtgatgttttatgtcctttaagcctcatatcttacagcgttagaatgtgggatgccagcaattgataaattttagtgtcatggggttgggggaagaaatgcctatcaaatgctgaccaccagtttttcaaaaaaacttccattggcaataaaaatggcaagataatttagata

SEQ ID NO: 225215 - DNA, 340 bp, Homo sapiens
tttctgagaactagcaaaataccctggaaaaaatttatgaaacctaccagatttgtaaaaaggtcagccaggcgtggtggctcatgcctgtaatcccagcactttgggaggccaaggcgggtggatcacctgaggtcgggagttcaagaccagccggaccaacatggagaaaccctgtctctactaaaaatacaaaattagctgggcatggtggcgcatgcctgtaatcccagctactcgggaggctgaggcaggagaatcgcttgaacccgggttgcagtgaggggagatcaccccattgtactccagcctgtataacaagagtgaaactccgtctcag

SEQ ID NO: 225216 - DNA, 402 bp, Homo sapiens
ccagaacttggtgcgcaaggtgtgggcatgatgctgggatgctgatacaaccaaatttaagagctttaaaaaccattaaaatactggagtcaccagaaagtaaacaggtgctcattagtatattctatatgatggacattttgcttaatttacatattttccccctttacactgtcactctaattagctatttaaaaacgtattctcaactgaactatcagttggaacattttgtcgttttcgttagtgtgcacacactgttaccatttttggtcagtgatttgcaggcgtagccttaccagactttgctagaaatattacactgtaattgcatctgtctagaagcagttggtaccagcttatctgcatacaaactgttttcactgtataacagttttggtt

SEQ ID NO: 225217 - DNA, 345 bp, Homo sapiens
ttaatataatcttttaatcatttctaattgttttttttttttgttggtttatgttgttcccggaaaaagacgagagtgtttcgtgtctaaaaaactcctagaatgacacgtggtttatcatggtttatttaaactgcctgtagattaataataataattctctggcagaccacatgatacaattacgttcttgttactttagctcattagctcacttgtttttattacccttaattccaaaattaagggattctttttcatttcgctttttacatgatatcgagaggtacgtgattgttgttccctccaaaattagcattcaaccagtggtgcttttggtttttt

SEQ ID NO: 225218 - DNA, 420 bp, Homo sapiens
cggctgcatggaacagtaatgtccacagatggtaccaaagaatgtcgcacagaccttccggccttcttcgctgtgtaagcagctccttctcaaggctcaaggatggcaaggggagggagctgtgggaacaaggccagtcccattctctgccctgggagaaaggtttataggatttaagaggggaaggcatgcctgcagctgctgggtcaccattaatcaattgtgccccacccactgagctccctgcacttagggaatcagaaatgttgccttttcaggatgtgtaggtttagtaactggatcaggaaataatctatacaacaaacccccgtgacaggagtgtacctatataacaaacctgcacatgtacccttgaacctaaaataaaagttttaaaaacaagacaaggcacaaacaagc

SEQ ID NO: 225219 - DNA, 450 bp, Homo sapiens
ccagctatctggaaggctgaggcaaaaggacgacttcagcccagaaggatgaggctacagcgagtcgtgattgtgccactgcactccagcctgggtgacagatcaagaccttgtctcaaaaataaaaaagatttgagatgaaaacattagtgttactcagcatcaatactaaatttctgcattttattataaaattaagcctgatccatgtagctgatcataaatctattctccatattacatctaacatgaacttctaaaattgcaaatgtaatcaccaaacctcaccacctctaaaacgcccctgactataggtcatatcattattttatatatagcccagaaagaaaacaatgctaattaaacttcgatttcagcgattttgtaagaaaaaaagtgtcccacaatcgttggaatatagtgcggcaaccacctcacctccttaaaaac

SEQ ID NO: 225220 - DNA, 670 bp, Homo sapiens
tcttgtcctaattaatcaatgccaccaatacaatcatctctccagtttccttatattcatgggtctgctttgtagctatcttttctttcactaatgtatttctctgtcactgccccaagtgcctctgtcttcatgattacagccttataccattcctgacatctagtaggccagattccttccaaaaaacctcccacatcattgttttaacaaaacccttttgggatttttcttattgagttgcattgagtttatagaaatttggaaagagataatttctttaaaaatattaagtctttccatctttgaacataacgtgggttgagcatcccaaaacttgaaatgctccaaaattcaaaactttttgagcactgacgtgatgctcaaaggaaatgtttattggagtgttttgcatctccgagttttggatttgggatgctcacttggtgagtataatgcaggtattccaaaatctaaaaacaaaatttgaaacacatctggtccaagcatactcaacctgtacatctctacacttatttttcttctttaatattgttccatgaatttataattttttacataaatatcgtgcatatattttgttagatttatttctacctgtgttgtggactgtgttgctattataaatgtattttctcaaaaagtttgt

SEQ ID NO: 225221 - DNA, 425 bp, Homo sapiens
ggcctggggatctggtgccctggaggctttccttcaatctgcctctgactattaggagctcataggtgggtcacctgaaactctgggcctcagttttctcattgtgcaatgagattgttgaatcatattagagattccacaaatgagagcagtgcatccaagacataagccatttctgcataaccttttctagagatcccctgacccattaatcatgtaattaatggtcctcattaaaatgacttcagttctagcataatgttttagttccgtccaggtggaaacatttacaagcccacaggtatgatgtgttaactattatttaagtacatattaaaatactcaggaattaaaattaaaaatagcatttgtccatgtaccacctaatgaatacgcaataaatgttgaatggatgaatgacaaaa

SEQ ID NO: 225222 - DNA, 234 bp, Homo sapiens
atttgaggaagaaagaccagtgtgactgaagtgtgttgtgcacagaagagcaagaaagcctcagtccttccagaaactcctgttatttattgtgttttcatacttgagtcttaagagattccattctgacatctgctggctattgtgtatactgcagttccaaattccactacacaagaacaacctttaataacgtattttttgaaatttgtcataataaatttgagataaaac

SEQ ID NO: 225223 - DNA, 162 bp, Homo sapiens
tgggggtgatgagggaaggaaggccagtggggagaggagtgaggaagaggacagctgcgagtcaggtggtgagagcacttggagaggctgagaggacatgggctgggagtgaatgcatgtgcacatacacacacacacctctccagcatatgtacacatgca

SEQ ID NO: 225224 - DNA, 525 bp, Homo sapiens
aggcgtatttagtctaaagttacatgtatttgatttgttttgtatattagtaataaagcagtaaatgaattggacagttgcttgaaatgttgtctggcgtatctgtataattttagtgatttaacatgtcacttaagttattgaggaatgggaaataagtactatgacttggctaacaatttcggaggtaactagtttagtcgtggacagtattttttaaggaggttagcaaatgatgtttagttgccattgtgatcttctgaaactgagttaagatttaactgtatttattagaaaaataatcaggcttattttgaacactgagttgtcactatttttaggtccttactgcacactgaagtattgtacacaagaagctcattatttaagtgatctttacgtggcatacacaaatgtattacctgtaaaattaattttagttaaaaagtgtctgaaaggagatggttactttgtgagttttaagttgtttttgggtattagatcttgatgagcctgaaggggtcg

SEQ ID NO: 225225 - DNA, 322 bp, Homo sapiens
caggctgctggttgaggcgtcgagactctctgactagtacacgtccctggtggttgagtagtaagaatgcggtagtagttagaataaaataaatatccatgaatctatactgatgtgaataaattattgaataagctaacaactagggtagaaaagaaaattcctctgtgcagagttccaaataaattatgtggctacttcaccctataggagagggaacattattatctctttcttaagtgtggtgtgcacatagtgacttcctcccaaagcatacaatatgtagaggggggaaaagagtaactttagaggggagaaacct

SEQ ID NO: 225226 - DNA, 710 bp, Homo sapiens
tgcttggttttcagtgaatttacaattaaatcttcccacaatctctaacagctcaagctgtaaaaaacattcttcaatgtaattttccacaaagacaaacttgttagataagttatgtgttccaattttttccccctgaagactttcctcttgaaggagatttggacctgctaggtagctgctatcctgaggcttctactgaatattatttgggattccttttaacttttcctgttctggacttcctgtttcctgaggggattccattcttttccctttcttggttactcccttatttgatgaaacacatctttcaaaacttctagggaaatggaacatgagatgtaaattttctttctaacttccatgtccataattttgatagcttccaaattttcctaatttctccttacagagcacatacaagtttttaacaaaggacaaaccaccatgtcaatgcgttctagtggcactgaaggacagactggtatatcaattgatgtgctttttcaaaccatacataccgtgtacacatcataccatgacacacactggtcctatatgaaatttttaagagaactactctcataagtggcacatcatctatatgtaaattaatgcaccttaagtgcctgaaaacttttacagattttagtttctttgagacttgtttatgatactaattttaaagattataataggattaacca

SEQ ID NO: 225227 - DNA, 1736 bp, Homo sapiens
gtggcacaggtgttgtcctacaacctgtgacaacagtggagtttgtttgcaaaataaagatgcaaggctttcccatgttgtgggagacacagtcctctcctggtggccgtgtttctggttggttttctctcacgagccagtgtgctgtggggcacccgctcccactcccactctcagtggtgtgtgcatgcccagaggtatgaaacttcaaggaataaaagtggctttctgaacaaaaatatcaaagtgtgtagagacctgtcagactgttcgcacagcagatggggagggacacgttctcccaccttagtctgcacaaacaccgaagaagcagccctgacaagtctaagctgggcacatccccaattccttgggaattttggaaataaaactgagaaagattactctaaaatataaagcccagatgctattggcagccatgtttttgcctctgtgcaaaaaagacttaacccagtaggcctgggacggctctctttagcaaggctgcttgcaaggctggcccttggctggcgtctgggaactgggattacaggagggttcccattgtttccagaactgatgagaggggctcacggtgctgaaactgtttgtgcaaacacatggtatgtgctgaacagcagctttcctttggggagtctggaatgtagtatgtgctgggcagaaggggctggatgctgagtccctagtgagcttccctggttggcagcattttttcttgagatggggtttcagtcttgttgcccaggctggagtgcaatggcaccatctcggcctcaacaaacacccctcccgggttccagattctcctggctcagtctcccgagtagctgggattacaggcatggtgccaccacacccagctggtctcaaactcccgacctcaggtgatctgcctgcttcggcctcccaaagtgctgggattacaggtgtgagcccctgcacccggccggttggcagcatttcacacgtgttgtcatggcttgttgccaggggaattaaacatgtccgtgactgctggagagaattcttggaagcacgtgcctggtttcctcgggacttcctgccctgtgccttttccctttgctgatctggctttgtgtcctttcgcagtaataaatctgtgaatagccgtggccatgactccatgctgcgtcctgtgggtccttcccctgatcattgaacacgggctttttattgagccttaaaaaggagtaaggcactgacacaggctgcagtatgaatgttccctgaagacgtgttgccaggtgaaagagctgggtgcaaaatctacatcttgtatgagtccatttataagaaatatccagaataggcaaattcacagaaacagaaagcagatgagcggttgccagaggctgaggagagagggcaatagggactggagtggctgcttagtgggtacagggttttctgttgggtgatgaaaatgttctggaactaggtagtggtgatggttgcacaacattgggaatgtgctaaaagccactgaactatacactttaaactggtttaaaatggtgaaagtgatacattaattttaccttaattttttttaaaaaaaacagtgttatgaacagacacgatagctcatgcctgtaatccagacactttgaggggccaaggcaggaggactgctgagaccaggagttcaacaccagcctgggcaacatagcaaggccctgtctttaccaaaaaaa

SEQ ID NO: 225228 - DNA, 1181 bp, Homo sapiens
tgcttttataaaatctagcaaagatattatcttgttcattcttactgaacccatgtcccctacagctgaaactattacagctaatatttattgactatttgtggagtgctagttgtgtttataagcacttagcatgataaatttgcaatcatacatagggttgatgattaagttttggcctagaatgtttaagttatacaattagtgaatggtaaaatttgaatttgattcctggcttctgtcctcaaatttgtgcctttaatcactgacacaactttatagttaccattaggtaagtgaaaattatgttgaaacaggaaaaagctacttcattaaaaaaagcataatatatatttttctatatttcatggagtattgtgtttaattaggtatacaattttacctattgcattacatgataaagtccctatgtatagtctaggttagctttttttttttttttaattgactgatgttaagtttcaaacatatgcccttacaaagattgttgatattttggtacaccttgctaattcagtaaaataactcaaataaattgatgttgttttaatacatacacatacacactactatttgactgaagttttaactttcagataattataatatgtggatttaatatcttgtcgctctgccatcagatttaattatgtcactataaagaatgtgatttttgtagttatgctattccttaacatcttactatgtatcaaggtgctccatgtactattccttcatatcccatagaatggaggtggaacagatgttgccaattcatggcatatggacttattctttttattataatatatttccattgcagtataatggaagcttttacaataaagactttctcttcataacccaaataactggaccatgaagagacctactgtgtctggaatttattccttctggtgggttcttggtctcgctgacttcaagaatgaagctgtggaccctcgtggtgagtgttacagctcttaaagatggtgtgtccagagtttgttccttcagatgttcagatgtgtccagagtttcttccttctggtgggttcgtggtcttgctgatttcaggaatgaagccgcagccccttgtgcttagtgttaacagctttttggttgtggacccagagtgagtagcagcaagatttactgtg

SEQ ID NO: 225229 - DNA, 271 bp, Homo sapiens
ctttcttctgttctgctgcaagccactaatgcttctccatttacttcctgtcttctgaaaattcattaaaacttcttgtatgttgatgagggaaccgagatctgaagaagagaaatgacctatccaagttcccccagctggggccagttcttctgtttcacctagaattggatgttccaactcctggggatttttgtgccacgaagaaatgaagacaccagaaattcaagccaaaggcctggggcttccttggctcttctccactccacct

SEQ ID NO: 225230 - DNA, 634 bp, Homo sapiens
attattgaatttcataactacttatggaatgaatttacacttgataaggagtacttagaagaaaactttctgaatctgggtaattaagtgaaagtaaaaataaatagataagtaaataaaataagcacatagagtactttttaaaggcttatgtgtcctctcctcccagaaattgatattgagatattcctgtatcatctgaaagtgactattgttatttcttttagagaattaattttatttctatcaacacatatttattgaacatacgccatatgccttgaattgagagagatactgtgaagatacaaaaaagataaaggcttggaaaattgtggaggatgtaatagaaatttactgtttaaaaattgtttgtactcaagcctgtttagctcagttatttagggcttctaaacaatattcctttatttttgagaatttttggagaaaaagtgacaagccccaaatctggaaaagagtatgattgatttacaataggagacgtggaagtcataagcctctgaatttaaatattaaatgtagtatctctggcagatgaaactatagaggacttttatttagtcatatatttttagtgtttgagtcttatattacatttttaatcataaaaacc

SEQ ID NO: 225231 - DNA, 423 bp, Homo sapiens
ggaaaagtaacggcgttatccattcacatgaagcattcacatgcctcgggaagaacacaccataggcacacaggtattgattaccgccttgcttgtggtagctaaaaaagaaggaagtgacgtgactgtccctcagcaggggaagggttgaagaacggacagaacatgcatactgtgagatgctatgaagccaggccaccggagcaagctagagccaacccagtggcctggggagggccccaggtgcccctggcggggcggtttggtgtgaactgcagcgtgagcaggagctgggaagacagtcactcaggacgcatctgtgttaaggagagggaagagggcatgcggccaaaacagtggttttctgagcatgttgtgaatgttttcttaccctgaaataaaatttaaaaaagattggcagag

SEQ ID NO: 225232 - DNA, 439 bp, Homo sapiens
agagtcctggaaccagtcccccagaaacaccaagtgatgactgtatgtggaattgctgagtgaaccccatcagttttagattcttaccagtttagaatcagtttgagattctcaccatttgtgtatgagaattcctaacttggtagcgtcataatatatctttattctaattgctaatttatttgatttgttgtaagttagatagtagaaattatttgttcttaatttcagactctgtatacatttcttattcttcctttaataatgtatatgcaatacatttaatgccttaatattccttttggaggacagacctcttatcctctttggagagcaacacagttattacagatttaaaaatctttattactttttctgtttataaaagtaatatgtttttatttagaaattcaaataataaagaaatgaacaaaacaag

SEQ ID NO: 225233 - DNA, 494 bp, Homo sapiens
ctccacagtcttggtgccattatttaagaaacattagctgataatagcagtgttttctaacctactaataacagttatccttttttggtaattaccttattttagtaaaagtttggaagattaaaacagatacacatatgtttccaggcttagtgaaggggatgtaccaacttcaaagaattaaaaagaaatggctttttacctaaataaccttttgttgctggtagtatagcttgtgctaatttttgtaatgtttaagtaatgaaataattctacatatcaggtcctttttatttagaacatcgacttcctaatatcatccgaataaatactctggacatagtaggtgaaagtattttgttaacaacttctttctggccaagcatggtggctcatgcctgtggtcccaacactttgggaggctgaggtggggagatcacttgaacctatggatttgagaccagcctgggcagcatggcaaaacacttgtttct

SEQ ID NO: 225234 - DNA, 523 bp, Homo sapiens
agaatagaaccatgaacacaccagtacaccctccacccacattgcccatggtcagcagtttgctatttggtttttctctttctctctttttttttcttttttgtagcatgtgttagaatttccttaatttgtaaggctgaataatgtttccatgtgtgtatgtgtgtgtgtattcatttgtatacacacaacacattttgtttatcctttcatccatcaatggacacgggttgcttttaccttttggtcattgtaaataacgttgctatgcatatgggttcacaaatatctgttcatgttcctgttttcgattcttttggatgtatacccagaagtgaaattgctttttttttttttgagacagggtctcactctgtcacccaggctggagtgcagtggcacgatctcggctcactgcaatctccgcctcctgggttcaagtgattctccctcctcaacctcccacatagctgagattacaggtgcccgccatcacacccagctaatttcggaatttttagta

SEQ ID NO: 225235 - DNA, 388 bp, Homo sapiens
ctttctccttccctctcttctctttactgtgtttcttactgtctaaacccaaccagaagctagaaggcaaaggagcagggtagagaagggtgaaaagtggatctacaggagaaaacctaagtgtgcagtgccacttccatcattccttatgatgatataagttattacatttaattttaaaacattttttctaggtttttttcccctgtgaattaaaagggtcatgtacctgctatctgagtaatagctatacccactgtcacagtgccttaataatataaacccagaaacctttgcttttcttctgataactagatgtccagaatggaatgatgttacttaaacttttaaagtctgtggtacaataaaatattttaaacaaaatatc

SEQ ID NO: 225236 - DNA, 684 bp, Homo sapiens
ataatggaacactaggcataaatgggctaactccttcagctctgggctgagtttctcacaattactgcagatctccacatctgggcaggtcctgacaatagttaaagattttttttctcataatttgtcctgaaaggacatatattgagctattcaggagacttgagaaaagttccaagttaaataggataaagggcaatggatacacattttttgttcagaaatataaagattattcttagttagaggtgaatatgttccttcactgttctctgaattcattctgtcattctgctcctggacttcctacaatagtaccttgacttataaggcccgtgtccagatcttttacagtccacttcattcaaaatgctcctgaaaaattcaagggactcactaacacatggctttggtaaaggcattctcctgaacaaaaacctttctgacctcaaaatacacctagcaagggatttagtggtgataatctagctctcctaccttttcagccctggatctttatgctctttatcttgcaaaacatgctctaaattaaattaactgctacccatttgtatgccccgtgtttctacaacactatagtctctttatggttcaccttttctacccatccccaaagcccagatgaaatgccactttcatgaaactgttggatccatctatcct

SEQ ID NO: 225237 - DNA, 329 bp, Homo sapiens
acgccccccacaccccgcccgaccccagctgccgcaggagggccggctgatagaggtggtgcagacattggtcctcacagccgggcagccttgaggggaccacacaccgccccgcccagggcctccagcacctcggctcactgccccggttccagcaggaatgggggccacacaacccgagaaacacagaccacgccactgccgagctgcacgagcttcagctgcaacaaatcgccacagagcaggcagctgcaacatcagaaatggacgttctcacagctccaggtccaaagtggtttcactgggcacaataaaggtgtaaggtgtct

SEQ ID NO: 225238 - DNA, 383 bp, Homo sapiens
atacagtatacaatcgagccggtacccaggtctttccccttcaagagtggctggcaaccactaatctgcatgttgtctctatgaatttacctattctggatatttcatataaatagtatcatattctattgtaccttgtttctttttcttagcacaaattttctaggtgcatttatgttgtagcatatatcaattctttattcctttctatgtctgaataatattccattgtatggatataccacagtttacttacctgttcattcattgatcgacattttggctgttgctaccttttggctattttgaatagctgtcaatatgtgtacatgtatttgtttgactatctgtctacactttcaggtatatacccaggagtggaa

SEQ ID NO: 225239 - DNA, 243 bp, Homo sapiens
atcatgtgtgcatctgggtgggttgaataaattatggggctaaacaagggtcagtttccttcccttggatacaggggttactatgtcattcccctcagttgcataagatgcttgtttgcttaggttgcagttcactgtgactgactcgttttttttctttctaggttctgcaaattgtcctctgtttcacctctagtgatttccaggctaccctctatctctttctccttttttcaaatttga

SEQ ID NO: 225240 - DNA, 2701 bp, Homo sapiens
  misc_feature (2067)..(2067): n is a, c, g, or t
  misc_feature (2446)..(2446): n is a, c, g, or t
  misc_feature (2509)..(2509): n is a, c, g, or t
  misc_feature (2528)..(2528): n is a, c, g, or t
  misc_feature (2582)..(2582): n is a, c, g, or t
  misc_feature (2608)..(2608): n is a, c, g, or t
  misc_feature (2643)..(2643): n is a, c, g, or t
caaaatgataatgctcagaaaaaatacaaggtttttttcttggtctaaaatgttttactcatcaatattacatttgaagcaagcttttacatcaaaattgtgatgagtaaaacattttagaccaagaaaaaaaccttgtattttttctgagcattatcattttgtgaaagtatgaatgattaaggctgggactttaccaaattacacagttaacatgtatttgtgaaaacactgataaagaaaataaaccagaatataatctagtagaatataagttttagatggtcgaaaatttgtcctatttatttctctttttcctgtgactaatagccatacaataaatgtttattgaatataaacaaaagataattaaatgaataaactaaggaattgttttaaacttatgtttgtgtgtagttttacttaaaaactttttgtctaattagaataaaaactttaacactaaaataagtattaaatgactagtatatgtaccataaatctgtttcatttctttcttggtgaaatggttagcatatgtctgccaacctgttgctgcttagctttactgacaattatatacattataaaatacatattttgttttgcactgtttttatatatttttgtattcaattgggtatgcttattgttagaaaatcttaattttattttgtagtatcaattataaaatatgtaattcttcaaaaattatttttgtgccaaggtgtttttctccatacaaggtgagcagattaggtagcattcatacagctataaactttagcgttttatttgttataggtaaagttgtgttttgcaacaagaacatccatatcatatcacaaaattgtaagttaaatggtttgagtactttgaccaatgcttagttttatgtgaggattaagaggtaacagagagagtatgaaacaccattctcattgaagcagatgtcttttctctctcactggaaatttatattaaaatttaagcaaatcagtaggttcatgatttgccttgagcatctgtatatttttggttgtaacagaaatacttcattttaatgctcactactagatgtctattcagaatgcatatttcttaacaaactttaaaagaaatatgtagattaaaatgaattcccagtgctatgatatgtttgtaatacttcttcaggcagataggtttcaaagaaacatacaaggtacatgctcaagttgttactgacctatactatgcctgcctcctaataggttgtattttggctcctatgtttttgacaaatagctgagctctgtaaagctctgtttgtggtgctgaaacctctcatgatgtatgagcatgtctggctgataaattctaacgtcagcctctgtgtgatagtgattcatcgggttgtaaaatttgtgtttgagaaacacgttgaattagcaagtttcatattttggttgtgttaaaatcaactcaatttaccctcttgttttaagaaattcttaacaattgccttccacattgtcaaaaacagctaggatttaactggaaactgtccatgctatcacaaaataaatgtctaatattaacaaataaattgatatgactacagtgctggaaatgtttataggccagtgagatgttgatattatgcagaaagctattgtaagaaaagttaaaagttgcttatgagcagacacagtagcaattaacatgaaagctttgtaactttgagagataaacaatttgcctataaaaactgtggtattttattgtctcagaatgtttgctttgtacaaaaatacttctatttttgcaggactgtgggggtttgtttgtaaaaatgactgaaatcctcaaaaatcttaattctctttttttttaagtgaaatccgtatattccctatataagatttttaaatgactactaatgtacttggcacttcaattcaatgatttgtaatcttttaagctgtgggtttccagtgccttaaatatatttttagaggactggactaaaaaattaaattcttaattgtttcttttactttaaaatagtttcagaagcttttcctntagttaacatcattcctcttaaatttgtgtcaaactctgaaagtatctgaattgtgtcatttttatattggagtgagctaaataaaagaaatttcagaaagtcgaacctgttaaacttctactactaatgctatatgttttatggtgtaattttaaaatcttagtgttggactgaaacatgttgtttccttgccatgtttcaatatagtaaattattaagttatttgcttgttacttcagtgaagctccttaactgttttgaatcagagagagatttgaaaattatacctagagcataagtcataatgaaatttggcaatagtttctgcaaagcaagcagcctagacctggcgtggtggctcatgcctgtaatcccaanactttggggcaccgaggtgggcagatcatatgaggccaggagttcgagagcagcctggccaanatggcaaaactttttctcnactaaaaatacaaaaattagccggagatgtagtcacctgcctgtaatcccagcnactctggaggttgaggcaggagaatngcttgaacctgggaagcggagtctgcagtgagccnaggttttgccactgcactcctgcctgagcaacagagggagactccatctcaaaaaaaa

SEQ ID NO: 225241 - DNA, 942 bp, Homo sapiens
aactaacttttatcttccttttctcagactatcaatcagtattaaatagatggaaaaaaatcaaggactacttgaagctatttttgttaatattctggttactgaagtttattgtaaatatgtatgtatagtaggcatatttctttttaaccttgtgcttccctccttcccatggaatttcttcccacagatgaggggccactggacagggggatgagagccattcgtccctgggttgagggaattagtaagacatcattttcaccactgggtggtcttcatacacatgagttataatagcattttaagtatcttagcatttgtgggattagaaatctgtttttgctatttataatatataaaaaatgaaacatgatagcctttcttgagataagtatgtgaaatgtttatttttaaagttactaaatgcatcttgtcttgctactacatgcactgctctgaaaaagagcctttaccatctataacctgtattttgggtattcttccttttcatacttctttgaagttgtggaaatattaagtcttttgttaaggcagagtctctctctcctgttacacaacactgaacctcacgccactgcctcagtggttattggccagccccagaggttagacttggagcataattctgagtggcagctaaaggtagcaggagtcttacctctccctactttgggttcagaattgagccagagaaaggaagccattaaaatctccagaataatgatagttaatgagcaaatgttatgctttatatcccacagacatctgccaccttgttcatcttgtcctgaggagtaataaataatgttaagcttttaaaaatctgaatttcagagaatctcctagaggatagaggaaaacccctcagcatggtgtgttagagtgggattgctggttcctcagccccgtgccaggttg

SEQ ID NO: 225242 - DNA, 141 bp, Homo sapiens
tagaatacttaaatatttaatagaaaaaattcataaagttgaagagttccttttgtaaagcaagcataaatttaataataaaactttaaaaagctttgaaaacccattgataaattcacttggaaaaattaaagacaactc

SEQ ID NO: 225243 - DNA, 1159 bp, Homo sapiens
gcaagaaggctcccaccagatatggactcaacctgggacttttcagcctccataactgtaataaattcctttgtcagttacccagtttcaggtattctgttataggtaacagaaaacaaactaatacaagtggtaatgtgtccagctaaaaatttgggttctgttaaggttaaaagaaaatttgaggtagccagcagtatctgcctcagatgctgagaagcctcctgagataagagcgtataccatgtccataactgaagttttaacattctctgccaaacagaaccagaatttaagggcaggagaatttgcaagatagaatttgcaatttgcaagagggaattgcaatttgcaagagaggggcaatttgcaatttgcaagagagggcaatttgcaagagagaattgtggggccctgagagagaatacatccaaaggaagagggaaccaggcattacaaattgaattgaacaaggacagatatctgaagggggtttgtagttcccagtaaagtatggtacagctaggtgcacttccctggccagaccaccctacagtgtatgatccccctggggagcaaaaggctgcaggtaacactttggtgccctagaaattctgctgtggtgcaactatagtggatcacaggcagagtggggcattgttccccttcttagcacaggatactgggtcatttcaacaccacaaggatttgcagcatctgcggcaacgagtttggtgtcctggagcaaggaaaggaaccgttcatggtggctgaagccaagctgctcagcactgaggcagcaagccatgatctaggtcttcgagtagaattctcagttttggttcatttaaaaatgttttttgggggaattggggatcatttatgggtaccaaaagaaaaaaaaatgaataagatctactatttgatagcacaatagggtgactatagtcaataataacaattgtatattttaaaataaagaatgtaattgaaaagagtaaatgcctgaggggatggataccccattctctgtgatgtgcttatttcacattgcatgcctgtatcaaaatatctcatgtaccccataaatatatgcacctactatgtacccacaactatttaaaaaataataaaattttaaaaaattgtctttatgttg

SEQ ID NO: 225244 - DNA, 992 bp, Homo sapiens
ttcttcctgtaccagtgaggtagaaaacaccagaatagtgttgtaataaaagcatacacaccctgtggcagaggttccctggttgtcctccaaaatccattctcccttcttctgtagtgggaaggatttatgtggtctgtggccgcgcaggataagaactaacttcccagcttgcctttgcagccaagagaccaagttgtgttcagaaggatgtgagcaaaaatgttacgtaaaaccttagggtcatggctataatgccacctcttgctcttttcttcttctggaatgtggatgtggtggtgagtcagccactggaccttgtgaatgagggcaacaccaggatggcagagcagtaaaataaggagcaagggccctgacaccatggagctgacatattagccctggaatgcttacattggactgtaagagagaaataaacctaatcttatttaagccactgctattctggatcttgttacagcagctaaattaaaattataatacaattcccaaattgtgtatatttattcataaatcatatacctatattattgacacatttaggttaatgaaacaaaaaaaaaaggttattaaagagatttaagttattttgttcctatgacttagtagattgtccatctcatgagaaagagtactcaggttgaaccctactagtatattgagtgacagcatgagagggtgagatttggagttaaagacttgagtccctgtgacttacttgctgggggactgtggacaagttacttcacttggctaaacttgtttcttcagctgtaaaatgaggataccatctacctaagaggagagctgtgaaaataggtgagcacatatatgttatttagcatatttgccctcatatagtcaatgatagctattttttttcaaaatagcaatcagtagtttcagtgataatgactacagcctttcccactgccctttttttaaatattaaaaaatacttaaaaaataaa

SEQ ID NO: 225245 - DNA, 631 bp, Homo sapiens
caagtgttaggatttcagttgagagagactagagaatatggccggcaacttgctgtcctacaggtcatatatgttccttttgaatacagattctacaccctcctccatcctccctgcctctcaaaatttctttgtcttttacaggactatttctaggtcatgctacggttaccctgaccccagtcactccctatgctggtccatccaaactcagagccacgatcaaggcccttctacaacacagatgtgattacttcactctcttttgtggggtaaatataagccaagagccaagcaggtgcactgtggaggaagggagaatgcaagaagaaaaaaagaaagcccgccaggcgcggtggctcacgcctgcaatcccagcactttgggaggccaaggtgggcggatcatgaggtcaagagatcaagaccatcctggccaacatggtgaaaccccatctctactaaaaatacaaaaattagctgggtgtgatgccggtagtccttgtagcacctgtagctactcgggaggctgaggcaggagaatcacttgaacccgggggcagaggttgcagtgagccgagatcgctccactgcactctagcctggtgacagaggaagactccgtctcaaaa

SEQ ID NO: 225246 - DNA, 467 bp, Homo sapiens
taatgggcaccaagaaaggcttgttgcatgagcaaatattgaagagggaaggaagatcagggttttttttttaacaagcagtgtttagatatgttggttttgattgttctaagcagaatgtccaccactccctaagaaatacaaacctgttatgatacaaatgtgattctcctctagaagagataataggtaatgctattgtggataggaacccagaggacagaggtgtgtaaagaaggagctggaggcgtaggatgtcacatttaagttaatactgttagtcacttaaatataaattgtgtgcactgccaatagcctgagggcacttgaaaaaaagtataattttcgctgactaaatcctttgtttgttcaactaaattgtaggcacatcatggcactgaaaaaaaatcataaatttctaacttaggtggagacaataaatgaatccttttctgtggggtaactgc

SEQ ID NO: 225247 - DNA, 480 bp, Homo sapiens
actttctaagactaatgaaaggctaaatgttaggattatgggaggtaactgaattctgctaaaatgtagacagaaacaataaccagtgatttgtaatttctcagttgctcctgtagataacactactattgtgaaaacctaagattggtctttgaggtatttttcagacttttacaattgggcagagtcattcaggccacctggacgtcttcttcactggtaccagagaactggcactgcccggtcctgtgaccgtcacccagaaactgactcagctccaggaggcctgttttgaaccctcttatgattttctccacaactaatgagccacaccaattccctagccccttgctctccgaattatcctcaaaaccctagtctcccaacttttcgggcgacagatttgagaactaacttccccctctcccaacttgttccacttggctagccctgcgataattaaactctttgctgcaaaac

SEQ ID NO: 225248 - DNA, 418 bp, Homo sapiens
ctcgtggggactcacagtttctacttgcagcgcctccggcttagccagaacaagcgcttacactgtctgaatcagaccctttatggtccagtaaactgtgcttcccttgactacatgcagccccttagggggcccaggaagtcaggaggggtgtggatgatgacttggtgtgaatctcttcatcatccccactcctggagaagctgtcctgcccccagcagagaagcacactctcaccatggtctctgattttatttttatccatcaagaagagaatgcccatctcacttatttcttgacctccaaggtgcttctggtagggtgcgatgtgtattcacagtgaacacaatcggcagagggcaagatgccagcccactcttttgtgaaagggtctgaaatcatctcacggtcttcacag

SEQ ID NO: 225249 - DNA, 380 bp, Homo sapiens
aaccatagcacaggtgttttgtatataagaattttccttattgaaaatatgtggatattagatttaaaaagggcacaatgacttagcccactttgcttaagatcaatggccaaaatttataaatctatttcattcttataagaaggaaaaataattaacatgacatgttggatgtcattagaccttaacgggaaatcttccaaaagatttatacccataaatggagataattaaggtaaaagctgaaattattaaaataaaaagaaaagtagaaataatatgtataactaaagcctggttcactgagaagataaaaacatagactcactccaggggttgtttaagaaaaggagagagaaaacaggttgtacaatattagg

SEQ ID NO: 225250 - DNA, 552 bp, Homo sapiens
gaaatgtggctagcagtccaatcctgaagacaaagtatgatcaaagcaatagctaccaagaggtggaagtggaagtggtccagtcaaagcaaaagtggacctgtcaaaaacagggcaacagtttttggagatgcttgagggattttgcttgttcactttctggagggccaagtaatgataatagcttattatgagagtatttagagaaagttggccaaagctttagtagaaaaacacttgggaaagcttcaccagagagtccttctccaccgtgacagtgtctgttcatttgtctcatcaaacaagggcaattttgcaagagtgtccgtaggcatccaccttagagttcttatctggcttctttcttttgcttcctaatcttgaaaaaaatctctaaagagcacccatgtttcttcagttaataatggaaaaatgggtgagcgtgggggatgtggctgggtgggtgccggggcttcacctccaaggcagtggccggatcatgattgaggtgattgagcccctggagcctctagtgcctgtggattttggcag

SEQ ID NO: 225251 - DNA, 337 bp, Homo sapiens
atatcagaccagtttttccagggggccttattagcattcatttgttaaagtcaaccttagtttcttaaagctgaccatcatatctaattttgcacatcatactcactaatggtttccagattctggaggaatcaagtagagagaaaaagtaattatttcaattttatttataaaaatataatctaggccaggcatggtggcttatgcctgtaatctcagcatttttggagtccaacgcaagtggatagcttgagcctaagagttcaaggctgcagtgagctatgatcacaccgctgcactcttgccttattgatggagagagatgctgtctctttgt

SEQ ID NO: 225252 - DNA, 230 bp, Homo sapiens
tggtctgggggttcgggaggtagtctccaggcctgtggttggagcttgcaggtaggtgccagcttttgaggcagtggcagggagataaggcccaacctcagaccccctggaggagtgcttatgtacccaaagaagtggattggtttgggcagtcccaaggaccctgggttatgagttctgtctttgggggttgaaggcagaactaggctgggtgggcttgttctcaggct

SEQ ID NO: 225253 - DNA, 570 bp, Homo sapiens
agcccagtcatatatctgtgaagtgactatattaactataaactatgacaaatgtgagtgcatatattataatcctaaagcaggtgggttattacctatagcatgagctgtaaccatctagttaaatgagatcatcacagctctctctgccagcaatttcctgtttccaatggaagacaaggataccaaaacgtctctttcgttttcagtccattactagattcctctggaaacaatcatcatctttattttatgggttaaggtaatgttaatgtcacttagaattctgggtgagatatgataaaatgagtatgtgacctggattaaaacatactattaccagaccacaaagcgagtccaagtctttggaagccaacacagttctaagactatcatagaagagaactaaggtcccgtagcctccaaggttgtgtacgtctgtattcccccacccccttttttgtaaaggccagtatattaattcgttctgggaaccaagactccaaatatttcctctcagcctcagcctgcccttccattagtgaaaaataaagatttctgcacattcta

SEQ ID NO: 225254 - DNA, 475 bp, Homo sapiens
caagtaggtcattgggagaattaacagggtcattggcagaattaaacaagacaatgaatagaaggtactctgcgtaatgtttttaaaaaagtaagaaatactgaaaaccggccaggcgcggtggctcacgtggcaatccaatgtatgaaaaacgaaacaatgtaatacaatacaccaaaagcaaattacagaattgaatgggaaacaatttcacaacaaagcttctaaaaataatacaggagaatatcctcatgtctttgaagtaggaaaatattttttaaataggccactaaaaaggaagaaaaatactgacaacctgaaccattaaaattagaaatttgtttataaaaagacaccattaagaaaggaaaaaggcatgcctgtggtcccagttatgcaggagctaaaattggagaatcacttgagcccatgagctcaagtccagcctgggcaacacagagtgatcctgtccctt

SEQ ID NO: 225255 - DNA, 476 bp, Homo sapiens
agatgagatcattttgtctgtactgttttgtgcaacacaatttgtttttcattttcacttctttatatacatgtcattgaatattttgcagcatcatttttcatagctatattatatttctttcatggatatgtcatattagggatggggtaaatcatctgatgaatatttaggtttacttcagattgcttgatctgatgaaaaattatgtaacaaaatttccttttattatttctttggcgtaactttctaggtgggaattcctagctgaaagtgtgtatattcttccttaacgagtttgtagaatacttattaaggaactgctgtgtattggacactgtgggaatacagtattgaatggagcagatgcagtccctaccctcaaagacagacagcctgtttggggagatggacgagtactaaggcagctgtgatgctgtgagatagctgtgttgacagtgttataggggggtaca

SEQ ID NO: 225256 - DNA, 496 bp, Homo sapiens
agaagcccagggcagctctttcctttcttggtttttagttcaataaaactatatctgctattgaggtcatgctggcttccttctcttacctagtccactccttgagaattataatatctattatttttaaagttatctcttcccaagactctaatatcttggcttttttttaactgaaatataatttacaattaatgcacagattttaaatatactgtttgctgggttttgacacttgtatgtaccagtataaccactacccaaatcaagatatagaacttttccatcaccttaaaacgtttcatcattaacgctcaagaataagtgatactaatctatggtgatagaaatcagaagagtggttgcctctcaggacagagaattgaatggaaaagatagaaatcaaccagcagtaatatttaattttttttttgagacagggtcttgcactccagcctgggcaacagagcaagactccgtctcaaaaaaaaggaga

SEQ ID NO: 225257 - DNA, 687 bp, Homo sapiens
agaagcccagggcagctctttcctttcttggtttttagttcaataaaactatatctgctattgaggtcatgctggcttccttctcttacctagtccactccttgagaattataatatctattatttttaaagttatctcttcccaagactctaatatcttggcttttttttaactgaaatataatttacaattaatgcacagattttaaatatactgtttgctgggttttgacacttgtatgtaccagtataaccactacccaaatcaagatatagaacttttccatcaccttaaaacgtttcatcattaacgctcaagaataagtgatactaatctatggtgatagaaatcagaagagtggttgcctctcaggacagagaattgaatggaaaagatagaaatcaaccagcagtaatatttaattttttttttgagacagggtcttgctctttcgcccaggttggagtgcagtgatgtagtcatggctcactgcggcctcaacctcccaggctcaagtgatcctactacctcagtgtcccaagtagctgggagtacaggcacaagccaccacacccagctaatttttggagtttttctagagatggggtttcaccacgttgcccaggctggtctcgaactcctgggctcaaacagtcctcctgccttggcctcccaaaatgttgaga

SEQ ID NO: 225258 - DNA, 704 bp, Homo sapiens
tctgtgcctgaagccaccaaggtttccaaagcggctggaatcccggtgggggctcaccacctctccaaacctcttgctggcctctggcttggctttggagtggaagcaaaagactgagagtccgggattttctccctccgtttctgagacagcaggatgtactaaaaaagcactgactggtccagtagaagaccgaggtccaaacccagactctgtcaccaactcacagtgaccctggggaaatcttttcttacctttgaacctcgatttcctcatctttaaaacggggacagtggtctgtgccacgtgacgcccatctcacagggatgctcaaataatcaaaagagatcgtgcaagcctcagggctttgtgaacgctaaactgtgagaacgtgagggattttacctccgaggtaaccgggtctgaagctattacagtaattcactggcggggaaggagatgcgctgagcattgcctgggagtaagcagtcctggcctcagttgcatccccaagtctaaggcgggtgcaccggagaaagggaacaaactcaagtcacagaggtgtgtgtgtcggggtgagggatccccgggatggaagcctccctcgcgccctcggagagtcccagagggttgggcggaggcgcgcggagacgacaacactgtccccgcggtcgcgcgcaccgggcgcgcggaggcttccccga

SEQ ID NO: 225259 - DNA, 117 bp, Homo sapiens
aacaatgtgggaggtagatctgggaatctagaaatctgtgttgtccaataaaatatagctcctctcagaagggttttaacaacatagaaagtacgaatttatccagaatggtgacat

SEQ ID NO: 225260 - DNA, 355 bp, Homo sapiens
cagctggagtgagtgtagccggtgctaacctactgcacttggaagtcatctttaaatattgttcttgtgggctgagtgtggtagctcctgcctgtaatcccagcactttgggaggccaagatggtaggattgcttgagctcaggagttggagaccagcctgggcaacatagtggaaccctgtctctaaaaaaaaaaaaaatacaaaaattacctgggcgtggtggcgcacacctgtgatcccagctagttggaaggctgaggtgggagcatggcttgaatccagaaggcaaaggttgcagtgagctgagatcacaccaccacactccagcctgggtgacagagccagactgtctc

SEQ ID NO: 225261 - DNA, 357 bp, Homo sapiens
gggtcaggaagacattctcttatattttcctgagcataaagttttacacatttaagtttatcataagagcaggccacctgggttcgaatcgtgaccctgctgctgcaaagccgtgcctttccttcgtgtgtctcgcgtgggtgataacagcaccttccctagagggctattgtggggattcaccgctgtgcagagagtgcttcggaccctccagcagcacagtcagggctgtgtcagtgttactaattgtcgctgtttgtgtactgataatgagatcagaatccagtttttctttttgcctggcagcatggacaactgtcctggtatcatagactgaataaagtttccttcttcagc

SEQ ID NO: 225262 - DNA, 603 bp, Homo sapiens
gtggaattatcacaataatgtatattttaaaatgcttttgtagttatgcctcagaataggcagatagatactgcctattcatatttgaacttctgtcctgtgaagagctagccccagaagggatcttttgcttttgattatttagcctatatttaagaggtttcttttctcttgaattgttatccccagctacttgttcagagatgtttgtaaatgaagggagtgagtgggaggaaaagcttatgttacttgtagaccagagaatagtatagcagctagaagtggtgtttgtctgtaggctacccttagttgatttgtgttgtcatgcaagaaacattttgatgcatttatttcaggacacggcattttggagacttcattaaatgctacctgttgctgtttgtgatggaatctagtctagaatgttaagaggcagtagaaaaagctgaaatggcaagaagatggcactcttcagtctttaagattcacctgtttgcattttagaaacacattaccattctttttgcttctcttaaaattggagctatttggattaaaattaaatttatcattatgatgtgacctacttggtgtcagttattt

SEQ ID NO: 225263 - DNA, 248 bp, Homo sapiens
agatgaacgtgatataaatgtcactattagagtcatcagataattcttatttttcttaaaagttatggatcaaattgttgagaaatatttattctctgatgagagctcaggaggtgttgtgcattatgtagtataaaggaggtgaccaggtaagtgacagataggtagactcagcttctctgcttctcataggactacctctacccacctctagttagcattatcaactcctcctgagctctcatcag

SEQ ID NO: 225264 - DNA, 287 bp, Homo sapiens
caagaggaactcagaaaaaggagtttgtaggcagcaaaatcttccatgcagtgaaagaacgtggtatgtaataaagccttcaactaggaaatgtttccttacttttcagggctgtttatctcctataacctataggagcatcagcatttaagaatctttgccagacacagtgactcatgcctaaaatctcagcactttgggaggccgagacgggtggatcacctgaggtcaggagttcaagaccagcctggccaacatggtgaaacaccatctctactaaaaataca

SEQ ID NO: 225265 - DNA, 422 bp, Homo sapiens
ggtgaagtattacagtcatcattacaactcgtcattgtggagagacatgggaaaatataatattgcattcagtgaaaaggctggaatacaaacttgtgcttaggttctgtaattctataagattgtgtaatacgggccgggcagagtggcttatgcctgtaatcctagcactttgggaggctgaggcgggaggattgcatgagcctaggattttgagaccagcctgggcaacatggtgaaaccccgtctctacaaaaaatacaaaaattagcctggtgtggtggcgcatggctgtagtcccagctactcgggaggctgaggtgggagaatcacctaagcccagggaggtcaaggctgtagtgagttgcagttgcaccactgcattccagcctgggtgacagagtgagaccctgtctcaaaaa

SEQ ID NO: 225266 - DNA, 407 bp, Homo sapiens
tctagggcccaggtcatttgaaataaaatattgagataaatctaattattgtttaagacaatatccagttaaaacaacctaagaagtatcactgatgagagtcaaagaacattttactgtggttgagttgaacaggtcagcaaaacttgtaggaggatgagaaagtttgatatacgctaaaggtagaaatagaagttaatgacaacactgccatgtaaatgggtgtttttttcttctttaagaaaagccccccaaatatcaaagctgaggtttcttttagtatgttttatgcacagtttgagtggagagaacctgttgtcaaatggcttgggtaaattcttgagctcagtattacaaagtgcatggaaatttcgttctttatagacatgtttaaccactgtggcaaa

SEQ ID NO: 225267 - DNA, 352 bp, Homo sapiens
gttaccagaggctaggaagagtaggagaagagtcgggggtacgtgggtgtggttgatgagtacaaacaatagttagaaaggatgaataagatatagtatttgctagcacaacagagtgactatagtcaaaaataattttattgtacatttttaaataattaaaagagtatacttgggttgtttgtaacacaaaaaataaatgcttgaggtgatggataccccttttgccctgatgtgattattatgcattacatgcctgtatcaaaatattacatgtaccccataaatatatacatctactatgtacccacaaaaattaaaaattaaaaaattaatctccagctttggagtc

SEQ ID NO: 225268 - DNA, 839 bp, Homo sapiens
aacaaattttattttctaatacttacaggcttatagaaaagttgcaaaggtagtacttcctgtgctaccttttccctgttgctagcatcttatgttattatggtacatttgtcacaaccaataaaccaacgttgatacattattattagctaaagtccatactttattcaggtgttcttagtttttacttatatctgttttttgttccagaatcccatccaagataccacattacacttagtcatcatatctctggctcctcgtggcaatgacatttctcaggtttttcttgtttttgatgcccttggctgttttgaggagtactggtcaggtattttgtagactgtctctctattggaatttgtctttttttttttttttttttaatgattagactggggttatctcatatgtatgcatttggcccaggaaaaatttataatctccaggctctgggcctgtagtgcctaatggacaaagtagcctgtgtgcacacaaatatatccagaattggaagaaagtgtatgtctgcttttataggctatacatatcctacaatgtatcgtctatacctggtgccatgttttgccagtctttcgtatgtgtgtgtgtgcccaaggagtgtccctcggcctttgagaaggctacgaagtctccgggttatatgaatatgccatgttcatatagtcccttgcaaggagacatgtagattgtagttatttttgctattgcagacagtgcttcacattttgtgcacaagtttgcgtctctctgaaggaaattgctaggaaggggcctgctggtctgagcatgcccatttcacatgttgatgagcactg

SEQ ID NO: 225269 - DNA, 507 bp, Homo sapiens
caataaaggactcctgaagtagtctcggagtgtggtgtttctctataactctctcggttatgacactttggaggccccagcgagatccgccaccgggtgagggccggactcgttccgggctcccccggagcaacggcgggcttacagggtaggcgccacctaaagatgctccagggccccgtaggccaccgtcttccagaggggaacggatcaactgctggtgtgcccaaccaaattcaactcctgagtcctcagtctccggtcccgggaaggtaagtcagatctgactctgtctccctgggagggaaatggctctgactaggtttctccctcagactctgtccacactctaggatgctggaggacagcgtcctggtttctgtcagtcttctctgttaagtctagtctctctctatctcttctccttctctcgttcaggtctctaggagacctcggttttaaacgggtataaaaaattgtaataaactctgtgagtgagtgagtaca

SEQ ID NO: 225270 - DNA, 567 bp, Homo sapiens
aggggtgaacatatcaaaacaggaaaaatgtgagtgtgaaaagaggttctgttgattacattgactgtcaaggtaagaagtgggagttttccagctaaaaggacagtccccgtccaattggatcatttggtcacactgtcatgacagacctgaagccaataacaattttgataattgtcctaggggctggtgtaggaagaactgggaggttttcttggatagagtccccttgcctaaacagatgctgtaattgtcacaaaaccatctctgcatgcttgttgttttgtgctgtctctggtctccttttggagggaagaactgcatgtgttaagatccaagggcagagaacctggtctacttgcatctctttgtctctccctgtggtttcttttcactgcacatatttgacaatttgatcccctgtctatgtggtatcttttgttaggtcttagtcaattttagcttttttccattttaacaacttcaaaaggcttagaattgtacctgaggtttccaccttgccagaatttctagtttagggcccactatttatctttttctttttat

SEQ ID NO: 225271 - DNA, 586 bp, Homo sapiens
ctgaatgcgggacttcatcaaactgggttccaggctgggaggtctctgaacccaatttctagacagcctgctttggagttcaactgatgggaccttagacaccagccttaccctctgcaagtcttgtgatttggagccagatacttggcctctctgtgctccagggagacaccactgcacctacctgagaggactgaaggagaggatctgtgcaactcactcaggatactggatcttaagccaatgggtggacttacattcgtcacctctgattctgtctcctcctgcgcggtgacttagcaaacacttcttcctctccagctctgcttcttactctccagctctgctgccctgttccagtgctgacgccagacaacagataatttcccaaatgcttgtattagcccttaggagttcatgtgttcctcccccagccaataaagctgttaaatcccaataactgtcaggaatggagccaattgctataaagtacttccagcttcttggcatgaagaaataattagaatatatgtgttggctttgaaacaacactcactggttcattaaaaaattctgtgcatattgt

SEQ ID NO: 225272 - DNA, 884 bp, Homo sapiens
gtgccctcacatgaggctctcgcattccacgcccggctccacgccagcgagccgggagtaggaaaagtaggaaagaaatgaaaggatattcacggtacattttaccacttgacactaatgatcaaggtccagtcattaggtcacacagccctacatttgaatttcttctatttcttttatcatctgtgttcttcagcaaatgacttgaagataacaatcttgtatcatgaacaatataataccagttgtcttattgtgtgcctggttattactatatctacttgctttgtagaaagaaatgtataaaacagaaatatctctcaagcaatgtaacctcttaacctctatcttcttatgcaggggataatttatggtttcattagccaatcattaaacaaacaacatttctaagggcctactttggactcccatagtactagtcactcaagatatagatacgaataaaatgcatccaagcatttaagagttccttatcaaggacgaaagacatatatacagtgaggagagacaacacaattttgggagctcagaacagaggtaccacagcatggaaagtcaagaagatgttttcaaacatttgacatctactcagctgagctgggtttgaaagatacattgaaattttctagcttcttgtgggaaagagtataagattaatatgagtaaacttgaagaagtgagaagaagtctgaaattccaagtacatcagttgtacttcatagtaaattaggtttcacagagaggtaagaaaataattgctacattgtttggcttttgggagagaacattccaagaatgagtacatagctcaaaaacgtaattacatatttaaaaggaaaataaaataagagatttttattatg

SEQ ID NO: 225273 - DNA, 327 bp, Homo sapiens
caaattttagaatcatggcacgtagttgaatggtaatgtggatattatcacttaagaggtgatatggataaggtgcaatgaatgtcttttcatttttcactgaggtgaaaatgaaatttcaccataaaatgaaattttatgatactgtgaggacagtatcataaaacctctagatgttcagaaactggccttctaaactgttaaagcgtcgcacatagtagtaggtcctcaagggaggcctttccacagggaaaaaaagtgaaatcataaagtttccacaagaggacacttggtggtgttttggagaactgatacaatgttaataga

SEQ ID NO: 225274 - DNA, 856 bp, Homo sapiens
taagcaaagggtattttatttaatattaggttatgtgtgtgcatgttgtgtgtacctgtgtgcatgtatgtgtgtttctctactgagcctggggtctctagccagggagaccccatcttattcaccatgtccaagatcctgggatctgggcccagcatctcttcctcctttgtagatgctggagcccagccaaggtctgggagctatatgggaagtgggggctgggatctgggtgggaatatgtgtttgtatacaaaggggccctccttaaaagggacaggatgaccttcccgaggaactcattggcctggggtagtttaagaagtaatgttctttctttctttctcttttccctacctcctgctaacccaaccagagatccccttccttgctgagagggttgggggcaggaggagatttggcagtgcctgcaggttgcctggccaggtggagagggggaaagaggaagggcaccgtgggtgtaagatgcctttctcctccacccatcgaaaccagccaccccttccctgtgccaccaagacagccttttccagtggccatcctaaggggaactcccaaatgggtgttgctggtggacacagatgctccccccaatggaagccccaagctctgaggtatgcgggtagaggctttggataggttttcttctgctcccctcttttatagatctaggctgcttggctgcctgtctttctaggcagtccccctagaggaaaaatgtaggaatttattttttctttaactgctgtgaactcactttgagggggtaggaggagggagaaacagcctgtgttttttatgcaataaagtcatcaactacatcatgaaaactttg

SEQ ID NO: 225275 - DNA, 375 bp, Homo sapiens
agccctcccaagcctgtcttcttgggtctctatggaggcttctttatgtcagcatttctgcccccagggtatggggtggagccttctctggaataagggtcttatgacccaagatcagattagggtcctgccttgggcaggtgaaaggaggcaggaaaaggtcagagagattttgtttcccgaggtttaacactcgcaacgttctttttttagttattctttttatttattttttaccttttcagtggtgctggcactcccaacattgtaacaaaagactaacaagggctctgggagttatgagataggaaccatggatcacacacacacacagccatggataacatggctaaaccccatctgtccaaaaaaaaa

SEQ ID NO: 225276 - DNA, 333 bp, Homo sapiens
tgatttcccttttgatttcccttcgatccacacgtttgaatttggtatttagttttcaaatattttgagattttccagagatctgctcttgatttctaatttaattccattgtagacctagaacatactttgtataacttgaatcctttgaagtttgagaggtgttttcttaatggcctagaacaagggtgtccaatcgtttggcttccctgggcctcgttggaagaattgtcttgggccacacataagatacactaacactaacgatagctgatgagctaaaaacaaagacaaaaacaaataaaaaaactcataatgttttaagaaagttta

SEQ ID NO: 225277 - DNA, 748 bp, Homo sapiens
ttacaggcatgggccactgtgctcagcctattttttactttttttagagatggggtcttgctgtgttacccaggctggagtgtagtggcatgatcatagctcactacagccttgaactcctcttgccattttttttatccttaaaatttccatgtctcactctcttgccaactgttctctctcatttggtcccttgattcactctaaactcaaaccctgataaagcagctgatcggtgaagtgtctgttgttactaaagtagaagttagaggcagaacagtggcagagagccctggaatctggcccttggtaggtgctccacaaatgtttgttgaacaaatgaataagtggagccaggttgtctatgccctagtcccagctctctcacatgcgctagtgagagatatatacatgtataaaaaaaaatctccctgtgcctcagtttcctcatctgtaaaatggggaagatcattataggcttgtaaatgaaatgaattaatacttataaaatgcttaaattagtcctggatcaaagtaagctttcaataaattgtaagctcttatgttcaagctctcagaaccagaatactcgagatgcagacaaaacattacctctcttaagaggtttgttggggaaagtatagctggagttaaaaatttaacctcttagataagtcactgttcaagctactggttttcatctccaccattccacctaaattgccaccaccttgctgaattagacaca

SEQ ID NO: 225278 - DNA, 510 bp, Homo sapiens
atgactttgtgatctgggatgatttatttggttctttgaagccctcattttctcttttgtaaagttcaggtaatagtacttcatagagttgattggaggactaaatgagataaggtaaaacactttacacttaatagtatcccctcaaacttggagaaaagctagaggatcagtcttaggttaaggtggacattttaatagcctcactggaaaaagagaaaaattaatcaagtaagtgtgagagacctcagcaactagactagagcaatctggagtcattaacacttggaaaatgtctttttatatccctcacttcctgctgagacttttgatctctctctttggattctcttcctctatatcataagagctggagtttcccaaagattcttcctctgccccgttcacattatattcatttttaactgccactactttgccagtcagtgagatattaccctaacttacaagcaaattctggccatgctaaccagtttaaaattataattt

SEQ ID NO: 225279 - DNA, 447 bp, Homo sapiens
gaggcttgcttgcctactccttctctctttccagagggaaaccttgtggtggttcctcactgtctattcattatgcaaggaaatgagggcttttaagggttcctcagatttttctccaccaaagagtgctttcacaagttattgaggcgtttgtttccattttaaagtaaacttttggaattttttttctccttttgagtggacctgaagggttttgacctccttcaggaaaggcaaggcaaaaaccttaaaacagttccactgaggtcttcacacaactttaagctgctccaggtctcctgaaagtcaccaggaaatgtgatttcctccttgtgaagatggtgatggccctaagctgagatttttttgagttctagggtttggttatcatcatgttttgatgcattgcaagactttattgtctgatttgagttgatttctgcaaat

SEQ ID NO: 225280 - DNA, 415 bp, Homo sapiens
cagatgcaggaaaaattctctaccctttcttttgtgcctaaaagcaatacataaacttgtctttgtgaaaatgacatgagtttttccctctcctgaaccaggatgaagagagctacccttatcaccacatatggagagccagcaccaagatgagtcagtataaaaagaccttactaaaataacccttactttcagtagtttcctgatatatttgctagtcactttcccacaagttatcacccctagaagcctaaaacccttctcctttgtctagtcacttctttaaaatttattgccttttgttaaaatggtatgtaatctcttaagcctaactgcttctttgtttttttttatttttttacttctttttttttatgaagcccttgtgcacacaaaattaaaaatattaatacta

SEQ ID NO: 225281 - DNA, 1719 bp, Homo sapiens
cccttgcgtggcgcgtcggtctcagagtcgcgtgacttcaaccccctcttcgggaggctgggtcgtcatgatccggaccccattgtcggcctctgcccatcgcctgctcctcccaggctcccgcggccgacccccgcgcaacatgcagcccacgggccgcgagggttcccgcgcgctcagccggcggtatctgcggcgtctgctgctcctgctactgctgctgctgctgcggcagcccgtaacccgcgcggagaccacgccgggcgcccccagagccctctccacgctgggctcccccagcctcttcaccacgccgggtgtccccagcgccctcactaccccaggcctcactacgccaggcacccccaaaaccctggaccttcggggtcgcgcgcaggccctgatgcggagtttcccactcgtggacggccacaatgacctgccccaggtcctgagacagcgttacaagaatgtgcttcaggatgttaacctgcgaaatttcagccatggtcagaccagcctggacaggcttagagacggcctcgtgggtgcccagttctggtcagcctccgtctcatgccagtcccaggaccagactgccgtgcgcctcgccctggagcagattgacctcattcaccgcatgtgtgcctcctactctgaactcgagcttgtgacctcagctgaaggtctgaacagctctcaaaagctggcctgcctcattggcgtggagggtggtcactcactggacagcagcctctctgtgctgcgcagtttctatgtgctgggggtgcgctacctgacacttaccttcacctgcagtacaccatgggcagagagttccaccaagttcagacaccacatgtacaccaacgtcagcggattgacaagctttggtgagaaagtagtagaggagttgaaccgcctgggcatgatgatagatttgtcctatgcatcggacaccttgataagaagggtcctggaagtgtctcaggctcctgtgatcttctcccactcagctgccagagctgtgtgtgacaatttgttgaatgttcccgatgatatcctgcagcttctgaagaagaacggtggcatcgtgatggtgacactgtccatgggggtgctgcagtgcaacctgcttgctaacgtgtccactgtggcagatcactttgaccacatcagggcagtcattggatctgagttcatcgggattggtggaaattatgacgggactggccggttccctcaggggctggaggatgtgtccacatacccagtcctgatagaggagttgctgagtcgtagctggagcgaggaagagcttcaaggtgtccttcgtggaaacctgctgcgggtcttcagacaagtggaaaaggtgagagaggagagcagggcgcagagccccgtggaggctgagtttccatatgggcaactgagcacatcctgccactcccacctcgtgcctcagaatggacaccaggctactcatctggaggtgaccaagcagccaaccaatcgggtcccctggaggtcctcaaatgcctccccataccttgttccaggccttgtggctgctgccaccatcccaaccttcacccagtggctctgctgacacagtcggtccccgcagaggtcactgtggcaaagcctcacaaagccccctctcctagttcattcacaagcatatgctgagaataaacatgttacacatggaaaaaggtg

SEQ ID NO: 225282 - DNA, 512 bp, Homo sapiens
gttaagtacattgaaattacatggcttttaagaatatctttggtgtgcagcttgactgctgatagaagcatgtgctgtagtgtaatttaaaggaagagatgattttctctacccaagaacagcagcctggtcttaatattctatgttcagagagatacattactttaggttaagaattaacacctgttactttgtccttctttgtggctggaaattgaaacagcaacaccttgatgtgaattaggacatgaaggtgatgggacaggattaagtactgcagcaaaagggcttgctgaaggaagggccaaaagggaggatgatgtattcagaaagctgactttgcctttttaccattttgcctcacactaatcccaaatacaaaatatttactctctgtgtgaaatcttcatacatttgtagtcttcctgcatttttattcctaatagacttagatacataaagcccaatttgaataggcaatgattaaagactcaataattaaaaacagaagt

SEQ ID NO: 225283 - DNA, 452 bp, Homo sapiens
gagttggagaccattattctaaatgaagtaattcagaaatggaaaaccaaatatcgtatgttctcacttataactggaagctaaggtatgaggatacaaaggcataagaatgatataatggactttggggactcaaggggaagggtaggaggcaggtgagggataaaagactacccatcggtatgtggtcaagtgatcttcaacaagggtgccaagaatacacaatgggggaaggatagactcttcaacaaatgttgtaaaagctagttatccacaagcaaaaaaaattaaaagtagaatcttatctcacaaacaaaaatcaactcaaaatgtattagtgatttatacataagacctgtaactgtaaaactcctagaagtcaacctatgagggaatcttcatgacattgggcttgggaatgatttcttgaatatgacaccaaaagcacaggc

SEQ ID NO: 225284 - DNA, 409 bp, Homo sapiens
aagtgaagttgggaaacagagccaagtgacaagctgtgaagtaacagctcagccttcacaaagcaaatgtgctttgtgcacttccttgccagagcagatgtggccttggtggactgtggggagcatcatctctcaggtaaaaataaattactaagattaggaccaaatgatgcaaatcctttcatttgcaaacagatcatgaactggcagccatgtggaaagaagactagactgcgaatcacttaggatcccaccctcggtttagtctagaatactctgcgaatcagctttttggccctaggtgagtgattttaaaagacattaaatgtgcaaatgcataaaatgaactcacgtagttcatggacacaggtgacataggaagttaatcaacaaaaaaatagaatgaaat

SEQ ID NO: 225285 - DNA, 299 bp, Homo sapiens
atgtaaggtattgactgctctttagccaggccatttctcaggattgtctttgcagcaagcaactttgagctgtgaagtaatatctccctgggttaaaaagcaagctcacttactgctttctataaaatgtgggttccccaaactcagtgctattgtcatgtaacacatttaccacatgtgtagaccttcatctgggcctttgtgttgtccctgttggactcagggagcaagagctgatgcaaaagttaatgctcatgctgcttgctgtgtgatgaataataaagttcattgtctctgac

SEQ ID NO: 225286 - DNA, 439 bp, Homo sapiens
ataagaccggaaggtgagagctccctggtctgccctttttttcctggaggctggggcttgcctggccaaggtcgcccttcatgagagggaatcagaactttgtgtggatgcctaaccccgccggggcagcgctggagagaatcactgctgaggctttcctgccggctgcagtgactgcccctttagggtccctgcaaaaacaccacccctgcaaggaatccaccgtgtcctgcttgccagcctaggtttactgatcatctggtgattccagagaaaacaatctacagtggaatgaccaagttctagaaagaggaaaacacaaacaatctgtggaaagtccgtttgtcgtctagatttttaaaagatacacattttcccttcttgttatattgagtagtgcatgaagccgatataatagatgtacaatcacactatagct

SEQ ID NO: 225287 - DNA, 1114 bp, Homo sapiens
gatctccaagctctacgaatatacgcataggatcctgccctcttcgaaaaaggaggaatgtgtattcacgttttctcgtttgcgcgtttcaggttctctggagggatagacactgaacggatgatggtagttgtctatggggtgagggaacaggtttatgaggaaggcatttctgcatctctttttatgcttttgaattttttaatcatgtgatattaaacatagttaagaacttttattataaagaattgaaagaggccgggcgtggtggctcacgtctgtaatcccattactttgggaggttgaggctggcagattgcttgaggccaggagttcgagaccagcatggccaacgtggcgagaccctgtctctactaaaagtaacaaaaattagctgggcctggtggcgagcgcctgtaggcccagttactcgggaggctgaggcggacgcagaggttgcagtgagccgagattgtgccactgcattccagcctaggtgacagagtaagaccctgtctcaaaaaagaaaaagaaaaaagaaaaaaaagaaaagagaaattaattatgaagaggtcttagaaaataaatctccaaacccacttatagtcacagataataattgggcgtacaggtatatgtctttccagtcattctttctgtgcattttatagctgtttgcgtggcttttatgccattcgagtcacgttggacaagcagttttgagccctgcatgattatataatgggcgcttccccaggtcattggaatgacttgtgggtgtcttgatcagtgtgtggttttctgtcgcatgaacagattgtggttcatgggcctgtttctgtactgttgtgcgttgaaggggtttccatggattcacacactggcgtgtgtctgatgcgccacccaacctgcatgggcaggaggaggtctctttgcctggggtcagggtgggggtgccctgttctccctctagtgggcgagacggggtctgctgggctgagtgagaggccgccctgaattcctcggtgtggatttcaggaagtggcatgacttgttctaactgaacgtttatttgatacgcccttggtacatgtgttttccagaagtgtaatac

SEQ ID NO: 225288 - DNA, 270 bp, Homo sapiens
ttgatcccacccccatggcgcccagcaaggttttgagcaccttttggattaatgccagaagaaatccttcaaaagtcaaagctccattccactctctggcttccgtggaggaagggctgaactgtgcctagttattttgaggtttgggacaaaccaaagaattgagcatagtggtgaatcgttttgaaatgagagacctagccaaggatatgttcacttagtaagaggtcacatcttctgcaaaataaaaaaatcaatcaaaaaaaaaaa

SEQ ID NO: 225289 - DNA, 196 bp, Homo sapiens
aacataacctctatttcacaaaaaagaaagctaacacttaaagaagtaacttgcccaagatcacacactaccaaagtggttaagttagggttagaacccatgcagcccaattccaaagaccccattctaatcaccatgctatcagcaatccctacccatggcacctaaaacagttcaaaacctttcccttgtctca

SEQ ID NO: 225290 - DNA, 401 bp, Homo sapiens
taaagatatgtttaacctctctgatactgacttgctcatgagaagaaagagagagggccaggcatcttgcccactactacccactatcaacacttaggcctgacatcagtctctcaattaatattctgggccaggtgcggtggctcacgtctgtaatcccagcactttgggaggctgaggcgggtggatcacgagatctggagatcgagaccatcctggtgaaaccccctctctactaaaaatacaaaaaattagctgggtgtggtggcaggtgcctgtagtcccagctactcaggaggctgaggcaggagaattgtttgaacccaggaggtggaggttgcagtgaaccgagaccatgccactgctctcctgcctgggcaacagagtgagactccgtctta

SEQ ID NO: 225291 - DNA, 473 bp, Homo sapiens
ttcagtcccctgccttcttagaaatcctttgtagtgatggtttgcattattctcctgtattagacaccttctttactgttttctggttctttcacaagtacttttttacataagctgttttgaagttgtaaatcatcctaaatcttttataagcctcatataatacatagtacaatgccagcctggactctagttttaatctaaatacatagggtttaatttagcagcataatctttttagtcttttgaatgatgaggtaacctcataggtattttggcccattttgtttttccttgaattacatatataactgactatttagactgactcctttagatctcctgggatgctgacctcttggctttccaattcatgagactattgtaaagaataagtgagttcattcatgtaaagtagtaaaacagtgcctgacaaaagtaaatgctcaataaattctaattgttatgaaata

SEQ ID NO: 225292 - DNA, 377 bp, Homo sapiens
gggaagtggaaagaggctgcatagcactcaggttctccctgaagttgagagtcttcctgggatttttgcagggtaattaagagcagattgtggctgcgcgcagtgactcgcgcctgtaatctcagcactttgggagtccaaggcaggcggatcacctgaggtcgggagttcaagaccagcctggccaacatggcgaaacctcttctctactaaaaatataaaaaatttgccgggcgtggtggcatgcacctgtagtcccagctactcaggaggctgaggcaggagaattgcttgaacctgggaggtggaggttgtagtgagccgagattgccccactgcacttcagcctgggtggcagagggagactccatctcaaa

SEQ ID NO: 225293 - DNA, 402 bp, Homo sapiens
tattttgtttgctgttatattccagtgcttggaatagggcctagcttaataaatattcatatttaatggcttaactaatgcaatttatgtttgtttctgtgacacatgaaggtaagtacacattcgaaaaagatgttcacttcccttctttagcatcccacatccaaacattttttttccctttctcttttgtcttgggctcaaacttaaattcatgtttaatctatgaaagcaaaacaatcttcaaaacaggccataaagccgggcgcggtggctcacgcctgtaatcccagcactttgggaggccaaggtgggcggataacctgaggtcaggagttcgagactagcttggccaacatggtgaaaccccatctctactaaaaatacaaaaattagccaggc

SEQ ID NO: 225294 - DNA, 387 bp, Homo sapiens
gcacgagaacaataagacaaatcctgaaatgcaggaaaaaagatgaaacaaaccagtgaatgcaatgattattgtgtcatctaatacttgaagattttaacaaagcaagtgtttcttctgtggcgatccctggtggcctccagaccttccattcatgtggcttctgactcagctcagccctggtgttgattctggggagggtccatgttcttggagtgctgcagtattcattgctttgtcatcagtcagatgggctgggaatctggattctgcgactgactagctgtgtgacctctagcatgtaacttaatctctttggggcttaccttttccatctggaaaacagaaagaataaaactctcagagttggtatgaggattaaagata

SEQ ID NO: 225295 - DNA, 136 bp, Homo sapiens
tagagactagagaaaggaagaaaacagtattaaacaaatatttcacatgctttttatatcagggtcatcttcataaacgattaatattttcaatttataagatactttaagttttgctccatgctacaatgtatct

SEQ ID NO: 225296 - DNA, 527 bp, Homo sapiens
ccatagtccccaatccctctagcactttggtttcataatgaaagacataagaggaaagaaagatcgcagagaagcagcacatggaaaccatcctgtctggagcagaggagcgaagagagaggacagtctggggtaagatgttgctgaggaaacccaattgggctgaggagtggctgggctcaccatcttcccttcttctgtctccccctccgtgggacagtgctgctccccgtgtccaaggtcagggacaggggacagggtgggattgccacttgggcagtgtcaaaaagaaaatagaaattcctgaggaatggctgagattgacatgaaagacagccctcaagtggcccccacacatcccttttgggaacctttcctctcttttacctgaagtaccttcataaatgagtgcctgcttaatttgttttttaaaaacggagtgaaaaacaggcaatgtttatgtctcaaagaagcgtttctgatgaaagcacaataaatgcagttttgcagtaccatgcaaagcaata

SEQ ID NO: 225297 - DNA, 741 bp, Homo sapiens
gagaaaggaaaataagtaaaacctacatgatttttgtaacataggcttggtcacattgctatatttcatctaagtgatggctatacagtttttctctgcttgtcacatttaacagagatataaaagttcttgctaaaaggctagtcttgtagagtacgtcatgaaggctcatcatgaatacatcatgaaagcccacttgggaagaaatcggagcaagacaactggcgaggcaaaaagaacaagcaggggcagacatggaaatccacctagtctgttttaaagagcccctgggcaggcaacttctgaggaggacgctgtcagcagaagtgccatcatataaacactacaccttcaaaaaagtttcctgaccctattgtcccctctgtgtcctcctcatttcagttaacatggcctgttaaaaaatcttgtcaccattagatgtttcatgtcttatttatttaacacacttgttctgtgtctggctaagaggactagcaagtcttttgtttaaaaatgtctttaggccggatgcagtggcttacgcctgtaatcccaacatgctgggattacaggcgtgagccactgcacgttggttattctctagacctcaggcatagcttctgccctgggatttctctttaccttcaccctggtcatttcttcctctcctgtctcctggatcccatagctgctgctttttggtttactttcctgttgggtggagtatatctttcagcatcc

SEQ ID NO: 225298 - DNA, 319 bp, Homo sapiens
tgaaactctaattacatttacatttagaataattgggaacacccctacccccatctggcttctgagtcatatccctacactataactttgatataggaaaaaagtataaaatctgcaaaaataatgtgaaagaaaaagaaacctcaaacaattagtttacaaacaatgccaagtgctaaagaaatatataatccttgaagcttgaaagccacagattactactcagaggtctgtcaaaagctttagccaaaatatttcatcaaaagcaggcccagctgaacacagtcaaaagggaattatcatggccaacctggtcaac

SEQ ID NO: 225299 - DNA, 524 bp, Homo sapiens
tgtgtctctctctgtctctctgtcagtctctctgtgtctctatctcggtctctgttgctctctctctgttgctctctctatctctctctgtctctgtctgtctctgtctctctatctctgtctctgtcgctctctctgtatctctctgtctctatctatctctgtccctctgcctctctgtctgtccctctgtctctctgtctctctgtctgtctgtctctctctctctctctctctgtctctctctctgtcttccagcctgtttgagacatcacccaccaagcggcctgggagggagacctccccttttctccagaggcaagccgcagggccctaactggaagggctggcccaggtcgccatcatcccccgcagtctgcagagggaaacgaaggcccagacctccccggagccaccctgaggagtctcacagacaactcctccctgacatgcaggctcagggctcatgcgggcaaggggtccgtggcaggcaggcaggaggagctggtaacaggcaccacttt

SEQ ID NO: 225300 - DNA, 735 bp, Homo sapiens
gataattaagttgtatcttaaggatgctttgtagctaaattttaaaatattgtttctaaatttttaaaaaacaccactggctctggtagtttttagaataaaagaaaatcagcaaatatgagtgacatagaataacaaacactgagcaggtaaatgtatataataggagtctctagagcattaatgatccaggcatttccccaaagcagcattttctaacctgtgttttgtgaaccccagggatataaagtatcctgaggttcacttattttaatttgtcttttaaaaagatggtgagtattttcctttcaaaatcgattagtttgaggacttctgagggtatatgagcaagcatacatggcattgttggtggaaatcagtcacctgattatcattcaaccgaatgttgccaggcaccatggtcttcttgacttttaatttttcttaaagagaagataccagacatatgcagaagtagaccgaatagtatcctgtgcttccaggttcaataagcctgcttcagtgagtatcaattcactgccagtttcattactacacccttacctggctactttgaagcaaattcctgataccatatcattatatctgtgagtatttcagcatgtaaatctaaaagataaggcctcaattttaaaaacctgtaatacctttattataattaaaaatagttaacagtttcttaataacattaatatctactgtccaaatttctag

SEQ ID NO: 225301 - DNA, 471 bp, Homo sapiens
aactctttttgcccaacagaatgtggacagcagaactgctttataaattgggaggaaggcacacctggaagatggtgatgccagcacaatgggaaatgtgccagtgtgtagaattcttctctggtctttgtaaatagaaatgctcactttctatgtgaaacacctaaatgattcgatgccaaacgcagaataagtttaaaggtagaacaagcaaatagctaaacaagggagtgtttcagaaaggaaatatgtcaagccttggctcaaaagcaaaacagtcttttcatgaagggaagtgttcacagcatctattaaatgcatactcagtcacaaaaataaaacccatctgtttaatattaacatttgtaataaacattttaaaaaaaggaatgtagaaggcaaaaatgtattgtaaaacaaaatgtacactcttgggataactaaaacttcctctgaaagaattgcagtact

SEQ ID NO: 225302 - DNA, 204 bp, Homo sapiens
taatataaaaacagctatattttggcactcaagaggcaaaagctaatatatgtgatgaaagaacacaaagcaaataaaatttgactatttcaaaatgatgcctcgggcaggtcctgtatccagaagaggatgttcatccagggtctggggctaaggtcatcttagcacagcccagctgccagcttccctcctctgccgcttccc

SEQ ID NO: 225303 - DNA, 385 bp, Homo sapiens
tgtctcccttcagatgaaggaactgatgctgagacttgcactctaccataggcggaagcacccaccaccctgttcccagccctggaagggcaaggaatgaatctgaggcaaatagggccagcactggcagtctgctcgattttccctcagagcatttatcttccttgacatatttacaattttttgtctatttttggtttctctaacttgactagaatgtaagatccacaaggcttgggctttgctcttttgttcactatgtccatagctcctgtaacagtgcctaaaacatagtaggcaatcaatagatattctttggataaacaaatatgcctcaacattgagtctaacttacagcagacattgaataaatatctattgaatg

SEQ ID NO: 225304 - DNA, 757 bp, Homo sapiens
ttagttttaaaaaattctaagcagcacataaatcatgaggttttttcacactgaaaaaaataaagaaagctcagtgctaaaatcacctgcagggccagcttgatgggcacgcagtctgtacaattgccctacccttggttaatgttcttaaaaatctcaataatttttgttcaaaggacctcatgttttcaatttgcactgcacttgcaaattaggtagccagcgctgatcctgtagcatcttctaaaatagaccttatggataagcagggcatttcctgtcccagaacagttgcccaatagcaaaaatggatttttgagtgaataaattgataaataaaaatgttttaatggcatagcataaaaacacaaacacttgtatctaacagtcaagcagaagaggttcttactcaaattaagaagtggaggcagaaagagtgaagggtgagaaaagggcactcagaagttcttttctatccaaatccatgagagcacaaagttgaccataatttcattgcctatgaagccaagtaaaagaaaataaacccttacttgtaaaagcaaatcaatatcttttaacttttgctattcttaatggatagctgcaatatactcaaacacattcaagagtttataagacattccgttgaaaatcattttctcttatcaaatttagacaggttcttttaatttgaatgaacactacttcttttgtgtaaatagtgtattataaattgtaatgttattatttgaggttt

SEQ ID NO: 225305 - DNA, 472 bp, Homo sapiens
gaggaaacattactaccaacgttacagaaataagaaggattataagagactataattattggataacctagataaaatgaccaaattcctagaaacacaaactaccaaaaccgagtcaagaaaaataggaaatctgactagacttacagcaagtaaagagactgaaccagtaatcaaaaatttccagccaagcttgatggctcacgccggtaatcccagcactttggaaggctaaggcaggagggtctcttgagagacctgcctgggaaacatggtgagacccctgtctctacagaaaaaaaaaaaaaaaaagatagccaggcgtggtggtgtgcacctgtagtcccagctactgggactggggtgggaggattgcttgagcccaggagttggtgctgcagtgagctatgaccaggccactgcaccccagcgtgggtgacagagcaagatcctgtgtctaaaacaaattaaa

SEQ ID NO: 225306 - DNA, 442 bp, Homo sapiens
ttccgggaacccgtcctgagctggccggactcaccattccaacctcagcccctgccactctccccacaccatcctgccatctttcaacctcaccaggctcatgtacgccaagcctgttcctgcctcagggcctttgtacgtgctgttccctctgcagaatgtcctcccgtggtctttgcctgactggctccttgctatcacctcttcagagaagccctccatcatcaccctgcctcaagtagcttcccagccacttgcctttacagtactcagttttattctttgtcactccattccccttccggcataggtgctccattaaatcaggaaccttgttgcttctggtatctggggtgtcccaccgctacccccatgtgagtgcctggcacatatagatacttgatacctgcttgctgaataaatgaataagtgcaacttggta

SEQ ID NO: 225307 - DNA, 273 bp, Homo sapiens
gactagaattttgatggcttgaaacttgttcttggctccttatttaccatcctgtgtcctcagaagctctgtgtttgtttgttatgtgggtatatcttccctaattagtgttattggtagttgtgcaaatcaacataatgtattaaagatatttaataaactttaaagtcctatacaaataaacatagtgtatattatggtacagtaaagccaccatatccatgggttctacatctggattcaaacaaatctgagttgaaaatacttggggca

SEQ ID NO: 225308 - DNA, 502 bp, Homo sapiens
tctcgctccatccctgacccagccttgtgcctatgtgccagtcatttgcctatttgctctttgactcattccctacccttcacctgcaaactaccttttccaggcttatttgccaactggctccagctgggtttaagtggaagactggaggaccagaggaagccagagaatttcctcccctgcctttctctgcttgtggtgatatctccagcagtggccttttcttctccatgattccaactcccagcagacagaccttccctctacagtcccaggtgcttctgaacacccccatgcagatgcagttcttcacctgtggtaccaccatcctctctctgttctaccagcctttgtcatagtaacggtttcctgctactgttaatatctgggtgagtttatcacccctatttggcttttcgcatcttctaaagatctttgtaactaagtactttcattaaagtgctcctattttattgcatgggccatgactaatgcagcctcc

SEQ ID NO: 225309 - DNA, 781 bp, Homo sapiens
taatccagtaggggtggtgcccgtataaaacaaggaagaggcaccagagctttctctgtctgtgtgcacactccgaggaatgccatatgggtcatagctagaatgtgaccatctgcgaggcaggaagagaaccctcatcagaaaccgaatcagccataactttgatcttgaacttctagcctccagaactgtgagaaataaatgtcaataaatgtctgttgtttaagccacccagtctatgggttttgtgttttgttatggcagcctgagatgaccagtacagtgaccatttaaacaaggtttttaatgtctctgagaaaagcctcattttcttatctgtagaataattatacctgcatttgaaaaacaaaaaaaactggcccaggcttagtatagggaaaggttaatttccaacaaaacttattggtagggaggccagtctatagtgatactttttgtaatgatttattttggtagacaatctcaattttaaaaaaagaagaagaaggaaatctataagtgaatgaatgaatggaggaaggaaaaaactgaatcgacatgaacatgcagggctattctccaaagaatcagccatcaccttgtcctgccacctgccacctctgcttcctggatcagttccatgacaagaccccttatacgattatgtttggtccagataaatgtggagaggactataaactgcacttcatcttccgacacaaaaaccccaaaacgggtatctatgaagaaaaacatgctaagaggccagatgcagatctga

SEQ ID NO: 225310 - DNA, 380 bp, Homo sapiens
tgcttcccgtcccgggccagggaacgcgcccacgcccgcccgtcccgcggcctctcccgggtgccgctgggcccgctactcacagcgctgtggcgtccgcggggatgcgcagcgcgggaccgagcgtccgcagcccgcggcccgcggcccgagcagttgacgcggcaggcggcgccgggcgctaggccgcagaggcaggggggctcgcaaggcccgcagccgcgcccggggccccccgccagcgccccgagccacaggcccaggcccagggccagcgccagccgggcgggcgcggcgggcggcatcgttagggcagcgcgcgcatggccccgccgtccccaggcccgcccgcgcgcggaggccgcggctcaggcggggcc

SEQ ID NO: 225311 - DNA, 243 bp, Homo sapiens
catggttttccaaagtattttatgaagtcatcatgcatttaattatttagtgagtagctgaggtggaatgtaaaggctaataatagttgtaagtaaaaaaacgcttatttaagaaatgttaaattggttgacattttgacaggaacattttaataagataaatgtgctatatgtgatttctttacatactttgttggtataatttggataattacattaaatatctttctaattttgcttttg

SEQ ID NO: 225312 - DNA, 419 bp, Homo sapiens
cccagtggctcacgcctgtaatcccagcaccttgggaggccgaggcgggcggatcatgaggtcaggagatcgagaccatcctggccaacatggtgaaaccccgtctctactaaaaatagaaaaattagccgactgtggtggcacgtgcctgtaatcccaggtactccggaggctgaggcaggagaatcgtttaaacctaggagatggaggttgcagtgagccgagattgtgccactgcactccagcctggcaacagagcaagacttcgcctcaaaaaaaaaaaaaaaaaaaaaaaaggaatagggccaacctcagaggtagaaatgcagcagagggaagagtagcgagcagagggaatgagcagcgtgaattacagtgagagcatcagcaaatggaatggcaagacataggggcccgca

SEQ ID NO: 225313 - DNA, 235 bp, Homo sapiens
aaaaaaaaaaaaaaaaaaaagcaaagcaaagaaaagaaagaaaatgaagttgttacttttgtaactgggtcccttaacttcaaaatgcattttaagggctgagcatggtggctcatgcctgtaatcccagcactttgggaggccgaggtgggtggatcacttgaggtcaggagttcgagaccagcttggtcaacatggtgaaaccccacctctactaaaaataccaaaaaattag

SEQ ID NO: 225314 - DNA, 689 bp, Homo sapiens
gcagccatggtgcccgaggtgcccggcgcggtcctgaccctctgcctctggctggaggcctcggagggctgcctggcggccggccccggagcagctgctgctcagctgctggacgagtcgctgtctgccgggagcgtcctgcgcgcccgctgcgcctccaggtgcctaagcttgccaatcatacgcatctctgccttcttccagcacttccaggtgcccacctgttccaagtttccaccgtctcgcctcagggaaattctggggggaccaaaaggagagggtcaccccacacctccaactcctgcaaatgagcccatccagaaagctgtctctggagcacatgcctgtttccatcttctcttgcacagtttcaggccatgtttaaggatgggagaagattgcctggcctccagcctggatgccagccagaacagtggttccctgctttggtgccagaatcacaagtgatgttctaaggtgaagaattatgaactgagttgatttcattatatatgatgcaaactaagtctttgtgatttccaagttaccaagcaggaaacaaatatttctacttggaaatctcagccctgaggcagtggccagtgattttggagaactatgaatgctttaccagttgtgagttcctcaaatacaccctgttggtgaagcagggggactgtccagctcct

SEQ ID NO: 225315 - DNA, 678 bp, Homo sapiens
catctcaattaaaaaaaaaaaaaaaagcattttcttcatattcgctacatatgtttgtaacattaatgagaaataagaaattacccttttccttgactaggtgtggaaactaaggcacagagaaatccaatatctttgcctaaggctatttagaaaggtaagggtagactgtgctgacactctaagcatagagaagctatttactgcatcaggtactgtgcttatccagggacatttggcattttcatctccttgttaaaatatatgtgtatatatatatatatatatatgaaagaaaaggaaagaaaagcaatttaagaaaaaaacaaaagataaagtggcaactagttttgtttttcacttcatgatcatgctcctagcagtttagaaaaagtttttttttttaaggcacacattaaactatcaaataggttgatccaaattgtccaaataatcttctagtcccagcatgtctttttttctctcatagaaattaggatcatatatttgtaaatgacttgtggaggagattgaagcagtcagtgtaaatggagtttctccaggtgctgatgcctaatcgctgggtaatagctgtggacttgctgtgagacctgcattattacaatgtaatcagaatcctgttgctctgctgttattgtcagccacttgtggaatttt

SEQ ID NO: 225316 - DNA, 333 bp, Homo sapiens
aatgggctgaaacatgtccccccactcaccacactgtaggtaacaagaagtagagaagagctgcagcccttctggaagcccagaccttggtgctccctgagccatggctgtgacatgctgtaacacctatttggggactctgcagttcctggtgtctctgagctttcgggcaccaccacattcccctcatccagacgctggtgcccacagtggaagccacttgtggcacatctggtccagccacagcctcaaagggagctggcatatggagcttcccaccctgccacagcagccagcgtgcctggctgtgcagtggccagaccctgtgttcac

SEQ ID NO: 225317 - DNA, 1742 bp, Homo sapiens
gctagatggcgagttagtgagtgcagcacaacagcatggcagtaggaatagaataggagtggaagagggcctaggacagagtcttaaataatactggcctttagggttggggaggtatcagccaataaaagacaagaaggaatttccagttatgcaggaaaaaaaaaatgaggatgaggctcataaaagctaagggaagagagtagaccgggacagaggagtcaagtaagatgagaactaaaatgccgttgaatttagcaccatgaaggtcattagtgacgttagtgagagctgttctagtggagcatttgagatggaagcttactttggaattgactgaaaagtaaatgggggttgagggaagaaatgcagcagtatggaggcaaaagatatgcacatttgatcacttacaaaatatgattacagaccaactaaaaacctaggagattccagaaaccggaatgtacttcaacacaaattcttgggatacagataaatgtcattcacttattcaccaaacatttatgaagcactcggttccaggtcttgtgctaaagaaacatgtcagtctgatggcttttcttgtgtagccacagtgattggagatgtctttggctttgcactttagctgctagttgttctatttaaacgtctaggtaagtaaataggttaaagtgctctcctgtgtaggacccttcctagtgtggttctgtcttcaaagtctatgattctcacctagagcagatgaggtgaacattcttcttattcccattcccattctggaatcctttttgcctctagattaatgggaatccaacatcagtgaagtgccctttgctgctgctgccagccattctgactccagagccagtgaataggtgctgcttccatcactaggtggaataacaggagcatgtgctgccaatcagcatggttgcctagcaacaggaggagatgctattcattgtctatcagtgtgggggcacaatatattttagtttaaggtgcttgatgaacacaatgattacatggaccctccatgtcagccttggaagttgtgattctgaggctgggaagctggactatctttggaagctaaatttggaagtgaaagggggatgtaggatatgatcatctggctacatagataagtattgcaaaataggatttgggtttctggctatggcttaagctgtaagaataatgggctcctggcaaaggataaagtgtatcatgaaacaagaaataatgtgtctggcaggcatgcaattctcattgaatatgaggaagtgggagacaaatgcctagataatctgaaaaacaaaaaagagattttacagaggacaccaggtataaagtagaaacaaccacagtgggaaagatacacagagtgaatatcaaattttagtacaagacagtactctgtctcctagatcttattgagatttggaagtgtcatgcaacatggtcactttgtggtcaccaactgtcctaaaaagatttgggacaaattccacagtgtcatggtatggatgaaaaaataggcactattgagaacacttaaagaacaagaaccgaaggtttttggctgtttctcatcatctcatggaaaggtgggcagggatcagggtgccacagaacccttcgtgtgtatctgtgttttagcgaaggaaccctctgctcccctgtggctctctctatttattgagaaagtggaaaacaacaacaacaaaaaaaaaaaa

SEQ ID NO: 225318 - DNA, 373 bp, Homo sapiens
cctagaagagtgaggactagggaatatatgtatgtgtgtatatacaggtatgtgtgtgtatatacatataaatatatatattatatgcaatatatatatatatttgtggtgcatagaaaagtggctgcccatgtcttaatcctggaacctgtgaatatattaccttacattcaaaaggaactttgtggatgaagttaagggtcctgagataattaccctggtttatctgggtgggcctggtataatcacagggttcttatgagagagagggaagaatcaaagaggaggagaacagattctcttctgaggtccttgattttagacttctgtcctccagaactgtaaaataataaatttgttttgttttaaacta

SEQ ID NO: 225319 - DNA, 399 bp, Homo sapiens
tgccttcaaaggatgcaagtgaggcttgatgttgaaagaataatgaacttcgtttgtttactccttaaaccaatatttctttagtgtgtactacatccagctactgtttgggacatcagaaatacagaaagaaataagacaaaggctctgatctacacaaatgtactttctagcgtatgtgaagggaggggaggagaaaagaaaatcgatatacaaacaaaagatgagtaagaaaaaaatcagactttaaaaaaatgccacatagaacaacgacaacaacaaaaaataggatgctatgaccaagagactagtggcagctccaggctgggcagtttgaaaaggccatataaagaggttacgaatctgacatttggatgacacaaggcaccaatcccagca

SEQ ID NO: 225320 - DNA, 412 bp, Homo sapiens
aattgcttgaactcgggaggcagaggttgcagtgagacgagatcgcgccactgcactccagcctgggtgtacagcgagactctgtctctaaaaaaaaaaaagaaaagaaagaaagaaaatgcagaggaagaaaaaaacgaaaattttgacctggaatagtaaatcagtagttttcagatccaagttacctcacttgcagagttcgaaccgaatgctgaaagaaacgatggagacattaaaacaggaatgctgaaatataagaaatcaagctgagaaagtctaactagaagtcaaaaagacattggaaaaagaacagacacagcagttagaagaaaagcatatgcttcatgaatgtatctcagggaaatgtacagtcaagctaaagagaaattgcagtgagctgcagttgccc

SEQ ID NO: 225321 - DNA, 268 bp, Homo sapiens
atcagtcttcaattagctatatttttaggagcctacctttacttagcctcacaacatgggccttagctttagcacttaatctgcacaaatacctggcttaagtgttatgactgactggctattcaaccaaccatacaaatgaccaattcggtaagaaagcatgaacttcagtgttgaaccaaatcaaccaacctcctcaatccaaatgaacaatgctattctaggagtctgtgctagaataaaatcctaatgcaaaggctgtcttaaa

SEQ ID NO: 225322 - DNA, 676 bp, Homo sapiens
gagacttaagtagtttgctcagaataacatacactatcccctcaaaatgcatgcaaacactatagtggacatattttgaagtacctcatcttatttatttatttatttatttatttatttatttatttattttgagatggagttttgctcttgttgcccaggctggagtgcaatggtgcgatctcagttcaccacaacctctgcctcccgggttcaagcaattctcctgcctcagcctcccgagtagctgggattacaggcatatgccaccatgcccggctagaagtacctcattttacattgactcctttaactccctctcatctacccattatgatgagttcccaaaagccatcaaagtccttaccctaggaatctggaattggaatggagaaagagttagaatttcagcctgtctggaattgtcatgtgtgtgcatttgggctctgtgggtaactctctgcatttgccccatagactaaatatcagagagatctggtatgcagtgagaatgacacagaggtccagagagaagcagagatccatgaaacaagaagatttgtgcagacttcccacttcccaactccaatcccccatgaagcttggctcattcctactgtttaatgtagtagaatgtccctgaatctcaataacaagttgtctatctttgctttaa

SEQ ID NO: 225323 - DNA, 211 bp, Homo sapiens
gtctcaaattttagtgggcatcgggaccacctggagggctgattaagccagattgccggttccactccccacaccaattcacttcatttctaacaagttctcaggtggtgctgacactgctggtgctgggactgcacttagaaccactggtgtagcaagtggtttcagaactatggagccattttctagctgttccttgctgtttccagtt

SEQ ID NO: 225324 - DNA, 362 bp, Homo sapiens
ggctaggaagtccaagatcaaggtgcttatagattcagtgtctggtgggggctcacttcctgctttatgagctatgccttctcactgtggtttcacatggtagaaaggggtagggctttctctctggcctcccttacaaaggcaccaaccccattcctgagggctctgccctcacaacgtaaaatttctgtacattctatgccatgctgaagctcattttacaaccctaagctctcaccttaaggtccatacatgctcctaaggaaaatccaccacagcgcactcagtcctcccgtggaggcacctgctgcactctgctgcagtgttcttcctttctaataaactttccttttccaaaccta

SEQ ID NO: 225325 - DNA, 309 bp, Homo sapiens
aggtatcacatacagcaacaggagagctgaataacaaaaagaagccagagatgagaaaactgggaagagcaagcaagggtaacacctataacctatagatgatgataagctggacaagttaggagaaaaaggataaaaaccacaggctggagcactggggacaaggagaaagtgtggaagattagataaataaataggctatttagactctgaacttcagttgtttgttcagattttattcaagtataaaggaaagccctggaaaggtaacaacatgagctaactggtgtcttatacattggttgctgc

SEQ ID NO: 225326 - DNA, 503 bp, Homo sapiens
ggccctcaaccttgttggcagcagggaccggtttcaaaatgaaactgttccacctcggatcagcaggcattagcttctcataaggagcacgcaacctaaatccctcgcatgcgcagttcacaatagagtttctgctcctgtgagaatctgacgccaccgctgatctgatgggaggcggagcccaggcagtaacacttgcttgcccactgctcacgtctgatgggtgcccccattcctcacaggctatggaccagtacccatctgcagcccagggttggggacccccaccatacatgctctgaaaataagtgtctttaagttgtgtttttctgtgtgacatcatctctgaacttgaacatgttcattacggcaagattgtaatcctgctgtattcctcgccctctgtattctatccctttaaaaactagatatttaaacattttatcctaatgtgtttcatcagaacactttgcacactttcttactaaaacggtatgtgggtg

SEQ ID NO: 225327 - DNA, 307 bp, Homo sapiens
aggattgtgttctcaatttccttttgaggcaatttgatgttactgtatagaaatgctactaaaaattgtatgttgattttgtaatctacaactttatggaatttattaatcaattttaacaggtttttggtggagtctttaagcttttctatatataaggttatgttatctataaggaaagacaattttacttcttcctttccaatttgaatcctttttatttctttgacttgcctaactgttctggttagtactttcagtactgtgttgaacaaaagtgagggtgagtacccatgtcttgttcctc

SEQ ID NO: 225328 - DNA, 476 bp, Homo sapiens
attcctatcaaaaattctgctggctttttttgtagacattgacaaactgatcttaaaattcatttggaagttcagaagacctagaatggccaaaccctgtagaaaaataaaacaaaacaaaattaaagaacttatacttccatatgtcaacacttttttacagtgctggagtcctcaagacagtgtgttatggcaagatcaaaggaatagaattaggaatcaaggaataaaccctcacatttattgcttttcaattgtttttcaacatgggtgtattttttgtgcttctataacataatttccaagacttggcaatttataaacaatggaaatttatttgttaagttctagaggctgggaagtcctagaataaggtgccagcatttagtatctggtgaaagctgctctctaagatagagtgttgaggctgactcctcacatggcaaaaaagatgcatgccatgtcctcacatggtg

SEQ ID NO: 225329 - DNA, 389 bp, Homo sapiens
atggaggttgcagtgagccgagattgcaccactgtactccagcctggacgacagaatgagactctgtcttaaaaaaaaaaaaaaaaaaagtcagtccctgcacacctgaggcctttctcacctctgtggtctgaagctctagttaagattggtttaaactgccccattctgagcactgtggggtgtcattgccttcccaaagacatctctaaatgcctcagctttacatttcccccagcttcttccgactccaagtttcttcttctataagatgcttaatttgtgtccccacgaaattcatatgtggaaatcctaaccctagtaccttagaatgtgattgcctttggagataagacctttcaagaggtaattaaggtaaaatgaagccc

SEQ ID NO: 225330 - DNA, 366 bp, Homo sapiens
agtatcaagtatttatgggtctaaagtagctcactgcatgacctaagtgcatcttcccagcagtgatgttagcatcagctcttctaaattaacatgggtaaggggtgtgtcttagtccattttgtgttgctataaataaatatatgaggctgagaattgtgtaaagaaaagtttacttggctcatggttctgcaggctgtacaagaagcatggggccagcatctgcttctggtgagggcttcaggaagcttctactcatggcagaaggcaaagcgagccagcatcacatggcaagagaggaagcaagagagagggagaaggcaccaggctctttttaacaatcagatctaatgagaactgacagag

SEQ ID NO: 225331 - DNA, 454 bp, Homo sapiens
gcacgagccgaagtgtaggtaggaggtctggttccatgtgagaaccacaagtccagggcaatcacaggggcccctttcctcttgccagtgattggttaggcatggggatctgacacaattctgaccaatgagatgagagggaacgtctgctggatggcttctgggaaagttttaagccattgataaaaatgatacatgagaagaaatagtttcttatttgtgtcttgccattgtcatgaagatatgatgtgtagaaactgtggctgtcatttgtcagaggatgaagttgccgaagacaactgagaaaaagaggaaaagaatctgatccataatggtgccagttgagctgctaaattaatcagtcctggaacattttttattttgacttcttactatgtgagatcataaattccttattgattgaataaattgaaccgaagttttcagttactta

SEQ ID NO: 225332 - DNA, 409 bp, Homo sapiens
gaagccagaaatgcccctcaaaccaggggatttttagatgcccagaaaggagtctagtctgtctgcaggaagcagctgctcaaacaaccatgagtggaaactgggtgatatggtttaactgtgtccccacccaaatctcatcttgaattgtactctcataaatcctatgtgttgtgggagggacccagtgggagataattgaatcataggggtggtttcccccaacctgttctcatggtagtgaatacgtctcctgagatccaatggttttataaggagaaacccctttcacttgttctcttctctgtcttgcctgctgccatgtaagacgtgcctttcaccttccgccatgattgcgaggcctccccagccacgtgaaattgagtccattaaacctctttttctttat

SEQ ID NO: 225333 - DNA, 597 bp, Homo sapiens
gaaaatgaaagcagaaattggagtaataaatctataagtaataaagctccaaaaatttgtaggagagagtagaacctaggcaggggcaagaaaagatttttttctgtggcttttcaaggaagcgtgaccctattgactccttggcttcagacttctagcctccagaactgtgaaataataaatttcagttgttttaagctacccagtctgtggtaatttgttccagcagccctaggaaagtactacaatgctgtattcacgttctgaactctttccagttattttgtgagtatgggtagacaagattcttagaacagtcttgacagtctctgagtttattgcttattggtgggtcctatgaaatataaattacttctcacagtttaaggaatgtcctaagttgatctgcactaatttataggatttagttggagtttaaggaatgtcctaagttgatctgtactaatttccaggaattaatttgcaccttgggctgtgccttaaattctagctggatttatcagccagcttctatttgtaatacaggtgactatggtccttaactcctctcctaatttttgctctgagaagaaaatt

SEQ ID NO: 225334 - DNA, 613 bp, Homo sapiens
cctgctctagactaattgaactctgaagtcttttctttaaccaggttgttgaatgcctttggggaaatttacactcccctagggggattgttggctatagaaatctgtggtcttcaaccgcaagtggtctcttcacaatctgctaattcatgttccagatcagcttttatcttttattcaccaagagcaactgtttgaaacctttattactcttttgatattctcttaattcactttgagcacttaggctcgtaaagaaagcaggtgaccctttatcttgccccaaaacttacagatagtaatttcatatgagctgttctctcctaaccaattttctccttaaggtctgtatagtataaatttttcttatacccagagaccctcaccgtaccagataaatattcactcttagcttctccttgttgcctcattttccataactttataacttgctgcagttttttgtcttcaaaaaacaaaaaaactcaaactttttttgagtgggacttactgtcttcacttctttaacccacatcttgttaactcttcattatcttaacattctgatgtctgtcctcaccatttccttgaaattgttgataaagatcatcag

SEQ ID NO: 225335 - DNA, 475 bp, Homo sapiens
ctagaaggtgtggctcccagctctactatagctgaccagtgctaaggtgaatccactggtcaccactagtctgttaggtgccactcagtgacctgggagtgaagatcaggtctggttcggatacaccaagcattaacgctaccagctgttccctcacattttgtcttcatccccaagggtggatggaaaggaagaaggcagtgatattgtttcagcctctttctcaatctcttggcctgcctcagcccctgcccctgggtcatcccaccactgcctttgggagccagagtcttcaagccagaatgtctccaaataaagctgtggggaccatcctgagtcttccccaggctgaggaaggatagcttgtctgctcagttacctgttgttttctatttccatcaatttctgttgttttctattgctactgtaacagatttccacaaacttcatggcacaaattgaaacaacaaaaaaa

SEQ ID NO: 225336 - DNA, 468 bp, Homo sapiens
cttatgtgctattctggtcagacttcatcttccaagagctgtcaccaggcctccccttagctcaatgacccatctctttccccactttctgtttaatcaggcttatacttgctgcttcttttatgttttattgacttctatgagatcaattaagtgctccttattctactttcccctgcactggattaaaaataagatattgtattgctttactatcggaagttactcttaaccttgcatctttgacttaatgactaattggtatctccttcttgagcaataaaaaagaccttagaatgctgtaggtacattctttctttttttttttttttgagacagagtctccctctgttacccagggtggagtgcagtggggcaatctcggttcactgcaaccaccacctcctgggttcaagcgattatcttgccttagcctcctgagtagttgggatcacaggtgagcgccac

SEQ ID NO: 225337 - DNA, 459 bp, Homo sapiens
tgcactgcagaggctcatgaaagaaaactacatcccccagacgccttgcaggcaacccttccgagaggatttaggtcctgccaatgagatgtgctaaagcaagacatggagggcagaagtcaggcgtgggctgagctcccatgccttttgctatttcttctgacaagctctgacgtggaggtgtgtgctttcttggcatcatacgtggcagcaaccccattgttcagatcccgactcaagggtgtccagagaaagagtgggacatcctttcactatgagattgtggctagtatggcatggctgtggggtggcacttgtacagagtagtcgggtggcttcctgagagtagaaaatgctcagacctggtggggtgcagtcccagtacttcgggaggccaaggcaggtgtatcacttgaggtcagggattcaagaccagcctggcgaacatggtgaaacacc

SEQ ID NO: 225338 - DNA, 559 bp, Homo sapiens
tgtatatatacacacacacgcacacccacaattttagtgtattctgattaactttataaagcattgcttaattacatatttggaagagctgatttagaatgttcaaaggctgccaaatttttggtacataaattaatcactttttttcttcttctcttcttcaaataatggcttactagtagtaatctctctcatagtggaagttcttgtgattctcaacttttttccacatctgataatgtaccaaatgttggccaattccatctcacagaaagtacacgaatgctgaatttcttctaatccttgtggcttaggaaacacatcttaagagttaagctctgaagtccactgattcaaaatgacttatgaattatagtagaagaaaacatacacacataaacacacaaacacaaaaatgtaaatacctaatactttataatgtgtattgttgatgatacaaataatgtttattcaacaaatatatagtggctagtttttttgctcctagagtatctttgaatttttgtatttaattacatatttttgaaataccatctgt

SEQ ID NO: 225339 - DNA, 210 bp, Homo sapiens
atctagatatgatcacattatagttttagtattattttctacttctacacttgcataggtataaaatacctgtcaatatatattatatataaaacagtattgatagtatatttttatatagttttgcaacctactttcctcattcagcataacagtgtgaggatttctctggtcatcacatacttttattaaatattttataagtgctta

SEQ ID NO: 225340 - DNA, 497 bp, Homo sapiens
agcacggtgaataagaacccaacttttgagccagatcactttgcatggaatccccattctatcattctatcatttctgggctgtgggaacctcagacaagttacttaacttcttcaatgctcagattaaaaaaaaaattcacaaaatatctctaataacagtaataataactgaaaatacctacctcagagggttgtcgtagagatcaaatgagataaaaatatgtaaagcatgtagcctagtgcctgactgaaaaaaaaatctctcaatagatgcaactcttatgattcttattaaggacttggctattgccacaaatgaaggtgttatgagccctggcttaagagcaagaagcctgcaaagctaactctcctaatcccaacattcctttccagggaaagtagggtgacaggtggaggctgggaattaacgttttttgagcaccaaatatggacaaggcacaggggttgggtgtttttctagtgagaatacatatg

SEQ ID NO: 225341 - DNA, 225 bp, Homo sapiens
acataaatttcccccagaaagtccaagaaactggttgtatcaggggtgagataagcatgaaggcagttagaactatcccagaaatccagttccattcttaagtaggtatttacgtctgttacactaaaatgattatgaaaaacaaattttctttgatgttttcctcatcctttccatatgcaagctgaatgtttttcctttgcaaactaattactaaattaaact

SEQ ID NO: 225342 - DNA, 417 bp, Homo sapiens
tcacctttaagtccaaagagttccttttcctttgctatctccgtaggcagcactttatgttgtgttttttataatcagaggaaaccgatggcaccataaacttctagaaagtcaactaccaccttggttctgtgtgggaaagtaaaattttatgttttccataaatacaagatgaagacagcatttaaagcctatccctgaattggatagatcattttaaagtgagtttgttgcatttagaaaccatgatccctattggccctacaacaaggcaattttcatatcaggcaggtcctggcatctggggagactggctgtttcctttgttgccagggaaatcatttcaaaatggaaaaaaccctgaatgccagcccccagcaatcttcaaaacaatacacattctttaaaaaaaaaaaa

SEQ ID NO: 225343 - DNA, 508 bp, Homo sapiens
atgggggatttattggctcatggaactgaaggaagggctgaatgcccaattgtgggaagggcagggatacaggccgactttaggaataaccggacccaggacataaatgctaccaggacgttcttttcacccccagtctctgcctctgtttgtgtacatcagccatactccctttcctgcagcctgtctttttccacatggcaggagatgggccactaattcccacagactagcttctagctctgtacatgtcaaacctgtttctcctcctctgtccacgtgtgtgttcaatgctaggcactgtttacatcctcgtatcaccaaatgactttctgccctgcacgttggtgtaataaaatgaggtgagtcagattggcgggcatagaattattcctggaagctgttcctacttttttgttaaagtatcctgtattgtctgatatttttgcttttataatcagaatttaaaatgccatttctattttttaagaaaagacctggccaggca

SEQ ID NO: 225344 - DNA, 241 bp, Homo sapiens
ggctcaaacgattctcctgcctcagcctcctggcatgtgccaccatgcctaatttttgtgtttttagtagagacaaggtttcaccacgttggccaggctggccttgaactcctaacctcaagcattccacctgtctcggcctcccaaagtgctggaattacagatgtgagccactgtgcctggccgtattttatttacatttttgtataattattatgatcatagaaataattctgtagtc

SEQ ID NO: 225345 - DNA, 598 bp, Homo sapiens
acacaaaaattggctgcgcatggtggtatatgcgcctgtaatcccagctactcgggaggctgagacaggagaattgcttgaaccccggaggtggaggctgcggtgagccaaagttgcgccattgcactccaccctgggcaacaagagcaaaactccgtctcaaaaaaaaaaaaaaaaaggagggaaactctgacacgtgctgcaacattgatgaaccttggagacattaaactaagtgtcaaggaagacaaacattgtattgttccactttggtgaggtacctagaatagcagtcacattcatagagacagaaagtagaatggtagtaaccaggagctgaggggagaaaggaaatggagagttactgtttaatggatatagttttgatttagtaagatgaaaaaggtcccaagattggacgttctagagattgtaggggactgtatggttgtagaacaatgggaatgcacttaactgccacagaaatgtacagttaaaaatgattaaagtggggccttgtgcggtggttcacacctcctacactttgggaggccaaggcaggcatgtcacttgaggtcaggagtttgagaccacctcg

SEQ ID NO: 225346 - DNA, 429 bp, Homo sapiens
cctctcctgggcacagaacgggatttcacccccacctccctcaccaccacaggtgtgtaaagccagtgacatcgctgatgcgaaggctctgaaggcagagggcagctcaccccccactccccaccggacaccgggggcgagggccgccacgtgtcaggctgaggatggcgggacagagcccccagtctccctgtgagcagtgtgtggggccaaacaacctgggctgttgttgacgtctattactgtggcatggtctggcctgtccctaccaaacaccagtctcagcgcaccctgacaaaatacaagcactgaggcttaacatgggaacaatctggccgattgttattcttacgattattataaatacccaatcaaaatgatacgcatacatttccaattttcataataaacaaaaataaaattgagcta

SEQ ID NO: 225347 - DNA, 548 bp, Homo sapiens
aaagaaattctgttgttttcagcaacatgggtggaattgaagagcattatgctgagtgaaataagccaggcacggaaagacacataccatatgttctcacttacatgtagaatctgaaagagtccagctcataaaagcagagagtaggatggtggctacagaggctgggaaatggggagatgatggtcaaagggttcaaagcgtcagttccatgggagaaagatgggtgtgtgtttttctgagatctgttgaacagcatggtgagcataaaaatacagcactgtacatttaaaattgctttaagaggtcagacgtggtcactcacaactgtaatcccaacattttgcgaggctgaggcaggatgatcacttgacaccaggctggtcgcgaactcctgacctcaagtgatctgctgccctcagccttagagaataaacaactacataaccaccaagcaagcagctcaagaaacagaataagataagggcggtgagttaccagttccattcagtctgtgttggtcctagtcagtacagtaagacgtgaaa

SEQ ID NO: 225348 - DNA, 547 bp, Homo sapiens
acagaatttatttagtatcacttattcaggctgtgttgtttccgtatttgtctcaaaagttgcctcactacagatatttgtccactacaaagctttcctgagttttctctggcagaattacttccattgtcctttttagtttcagagcactttattatatgaggactccacggctggcatggtatatctcaactgtctgactgtcccactggttttgagatagttctttgaggggacaggcaccttgtctggctcctcatgggtcactgacacagtgcttggcacccacctggactgtgcaactgactgactttgagggtatcagttgtcctttttgcctggaaaaggaagttcatggaggatagaaactcagatgggaaaagggggttaggctattactggggaaagcctagggtgccaagattgtgtgtggatcttatctgaggtcagcgagatctactgctgggttctgacaagagaagggtcatgatttctttttttcttttcttttgtttttgtttttgttttgagactccatttcaaaaaa

SEQ ID NO: 225349 - DNA, 856 bp, Homo sapiens
agtgagatttccgcacgttgtagctgagaggccggctgctgagacgaccccttagggaaaagtggaaaactctgcctccagaatggagatctggctttctcttcccctgctcaacctgagctcagggattctgtgcccctcgctctccggacagtttttacaccagattatcttctaattgctgtgaatgcagccgcatcagcaagtccccatctggggacattatcaatttcaaaccttggtcagtcatgaagccccattgaaggacttcatcctgaaatccacgaacaaagaacgagatcccgcaatgctgtcatctaaaatgcctgaaaatgccagtgctgcgacagatggccctgctcggtaaaaagcctaattatttggtattgtatgctacaaaagagaaatgccataattcccagtgggggctgtggatactggacccccataaccaggtgccagagatcacgtggtgttcaaagtccaaattataagcatagtgccgaggactctgaggatgacttctgcacatcttccgaaaagggatggaacagcagaatgagtgccatcatggcttggatggttggaggtgctttgggcatgaagaccctctaactgtgaagttagaggcttccaatgttagctctgttttaagtatatgcacaaagtcacagtctcatagctgagctattaaaaataaaatcaacaccaagatataaaataaaaaaaaaaaattcgggggatttttgtgcggggggggaaaggggttggaaatggcattggtcaatggggttcggaccggtttttggaaagtggtaattggggtcccaagggggagataattgaaagcagtact

SEQ ID NO: 225350 - DNA, 658 bp, Homo sapiens
caggattatattaagccttgtttatcaacagctcataacaatgtgtgtttctgcatgcttttcccttactctgaaataggttttactttgcttaaattagtaattagtaaatattaatgctttattggtttaataatacatgtattaaaagcagtttattttcacagaaaaagcctaattatttggtattgtatgctacaaaagagaaatgccataattcccagtgggggctgtggatactggacccccataaccaggtgccagagatcacgtggtgttcaaagtccaaattataagcatagtgccgaggactctgaggatgacttctgcacatcttccgaaaagggatggaacagcagaatgagtgccatcatggcttggatggttggaggtgctttgggcatgaagaccctctaactgtgaagttagaggcttccaatgttagctctgttttaagtatatgcacaaagtcacagtctcatagctgagctattaaaaataaaatcaacaccaagatataaaataaaaaaaaaaaattcgggggatttttgtgcggggggggaaaggggttggaaatggcattggtcaatggggttcggaccggtttttggaaagtggtaattggggtcccaagggggagataattgaaagcagtact

SEQ ID NO: 225351 - DNA, 504 bp, Homo sapiens
ggctgtaggtgccaagccaagctgccctcagctcccctcagtttccttctatgctcattgtgcccaaaatctggagggggccagggcggcagggggctggtgtgtcagcactgcccaactttgctctgagatcagagaaggcagggagaagctaggcagtaggaacaggcatttccatgcctgcaagggcaagggggtatcgggggacctgccccaataatcacgtaggttcttttctattttcctaagcgtcggctgacttgagaaataaaaggacagagtacaaaagagagaaattttaaagctgggcatccgggggagacatcacacgttggtaggatctgtgatgccccacaagccacaaaaaccagcaagtttttattagggattttcaaaaggggagggagtgtgcgaataggtgtgggtgacagacatcaagtacttaacagggtaatagaatatcacaaggcaagtggaggcagggtgagatcacattgctaatga

SEQ ID NO: 225352 - DNA, 471 bp, Homo sapiens
gaggccgcccttgtttgagtccacctctccttggctgtgcagcgtccgccagccatgctgacccctgaagccttggctgtgcctcccaagtgcaccgggtttccctgcagacacacgctttggcatgaacatgccttcttaggcatgaacaagaagttcacgtggctgccacacccaagtgccttgcatttcgcctgctccccgcaccccccccaaccatgttgccacacgaggcttattctgaattacaggttggttgtgatatcacctctggtacatggactgttaaaactattgaaagggaggtggatctgaagcacgcctacctgtttcctggcatacttggaacgttgccagaccactggatacttagaaggctaattctacatttatcctcagccatcattctgagcgccttcaaaagatgaatcatctgcaccgactattaaatttaataaccatgcaaatctc

SEQ ID NO: 225353 - DNA, 275 bp, Homo sapiens
tgtgtaggtctatttctggaatctgtattctgctctattgatctgtgtgtctatcctttcaccaatacacactgtcatgaagtcagagaggtaacaggaagccagatcatgtagggccttgtagaccattgaaaggatttaggcttttatcttgagtgaaatgaggagctacaggaaggtgctgggcaaaggaggaacctgactttattgaggcaaggataggaatgtgaggttactgcagtcatccagatatgcaaaaatggtggattggacca

SEQ ID NO: 225354 - DNA, 593 bp, Homo sapiens
gaagccacaaaaaccaatctgcagctaattgaatcagaaatctatgaaaggtacagtgcagactgaagaagatgactgagaggcttcataatgaggaacagcacccaaaatcacgctgcggaacagctctcagagaacagcactgcagtgacagagacggcaccactgcagcaccagcgccggtgcaggactggatgctcatgcacatctcaggcctccagatgcccgcgaccttctccccttcagcctcttccataaccacactactcctttcctccatcggcttctcccctgactgcacagaagcccatttccccaccatgacgaaaaaaaacctttcccagatctaaggcaaagggaaaaacatacaagacagaatgtaaatttgtgctgccaggggctgggaaaggaggggatggggagtgactgatgaatgggtatgggctctccttccggagtgatcaaaaagtgttctggaactagagtggtaaagaaggtacgacctcgtaaatgtactaaatgtcagtaatgataaattgtatgttacatgttaccaccaaaacaacaaaaacatctctggcctccctcagatt

SEQ ID NO: 225355 - DNA, 441 bp, Homo sapiens
gcaataatagccacagtgttgcataagaggtgtagggttgcatggtgattgccatcgaaactgcccagattgtcataaacttcaggagtgcagcagctatgctgtattgttaaaatgttggttagactaaccttataaccctataagaaatcatttgttcctggctgggtgcgctagctcacgcctataatcccagcactttgggaggctgaggcaggtggatcacttgaggtcaagagttcaaaaccagcctggccaacatggtgaaaccccatctctactaaaaattcaaaactagccgggcgtggtggcacatacctgtaatcccagctacttgggaggctgaggtaggagaatcacttgaacccaggtggtggaggttgcagtgagccgagatcatgccatgcattccagcctgggcaagagcgaaactctgtctca

SEQ ID NO: 225356 - DNA, 278 bp, Homo sapiens
gcacgagaaaaaccatatcattatgctcccaaaggagcaaacgttatagtagcagagcttggaggagtgctcatattttgatcaccgtgcatgcattatgaatttaaggtcttttattaagtaagttacagattgaatatggtaaagctacaaaaacatagcacttgtgttcacttaaaactaaccagttgcagttttaaaatcaggtaaatggcgatatattggtgtcattaggaaaaatgaatattagaaataaccttaaaaccaactcgtaaaaa

SEQ ID NO: 225357 - DNA, 514 bp, Homo sapiens
aatgcaaaggtttatcaagtttctccattttttttcaaaataatatattatggagcaaagtgatattttataggcaataataattatagtgttgatcaggttctaaaacattacattaactataatgtcccaaacctccttcttggctaatattctggttccgttcttgccagtagctcctattttctctactcactcattctgaaaacttgaatcatctttgattttcctctctcccctttccaaacatttattgaattgtcaaattatttggattgtatctcctggatatttcttgaatccatcctccattgcctttgtgtactggactcatgatgttgcctgttgtcttcaaagaagcaggcaattcattttgaatgcttttgatcggatccaaatataaaggccaaaacaaattaagtaatttatttaataacactgactccttgccgcatgccaacccccgatctagactctggtgatatagcaatgaacagtagggttaaaaaaaaaa

SEQ ID NO: 225358 - DNA, 837 bp, Homo sapiens
gggcgctggtggcaggtggtacaggcacgtggatccaccgaccacaaggacggattcgattggattctgattgaccggcggaccagctccagagtaattgtctatggctgcccctgcaatgactgattgattgacaatggctgagagaccagcaagtgagtcgctccgagaaagcgaaggagcccactcttgtgcggcgctttgggaagacgcctgttggttttgaccccgaataagaagaggaagctgagagcgggctgactgtggtccagtcctacttcgattcagtgtgaactgacactctgatctgaagacgctcaggcctttgtcatttcagcaccccagatgctattttccattcgaagaatgccgccaccaggtggcggtattttaacatggccatgcaatccgggtatgaggaggagggttggtcccctgggagagctaatgtatgttgctgttgctgtttgtcttattggatccttttttttttttatagagccagaggcttgctctgtcacccaggctagagtgcagtgtcgtaatctagctcactgcagcctccaattcccaagctcaagcgatcctcctgcctcagcctctgagtcactgggattacaggcgtgagctaccgcacccggtctttttgcattactaacctgtgatatgggtttatgggacttcattatttcaaagggaggcagcttggccccggagagcatgcattcctggcttctgcgatggatagacttgtgttctccatctcaggagctccccctcaaggtgggggtaagagatgagggcttccactctggctttgttcgagatgtcttgatg

SEQ ID NO: 225359 - DNA, 443 bp, Homo sapiens
ccaggctggtctcaaactcctgggctcaagtgatcaacctgccttggcctcccaaagtgctaggattacaggcgcgagccattgcacctggcctaagttttttcgtgtttgttctttgttttttgtttttagacggagtcttgctctgtcacccaggctggagtgcagtggtgcgatcttggctcactgtaacctccgcctcccgggtttcacctcgttagccaggatggtctcaatctcctgaccttgtgctccgcccacctcggcctcccaaagtgctgggattacaggcatgagccactgcacccggcctgcacctggcctaagttttgagataatttgttatacagcaacagataacttatacaacacaagttcatgtcatgctcatgacaacccaggggttgtctccagccccatcactatctccattttatgggagc

SEQ ID NO: 225360 - DNA, 753 bp, Homo sapiens
gtaatgtcatttttaatttagagagccttaagctgtccacttttactagtgatagcatcgttgcagttgtctcctgagactttatgtaaacataagtcatgcgtcccgggcagtttgagaagagattgttaaagatgacattgggcatcatgaagatttcccccactttgatctcttttaaattgccagatacagtttatgttactgccatattttagccattcctgaaattaatatatcccaggacttttgaaccaagttaagtacagaaataaaacaaaggttggaaatgaatgccttgtaatgttttcatgtcatttcaagaagaaaaatggaagatgaatcagattctcttgctcctaggtgacttggtaaataaaaagagaagaaagagcaagctcctaagaaatacataacaccaaatagacaaaagctttcttattttcctaggggacactagtgtattggtgatggctttgtacattttaaagataaataagatccaactatctcttatctttgtgttaactttttagtaatattttattgtcactttccttacgatttgtatccttagtgtcattattaagcctgaattttaaatctcatcacttttgtggtatcaagcgtttctttctcaaacaacgagatttctttaaagactcaaacaatgatattcctttaaatattcagactagtgggtataaacaaagttattttccatttttaactaaactttttcttgggagaaat

SEQ ID NO: 225361 - DNA, 1181 bp, Homo sapiens
ctggcggggacaggctagaggagacagcaagtcccagtccccggagcagagagaagtggggccggcccggggcgctggtggtggctgtctggacacgtccttagcgcctgggaaccaggacataaaagcgcctccggagccgccctgcggcggggtccctttcatcccacttaaagtgcttctgcccctagggtttccggagggagagccgagatgggatgggggagcctgggggtcccccttggcaggggtgtctctttctggtttggagggttgttgctgtaaaaataactcctttgatgagcttccttattaaacctttcagacccagtctgttggagccatgaaggaagagggaaagagggctgccattcctgacagcctcccagccagggctggcgataaaggaccgagatagatggagggggcgagtagggaagtcctcttctaaaatgagagatagggatttggtggggtatggaaggaactaaccccttccctctccacctctgattcagcccttaattcttggtctatgataaataaagttcagtagtctcacattccccatctattaccctaggtgtgttttcaaggcagccagcggtagaatccatgtagttcccaccagttgccttcccctcagggatggaaggaagagggtttcttgggctggttgagggcagattgggggtgtctcatcagagggacctccactggttcccactcagagtggaggcctgcagcctacctgaccatctctttagctgtcaccaagaaaataaaccccactgtctctctagcttggcccttgtctttcccttgcccctgccatagcatgttcattaggggattccttcctccccctcatctcacaggggaagggagaggaaagagttgttctcccactggaaggggttctgccttctgaggtgacatccaggaagctgtccccattcccttctcctttagatgctagaaacacattttgattctgatcatggggtgggggagagaggaaaggagggaggggagaagcccagcagaagctgagccaggcagaggggaaagaagctgatatgaggaagggtctgacaggccacagcccttgcagccggagggctttcccacactcaagagaggggccttacagtccctctgacacccctcccccttcccct

SEQ ID NO: 225362 - DNA, 322 bp, Homo sapiens
  misc_feature (2)..(2): n is a, c, g, or t
  misc_feature (52)..(52): n is a, c, g, or t
  misc_feature (102)..(105): n is a, c, g, or t
  misc_feature (110)..(110): n is a, c, g, or t
tnccggggagcgcggattcgcattcccaattttaggtggcagtcgcaacccntactattcggacagatggcacagaaaccgctgcgcctgtgagtgacctcnnnntggangcctctctccctgtggctctttcgtgtgtcttggcttgtggagatgttgaaggaaagtttgatattttattcaatagagttcaagcaattcagaagaaaagtggaaactttgatctgctgttgtgtgtaggaaatttctttggctccacccaagatgctgaatgggaggagtataagactggcatcaagaaaggtatagaaatatttttatt

SEQ ID NO: 225363 - DNA, 654 bp, Homo sapiens
  misc_feature (2)..(2): n is a, c, g, or t
  misc_feature (52)..(52): n is a, c, g, or t
  misc_feature (312)..(312): n is a, c, g, or t
  misc_feature (327)..(327): n is a, c, g, or t
  misc_feature (334)..(334): n is a, c, g, or t
  misc_feature (341)..(342): n is a, c, g, or t
  misc_feature (349)..(349): n is a, c, g, or t
  misc_feature (372)..(372): n is a, c, g, or t
  misc_feature (433)..(433): n is a, c, g, or t
  misc_feature (449)..(449): n is a, c, g, or t
  misc_feature (451)..(451): n is a, c, g, or t
  misc_feature (474)..(475): n is a, c, g, or t
  misc_feature (477)..(477): n is a, c, g, or t
  misc_feature (494)..(494): n is a, c, g, or t
  misc_feature (497)..(497): n is a, c, g, or t
  misc_feature (503)..(503): n is a, c, g, or t
  misc_feature (509)..(509): n is a, c, g, or t
  misc_feature (512)..(513): n is a, c, g, or t
  misc_feature (516)..(517): n is a, c, g, or t
  misc_feature (541)..(541): n is a, c, g, or t
  misc_feature (549)..(551): n is a, c, g, or t
  misc_feature (574)..(574): n is a, c, g, or t
  misc_feature (652)..(652): n is a, c, g, or t
tnccggggagcgcggattcgcattcccaattttaggtggcagtcgcaacccntactattcggacagatggcacagaaaccgctgcgcctcttggcttgtggagatgttgaaggaaagtttgatattttattcaatagagttcaagcaattcagaagaaaagtggaaactttgatctgctgttgtgtgtaggaaatttctttggctccacccaagatgctgaatgggaggagtataagactggcatcaagaaagctcctattcagacatatgtgcttggtgctaataaccaggaaacagtaaaatatttccanggatgctgaatggantgtgaantatatgnntgaaaanatttactttattcttgggttcgntaaaggtatcttcactggtaagctcgggggctggcagattgttgtacctcaagtgggacangaattccttttattgngnatgtaaaggtttttgtttttgtnnanggttgtgttttttttgngantgatgntgtgtnaannatnnagttttagggtgttgtttttttgntttaattnnnaatggaaaaaagtgtgtgggganaatttgggaattattatggagaagtggataaaaaaaaatgtggttatgatttggtttaaagtattgaaaagggattgnaa

SEQ ID NO: 225364 - DNA, 497 bp, Homo sapiens
taataaaaacaggattccagcatgttgcccagggtggtctcaaattcctgggcccaagcagtcctcccaccttggcctccctaagtgctgggattacaggtgtgagccaatgcacctggcctaaaaatggcaatgtatttttgaaagtgtttacaacgtgctaaactgtttaaattcatgttaactgtcaataacaaccactatggggtatgtattattaaaatatctatctgactaatgggaaaaatgaaatgtagataggctaagtatcttatccaagatcacaaagcaggtgagtaacaaagccaacatgcaaatccaggtccagcctgacaaccactacaatggagtgcttatcaaaaactgttgctaaactggctgggcgaggtggttcatgcctgtaatcccagcactttgggaggccgaggcaggcagatcacctgaggtcaggagttcaagaccagcctggccaacatggtgaaacccccatctctact

SEQ ID NO: 225365 - DNA, 371 bp, Homo sapiens
ttgaaaaagaacaaagctggagacatcatagttattgttttcaaagatattgcaaagctatagtaattaaaacagtatggctgggtgcagtggctcatgcctataatcctagcactttgggaggctgaggtgggaggataaccttaggtcgggagttcgagaccagtctgaccaacatggagaaatcctgtctctactaaaaatacaaaacccaggcatggtggcacatgcctgtactcccagctactcaagaggctgaggcagaaaaatcactcgaacccaggaggcagaggttgtagtgagccaagatcgtgccattgcactccagcctgggtaacaagagtgaaactccatctcaaaaaacaaacaaa

SEQ ID NO: 225366 - DNA, 697 bp, Homo sapiens
gagactcttgaaacttttacaggaatccttgggcaccagagcaattacttccagtgcttttaaaagttttggagcggccgggcgcggtggctcacgcctgtaatcccagcactttgggaggccgaggcgggcggatcacgaggtcaggagatcgagaccatcccggctaaaacggtgaaaccccgtctctactaaaaatacaaaaaattagccgggcgtagtggcgggcgcctgtagtcccagctacttgggaggctgaggcaggagaatggcgtgaacccgggaggcggagcttgcagtgagccgagatcccgccactgcactccagcctgggcgacagagcgagactccgtctcaaaaaaaaaaagttttggagctagttagaaagccccaaatttctcttttaatggtaatcatgaaccatccatataaagacactgagagaatggaaatactgatataaatgttcatagtcctttatctataattgtgaatttgcaaaaagatctggaggggaaaatctactgttttatttataagaaaatttacgtaaatgtatacgtagttcacacagcaaaacctgacttgaactaaactcttggtggaagtacagagctcaacttccatgatactgtttatagactttatatttcctatatgtgactattcttatatttcactacagagatgctgatgc

SEQ ID NO: 225367 - DNA, 640 bp, Homo sapiens
agaaaagtgcccctgcctcggcgctttcggttttggctgggatcatccgcggcggccgggctcgtggggcgcctggagtgagggttctggttcccgccggcgaggattgttaaaatgagtcttcggaagcaaacccctagtgacttcttaaagcaaatcatcggacgaccagttgtggtaaaattaaattctggagtggattatcgaggggtcctggcttgcctggatggctacatgaatatagccctggagcagacagaagaatatgtaaatggacaactgaagaataagtatggggatgcatttatccgaggaaacaatgtgttgtacatcagtacacagaagagacggatgtgaagacaccaagagagcaacgcttttcatagttggatatatttttttatgaattttttctaatttttgcttcttttgtgatacaatttgtcctctttttataatagttggtgatttttcactgacatgtgagtaagataaatgtatacaattgtggatttaattgtgaaatgttctttcacttgtaagtttcagtcattttcttttacctcgttgtcagtgtacagaatgctaaaataattaaaaaaagacaaaatatacctcttcctacaagattatttaactt

SEQ ID NO: 225368 - DNA, 539 bp, Homo sapiens
agaaaagtgcccctgcctcggcgctttcggttttggctgggatcatccgcggcggccgggctcgtggggcgcctggagtgagggttctggttcccgccggcgaggattgttaaaatgagtcttcggaagcaaacccctagtgacttcttaaagcaaatcatcggacgaccagttgtggtaaaattaaattctggagtggattatcgaggggtcctggcttgcctggatggctacatgaatatagccctggagcagacagaagaatatgtaaatggacaactgaagaataagtatggggatgcatttatccgaggaaacaatgtgttgtacatcagtacacagaagagacggatgtgaagacaccaagagagcaacgcttttcatagttggatatatttttttatgaattttttctaatttttgcttcttttgtgatacaatttgtcctctttttataatagttggtgatttttcactgacacagagtctcactcccatcgcccagacttgagtgtagtgatgtgatcactgctcactgc

SEQ ID NO: 225369 - DNA, 839 bp, Homo sapiens
agaaaagtgcccctgcctcggcgctttcggttttggctgggatcatccgcggcggccgggctcgtggggcgcctggagtgagggttctggttcccgccggcgaggattgttaaaatgagtcttcggaagcaaacccctagtgacttcttaaagcaaatcatcggacgaccagttgtggtaaaattaaattctggagtggattatcgaggtaatattttcatgtttcaacctcactggtataactgaataagtaaatgtgacttactgatatttattaacctcttaagtatacccaataggccaaaaaagtactggtcatcagtagtttttatgcatatatctttttctatctctgagatcattccttttagaaggacaactctgacagtatagcatgtgcttctgcctttcagtgtgatttgtgtgacttctgtctcctgtctctgctttgagatcatatgtgcctaaattccctggtaatagctaggtattcctagtgaactcaggtatgaacaacacaactgaagaacatcttggtgcagcagcatttgtttttgcaggagtattcaagattggcaagcagctgttgagtatcattttacaacctgaatgtcccactcatataacgtataatgtgtgtggcaacagggtgagactctgtctcaaaaaaaaaaatgcctttctgttcttggagagaatattatttttaagaggctgcagtgcttttgaaattaactttataggaagaatggttttaaattccgttttttaaagttactgaatttcttatcttccaagctaaggtatgttaagttacctgaaatatttggcaggtgtaa

SEQ ID NO: 225370 - DNA, 1266 bp, Homo sapiens
agaaaagtgcccctgcctcggcgctttcggttttggctgggatcatccgcggcggccgggctcgtggggcgcctggagtgagggttctggttcccgccggcgaggtgagccgcaccgctgcgcgggccgacgacggggccgggcgcagccccaggttcggtgccccagtgttcagtcgcgctgtggagcggcggctgcagcggccctaggccgggcgaggcagccccggaaagggcctgcggtgaacaggctggggctccgggaagggaccgctgggtggcgggtccccgcgaaatgccgcgtccaagctctccgcgcatggaatggctgggagaggtctgatggtgggcgccgggaccgccctcagcgaggcgcctagactgcgcggagaggagcggcaccgtcccggctcctaccgagttggcgtccgagatcaattcaggttgttgaagttccccagggagccccgacgctaatcccaagattcggcgggaaagcggatcccgaacccaggcctaggcttcgcctgtcttccaggagggcttcagggaattgcgaaccctctcctacatcggggtggctgcgcctgaccacaggaattaaaggctggactcgcctgtcttaccaagttgtcaggtcgaggaacccgattgtatggtcttaagtcctatcgcccaaggttttctgtgcgtatgcgtgtccgcacacctgcatagcaggcatttttaaggattgttaaaatgagtcttcggaagcaaacccctagtgacttcttaaagcaaatcatcggacgaccagttgtggtaaaattaaattctggagtggattatcgaggggtcctggcttgcctggatggctacatgaatatagccctggagcagacagaagaatatgtaaatggacaactgaagaataagtatggggatgcatttatccgaggaaacaatgtgttgtacatcagtacacagaagagacggatgtgaagacaccaagagagcaacgcttttcatagttggatatatttttttatgaattttttctaatttttgcttcttttgtgatacaatttgtcctctttttataatagttggtgatttttcactgacatgtgagtaagataaatgtatacaattgtggatttaattgtgaaatgttctttcacttgtaagtttcagtcattttcttttacctcgttgtcagtgtacagaatgctaaaataattaaaaaaagacaaaatatacctcttcctacaagattatttaactt

SEQ ID NO: 225371 - DNA, 778 bp, Homo sapiens
agaaaagtgcccctgcctcggcgctttcggttttggctgggatcatccgcggcggccgggctcgtggggcgcctggagtgagggttctggttcccgccggcgaggattgttaaaatgagtcttcggaagcaaacccctagtgacttcttaaagcaaatcatcggacgaccagttgtggtaaaattaaattctggagtggattatcgaggggtcctggcttgcctggatggctacatgaatatagccctggagcagacagaagaatatgtaaatggacaactgaagaataagtatggggatgcatttatccgaggaaacaatgtgttgtacatcagtacacagaagagacggatgtgaagacaccaagagagcaacgcttttcatagttggatatatttttttatgaattttttctaatttttgcttcttttgtgatacaatttgtcctctttttataatagttggtgatttttcactgacatgtgagtaagataaatgtatacaattgtggatttaattgtgaaatgttctttcacttgtaagtttcagtcattttcttttacctcgttgtcagtgtacagaatgctaaaataattaaaaaaagacaaaatatacctcttcctacaagattatttaacttaagtttcgagaagtgtcatttcatttgacttgcttttcttatccagctaaaatgatgcatatattttatatattgtatggacatataattaaaacattttggaggaaaaaaaataaataatgggctcgttggcctcat

SEQ ID NO: 225372 - DNA, 639 bp, Homo sapiens
agaaaagtgcccctgcctcggcgctttcggttttggctgggatcatccgcggcggccgggctcgtggggcgcctggagtgagggttctggttcccgccggcgaggattgttaaaatgagtcttcggaagcaaacccctagtgacttcttaaagcaaatcatcggacgaccagttgtggtaaaattaaattctggagtggattatcgaggggtcctggcttgcctggatggctacatgaatatagccctggagcagacagaagaatatgtaaatggacaactgaagaataagtatggggatgcatttatccgaggaaacaatgtgttgtacatcagtacacagaagagacggatgtgaagacaccaagagagcaacgcttttcatagttggatatatttttttatgaattttttctaatttttgcttcttttgtgatacaatttgtcctctttttataatagttggtgatttttcactgacaatccttgcgtgaatatgttctacaaaggcatccagtttcagtctgaagctacaaaaaggggccacaggatcagaagttcagccactgattgagtcacctaaataaaaaacagaattggaaagccaagagtgccacttgcacataaggagtgggaattc

SEQ ID NO: 225373 - DNA, 319 bp, Homo sapiens
gcggccgcctactactactactgctcgaattcaagcttctaacgatgtacggatgtgagtaagataaatgtatacaattgtggatttaattgtgaaatgttctttcacttgtaagtttcagtcattttcttttacctcgttgtcagtgtacagaatgctaaaataattaaaaaaagacaaaatatacctcttcctacaagattatttaacttaagtttcgagaagtgtcatttcatttgacttgcttttcttatccagctaaaatgatgcatatattttatatattgtatggacatataattaaaacattttggaggaa

SEQ ID NO: 225374 - DNA, 619 bp, Homo sapiens
agaaaagtgcccctgcctcggcgctttcggttttggctgggatcatccgcggcggccgggctcgtggggcgcctggagtgagggttctggttcccgccggcgaggattgttaaaatgagtcttcggaagcaaacccctagtgacttcttaaagcaaatcatcggacgaccagttgtggtaaaattaaattctggagtggattatcgaggggtcctggcttgcctggatggctacatgaatatagccctggagcagacagaagaatatgtaaatggacaactgaagaataagtatggggatgcatttatccgaggaaacaatggtaacatttcttcgccctacagtacagcattcaaaataagcctttctatttataatccagatcaccaaagaggtttctagataatttaaaagtccacttttaggcttgattattttaaaatgcttatatgtcagatcttcagtttgaccagttattttgtagatgcttcatggaattttgaaaccaaaattctctccttcccttcctttagtgatgaggaactgagggacattgttctccttacctggaaccctgctttctcgaatatagtgtagtatatctccccaacacatattc

SEQ ID NO: 225375 - DNA, 747 bp, Homo sapiens
agaaaagtgcccctgcctcggcgctttcggttttggctgggatcatccgcggcggccgggctcgtggggcgcctggagtgagggttctggttcccgccggcgaggattgttaaaatgagtcttcggaagcaaacccctagtgacttcttaaagcaaatcatcggacgaccagttgtggtaaaattaaattctggagtggattatcgaggggtcctggcttgcctggatggctacatgaatatagccctggagcagacagaagaatatgtaaatggacaactgaagaataagtatggggatgcatttatccgaggaaacaatgtgttgtacatcagtacacagaagagacggatgtgaagacaccaagagagcaacgcttttcatagttggatatatttttttatgaattttttctaatttttgcttcttttgtgatacaatttgtcctctttttataatagttggtgatttttcactgacatgtgagtaagataaatgtatacaattgtggatttaattgtgaaatgttctttcacttgtaagtttcagtcattttcttttacctcgttgtcagtgtacagaatgctaaaataattaaaaaaagacaaaatatacctcttcctacaagattatttaacttaagtttcgagaagtgtcatttcatttgacttgcttttcttatccagctaaaatgatgcatatattttatatattgtatggacatataattaaaacattttggaggaa

SEQ ID NO: 225376 - DNA, 619 bp, Homo sapiens
caaaaaaaaaaaagaaagaaagcaaagcactgagacattggtgtagaaatggaggtgatgcctacccccaccatggaatcacgcttcaatttaaaagttgttaaacatgttgacacagttttttttttgtttttgatataatcctgattttccttggtgaataaaagagaggtattagaaacagtttatcaaattcttaaaaagattttcttgaatattggctttgtacaaaagtctgtgctattttctgtgaggtatctgaaactcaataaaacaaaggtcctgccttctgaaagcactcactctaataggagctaaccccacacacacacacacatgtcaaaagccataacttttattctctactccttattcttctcaggtctgatcattttgtataaagcaaattggctgcttctccaaaattgagttttataagtggggaagtccagagttctgccaactgtagttttagaagcctcagatttatgcaaatgagtatgattttatattttttattttaaatcagatttcagtaactccctgccagcttatttttgctttttgaagaaccttatgggaggaaagccacaattctctatagttcctctttagctga

SEQ ID NO: 225377 - DNA, 453 bp, Homo sapiens
atgtaagtgtgtgtgcgctggagcgggtgtacacaggcatgttcactgcacctgtatacaggtgcaggcgtttcaggggggcattagctacacagcatttctcaaccttttggaagctggggtaatttggctctgaaacctgttccctgggtcgtgccctcttgcggatccaggagagcagggacatttgcctgtgcgttcactgccgtattcttggtgtctggagcagtgcctgacctgtggcgggtgcttagtgagttatccgtgcaatgaatgaatgaatcaatgaatgaatgaatgaatgaatgaacgaaccagccggaaccttgctggccgttgactgaaaatgtctggattcaattgactgaatcaaacagacttagagcttgagagggaaaaattatttcacttagaaaataaaagttatctctgcaggactagacatgaaaggaa

SEQ ID NO: 225378 - DNA, 341 bp, Homo sapiens
ctttcctcctttcctcccctacagcttctccacctttcctcctcccccacagcccccagctccaccatggatcagcagtcacttatgcccagtggttacagtctggaaattatagacacgggccccttggaacagtgtcttcaaatctgcagagagaagggtgaccgtgcggaggtcaaatggataggattggggagatgaagaaggaggaaataaaggaagatgactactcacttatgtggttctgggagaatagtgctattctctgagcttaggacagaatttatcagttaaggtgctttcagcagcaaataacaggaatttcaatgaaaattatataa

SEQ ID NO: 225379 - DNA, 1183 bp, Homo sapiens
gaagaaggtagctatgccctttttacaaaactataatttgcaataaatcaaatagccttatttaaaaatctggaaataagttatattttaattaaaaggggcatttaaaaaatctgtaatcagaaatgttgattagcagaaagagaaggagtatgacatagtgaataattttttaaatagtaataaagttcaaattattgccaatagatggaaaattatgaacagactatgccagtatcagaaaaatataacctcagcttcatttactggaaataaaccagtctattttagtagattctttgttgctagccacaggaacttttgtaaagcttaatattttattctccttcttattccataaagctctttaatttttgatacgtgaaatgtgatcctgcaatccagggactttgcttttaactctcctattaatcacctctgatatcaaatacattcttctagttaagagagagagaacatttacactccaaaagctctcagaaactcagcaactttttttttaatagcatatctacttctccacttcattaatatacaggcttattcagctgcccagaactagtaatattacagtcttcagaatgactgtctaaatttagattctggcttagatcctagtgactacagggttccaggtcattcacagcctaatttgggtagaagttctactgtaataactatcctgattgtaattctaaaggtgttaacttttaagtaatggcatttcataggatatgttagggtctcgtgaataaatatctcagatgcaggatccactaattttttgtcttattcagaagctccgtgatagtaaaaagtctatattttttcttatatttgttctgcccagtaaacctttgtttggtgacttacatgtgagaaaggtgtaagtagaaaactgttgaataattctgaaacctagattctagaacaggtaaaaatgaatttgtaaatagaatgcttatttagtaagcattaaacacagatccatacctcattactaacttagacattgggcttgatctggaatttctggtaatctgctccaggtagtcagtcagaatatcagtaagtaatgagtatttattataggttctaattagtatggttttacagtttttctattgttgtaaaatatacataaaataaaatataccaattt

SEQ ID NO: 225380 - DNA, 361 bp, Homo sapiens
cttcaggaacaggtcccacgctgacccctctcgaacttgttttgctggtctcagaattatgtgtctgccctgcctcctggactgggagcttttcgaggagcagtatcatgtggggattaagagcacacactcgagccctaccacctggttgacatcccagctctgctgctgcctgactgtatgatagtgggcaagttacttagcctcttcatgcttcagtttcttcatctataaactggggataacaatagtacatactttttagggttgttgtgaggattgatttactagtttgtatgtaaagtgattaatgcctggtacatagtgactgctatataaatgttggtgatccataaaaaaa

SEQ ID NO: 225381 - DNA, 262 bp, Homo sapiens
gtacatttttattaattaattctagtgatagcattttgttggataagtaatttgggtaataccaatatgtttctttctgcgtgttttccttacaaaaatcttcttgtcatgaaacattatgatgtgagtataatttacaggttgaaaacagcctaacccatacccaaataaaaatgttagaaacatcttgctttaaaggtgggccagaaatctggctgtagtagaatatctggccagcacacacagatgtctaaggggagtt

SEQ ID NO: 225382 - DNA, 498 bp, Homo sapiens
ctaacgttagctcttttttctccataatttctaatcattatttacatttcaaagtagaacaaagtaaaagaaaattccttagtatataatgtaagaaattaaaagaaaatttcgaattcttaagtgagtaagaaagcttagtgttttggttattggaataagatacagaaaacctgaattaaaaagctaaaaagtgactgggcgcagtggctcacgcctgtaatcccagcactttgggaagccaaggtgggcggattacttgatgtcaggagtttgagaccagcctggccaacatgatgaaatactgtctctaattaaaaaaaaaaaaaaaagaaaaaaaagaaaaaaaattagctgggcatggtggcacacactgtaatcccagctactagagaggctgaggcaggagaatcacttgaaaccaggaggtagagggcagtgagctaagatcacatccactgaactccagcctgggcaacaagagtgaaactccatctc

SEQ ID NO: 225383 - DNA, 452 bp, Homo sapiens
gaaaggagggaaatttttctaagcagttaagttttcttcttaaatatcctccttcaccatttggcttttcagacaggaaaacaaatgttttcagacaagaaaacaaattttcttggagccagctagcctctgctgaaaaccagaagccagggcctatttgcaagacttgtaatatgcaactttgcaaataagcactcaaaatttaccatctcacctatcagtgagtcccagacccccaaagcaactggctttcttactgacatcattgtctcatgtaaataagcactctctgcataggctcttttgggtaacatttgcaaagtccagctcaaatctgtactgtgatggttaaatatttgctatatttatatatctttgtagaaaacaaagtcactttctggtgaaccaatgaggaaaaaaaagtactgtagccaatatctttaaaaataaga

SEQ ID NO: 225384 - DNA, 341 bp, Homo sapiens
ttaagggaaattgacctgtaaacaaatggttgaaatgtggtctaaagaagctagtagtggctgggcgccgtggctcatgcctgtaatcccaacactttgggaagccgaggcgggcggatcacctgaggtcaggagttcgagaccagcctggctaacatggtgaaaccccatctctactgaaaatagaaaaattagctgggcatggtggcacaggcctgtaatcccagctactcgggaggctgaggcaggagaattgcttgaacctatgaggcagaggttgcagtgagccgagatcaagccagtgcactccagcctgagtaacagagtgagactctgtctca

SEQ ID NO: 225385 - DNA, 417 bp, Homo sapiens
tctctcattcgtatttttccatcaccttttttgtgtttcccaaaacatctgtcttctcctgggcccttccaatcgcaccttcacctctgtgttggttctcctggctgctgccatcctttcttctgccaacttgactttgtctcctgctgtctcacttggttgtacaggttgagcatccctaattccaaaatccagaatcctccaaactccagaactttttgagcatggacatgatgccacaagtggaaaattccatacttgacctcatgtgatgggttgaacaaaattattaaaaatactgtataaaattaccttcaggttatatgtataaggtgtatgtgaaacatacatgaatttcatgtttaagcttgtatcccaagttatctcattatgtatatgtaaatattccaaaatctg

SEQ ID NO: 225386 - DNA, 321 bp, Homo sapiens
tccagtgttcaagcgattctcctgcttcagcctccaagtagctgggactacaggtgccagccaccacacctggctaaatttttttttggatttttagtagagatggggtttcaccatgttggacaagctggtttcaaactcctgacctcaggtgatccacgtgcctcagcctcccaaagtgctgggattacagacacgagccaccgtgccaggacaaaacaaacttttaaaaaacatagtaatcatgaagtgtgagtgggatgtgaggatgaaacaatggcaggatgctgctagctgtggacgccgggaaacaggcacagg

SEQ ID NO: 225387 - DNA, 563 bp, Homo sapiens
gttttcatgtatgtaacattcagtgtaggtatttaagacagctgaaataaaaataccttctgacattttcaaatactagaattctgttttgttttattaaagcattaccacttgtttttaagcattcctgttagaggctaagagctaaagagttatttacagtattcaaattgaattttccttatcttttaaaatgctcatcttaaaatatgatctttattgttttggccatacaattgtggaactacatctctgacagtggaaaatgtatagttctttcagaagtttgtggtaaaatgactttaaagatttgatagaaagtaaggcatatctgaattgcatggtcggaagtacctgaaaaaagtaaaattgatatatcatttgaaaatgaaatgcatatccctggataagcagagcaccagattttttttttcttggcatccctgattttaattaaataggagtcagcaaccgtttcaagagcaggacccaagctctgaccctttgcactcttcacctgcaaggatggctgaagtagtggcaggaaagctctctgggatgta

SEQ ID NO: 225388 - DNA, 225 bp, Homo sapiens
taaattgtaggtggcctgaagtggatgtcttctgaggatcacaacttgtattaaacgggcatagcctgacctttgttacacacaacatggtccatttccatatttacaaaatgtgtttttaggaaacatagtataataaaatatgaaatgaggcaaaagggtaggaatttggctttcattttgcttttggtagggagcttttgtctcaatcttggaacaaactga

SEQ ID NO: 225389 - DNA, 488 bp, Homo sapiens
gcctaaagtacacaacactcaattcttcattactcacatgtggcctgaccgctggtggactggctccaggaaaatctgaaccctgggctgagcctccccgccggctggccaggacagacctggatgccctccaccctccagccaaacttatttttttcatatcatagctgcagaatattcggaccctctagtcccagccgcccagtgaacttgagctgtgtgaccttgagcaaaaggcaaaatgtttctgattttcagtcccctcatctggaaaaggaggaggctgtgggacatgatgatctttgaaagtctaataatgaaacaaacagaaaacctgtgcttctaagttggtgagtctggaaaggtacgtctgttgcttaggaaaaaaagtcccaaatcccaaagagccccttttggcaagtgttgtacttaagacaatccgggcgctgcccctcctgaggcgggggggactcgaggaccggctttag

SEQ ID NO: 225390 - DNA, 400 bp, Homo sapiens
gcagagcctgagcaatatccatttaatattttaagagaagaggcatgccccattttaataactgaatgtacttgtagcaaaaaaagtggatttatattgaaacacacattttcgatgaaaacacaagccaattctttaaaaaactgcccagatatagagaccatgtaggctaaatttgtagattccatattttttatgttaaaaaaggaaactctttaaaatattccaattatattcattagtgattagatgaatgattgtagttaaatagtgatgagctttgtcaaattgaaggaaagaaggcttgtggtaatttgcaaacttcatgcttgaatggctcagcacaatcgacattttaattagtaacttggatgaaactataaaaagtaggtttgtcaaa

SEQ ID NO: 225391 - DNA, 439 bp, Homo sapiens
agcctcaaaaaaaaaaaaaaaaaaaaaaaagatgaaccagttttgaagtaactgaagaatttaagtatatttggccctatcccttccttgaagaaaccattttttaattgtttttaattatttgcatagctttaaataatatactcatgctgatatttgagctataactttagattttatctttcgacttcctgctacatacataggcctttagctcaccactaccacccttccccagaccttctcaatttcttatacttaaaatattttgttctttataaatgtaaacgatatttatttaaacctgtatttcttgttccatcaattctcatgaagtaattttataagatactttctcaaccttcccatcactccctccacctcctaatttgccagcttttctattttgtcaagattaacttttatattctggtctgta

SEQ ID NO: 225392 - DNA, 404 bp, Homo sapiens
ggagaagagagcaagaaaaggaatctgtgttaaatcccgacagcctgcaggagaagcaaatgcccttcattttcttcatcagcagcgagactggcatccctgtagctttgagaaaccatgctagtgtagatgccagctccctccagcgggcctgactgggagaacttgggctggggttctggtctggggctcctaggcctgatgggaagagagttcagcccagctttcctgtacttcagctcgtatgcagacgatggccattgttgaaatgagagactcaaaggaagctggaacctgaacttttttgttgtctcgtggacacctgtgttcagtttcgggttctacctcttgctgtctgtgtgttcttaggtgactcacttaaacctttctgagtctcattgtct

SEQ ID NO: 225393 - DNA, 534 bp, Homo sapiens
actgggttgatttcaatactatacaggcaagaagataaagcacagctatatgttaaaacgtggatcaatcttaaaagcataatgttgaatgaaagaaaccaaacacaagagaatacatactgtacgactctatgatgttaataaaaacaggcaaaactaaactacacaaataggaagtcatgcttaagtggtaaaatgttaaagaaaagtaaggaagtggtgaccataaaagtcaatgtttggatcctgaatcaaacaatctaactattaaaagatatattttggtcgggtgtggcggctcacacctgtaatcccagcaccttgtgaggccaagatggaaggatcacttgaggctggaagttagagaccagactgggcaacagagcaaaactctatctctacaaaaaaaattcaaattaggtgcacttggtttctcaagtcacccacttagccctcttccaagttgtactttccttcttttctttcctttccttactgttctaaagcttttaaataaactttcactcctgcttt

SEQ ID NO: 225394 - DNA, 500 bp, Homo sapiens
ctgcctctcgttcctctgcttacgacattttcatgaataagccagaagatagtcagcacagaagcctccctacaacctggaaaaagaaatgagctttcactttgaatatcacacagacatactgaggtgggaaactacatgtgcgtgcttgacacaacttgaaaacaatacaaaacaacaaatcacaattgcaaaatcatacaacacaaatggaatcacagtccataagggaggccatgaaagagagagtgcatgtggtggacatattaagctgatatgcagacctgggatggtgtcagacaagtgctgaaggcactgtttgtttcctgccccaatgctgagctcagacaacaaccgaatccagagcctgccatttatcacttgaccacgtacatctgaacctgcaagaccctcgcacagccttcactgaggtgtgaaaactgacagtttccttctcctgccactggttctgcagtaattaaagcttttttgctatcgca

SEQ ID NO: 225395 - DNA, 339 bp, Homo sapiens
ctgcctctcgttcctctgcttacgacattttcatgaataagccagaagatagtcagcacagaagcctccctacaacctggaaaaagaaatgagctttcactttgaatatcacacagacatactgagggatggtgtcagacaagtgctgaaggcactgtttgtttcctgccccaatgctgagctcagacaacaaccgaatccagagcctgccatttatcacttgaccacgtacatctgaacctgcaagaccctcgcacagccttcactgaggtgtgaaaactgacagtttccttctcctgccactggttctgcagtaattaaagcttttttgctatcgca

SEQ ID NO: 225396 - DNA, 363 bp, Homo sapiens
tccaaacacagctgtggtgatagaaaaggattacttactgaaatgttttagttagttgtgtgagaattgagagttgtggggactggtttcgtgatgatatgtgtatatctcctatatggcataatttccttagtgggatctggggcagccccatgatcaaatatatgtaagcagaatctatgaatcatctaagttggataaagactataaatagtctctcgttagtttaggagaggtcaagttttattgtcaaactgagaaaaaagtttgggcttttagagctttttggatttcagagttgtggacaaaagattatagacctgtgttccagaaaaaaatcttattggctattcattcacgaca

SEQ ID NO: 225397 - DNA, 228 bp, Homo sapiens
ctgcccgcctcccaaagtgctggggttacaggcatgagccactgtgtccaacctaatttaaactttatctttgtaagtgccagggtaatagaggctacccagtttgccattgtgctcacccaaagatgaaagtgctaaggttgagtggaagaattcccaattattaagcccctcctctccctgtgttgaaaattctccatgaaaacccatctctggaggtgtatcaat

SEQ ID NO: 225398 - DNA, 575 bp, Homo sapiens
atagtaatacaactttttaataaagcaaagctgttatctgtcagagttcacggtttgtgtgtacttgcataccctgtagtctagtacattttatatggctatgctttatagagctttagaaagtgaggtcaagctaaatttcttgactttaagggtggcctgaatagttcaccataatctcattattgaaacatgattatccatcttaatatttaagcatgttgccttcatccatccatcccctattttaagtgttcttttgtttttcgtatgttagtttcccagagtcaaaatagatttttaactttttctgatgtttcaaaagttttaaaagaaatctgtatggtgtatttgaaggcatgaaaatgaaattaacattttgttttatactttctcccccttttctctacatttaagatacacgaacatatatctaatatatcagagacatcttccacattgatagaaatgtgtacccatcatgtcaaatgatgggttattatcatttgattgtgcataaatggaagtgctcctctatcaatagatatttaggctttttggaataactttatttt

SEQ ID NO: 225399 - DNA, 438 bp, Homo sapiens
cagttagtggttgtttacaaaactaaacatactttttactgtatgatccttcagttctgctccttggtgttttactcaaatatgttgaaaacttatgtccacacaaaaacctgtacatgaatgtttatagcaacatcagagaataccattggtgtctgggtccctggtcccggttttccctaaaacctatctgctgttagggcctgcaaaacaacagagtatccctaaaattaacttttctttttcctttagctggaatatcccttcaggtacagcttctgtttcttgaaactaaaagattctcaagttcctctcacttcctcactgagaatctcacctaacacccatgtaattatatatgtagtcatctgtcatttatagatgggatcactttaagaaagcttgatgtattaaaatacaagcgtccaaacctgaaaa

SEQ ID NO: 225400 - DNA, 344 bp, Homo sapiens
ctagagtgcatatgcaaataacatgatttatgatgaacacctgctttccttctgagggtatggaactttggtaacgtggctggttgcacaggcagagaatacttgaatgaccagcatcaaaaaccccggattctgagtcttaaatggtcttacctgggtagaaacactgcatatgtgtccctgcatttaactgcttcagtgtgttatgtgagataaccactgctccacccagaggaaaaactttggaagcctgtgctggacttgtccagactctgcctgacgtgtttttcccttgttgatcctgtgtgttcttttgttgtaataaacaagagccatgattacaa

SEQ ID NO: 225401 - DNA, 399 bp, Homo sapiens
tgtgacacagactagcagaagttttttagggatttctgagaacataggtgctttcttgatacaaagcattgcccctttctagaatacaaagctgaagatgaaatgagcatcttatggatgaaaccaacaaagtaaagatggcagtttataaatatacaagttgcctaggccactgattatattgcagattcactgtaccagccctggacttttattcctgaacactttgtgataaaaaatcacaagcattcctgtgcaccagtaacagagagccaaatcacgagtgaactcccattcacaattactacaaagagaataaaatacctaggaatataacttacaagggatgtgaaagacctcttcaagaactacaaaccactgctcaagaaaataagagag

SEQ ID NO: 225402 - DNA, 356 bp, Homo sapiens
gagcaccccaaacaacttttgttaatgtgggaactatatatcaatgtctactgtgttagaaaataagactaaaaactgggtgtggtggctcactcctgtaatcccaatgctttgggaggccgaggtgggtggatcacttgaggtcaggagtttgagaccatcctggccaacatggtgaaaccctactaaaaatacaaaaaccagccagacatggtggcaggcgcctgtgatcccagctacttgggaggctgaggcaggagaatcgcttgaacccaggaggtgggggttgtagtgagctgagatcacgccactgtgctccagactaggcaacagagcgagactccaaatcaaaaaaa

SEQ ID NO: 225403 - DNA, 555 bp, Homo sapiens
ctagaggatccccgttcatgatgattgctgggtgtgagccagagctgttgtatcattgtgcaatcatgtgggatccgaggataaagccagcaccatggaaggagggattggaatgagaggaagaagccagatcaggtgacaccaaaaaaaaccctggattaagatgtgcctgaagcctgggagatatattctcctaggacgttcagttacatccgcgaaaaaacctcctgtttacttcagccagcttcagtggggtttctgtcactcgcaacagaagcgttctgactgaaaagaagactgtcacgtcaggatggagacttgtgttggcctgagaggtgacatagccccttaccaggaggctggaagaagacacatgttcagaaagccgggcaagttcccaatgtctcccgagggttttccaaataactctgttacatcctatgaggaggaaccatgactacctcccagaattgctgttacacgccattagtgacatcaagaagacactactaacccactggttagacttgttttaacctaatggggatgtgctta

SEQ ID NO: 225404 - DNA, 489 bp, Homo sapiens
agcagaggaaacgattgttattctgacagtagaaagatcatagaacattagagatcattgagttagagtcatttattagaaaacaaggaaaacaagaggctccatgttattcaggtagatgatagcagagctgagatttggaaggcaggtattctctcagtgtctgccttttttaaaaatgatataatgctgtcttcttccttcaccttttcttttaaaatttcttgtgggaagacatttgcaaaaaaaaccagacctagtgtataggcaaatatcacatttatttactccaggtcttcaagtatctggaattgaatattgagcctaattcctgaatgtattttgatctcttataggacttgaatcttttagaatgatttacacctcagtgggactgtggaactcctatattgtaatatctagggacaattgcaatatctggggtgatagtataaaggaataaataatatagagagatgataaagacca

SEQ ID NO: 225405 - DNA, 549 bp, Homo sapiens
gagctgctctccagctataaatggctctgtagctgctggcatttgcaccacaacagaaggaagaatgcaggctgggatttgcagtaataatctgaatccagtgacgtggcaggcctccacctaaaatacgtccactgatgcaggattttgctgcaattcttgcacaaacatgttgatgacattgattcctaatggacagaaggcatcttagggactgagaggcacttcttgcctagttccaatttcctctcagacagctggtcccagggaatggccacccagaccagggaagctacctagagctggaattctttgggaaatgttgtgagcccaggtcttagcccctgaatctgaatggttcctcatcatgaggtgtaagaagtggcttcacctagtttcatctacatgcctacaatctcttaggaccagatgtgtcacggaattttgacttgttcaggtgttagaaaggtaacaagatgcatatacatgtgttatgctgttatgcaacagcttgagtgtggtataaagtggactcctatagtcaattgc

SEQ ID NO: 225406 - DNA, 284 bp, Homo sapiens
atttcaagttcacaccatgaaatcatggaggggatgaaatggaattgcccagtttgttgagagaacatgccgacacttcaagggataaaacagacgtgtcaagactctgcaggcgtgaaatctgcatatgcgttggtaaactagcaacctgctccttctccaattatgtggttctgtgacattagtaaacacagaaaaggaccttagctcatcccagggaagagagactgtgctggatatgagaaggatgcagtctgggctacaattatctggtgtagccatac

SEQ ID NO: 225407 - DNA, 528 bp, Homo sapiens
gtattattctctgtgtatgagataaatgttaaatgaggcaaaagacctgtctctcaaatatatttgatagtgaacatttcagagtaaagagggaaaaagctaacatgatgagaataaaaggagttccatgcttgagttgaaatgccctccccacccatttctactgttcctgaatcactggacatttctagattaaataatttaaaatttgttccagatttagttttaaaagcattattataaatttaattttaaaaagtaattatataaaaccttcttttatcacttatgtatagtacctactttttctctctatgcaactacgtttatgtacttatttctgaatctctttgaatttatggagagatcctccattaatgtatacataaaaggctggctattcactgaaacattaagaaaaatgaagcagtatatgttcaccagtcagttgtatgaaaacatataattaataattttttgaatggagacttcttttttttgtgagaaataaattctttattaattaac

SEQ ID NO: 225408 - DNA, 685 bp, Homo sapiens
gcatgaacaatattctctaaggtttcttccagctttttcatgggttctaacagccaattaaatgtccactgtaagtagcatgctcctgacaaccatacacggatacttaactaacatgtaggaaagtgctattcttattgacagtgctatcacagttattcaaaattatcattagtaaaattatacttatttaggtcatgttattcttaaacattaatatatttagtaatatacattaatatattttctatgactatttaataatatacttagaagttaagttactgaatgttcaacagctgccttgtacacattgtctaaatcaatcttcactatactcataaaagacagatactattactttgagaaaacaggcttagagagttaaataacttgactatgataaactaaaaattatagtcctggattcaacctagacattgtggcaatcaattgagtcacaatcgatgtgcaacctttatatattttacagtattctatatcttaaaatatatcagcctatcttttggcttaatagtgtctttgcaataaaaaaagaaattaaactgaagtatgacatcactactgtggccaccaggtggcagcagcacaataatgaaatagtcacataagaaatattgctattttagaaatcaaaatggtctaagatagagattcctgttta

SEQ ID NO: 225409 - DNA, 2122 bp, Homo sapiens
  misc_feature (1406)..(1406): n is a, c, g, or t
  misc_feature (1991)..(1991): n is a, c, g, or t
tggcttatctataatttcggaatttttcttttacaattaacatgaaccatttctgaaacaagaaaaaaaatataaaagaagaaactaagaaggaaataacctgttttaattgagacacagagggcaaataccacatttaatggtaaaaacagaacggaaaggtatttttcattggtgagagaaatattggtttgtcttcttgtctgtttttttctcatcctctctcacagataggaatgtggaagatgaggagagagggaaggaagaaaacaaggaaaggaaggtaacagcagaattgttacatgatgtggacagccgccaaactcaatagttctgagataaataactgtgcaaggtttagaggcaatacccaatgtttgaacctcagagttacacaatccacccaatacagggataagctatgtggcagagaatctcatctgagaaagataaaggatatgtctcaggaacgcttaatcaacaggtttgtccttcacatttatttatcacctacttggtgccaagcatttacaatatcctagggagacaaacagaaaatgttatctttttttacatggcattggattcacatggcatgtcattttcatattgcgtagagtggtgagtgattaggcctgtcaaagagaatcaggttcaggttctgcctccgatgccaactatgtggaggatgctacaccaagcactgaagctcagaaggagaacagttttggcagggcaagaaataagctatgttctacctgttatgtttgtggtaagtgaggaagattcaaacagagatgtctttttggtagctggatataggcatttggagtttggagagaggatagcaatttggggatcctcaatgcagcatgtagagaggaggagatggcccctggacagcatacagaaaagaatgggccaaagtttcacggggtgggcagaagaagctgccccgggaatgaagacgaagaaggaatatgcagagattggggtaaaaccaagacagaatgcttgtgaaatgtgcccaggaatgatcctctccactacttaaaatttgcttaaaatgagctgtttcagtacatccctgtgcagctgtgagcagctgtcctggttaataacatattcccatgtcccaaaggacacaaaccttggaagatgtgtttcccaataacttttcaaccttttactgagcagaacacatgaattttgcccttcctcatttggaaccatgtggaaaggggaaccacgaatggggatctgcttttggtttggattggggcttgctatggtttggataatgggattttttgtccccatcaaatctcatgttgaaatttgctccccactgtggtggtgtcagaaggtggggcctaggggaaggtgtttgagttataggcgtaganccctcatgaatgacttcgtgctgggctgctgttctcactctggcgagatgggattaggttggtttattattatgtaaagccaggatgccctttgggtatggtgtctcttcacacgtactcacttctcctttgaccttctctgacatgttgatgccggtgccatgcttcttgtacacctgcagaactgtgagctaaataaccctcttttctttataaatcctcttttctttatacccagtgtctggtactcctttacagcaacacaaaatggactaagacaggactgaaactcaagcaatggatgtggtaataggaaagagaaaggtacagtgcattcagcagagtcacagttgtaaagtaatgccaacaaaaaaaaccatctacaacgtgaaattcgtctctggaggtcagttgatgacctgaggttcactgaggataaactaaaaaccatacggcttagagtctatcacagcctctgctaaggtaagtgtgagtgacgcagctctattcccaaagacctggcccatgggaagtagtgtacaggcaccagaccccaggtcaagaggtctggctctgccactaaangctggttgagcctagaaaggcctctttacccctgagcttcagtttcctcatttacaaagcagaaatagatatgtctgccttatgtttttcacaggccttttacaaatataacatgcaggatgcagagtgct

SEQ ID NO: 225410 - DNA, 436 bp, Homo sapiens
tcacgaaggagctggaacattcacccaggcccattgccatgtgaattgtagaaggtctgtggggaagacaccatctgccactgtttggcaggatttggccaccatggcacagagtgggcaattgtcctcaaccttggaggcagaagctggcagctggccaaaagtctgctttctcccagaagagataggcagtcactgagccgagatactgatgatgtctctctcttatcgtgcaacatggagagcgggagaaaatgagggaggacagaagagaggagaaggaggaggaaaataagaaaaggaatactaattaactcagcctgtctatccagctaagcttgagcttgattttgctctctagttgaatggaacatgcaacctgaatttctgaataacagaattaccaaattactgtttaagtgtttgagaaaaaaag

SEQ ID NO: 225411 - DNA, 1041 bp, Homo sapiens
actttatggaatttttttctgaatattttccatctgaggttggttgaacccatgagtgtggaacccatgaatgtggaactcatgaatatggaggctgattgtacaggacaaaaagtcataaataaaatgaatgaataaagcctactttaaaattgatatatatttaaaatttttaaaattgtaatttgggagccataaaaaagaatacaggtagtgtctcagatttaggaaaagtcattatttttagctaagaaccatcaattctagacttgttaatcttatcttcactttaatcaatagctctggcaggccactttttggggagagccatattttttgtaaaggaagactgaaagtcagaaagagtgtgtatgtgtgcaagagacaggaacctcgagctattgggccacaagggcacatccccagtgacctgaggcccctctcctgtactcctccaccctcacctgggtgatcttgtcttagattggtgcctcagcagaatcagaacgattgattacatgtcaaggaccaccagggaaacctgcagatgggtgaaaccgcagggttcagtctgggaaagccacggctccaatctctctaattacaaaattaatgagggctggaggcaaagcctccagacggcccagggtgagccagggagcattttgatgccctaaaacagctcatgtttatttcgtggtcttacctgatcgtgtgtggattgaagtgaaggggtgaggtagaaatggagcttcccctctaagattttgcttcttgagttaaggttggggtcaggtcagaaaatgctttttcatcgctagtgttttgatagcaaaagcaaagagccagtggcagaacttttcaaatgactcttagaggagatgacccagcgtccctgaggtatccaacacactagcttgtaagaataaggatcagaacatgactcgtatgtttgtattctgcagaatctctccctctctctctctctctcacacacacacacacacacacacacacacattttaaaagctttcatgtgcc

SEQ ID NO: 225412 - DNA, 282 bp, Homo sapiens
aactcaaccaagatgatagggaattgaaggatgaatttcgggctgtgacactaaatctaactgcattacaaatgtaggacataagctcaatgacgatgatggagagaaaaatatctcacctaggttactggaaacctgtgttttaactaaaagtcataaggggccagacgtggtggctcacgcctgtaatcccagcacttaaggaagccaaggtggacagatcacctgaggtcaggagtttgagaccagcctggccaatgtggcgaaaccccatctctacta

SEQ ID NO: 225413 - DNA, 304 bp, Homo sapiens
agtgagccgagatcgcactattgcactccagcctgggagactagagcaaaactctgtctaaaaaaaaagaaaaatcacaatttcttagcaactagaaataaaaggaaatttctttcacctgataaagggcacatatcagacatatggaagaaactttatacttcatgttgaaacatcagcagcaggaacaagacaaggatgctgactcagtgctacaattcagcaccgtcatagagtcctagccaatgcagtaacacacgcccccaaatcagaagcacccccattagcagggaggacacaaggg

SEQ ID NO: 225414 - DNA, 587 bp, Homo sapiens
gatctgaagtttgccactaacactttagcataatcctggtgagcaagctcatataattttaggcagctagctaaaacatttcttactgttcatggctgtaaatttatcgtattttattgcacccctctctctcctcaactttccccattctttaactctttcttttttttctattacccttacattttatttattttacttatttttatttttattttactttaagttctgggatacatgtgctgaacgtgcaggcttgttacataggtaaacatgtgccatggtggtttgctgcacctatcaacccatcatctaggttttaagccgcacatgtattaggtatttgtcctaatgctctccctcccctttcccccaacccctgaacaggccccgctgtgtgatgttcccctccctgtgtccatgtattctcatggttcagctcccacttatgagtgagaacatgcgatgtttagctgtctctaaacaattagtttgatcctggtctttctgtagcctcctttgaattatctgaaaagttttctaagttgataggctgcccattttccttagatgctaagcatccattg

SEQ ID NO: 225415 - DNA, 375 bp, Homo sapiens
caaatggtgctgagataattggcaagccacatctaggagactatatcctcatctctcaccttatacaaaaatcaagtcatgatggatcaataacttaaatgtaagacctgaaactataaacattctagaagataacactggaaaaaccattctagatattggcttgggcaaagacttcatgaccaagaacccaaaagcaaatgcaacaaaacaaggataaataggtggaacttcactaaagaacttctgaaaagcaaaaagaacagtcagcagattaaacagacaaactacagagtgggagaaaatcttcacaatttatacatctgacaagactaatatccagaatctacaagggactcaaacaaattagcagga

SEQ ID NO: 225416 - DNA, 423 bp, Homo sapiens
ctgtggtgggaggatcacccaggtctcacctacagtgagctgtggtctgggtgacagagcaggagtccgtctcttaaaaaaaaaaaacaaaaaactgtaaaaggtttgatctgtagtgctgttttgaatatagttccattttgtatgcatgcatgtgtgtgaaaagtcattaagtctggaatgaaatatagagtatccgtgaagccattttagaattatatgtgtgtatatttatgtgcataggtatatgaatacataccttaggttccattattatcagtttttcctcttatttgtttgtatctactgtatatttctctgggaaatactcatggtctttaggtcatgttagctattgtcaaaatttagatatgaatcattgatttatatgaaaataaatgtttttgatttctctttacctgt

SEQ ID NO: 225417 - DNA, 306 bp, Homo sapiens
gaacaactgaaggctttcccacatttattacattcatagggtttctctccagtgtgagttctttcatgtgtaagatataaatgtagattatcaaaggccttcccacaaaacttacatttataaggttcatcttcactgtgcattaccatgtatcttcaaaaggtttgaacagaaatgaaggtttttccacatttcttacatggagtttctttccagtgtgaggcctttcatgtgtttgaaaggagtggcaatagctgaaggttttcacacactgcttatgtggcttctatgttcctgacactcatc

SEQ ID NO: 225418 - DNA, 433 bp, Homo sapiens
gggtttagtccacagacatacttgccctcatgcaacgtgatgaccacacgacaaggctatgcacgtgcaccctttgcacctgcgtgtgccgcagagccctccgcaggccctggactgtcacacctgcggcagctcactgcgcgccccgaaatacagtgtcaagaggaggagacaccagtgtgtagtgtgtagccatctgtgtaaaagaaaaaaatgcatgtatgtcaacgtgtgcacctgtttaccggaattttcacgaaatgatctctgggaatatccacaaggtaacactgtttgcccttggaagcagagccagggaacctgagctgtgggggaaatgggcattcgccctcatatcttctgcatcttttgaattttgaaccatgtgcaggaatgacctagtagaaagaaataaaatgcaaatgtttaagga

SEQ ID NO: 225419 - DNA, 434 bp, Homo sapiens
ttataaagtgcatttatttttgttgtcaaagtaatgttgttacccagtgtaacgtctgtgtgacctaagtaaatttcttccccaccttaactctggttatctttaggaaacgggatgtctgtggtcaaaagctccccatcatgacaccaaaccagctaagagtggtgggaaccaagatggcagctcacttgacctctgaagaacctctaacttcattataatctaatttccatgctaaatgaccctccccccagtgccaagacagctgacaatcaccatgacaacgaccagaagaaaccataaaaggacaaaaaagggggacaaaaactctggttctgagaagttatctacctaattcccagaaaagacatgaatacttttccccttgcttttaattccccaaccccttcattaaagatgctccatatctgtga

SEQ ID NO: 225420 - DNA, 432 bp, Homo sapiens
aagatagaccacatggtaggccacaaaacaagccgcaataaatttaagaaaattgaaattatatcaagcactctctcagaccacagtggaataaaactggaaatcaactccaaaaggagctttcaaaaccatgcaaatacatggaaattaacctgctcctgaatgatcatgaaatcgagatggaaattaaaaaaatcttcaaattgaacaaaaatagtgatacaacctatcaaaacttctggaatacagcaaagtcagtgctaaaaggaaagttcatattcctaaacacctacatcaaaaagtctaaaagagcacaaacagacaatcaaaggtcacacttcaaggaactagagaaacaagaacaaaccaaacccaaaccagcagaagaaaggaaataaccaagatcagagcagaactaaatgaaactgaaac

SEQ ID NO: 225421 - DNA, 457 bp, Homo sapiens
aaatcaaaacacgtttaatcagtcccctattgttggaatccggattttttcatgcttagaaacaatactgttataaacatttctgtaagtaaatcttcgtgcacagccttaatcatctgcattaatgcactgtgtaatgacattctggtcaacaatgaaccacatatatgatagtggttctgtaaggttataatgtatttttgctgtaccttttctatgtttagatacacaaataacactgtgtaacaactgcctagagtattcagtacagtaacatgctgtacaggtttgtagcttaggggcgatgggctataccatcaaggtttgtgtaagtacactccatgatgtccacacaatcacaaaatcacctaatgacgcatttcagaaaagatccctgtcttaagcaatgcttattaattttattaataaataaatgtattaaatttccttatatcct

SEQ ID NO: 225422 - DNA, 451 bp, Homo sapiens
ccagttgtaccagcagtgttcatctggccccaaattggccaatcattttcctgctcctggaaaattagacttggctttatattcaagtctgacctcaggaatttatggggcaaagtacacagatagatgtgtgtgaatgtccaatcagagaaagcacatctgcagaaagattaagaaattgatgtcgggtgtggtggctcaagcctgtaatcccagcactttcggaggctgaggcaggcgcatcacctgaggtcaggagttcgagaccagcctgaccaacatggtgaaaccccatctctactaaaaatacaaacattagcctccagctacgcaggaggccaaggcaggagaatcgcatgaaactgggaggcagaggttgcagtgagctgagatcgtgccactgcactccagcctggatgacagagcaagactctgtctcaaaaaaaaaaaa

SEQ ID NO: 225423 - DNA, 710 bp, Homo sapiens
ggtggaatgactttattttctgattttgttttattgcaatatgattaaggatttttaaaaaatttttgctacttcttagaatttattgatgttttctttgtaacttagtgttcagttttcataaatgttgcatggacatttgataagagttttgttttttaatttcagggtacagagtgcacccataatattgtagcttatcgactaggttaagtagcctcattatttttgtctacatgaactgcgatggtctaagaagtaaaagtctcctgttactagtatatttctgtatgtttcagcttgccttgctgtttctactttataacatacttttattttattttattttattttttttttaagacgggatctcactctgtcacccaggctggagtgcagtggtgtgattttggctcactgcaacctccatctcctgggttcaagcgattctcctgcctcagcctcctgagtagctgggattgcaggtgtaaaccaccaagcccagctaatttttttgtagttttagtagaggcagggtttcatcatgttggccagactggtctcgaactcctggcctcaagtgatctgcccatctcagcctctcaaagtgttgggattacaggtgtgagccactgcgactggccataatatacttttttttttttttttttgagatggagtctcactctgttgccaagactggaatgcag

SEQ ID NO: 225424 - DNA, 142 bp, Homo sapiens
aggctcagggtccttggcgtgggtgcatgtgggtgggagagacgcacagtggctgagcgcacacacagtcaaatctgggtgtaggagtggcctgctggacgtgccccacagcacagcatgcgtgtatacatgcatgagtatg

SEQ ID NO: 225425 - DNA, 481 bp, Homo sapiens
ttttggaaagatccctgtggtggctcagtgtagggtgggccactgtgggcaagaaggggagcagggagggtggtgagtaggctggcagctgtccaagccagtgagggcggggccggtggagaggcgagagggctcagactcaggtggtgttctgaagggagttcctgcactggacttgaatgtgagggagagaggagtttagaacactttcatactgggctggggcacctgaggaaagcccatgtggggaagcaggtttgggggtagtcagtttcactgtagataggttagacttgaaatgtccattagatatccaggtgcaggtgttggcaatgcaagtagaacccccaggaatctggctgaaaatgatatttgagagtccttaccacataagatggatttaccaccccagaagtggatgagaccgaacatctggggtaagggggcagagagagaagggtctgaagctcgagcccattga

SEQ ID NO: 225426 - DNA, 498 bp, Homo sapiens
ccttactgataacataaacagttaatacatattttttatgttacgtgtattctgtacaacaaagtaagctagacaaaagaaaatgttatttgaaaagtcataaggaagagaaaacatatttactgttcattaagtggaggtggttttcataaaggtttacatccttgttgtctacacattgaatagactgaggaggaggaggggcaggaggggttttgctatctgaggagtgacagaggcagaagaaaatctgtgtattaacgaacctgcacagttcaaacttacatttttcaagggtcactgtgtgattggaatggacaatattttaggaaaatatgaataactaatattgacttaaatagtaaaaaatttgaaattgaatatgcaatcaagcttctttagtgaagacaccaaatggtgatgacttcatagattagttctcccaaactttcaagaaattgtcctacactttattttccagagcaagaaaaaaaaaaa

SEQ ID NO: 225427 - DNA, 535 bp, Homo sapiens
actaagtgtgttaatacatctaaagcactttgaacagggcctggcataaagtatgtgctgagaagggatttgctgtcacgatgactctacctcctgaccctgtgctcccagatctgtttcatgggactaagatgtggttctaaaaaccagtagctgtggcaggacagacacaagccacgttatctccagaccctgtacccaccatgagattgataggagttgtgcagcctctgagccttgtgggctccttttgctctaggccctgcctctcctggacaactcccagcctgatgggaaaggggaaaggggaaaggtccatccctgctttgcagactggggatctcactttgctctttcttgagctctccggcactctcactccgctcctctccctagcactctgttctctacctggtattcttccaggcctccaagctgggggaatctcaacagtccttctgtttcttcttatggcctctccctattaactctaagacctaagaactcagccctggtcattcttccaggggagaga

SEQ ID NO: 225428 - DNA, 373 bp, Homo sapiens
gtgtctccactacaggccatttggctccacacttctgcccccaatttcaaccagggcacattgacaatgtctgaatacagtttggattgacacactgggatgggagggatgctgcagacattcggggaatagaagtcagggatgccactaagcatcctacaatgcacaggagaatctcccaaaactaagaattatccagtataaaatattaatagtgacagcagtgagaaagtctgctataagataaatcgaattttctctcctgtgaattcctacttcatacttttttctgaaatgtcttttttatatcaatttgaaagatttaaatgttttaaccacaattttctctcattatgttttttggatttcttgg

SEQ ID NO: 225429 - DNA, 484 bp, Homo sapiens
aagcaaagtatttttgctcagtcttggggaggaaaaagtaaagatagcatgtccctcaatgagtttataattgatagggacacaaggagctctcactatcaggcaggggttatctaagacagtgaataatgcccagagaagggttataggaattggaggaggatgagaatctctggagaaatcacagcctttggaaaaggccacaaagaggggcagaacccgggggcacccggtggagaactgagcaggtgtggtgtttagaatttaggtaacgggagagtatggtgatgggcagtcttggaaatggactttctgggaagcatttgggtggagatcttggactagactggtgactatggtgtagtgggttgatggtgaccctccaaaatggtacatacatgtcccaactctcagaacctgtaaatgtgaccttattcagaaaaaggtcaatttgcagacagatgtgattaagttaaggatgtcc

SEQ ID NO: 225430 - DNA, 460 bp, Homo sapiens
gtgtgaaccatactcaagggagaaaaaaagaagtcaatggaaataaactctgagaggccctataaattagatttagcagacagccactgtattaaagaaccaacagagaatatgacaatgactcaatatatagagaatatccataaagaaatcaaatctgtttaaaagcaccagataaaaatttttatatttaataccatatgttaagattatttactatattttgctctccacatgagctcactttctggataattgcaaagttaagtaattgcctggaaaaggtaaacatttttaaagttcttaaaaggaggcttaacttacttgacacaactgcaataaaatagcagtttgaatcaacatacaatctttcttgtatctatcagatgatgtcatgcagaattgctaacacacactttttgatgtaagactttctcaataaacttcattcataatcaga

SEQ ID NO: 225431 - DNA, 467 bp, Homo sapiens
gactgtgtcctgtttatgaaaatttggtggctctgggactgttttaaggtttatgccatgcaaaagcttttggaagttcctggtttctttgaaaatacgaccctttcaaaaactcaataggtttatgatctatgtagattagacaaatccatgtgttactaaccacactcaaagttctttcctagatatagttttcaatcctgattcattcatttgcctttttgtctccgtttaatgatagttatcttgggaggttatctgaaactgtaaatttgggtgtggagtccaagatgcatgttgtaatttgtagtgtaattgttagaaagttttgcagtggagtgtatagctaacaagctcatgaagggtggataaaataataaaatataatcaatctaaaaggagaaaagaaagtagagaaaaagaatacagaaaaagaacaactgtctccacaagaaactataggttaa

SEQ ID NO: 225432 - DNA, 793 bp, Homo sapiens
catcggtgctgggtgtgagaaggggatgggagggagggttgttcatcagaggaggcttgaggaggctagctgctgggggatatttaggggtgagggtggaaaattttccagcacatcccatcacctgcactcaacttctatcttcaatgcatcctctgcccagaagctaccactctgatcctaccaccttccagtgaccccaaaactaggtgcccagcactagtaagtgagaggcactgaaaacagagccagagtggggaaaggagtggtgtgggtcactgaacaagcccgctggcatatgtaggtgaagacagtcattctacagcagtttcctgtaccactggcctgcaagatgatttccagtggtgcactggagaacattttttattttaatagtaatgtattagcaaaaatagaacaagcatatcacatgatttcacggatgttacttaaaatgaggctaagttaaattgaattttaatctaatttaaaggaaatatgattaggcacggtagcccacacctgtaatcccagcactttgggagggtgaggcaggtggatcacatgagcctaggagtttgagacctgtctgggcaacatagcaagacaccccatctctataaaaaatttttaaaaaattagctgagtgtggtgctacacgcctgcagtctcagctactcaggaagctgacatggaggatcgcttgaacaaacgaattcaaggttgcagtgagctatgatcatgccaccacactctagcttaagcaacagagcaagaccctgcctcaaaaaaa

SEQ ID NO: 225433 - DNA, 483 bp, Homo sapiens
tccaatttactttttcagctctgtcctcttcaataatggtgcatggtgaccctcaatatgagatacaagcatctgttatctggagactggctgctctcagtgaaaaaagaaggagtactgctaataggctttcacctcacagcctgaatgccaggccaccacacaagaactgaagaggccaggctcctccccattctcccagtgtgcaggtgggcccctcatccattgcaggcatgtgcagaaaagaccctgggcaggttccctcatctgcacaaaagcatctgatgtaaacacttgtggggtgagtcggagattctctggggaccctccctcatctgactcctgcatctatcactaccattacctcaaaaacaataaaaaagttaaattggcatttttttttaacctaaaggctagtgtatctggcaacatacaagatacatacctctcatagaagattaaaagctttttcgtaccagggat

SEQ ID NO: 225434 - DNA, 474 bp, Homo sapiens
gtctttgtctttcttcctaattagtccctttccttacattttccttaattatctacacacctgaatacaagtccctcccaattacaaagccaatgcctattttttgaaacagaaaattttaaaaacattttttgccaatttgaacatataaatatttaagcctctaagtgaaatcgttaaaaatctacttataatattccatttattaatctacacatatgtatattaattgcataaaactgaaaagaaaattatatacactcatactttgcaatattgctttattctactctgatatttcatgaaacaatctgttcacatgtgtcgtgtgcatcttggctgtcagcaactttgccatcactggaaaccctttctgattttttaaaacagttttccaaaactatcttctctgccacccacgtttctataacacagcaatttttaaatacagatgtaatactatcacagaaaatt

SEQ ID NO: 225435 - DNA, 358 bp, Homo sapiens
gacgtccaaagccgcatggagggtgcctggtgaaaggccaagtgggggccgagtgtggccatgccatgggacaaggttgaagagagcctaatggcatctgaggaaaaagaactctaaggaagctattcttggggaaacggaacattcacccccaaatctggccaagcactgtgcagtagacttcttaggctccttctcagccttatcgttgactcgatatttactttaccctcccttccccctgtgcagggagaaggccgagacgtttatgcctatagagcgggccataaaatcttgactcttagataatatcattttatcattctttgtagtaggaaaacaataaatattttaaaat

SEQ ID NO: 225436 - DNA, 300 bp, Homo sapiens
agcatttctagtctaagttggttaaagagcctcagggtccagcaattttaacttcttctgagcatgcaattatccctttaaacttacattgatgaaacagaaaaactttaatttgaataacattaatttgtactttctaacaaataccataactttcaattatatttcattcaagcatcacttggatttaatattctaggccgggtgcggtggctcacgccggtaatcccagcagtttgggaggccaaggcaggcggatcacctgaggtcaggagttcgagaccaacctggccaacaagg

SEQ ID NO: 225437 - DNA, 353 bp, Homo sapiens
tggctaatttctgtatttttagtatgttggccaggctggtcctgaactcctgatctcaagtgatccgcccagctgagcctcccaaagtgctaggattacaggcgtgagccacagcgcccgaccataatattatttttgtgaaaatatgtgttctgagttctaaacattcagcttacaaatccccttttgcaacatgagtgtttgtagagtatgtgtgtgttttgaatgtgtgcatgtgagtatatgaatgtgaatgtgtaagtgcacgagtttaagtgcacaagtgtgtgttagtgtgtgcatgggtaggaatgtgaatctggttgtgagtgtgtgtgagtgtgactgtgtgt

SEQ ID NO: 225438 - DNA, 440 bp, Homo sapiens
tgttcttttctggtatgtttttggtgtaatggcgtgctcatgcgtccccggcagatgtggcttagcagcgtcaggacttgaatctgagacacgcagaattgctgtccaagaggaagcatgtgttggtcctctctgctcagctagtggagctcacctgcagtaccaagccctgttctgggcctcatgcttcaagggaacatagagagtgacctgaacacagaaggatctcgaaactctcatttctggagagaggttaaaggaagtgtttggtgttcagaggtgctgactagggtgatggcagctggtgtgggaaagaaggattagatccattgcctgtggccccaaggcagagaaggaaggaccccttagggatgcccagacactccctaaagcagaccacgctattctgatgtgtctatgaagacttcaccttattcaaa

SEQ ID NO: 225439 - DNA, 270 bp, Homo sapiens
atttttacatttttttcctacattgcctccaaattctatgtttaatacatttcttccctgttttgctctggtgaaaactttaggggacaaataaatgagtgctgtttggagacaaaattttgtgacatgggactgggcattgtggcgtgtgcctgtagtcccagctacttgggaggctgagatgggaggatcacttgatgccaggaggtcgaggctgcagtcagtgagctgtctgcacttcagcctgaaagacagagggagaccatctca

SEQ ID NO: 225440 - DNA, 351 bp, Homo sapiens
ggcacacagcaggagctcaggaaacatttatgtaatgaatgaatgaatgaatgaatgagtgcacacagtaactaggagtaagggctcaataaacatttctgtattaaacgcacagtgtctggaacacagtaagcgctccgtctatggcagccgtgaatatccctgggcgaagcctgtgaaaccttgtccaagagcttggcttcactgtgcgcgggttcgaatctggactcctcttcccaagtgtgcgacctcgggcaagtgatttaatccctttgtgctttagttttctcctctgcaaaaggcggacggcggcgcgagcctctgaggacacattccccagggcactcggac

SEQ ID NO: 225441 - DNA, 434 bp, Homo sapiens
aggatagaaaggaaatctcaggataagtttgttggcctcatttgaagaaaagtaccttatagaagagccataagaatgacgtggctttcattcactcagcagatacattgggaccatctcttgtgcccaccttgagcttggttaggggtacaggagatggggtcgggcacgctgggaactaaggaggtctgaacccagcctgggggatggaggactgcctggaggtggaggccagacctgaatgagtcacacaggctaagtggggagtcaagaggtgcaggcagttaggccaccacacctggccgctcatctttttcagcattgaataatattccattgcctggatatgccacattttatcattcgcccaatgaaggatatcctggttgcctccaagttttgcaattatgaataaagcagtataaacatctgtg

SEQ ID NO: 225442 - DNA, 528 bp, Homo sapiens
tccacctccaaggaagctgtttcaagagataggaattgtcagaaaaagccggagaaggtggtgttaaaggaaaacattgagaatggggagtgaagacgagggtttttcgtagcagaagatggatcttcgaaagccaggaggcagaggagagcaacgctgtcggtgagataaaggtgaagggaagctgatattccctgaagttagtaatattaaaacagtactgaagaaagagaaagttggaaaatggtctagagggaccttttagcaacatgagagggcgagggatgaatggagctctggaccaggatattccctctgcagcaccatccctgggaacgtcagacgtctggggtagtgaaccaacaaaaatagaatatgcaattaacaatttcccaggaatcatgtttacacacgtaaaaaaaaagagaaataggtgaaagtaatttcaatgatgtattttatttaacacaatatattttagatatgttttaaataaaatatatcattaaaattgatgtgtcaatatac

SEQ ID NO: 225443 - DNA, 539 bp, Homo sapiens
aaaatctcagcccgtgatgggggcgcccagaagctgaaggactggaccacggaaccataggaggctgtggggcttccaggaaggcagtgcaggtgggagggcatgttgagagtttgtaagagaaactgcgaaagccctcctcactgacttgactcccctctccctgcctgcagaaggtgaaccagaggctctgactagggacttcaggccccgcttcaggaaggagtggtgctcttagctgaccacagggagtcatgcaaatgtccacagcctgcacaggcaccagctcccctgccccaccctgctctgaggggccgaacaccatgggtgagcgtcttccatcctccaagagcttggaggagtcctcttagaaagcagcctaaaaggaaagccctcacgatctggggttctgccaatgacagggccttcccacggccttgcaggaaacccacaggccaacaggcccaccaggcatttctttgcagcttcctggaaatatctaattatttcaaaataaaaagttaaatttttaaaaaatt

SEQ ID NO: 225444 - DNA, 300 bp, Homo sapiens
tcaaagaatctggatttctaagcagcttccaggtgatgctaatattaccggtctggagaccacatcttgagaggcactcagctaagccaatcatggtattttcattgttcccctttgcctgactggtttaggcccacgccccagacacaatcctagccaacagaaactgagagaaaatcatctgataagcttgcggacaagtttttccttaaagggaggtggaagtgtcacaaaagactcaattatatgcttcctacaggaaacgcaccttaaacatgggcaaacaaataagttaaaagt

SEQ ID NO: 225445 - DNA, 1084 bp, Homo sapiens
gaagtctcggtctttcagtttggtggggtcccacccaggcagccatctgtgagagactcccacacagttctgcagggcatctttgaaacaggtagagtcagccttgactacatgttcccacccccaccctatcccatctgtactctctgagtctgacatcaaagtggcagccctggcggctcctgcctgtaatcccagcactttgggaggccaatgagaatggatcactggaggtcaggagttccaaactagcctggccaacatagtgaaaccccatctctactaaaaatacaaaaattagctgggcaagtggtggcaggagcgctactcgggagggtacagatttagagcctgtaatcccagctacttgggagtctaaggcaagagaatcccttgaacctgggaggtggagattgcagtgagctgagatcacaccattgccctacagcctgggtgacagtgagactgcctcaagaaaaaacaaaaaagagtcagccctagtgatcttgtaagttgcctttggtgggtcagtctttccttttcttaaagaatagtacacattgacagccaggtagctctatgatcctgttctatagaattcaaaaagtcgacaaccttcctttgttcctttctgttttctctgcctacgttagtttaaattggcagtgtctctgctggaataatcccatctctcttcctggcttctgctgagatggctgattaaatccttgggtcacacccattatctctttatcaaatggttgttcaggctaggctcagtgtttcacgcctgtaatcccaacactttgggagactgaggagggcagatcacttgagctcaggagttagagaccagcctaggcaacatgtcaaaaccccatctctataaacaacaacaaaaaattagccagggtgtggtggtgcatacatgtagtcccagctacttaggaggctgaggtgggaggattgcttgagcctgaaggcaaaggttgcactgaactgagattgtgccactgcactccagcctggatgacatagccagaccctgtctcaaaaaacataaaaataaaaataaaaccaagaa

SEQ ID NO: 225446 - DNA, 330 bp, Homo sapiens
cagttttcttaaagctgtatcagtttcagtgctaacctaagctgagattattttaaatacttggagaaagctggcatttaatttagctggagctagtgttttgcagttgtcttccaatgaaagaatctacctcattgggagatgttgagcagtaataacacagctgttcaaaactagtaaaaatcctaaaatgattcgtaagggacagtgcagaggctgccttcacaagattttgtaactcatttgaaatcaaagactgcaaagtaccaaagagggagctctggttattctagcctgggccatcagagtggcattgaacaattgattaag

SEQ ID NO: 225447 - DNA, 400 bp, Homo sapiens
cagaggtttgctgcagcattgttcagagagtaaaaacaggaaaaaagagaatgctcatcaaccaagcagtggcttaataatttataatatttctcaaacaaagtaatatttttaatgaataaaaatatgaattacagttaaaccaaatgatttggagggattcccataagatactactgaaggaaaaaagagcacatatatcctattgagggaaaaaatgataaactctgtgtgtgtacatctgtatgggattatctaagtacagagagctggacagaggatgcatattaggttgttgagattggttgccatggtcggggaggagggaaggctgctgacgttgaaagagggagaagaagggaaggacagagctcagttaaaagaagtttaaaaagtcact

SEQ ID NO: 225448 - DNA, 473 bp, Homo sapiens
ctgggttcatgcaattctctgcctcagcctcccaagtagctgggattacaggcacccgccaccatgcccggctaatttttgtatttttagtagagacagggtttcaccatcttggccaggctagtcttgaacttctgacctcatgatccacccgccttggcctcccaaagtgttgggattgcaggcgtgagccactgcgcccagccaccctattacattttttaaaagtcctaggagtaaatagatttttccatctcatggtagcctgagatatttgtttctttctaatcttaaccaattctattttagaaataaaaaaaaatgaatctaatctacatcccatagggcagccctgcaagttattgattatgctagcctttctctaagttttgtttgttccatactgaagaaacccatgtccttaaagcaattcaggtcactcttctctggatatgattcaagtcattaaagtc

SEQ ID NO: 225449 - DNA, 345 bp, Homo sapiens
gacatgatggtatagataccagggaaagcactgtatttatctgacattcaagaagactgaatggccaggcgcggtggctcacgcctgtaatcccagcactttgggaggctgaggcaggcggatcacctgaggtcaggagttccagactagcctgaccaacatggagaaaccccgtctctactaaaaataaaaaattagccaggcatggtggtgcatgcctgtaatcccagctgcttgagagggtgaggcaggagaatcgcttgaacccaggaggcagaggttgtggtgagccaagatcacaccattgcactccagcctgggcaacaaaaagcgaaactccatctc

SEQ ID NO: 225450 - DNA, 390 bp, Homo sapiens
aacaacaacaacaaaaggaaagaatcagactggcttgggactctgctgtcccctgcccgtgacctcccaaaagcgtgtgttagagactgacctgcctagtgcgtcagtggagggggcactttggagaggggcttggatcgtgaggccccgccctcgtgaatggctcagtgccttgtgaaagggcttgatggagggagtttggtcccttttccccttttgtctctctgctgtgtgaggacaccatgttcctcccctctggaggatgctgtaacaagctgtcatctcgggaggagacaccaggccctgaccagacgctgaacatgccagcaccttcatcttggactttccagcccccagaactgtgagaaataaatttctgttctttataaa

SEQ ID NO: 225451 - DNA, 468 bp, Homo sapiens
gcaactgaaaataaatcgaaagccttaatgtaagagctaaaattataatactctcagaaataaacatagacataactctttgtgaccttgtattagacaacataaccaaagaaaaaatagatgagttggagttcgtcaaaatgtaaaactattgttcatcaaaggacaccatcaaaaaagtaaaaatgggccaggcatggtggctcatatctgtaattccaacattgggaggccaagacaggagggttgcttgagcccaggagtttgagagcagcctgggcaacacagggatacctcatctccataaaaaatacaaaaattagctgggggtggtggcgtgtgcctgtagtcccagctatttgggaggctgaggagggagaattgcttggacctgggagattgcgactacagtgagccatggctgtgccactgtactccagcctgggtgacagagcaaggccctgtctt

SEQ ID NO: 225452 - DNA, 644 bp, Homo sapiens
actccaggctcccagccttgactatcggttccctgagggtcttggacgctgccccagcacagggatgtcccttctgcctgggaaccaccagaggcaagctccaaggatgtagtttggcaccttcttacaattaattggttttggacgacttggtaatttagaaactgctgaggtgaacctccaatagaggaagtctggcatggttctgtgcctgactgtgccccgattatgcctcaaaatgcctcttaagcccctgatgatgggtgttagtttccttacaaaggtgaacatgcttctcagaagatgctcctgccaccttctgcatcaataagcgaagtttggaggacaaagtacaggttacttttggaacaataggatcctctctccctctggcgttttgacagattttcagaagtagaagggaaagacctaagacactatccaaacccatgggatctatcactacctatagggtgtgacatgtcacactagctgagccacctggccttagctgcatgtctgccaaacagccacttgaaagctacctgttagaaagcaatgtgcttgatactagatactgcctgttaaatgtgttacatgaattctaaaaaagataaataaataaatcttatttttggtaaata

SEQ ID NO: 225453 - DNA, 577 bp, Homo sapiens
aatctgatttcggtggtgtgtgagcagggtgcattcggtagaaactactttgagttttgaccgttccccagctggccgtatgaggtcagtactctcctgtgatgaggggcggtgactgcagccccagcgggccacgtgatcaggagggggccgaatgtcccgaggggctctgcgtgcagggggttttgccggactgtaggctggcgtgtgtctgtcaggttaaggcaggtaaggctgcgccgcttggtcgtgggttctgtgtggaagtgcagtctccacccaggatgtttccagcgccgctcggtcgtgggttctgtgtgggaagcgcagtctccacctaggatgtttccagcacatggagggtttattgggaggtgaccttgtctgaagctgaggagcgtctgtggaatttgtttccagctgtgtaaatggttgcagagctactgaaataaaacctttaaaatacactctcaaggaaaaaagcagattggatagctcgttcagtgcattttggaggaggttgaactgaatcaggagaaagcccagctctagctctgtcctccaccccacccaactt

SEQ ID NO: 225454 - DNA, 302 bp, Homo sapiens
taaattctaatttgccctatattttaacctgggtctttgttttttttcttttttcttcttttccattcgtggaaatgttgaatatagtttcatcatccttttcctcttcatgaagatgttttgctgacacctttgttgactctagtccagactaaatattttttattcttttgtctccttcctaggtagagccctgcttggaagttcaagccagcctgtgtatagttttaagttaaagattttaaaaataccctatgtgcttttcagtctaccttaattatatccaatccaaatccataaga

SEQ ID NO: 225455 - DNA, 479 bp, Homo sapiens
actggtttacacacagctatacacagccagttcctctgttggactcaagtggccatgaccctcaggaaaatcctctaggagtgctcggcacagggcagcaggaagtcacgtggggagggtccctctgcagacccttgtggcacagcaataggagagcagggcggtgttggaggcccagccctgcctgaggccacttcttcataggtcctggctgccgcaccctgcttatgccctgcaaacccctggcacctctctaaagccctgtgaatcaaccatctgacacggcctgtcactactcatcaacgctgactggcagtgacaccacctctgaggcctgatgctctgccacagctgctaggtcacctgagtagagttaggattattaaaaatcaaatgaaccaagcaggatgtttctcctgggcaaatatttatctgtccctacccaaatgaactaagattaaaaaccaaatattagaaag

SEQ ID NO: 225456 - DNA, 536 bp, Homo sapiens
agaaaaaaaaaaagcaagttttacttacaaatgtattggaagaagcattaaaattatgaatttttattaaatcttgatctttggttacatgtctttttaatattatgtgtaagtaggaagtatgcataaagcatttctgctacattgaaagggtagttgtatggctgtggcattgttgagagctgaactggcccctttttttcatgaaatgttattttttttcttgaaggaaactggttattcagactagggaatttggcagacattttctcaaaaaagggtgaagtgagcttgtcacttcaaggaacaaaactgacagtatttgtggccaatgataaaatttgagcttttcagttaaaatcagaagtttgaaaatgtgtatccaccactataaacttgacagcttctcaatacttaaagacagggccagctacatcatttgcagggctcggtgcaaaatgaaaatgtggagctccttgttcaaaaagcaggaaaaaggtgccactaaagtactaaaatataaagcttttttttcc
